United States Patent Application Publication US 2025/0074962 A1 - sequence listing, part 14

SEQ ID NO: 23829 - DNA, 4095 bp, synthetic construct
  misc_feature 1..4095: note = Description of Artificial Sequence: Synthetic coding sequence
  source 1..4095: mol_type = other DNA
atgaccgtgttccggcaggagaacgtggacgactactacgacaccggggaggaactcggatctgggcagtttgcagtggtgaagaagtgcagagagaagtccacagggttacagtatgcggcaaagttcatcaaaaaaaggcggacgaaaagctcacgccggggtgttagccgtgaggatatcgaaagggaggtgagcattttaaaagagatccagcaccccaacgtaatcacccttcacgaggtatatgagaataaaacagatgtgatcctgattctggagttggtcgctgggggtgagctgttcgattttctggcagagaaagaaagcttgacggaggaagaggccaccgagtttctgaagcaaattctcaatggagtatattatctgcacagcctccagattgcacacttcgacctaaagcccgaaaatatcatgcttctagacaggaacgtccctaaacctaggattaagatcatcgacttcggcctggcacacaaaatcgatttcgggaacgagttcaagaatatctttggcactcccgaattcgtggcaccagagattgtgaactacgagcctctgggtttggaggccgacatgtggtcaattggcgtgattacatatattctcctctctggcgcatctccattcctgggggatacaaagcaagagaccctggcgaacgtctcagcagtgaactatgagtttgaggacgagtacttttcaaatacgtctgcactggccaaagatttcatcaggagactgctcgtgaaggatcccaagaagcgtatgaccatccaggactctctgcagcacccatggattaagcccaaggacactcaacaggcgctttcccgcaaagcctccgctgtcaacatggagaagttcaagaagtttgctgctaggaagaagtggaagcaatcagttcgacttattagcctgtgtcagagactgagcagaagctttctctcacggtccaatatgtccgtcgctcgcagcgacgacacacttgacgaggaagattcttttgtgatgaaagctatcattcacgccataaacgatgacaatgttcctggcttgcagcatctcctgggtagcctgtccaactatgacgttaatcagccgaacaagcatggaacaccaccgctcctcattgcagctgggtgcggcaatatacagatattgcagctcctcataaaaaggggaagccgaatcgatgtgcaggataaaggaggcagtaatgcagtctactgggccgctaggcatggacatgtcgatactctcaagttcctctccgagaataaatgcccattggatgtcaaagataaaagcggcgaaatggccctgcacgtggcagctcgctatggtcacgcagacgtggctcagctactatgcagctttggctctaacccaaatatccaggacaaagaggaggagactcccctccactgcgcagcttggcacggctactatagcgtagccaaggctttgtgcgaggctggctgcaatgtcaacatcaaaaacagagagggcgagacacccttgctcactgcttctgccagaggctaccacgatatcgtcgaatgcttggccgaacacggggctgacctgaatgcctgtgacaaagatggccacatcgcactgcatctcgccgtccgacgctgtcagatggaagtgatcaagacgttactgagtcaagggtgctttgtggattatcaggacaggcacggcaacactcccctccacgttgcatgcaaagatggcaacatgcccatcgtcgtggcactctgtgaagcaaattgcaacctcgatattagtaataagtacgggcgcacacctctccacttggccgccaacaacggcatcctggacgtggtacgctatctgtgtcttatgggtgcatcggtcgaggcactcaccactgatgggaaaaccgcagaggatttggcccggtcagagcagcatgaacacgtggcagggcttctagcgaggctccggaaggatacccatcgcggacttttcattcagcagctgcgaccgacccaaaatctgcagcctcgaataaagctgaaattgtttggtcactcaggaagtgggaagacaacattggtggaatctctcaaatgcggcctcctgcggtcgtttttccgccgacgtcggccccgcctctctagcaccaactcctcaagattccctccgagccctcttgcctctaaaccgactgtgtcagtaagtattaacaacctgtacccaggctgtgagaacgtatccgtgaggtcgaggtccatgatgtttgagcccgggctgacgaagggaatgctggaggttttcgttgcacctacccaccatccacactgttcagccgacgaccagtcgacaaaagccatagatatccaaaatgcctatttgaatgccttcgggggaaaactcaaaaacccactgcaggtggtactggtggctactcacgccgacataatgaatgttccgaggcctgccggcggggagttcgggtacgacaaggacaccagtctgctgaaggagatccggaatagattcggcaacgaccttcatataagcaacaagctctttgtgctcgatgcgggcgccagcggctcaaaggatatgaaagtgctcaggaaccacctgcaggagatacggtctcagatagttagcgtttgtccccctatgactcatctgtgtgagaaaatcattagtactcttcccagttggcggaaactaaatggtcccaatcaactcatgtccctccaacagtttgtttacgacgtgcaggatcagctcaacccgctggccagcgaggaagacctgagaagaatagcccagcagctgcactctacaggggaaattaacatcatgcagtccgaaaccgtgcaggatgtcctgctgctggaccctaggtggctctgcacgaacgtcctgggtaagcttctctctgtcgagacccccagggcacttcaccactatagaggacgatacacagtggaggatattcagcgcctggtgccagacagcgacgtggaggaactgctgcaaatcttagacgcgatggatatttgtgcccgggatctgtcttctggtacaatggtggatgtcccagccctcattaagaccgataatctgcatcgatcatgggcagatgaagaggacgaggttatggtgtatggcggtgttcggattgtacctgtggagcacttgaccccctttccttgcggcattttccacaaggtccaagtgaatttgtgtcgttggattcaccagcagtctacggagggggacgccgatattcgcctgtgggtcaacggctgcaagcttgccaaccgaggcgctgaactattagtgttgctggtcaaccacggacagggtattgaagttcaggtgcgaggcttggaaaccgaaaagataaagtgttgtctactgctggattccgtgtgtagcaccattgagaacgtgatggccaccacactgccaggtcttctgactgttaagcactatctgagcccccagcaactgagagagcatcacgaacccgtgatgatttaccagccccgggattttttcagagcccagaccctgaaggaaacgagcctgaccaacaccatgggaggatacaaggagagcttttcttccattatgtgctttgggtgtcatgacgtctacagccaagcttcactgggcatggatattcacgcatccgacctcaaccttttgacccgcagaaagctgtctcggctgttagatcctcccgatccgctggggaaggactggtgtctattggccatgaatttaggtctcccggacctagtggctaaatacaatacttccaacggcgctcctaaagatttcctgccatccccgttgcacgctttgctccgtgagtggaccacctatccggagagcacggtgggaacactaatgagcaaactaagagaactgggccggcgagacgcagcggacttcctccttaaggcctcatctgtgtttaagatcaacttggacggaaatggacaagaagcctacgcctctagctgcaattccgggacatcatacaactctatttcctcggtggtatctcgctag

SEQ ID NO: 23830 - DNA, 2223 bp, synthetic construct
  misc_feature 1..2223: note = Description of Artificial Sequence: Synthetic coding sequence
  source 1..2223: mol_type = other DNA
atggccaccgccaacagcatcatcgtgctggacgacgacgacgaggatgaagctgccgcgcagccgggcccttcgcacccgcttccaaacgccgccagccccggagccgaggcaccttctagttcggagccacacggcgctagagggtcctcgtcctcaggcgggaagaaatgctataagctggagaacgagaagttgttcgaggagttcctggaactgtgcaaaatgcagactgcagatcaccctgaggttgtaccatttctgtataaccggcagcagcgggcccactctctgttcttggcaagcgctgagttttgcaacattctgagcagggtgctatcccgcgccaggtctcgccccgctaagctttacgtctacatcaacgaactgtgtacggtgctcaaggcccactctgcaaagaagaagctcaatctggccccagccgccaccacaagtaatgagccatctgggaacaacccccccacccatctgagcctcgaccctaccaatgctgagaacactgccagccagagccctcgcaccagaggctctcgtcgccaaatacaacgccttgagcagctcctggccctctacgtggcagaaattcgcagactgcaggagaaggagctggatctgagtgagctcgatgatcccgatagcgcttatctgcaggaggcgcggctcaaacgaaagttgattcgcctctttgggcggctatgtgagctcaaagattgctcttctctcacaggcagggttatcgaacaacggatcccatacaggggtacgcggtaccccgaagtgaacaggcgtatcgaaagactcatcaacaaacctggtccagacaccttcccagattacggtgatgtccttcgagccgtggagaaggccgcagcccggcactcgctaggtctgccacgtcagcagttacagctcatggcacaagacgcttttagagatgtaggaatcagacttcaggagaggagacacctggatttaatttataatttcggatgtcacctaacagacgattatcggcctggcgtcgacccggcgctgtctgacccggtcctggcccgacgcctcagggagaataggagcctcgctatgagtcggctggacgaagtcataagcaagtacgccatgctccaggataagagtgaagaaggtgagcgcaaaaagcggagagccagactccagggcacctcctcccactctgctgatacacctgaagcgtccctggactccggtgaggggcccagcggcatggcttctcaaggctgtccttctgcatcacgcgcggagacggatgacgaggacgatgaggaatccgatgaagaggaggaggaggaggaagaagaggaggaggaagaggcaaccgactccgaggaggaggaagacctggagcagatgcaggaaggacaagaagacgacgaggaggaggacgaagaggaggaagccgcggctgggaaggatggggacaaatctcctatgagttctctgcaaatcagcaatgaaaaaaatctggaaccaggaaagcaaatcagtcggagctcgggggaacaacagaataaaggccgcatagtctctccttcgctgctgagtgaggaacctcttgctccttcgagtatcgacgctgagagtaatggggagcagcctgaagagctgacgctggaggaggagtctccagtgtcacagctgttcgagctggagatcgaagctctcccattagatactccgagctctgtcgaaaccgatatcagttcttcgagaaaacagtctgaagagccgttcaccaccgttttagaaaacggcgccggcatggtgtcttctacatcgttcaacggaggcgtaagcccccacaactggggagatagcgggcccccatgtaaaaaatcccgtaaagagaaaaaacaaaccggcagcggacctttgggcaattcctacgtcgagagacagaggtccgttcacgagaagaatggcaaaaagatctgcaccctccccagcccaccgagtcctctggcctcactggcaccagtggcagactcaagcactagagtcgatagcccttcacacgggttagtgacctcaagcctgtgtattccctccccagcccgcctgagtcaaacccctcactcacagccccctagacccggcacatgtaaaactagcgtagccactcagtgcgaccccgaggagatcatcgtgctgtccgatagcgattag

SEQ ID NO: 23831 - DNA, 2223 bp, synthetic construct
  misc_feature 1..2223: note = Description of Artificial Sequence: Synthetic coding sequence
  source 1..2223: mol_type = other DNA
atggccaccgccaacagcatcatcgtgctggacgacgacgacgaggacgaagccgctgctcaacccggcccttctcaccccctacctaatgctgcttctcctggtgctgaggcaccttcatcctcagaaccacacggggccaggggatcatctagctctggcgggaagaagtgctacaaattagaaaatgagaagctgtttgaggagtttctggagctttgtaagatgcagactgcggaccacccagaggttgtgcccttcttgtacaataggcaacagcgggcgcactccttatttctggcctccgccgaattctgcaatatcctatcccgcgtgctatccagagccagaagcaggccagcaaagttgtatgtgtatattaacgaactctgcacggtattgaaggctcacagcgctaagaagaagcttaatctggccccagccgctactacctctaatgagccaagtggtaacaatccccccacccatttaagcctggatcctacaaacgccgagaatactgcctcacagtcccctcggacacggggctccaggcgccagattcagcgactggaacagcttctggcactctatgtggccgagattcggcggcttcaggaaaaggaactggatttgtctgaactggacgacccagactccgcataccttcaggaagctcgattgaagaggaaactgatcagactgtttggccggctgtgcgagctaaaggattgtagtagtctgactggacgcgtgattgagcaaaggatcccataccgagggacgagatatcctgaggttaaccgcagaatagagcggctgatcaataaacccggaccggacacgttcccagactatggcgacgtgctccgcgctgtcgagaaggccgctgcaagacactccctaggcctgccgagacagcagctgcagctaatggcccaggacgcattccgagatgtagggattagattgcaagaacgaagacacctggatttgatctataactttgggtgtcacttgactgatgattaccgaccgggcgttgaccctgctctctccgacccagtcctagcgcggaggttgcgagagaatagatccctggctatgagtcgtttagacgaggtcatatccaaatatgctatgctgcaggacaagtctgaggaaggggaacggaagaaacggagggccaggctgcagggcacttcttctcactcggcagacacccccgaggcgagtctggactcgggagaaggtccctctgggatggcttctcaggggtgtcctagcgccagccgggcagaaacggacgatgaggatgacgaagagtcggacgaagaagaggaagaggaagaggaggaagaagaggaggaagcaactgactctgaggaagaagaggacttggagcaaatgcaggaaggtcaagaagacgatgaggaagaggatgaggaggaggaggccgctgcaggcaaggacggcgataaatcgccgatgtcttcgcttcagatctcgaatgaaaaaaatctagaaccagggaagcagatttcaaggtcatccggtgagcagcagaataaaggacggatcgtcagcccctctctactcagtgaggagcccctcgccccgagcagcatcgatgccgaaagtaacggtgaacagcctgaagagctaacactcgaagaagaatctcctgtaagtcagctgttcgaacttgaaatcgaagccctgccgctagacactcctagcagcgtcgaaacagatatcagctcatctagaaaacaaagcgaagagccgttcactactgtgctggagaacggagccgggatggtgtctagcacctcattcaacggtggtgtttctccccacaattggggcgatagtggcccaccatgtaaaaagagccggaaagagaaaaaacagaccgggagcggcccccttgggaactcatacgtagagcgccagcggtccgttcacgaaaagaacggaaaaaagatatgtacgctgccttcgcctccgtcccctcttgcctccctagcccccgtggccgattcatctacacgggtggactccccttcccacggcttagtgacgagcagtctgtgcattcccagcccggcgcgcctttctcagaccccacactcccaaccgccacgacctggaacatgcaagaccagcgtcgctactcagtgtgaccctgaagagattatagtgctgtctgattcggattag

SEQ ID NO: 23832 - DNA, 1998 bp, synthetic construct
  misc_feature 1..1998: note = Description of Artificial Sequence: Synthetic coding sequence
  source 1..1998: mol_type = other DNA
atgcagaccgccgaccaccccgaggtggtgcccttcctgtacaaccgtcagcaaagagcacatagtctgttcctggcaagtgccgaattttgcaacattctgtcccgagtgctaagcagggctaggtctcggcccgccaagctctacgtctatatcaacgaactctgtacggtgctcaaggcccatagcgccaagaaaaaacttaatctggcccctgcggctaccacaagtaacgagccctctggcaataaccctccaacacatctatcactggacccaactaacgcagaaaacactgcctcgcagtccccaagaacacgagggtctcggcgacaaatacagagactggagcagttattggctttgtatgtggccgaaatccgacgactacaggagaaggagttagacctttccgagttagacgaccccgattctgcctatctgcaggaagcacgattgaaaagaaaactgatcaggctgtttgggaggctatgcgagcttaaggattgttcctcgttaactgggagagtcatcgaacagagaattccctataggggcacaaggtaccccgaggtgaatcgcagaatcgagcggctgattaataagcccggccctgatacatttcccgattatggcgatgttttgcgcgcagtggagaaggccgcagctagacactcccttggcttgccacgtcaacagttgcaactgatggcccaagatgcctttcgcgacgtgggcatccgccttcaagaacgtcgacatctcgatcttatctacaacttcggatgccaccttacagatgactatcgtcctggcgtggatcctgcactttctgaccccgttctggcgcgtaggctacgggaaaataggtccctggccatgtctcgactcgacgaggttatttccaagtacgccatgctgcaggataaatcagaagaaggggagcgcaaaaaacgacgggctcgcctgcaagggacaagttctcattccgcagatacgcctgaagcttccttggactccggggagggaccatccggcatggcctctcaaggctgtccaagcgccagtcgagctgaaaccgatgacgaagacgacgaagaaagtgatgaggaggaggaggaagaggaagaggaggaggaagaggaagccaccgactctgaagaagaagaagatttagaacagatgcaagagggccaagaggatgatgaggaggaggacgaggaggaggaggccgctgccggcaaagacggggataaatcacctatgtcctcactgcaaatcagcaatgaaaaaaacttggaaccaggaaagcaaatatctaggtctagtggggagcagcagaataagggacggatagttagcccaagtcttttgtccgaggagccactggccccgtccagtattgacgccgagagcaatggggaacagcccgaggagctcacccttgaagaggagtccccggtgtcgcaactgttcgaacttgagatagaggccttgcccctggatactcccagcagtgtcgagaccgacatatcctccagtaggaaacaatccgaggagccctttacaaccgtgctcgagaatggggcgggcatggtttcttctacctctttcaacggcggggtgagtccacacaactggggtgacagcgggccaccttgtaaaaaaagccggaaggagaagaagcaaactggaagcggccctttaggcaactcatatgtggagcgtcagagatccgtccatgaaaaaaacggcaagaaaatctgcaccctcccctccccacccagccctctcgcctctctggcacccgtcgctgatagcagcacccgggtggatagcccatcacacggtctggtcacatcatctttatgcattccctcgcctgccaggctatcacagactcctcactcccagccgccccgcccgggcacctgcaagacatccgtcgcaacacaatgcgacccagaggagattatcgtactgagcgactctgactag

SEQ ID NO: 23833 - DNA, 537 bp, synthetic construct
  misc_feature 1..537: note = Description of Artificial Sequence: Synthetic coding sequence
  source 1..537: mol_type = other DNA
atggccaccgccaacagcatcatcgtgctggacgacgacgacgaggatgaagctgcagcccagcctgggccaagccatcctctgcctaacgcagcctcacctggtgccgaggccccgtccagcagcgagcctcacggggctcgcggatcaagtagctctgggggcaaaaaatgttataaactggagaacgaaaaactcttcgaggagttcctggagttgtgtaaaatgcaaaccgcagatcacccagaggtggtcccattcctgtacaaccggcagcagcgggctcattctctattcctggcctctgcagagttttgtaacatcctcagtagggttctgagccgcgcccggtcccggcccgctaaattgtacgtgtacatcaatgaattatgcacagtgctgaaagcccactccgccaagaagaaactcaatctcgccccagcggctaccacttccaatgagccctcaggaaacaatccaccgactcatctgtccctggacccaacgaatgcagaaaacacagcgagccaatcgtag

SEQ ID NO: 23834 - DNA, 147 bp, synthetic construct
  misc_feature 1..147: note = Description of Artificial Sequence: Synthetic coding sequence
  source 1..147: mol_type = other DNA
atggccaccgccaacagcatcatcgtgctggacgacgacgacgaggacgaagcagctgcccagcctggacccagccaccccctccccaacgccgctagccccggcgccgaagctccctcttcttctgagccccacggagcaagatag

SEQ ID NO: 23835 - DNA, 393 bp, synthetic construct
  misc_feature 1..393: note = Description of Artificial Sequence: Synthetic coding sequence
  source 1..393: mol_type = other DNA
atggccaccgccaacagcatcatcgtgctggacgacgacgacgaggacgaggctgccgctcaaccaggcccctctcacccgcttcccaacgcagcctcgcccggagccgaagccccgtcgagttctgaaccccacggggcccggggatcttcctcaagtggaggaaaaaaatgctacaaacttgaaaacgagaagctgtttgaagaattccttgagctatgcaaaatgcagacagccgaccaccccgaggtggtgcctttcctgtacaaccgccagcaacgtgcccactctctatttctggcctccgccgaattttgcaatattctgagtagagtcctgtctcgcgcacgcagccgtccagccaagttgtatgtgtatatcaatgaactttag

SEQ ID NO: 23836 - DNA, 2316 bp, synthetic construct
  misc_feature 1..2316: note = Description of Artificial Sequence: Synthetic coding sequence
  source 1..2316: mol_type = other DNA
ggcgtgcccgtgatcaagtggaagaaggacggcatccacctggccctgggcatggatgagcgcaagcaacagctctctaacggcagcctgctcatacaaaatatattacactcgcgccaccataaacccgacgagggtctctatcagtgtgaagcttccttgggagactctggatctatcatcagccgaaccgccaaggtggcggtggccggccccttgaggtttctatcacagacagagagcgtgactgccttcatgggagacaccgtactcttgaagtgtgaggttatcggcgagcctatgccgactattcactggcagaagaaccagcaagacttgacacctattcctggagatagtcgcgttgtggtccttccttccggcgcccttcagatttctcgcttgcaacctggagacattggcatttatcggtgcagcgcccgcaatcctgcttcttcaagaacggggaatgaggccgaggtgcggatattgtctgatccaggtctgcataggcagctgtactttctgcaacgcccatctaatgttgtggctatagaggggaaggacgcagtgttggaatgctgcgttagcgggtatccccctcccagcttcacgtggctgcgcggtgaagaggtaattcagctcagaagcaagaaatacagcctcctgggaggctcaaacctgctcatttccaacgtgacagatgacgattccggcatgtacacatgtgtggttacctacaaaaacgagaatatatccgcttctgccgagctgaccgttttggtgccaccttggtttctcaatcaccccagcaacttatatgcctacgaatctatggatatcgaattcgagtgcactgtgagtggcaagcccgtgcccacagtaaattggatgaagaatggcgacgtcgtaatccctagtgactattttcagatcgtcggtggctccaatctacgcattctgggagttgtgaaatccgacgagggattctaccagtgtgtcgcggaaaatgaggccggcaacgcacagaccagtgctcagctcattgtgccaaagcctgcgatcccctcctcttccgtcttgccgagcgccccccgtgacgtcgtgcccgtgctggtctcgtcccggtttgtcaggctcagttggcggccgccggcggaagccaaaggcaatatccaaaccttcactgtatttttttctagggaaggtgacaacagagagcgcgcgctcaatacgacacagccgggcagcctgcagctgaccgtgggcaacttaaagccggaggcgatgtacaccttccgcgtggtcgcttacaacgaatgggggcccggagagtcatctcagcctattaaggtggccacccagcctgaactgcaagtgcctggacccgtagagaatctgcaggccgtgtctaccagcccgacttcaattttgatcacttgggaaccccccgcctacgccaacggccccgtacagggctaccgactgttctgcactgaggtctcaactggcaaagagcagaacatcgaagtggatggactgagttacaaactggagggcctgaaaaagtttacggagtacagcctgcggtttctggcatacaatagatacgggcccggcgttagtaccgatgacatcaccgtggttacactcagcgatgtccccagcgctccacctcagaatgtctcgcttgaggtggtcaactcccggagcataaaagtgtcttggctgcctcctcccagtgggacgcagaatgggtttattacagggtataagatccgccacaggaagacaacacgccgcggtgaaatggaaacattggaacctaacaacctgtggtacttgttcaccggactcgagaagggatcacagtacagtttccaggttagcgccatgactgtcaacggaacagggccgccctctaactggtacacagcggagacgcccgagaatgacttagatgaaagccaggtgccagatcagccatctagtctgcacgtgcgccctcagacgaattgtattattatgagctggaccccccccttgaacccaaacattgtggtgaggggctacattatcgggtacggggtcggctctccatacgctgaaaccgtgcgtgtggatagtaagcagcggtattacagtatcgagcgcctcgagtcttcgtcccattacgtaattagcttgaaagcttttaacaacgctggtgagggcgtcccactatacgagagcgcaactaccagaagcattacggtcaggcgtcataacatctctaagctgcacagcaaccggccccaaactaagcacaacgtctag

SEQ ID NO: 23837 - DNA, 2694 bp, synthetic construct
  misc_feature 1..2694: note = Description of Artificial Sequence: Synthetic coding sequence
  source 1..2694: mol_type = other DNA
atgggcgacaccgtgctgctgaagtgcgaggtgatcggcgagcccatgccaaccattcattggcagaagaatcagcaggacctgactccaatccccggcgacagcagagtggtcgtgttgccatccggggctctgcagattagtcggctgcagcctggtgatattggcatttatagatgtagtgcacggaatccggcctcttcacgtacgggaaatgaagcggaggtgagaatcctgtctgatccagggctccacagacagctttattttttgcagaggccaagcaatgtcgtggccatagagggcaaagacgccgtactagagtgttgtgtgtccggataccccccaccctcatttacttggctgcgaggtgaggaggtaatccaactgagatccaaaaagtattccttgctcggaggttccaatctgctcatttccaacgtgaccgacgatgattcagggatgtatacttgtgttgtaacatacaagaatgagaacatctcagcttcagctgaattgactgtacttgtcccaccctggtttctaaaccaccccagtaatctgtatgcttatgagtcaatggacattgagttcgagtgcacagtttccggaaaaccagtgcccacagtgaactggatgaagaatggtgatgtcgtgattccttctgactacttccagatcgtggggggatccaatctcaggatccttggtgtagttaagtccgatgagggattctaccagtgcgtcgcggagaacgaagccggcaatgctcagacatctgctcagctcatcgttccgaagcccgcaattccttccagctccgtgctgccaagcgcaccgagagatgttgtccccgtcttagtcagctcccgcttcgttaggctgagctggcgtccccccgccgaagccaagggaaacatccagacctttactgtgttttttagcagggaaggagacaatagagagcgggctcttaatacgacacagccaggcagcttgcagctgactgtcgggaacctgaaaccagaggccatgtacaccttccgggtggtagcctataacgaatggggccccggcgagtcgagccagcccataaaggtggctactcagccagagctgcaggtgccagggcctgtagagaaccttcaggcagtgtccaccagcccaactagcattctgatcacctgggagccaccagcttacgccaatggaccagtacagggatatcgcctgttttgcactgaggtatctactggcaaagaacaaaacatcgaggtcgacggcctgagctacaaactcgaaggcttgaagaaattcactgagtattcacttagatttctggcctacaatcggtacggccccggcgtctctacagatgatattacggttgtgaccctatccgatgtgccctcagcccctccgcaaaacgtgtcactcgaggttgtgaatagccggtcaatcaaggtctcttggctgcctcctccttctggtacccaaaacggcttcatcactggatacaagattcggcatcggaaaacaacacgacgaggggagatggaaacactggagcctaataatctatggtatctcttcactgggttagagaaggggagtcagtactctttccaggtgtcagcaatgacggtcaacgggacaggccctccaagcaattggtacaccgctgagacccctgagaacgacctcgatgagtctcaggtacccgatcagcccagctccctccacgtgcggccacagaccaattgtattattatgtcctggacacctcctctgaaccccaacatagtcgtccgggggtacattataggatacggggtggggtctccgtatgccgaaacagtccgagtggacagtaaacagcggtactacagcattgagagattggagtcaagctcccattacgtgatctctcttaaagcctttaataatgcaggtgagggagtcccgctttacgagtcagcaaccacaagatcaatcacggacttaagcacaccaatgctacctccagtcggggtccaggctgtggccctgacacacgacgcagtaagagtgagctgggctgacaacagcgtgcctaagaaccagaagacctcagaggtgcgattgtacacagtccggtggaggaccagtttctctgcatctgcgaagtacaaatccgaggacactaccagtttgtcatatactgccaccgggctgaagccaaatacaatgtatgagtttagtgtgatggtgactaagaatcggaggtcgtcaacatggtcgatgacagctcatgccaccacatatgaagctgcgccaaccagtgctccaaaggacctgacggtgatcacaagagaagggaagccccgggccgttatcgttagttggcagcccccccttgaagcgaacggcaaaatcactgcctatatcctgttttacaccctggataaaaatatccccatcgatgattggatcatggagacgatcagcggagatcggctcacccaccaaataatggacctcaatcttgataccatgtattattttcgcattcaagcccgcaattcaaaaggggtcggcccattgagcgacccaatcctgtttcgcacacttaaagtcgagcatcctgataaaatggctaatgatcaggataccggtgttactatcaacctggtaaatgaggtgctgttagggtag

SEQ ID NO: 23838 - DNA, 4344 bp, synthetic construct
  misc_feature 1..4344: note = Description of Artificial Sequence: Synthetic coding sequence
  source 1..4344: mol_type = other DNA
atggagaacagcctgcggtgcgtgtgggtgcccaagctggccttcgtgctgtttggagcgtcactgttcagcgcccacttgcaagtgaccggcttccagatcaaggcttttaccgccctgcgattcctctcagaaccatccgacgcggttacaatgcggggtggcaacgtcctccttgactgttctgcagagtctgaccgaggagtgccggtgattaaatggaagaaggatggtattcatctggccttgggaatggatgaacgcaaacagcagctgtccaacggatcattgctcatccagaacattcttcattctcggcaccacaagcccgatgagggcttgtaccaatgtgaggccagtctgggggatagcggcagcatcatctccaggacggccaaagtggccgttgctggaccattacgattcctcagccagactgagagtgtcactgctttcatgggggataccgtgttgctcaagtgcgaggtgattggggagccaatgcccaccatccactggcagaaaaatcagcaagatctaacgccaattcccggggactcccgggttgtcgtgcttccaagtggggccctgcagataagcagactgcagccaggcgatattgggatttatcggtgctctgcccggaacccggcaagctccaggaccgggaacgaagccgaagtgcgcatcctgtctgatcccggattgcatagacaactttattttttacaacggcccagcaacgtcgtcgcgattgaaggaaaggatgccgtgttagagtgctgtgtgtccggatacccccccccctcattcacgtggctccgtggggaagaggtcattcaactgcgctctaaaaagtactctttactggggggaagtaacttattgatcagcaacgtgacagacgacgacagcggaatgtacacctgtgtcgtaacttataaaaacgaaaacatctcggcatctgcggagctgacggtgctggtgccgccttggttcttaaatcacccttcaaacttgtatgcatatgaatccatggacatcgagttcgagtgtaccgtttccgggaagccggtccctactgtgaactggatgaaaaatggagatgtagtgatcccgagcgactactttcagatcgtgggcgggtctaacctgcggatcttgggtgttgtcaagtcagacgagggtttttatcagtgcgtggcggaaaacgaggccggcaacgcacagacctctgctcagctgattgtccccaagcctgccattccatcgagcagtgtgctgccatccgcgccccgcgatgtagtgccggtcttggtctccagcagattcgtgagactcagctggcgaccgcccgccgaggctaagggcaatatacagacattcacagtcttcttcagtagggagggagacaaccgagaacgggcactgaacacaacacagccgggtagcttacagcttactgtggggaacttgaaacccgaagctatgtacacctttcgggtcgtcgcctacaacgagtgggggcccggcgagtcttcacagcccatcaaagtggcaactcagccagagctgcaagtccccggtccagtggaaaacctgcaggccgtgtccacatcacctacttctatcctgatcacttgggaacctcccgcttatgccaatggaccagtccagggctaccgtcttttttgcactgaggtcagcacaggcaaggaacagaatatagaggtcgacggcctgagctacaagctggaaggcttgaagaaatttacggagtactctctccggttcctcgcttacaatcgctacggccctggcgtctctaccgacgacatcaccgttgtgacactgtccgacgtaccgtcagctccacctcaaaacgtgtccctcgaagtggtgaactccagatctatcaaggtcagttggctccccccgccctcgggaactcaaaacggctttatcacaggttacaagattcgtcataggaagacgacacgtaggggcgaaatggagactctcgagccaaacaatctctggtatctcttcacgggcctcgaaaagggatcacagtattcgttccaagtgagtgcgatgactgttaacgggactggcccgcctagcaactggtacaccgcagaaacaccagagaatgacctcgacgaatcacaggtgccagatcagccctcatcattgcatgtacggcctcagaccaattgtattatcatgtcttggactccccccctgaatccgaacatcgtcgtcagaggttacattatcgggtatggggttggctcaccctacgcggaaacagtgagagttgactctaaacagcgctattactctatcgaacgactggagagcagcagtcactatgtgattagcctgaaagcatttaacaatgctggcgaaggagtgccactgtacgaatccgcaacgacccgttctataacggacccaaccgaccccgtggactattacccactcctagacgattttcctacaagtgtgcccgacctgagtacccccatgctaccccctgtgggcgtgcaagcagtggcacttacacatgacgctgttagggtcagctgggccgacaactctgtccccaaaaatcaaaagacctctgaggtgagactgtacacagtgcgttggagaactagcttctctgctagcgctaagtacaagtccgaggacaccaccagtctaagttatacggccactggactcaaaccgaacaccatgtacgagttctccgtgatggtgaccaagaataggcggtcttcgacctggtctatgactgcacacgccacaacatatgaggcagcccctacaagcgcccccaaggatctgacggtgataactagggagggaaagcctcgtgcagtgattgttagctggcagccccccttagaagcaaatggtaagatcactgcatacattcttttttacaccctggacaagaacatcccgatagatgattggatcatggagactatctccggagatcggttgacacatcagatcatggatctgaatcttgatacaatgtattacttcagaattcaggctaggaattctaagggtgtgggaccattatctgaccccatcttattccgcactctgaaagttgagcatcccgataagatggccaacgatcagggtagacacggagatggagggtattggcccgtggacacaaatctgatcgaccgatcaacactgaacgaacccccaattggacaaatgcaccccccccacgggtccgtgaccccgcagaaaaactcgaacctgctggtcataatagtagtcaccgtgggcgttattactgtcttggttgtggtgatcgtggcagtgatttgcacaaggaggagctccgcccagcagcgcaaaaagcgcgccactcacagtgccgggaagcggaagggaagccagaaggacctcagacctccagatctctggatccaccacgaggagatggagatgaagaacattgaaaaaccatccggaaccgatccagccgggcgcgattctccaattcagagttgtcaggacctgactcccgtttcacactctcagtctgagacccagttgggaagtaagtccacatcccacagtggtcaagacactgaggaggcaggttcgagtatgagcactctggagcgtagcctggcggctcgccgagcccctcgggccaagttgatgatccccatggatgctcaaagtaacaatcccgcagtggtttctgccattccggtgccaacactagagagtgcacaatacccaggcattctgccttccccaacctgtggctatccccacccacagttcacactgagacccgtcccgtttcccactctgtcagttgaccggggctttggagctgggcggtcccagtcagtttccgagggcccaaccactcagcagcccccaatgttaccccctagccagcctgagcacagctcctccgaggaagctccatcacggactatccctacagcgtgtgtaagacccacccacccattgagatccttcgccaaccctctgcttcctcccccgatgtccgctatcgagcccaaggtaccttataccccccttttatcccaacctggaccgaccctaccaaaaacccacgtaaagacagctagtctcggactcgccggaaaagcccgaagccctttgttgcccgtcagtgtccctactgcccccgaggtctctgaagagagccataaacccacagaggactctgccaatgtgtatgagcaggatgacctgtcggagcaaatggcttccctggaaggcctgatgaagcagctgaacgctatcactggttctgccttctag

SEQ ID NO: 23839 - DNA, 213 bp, synthetic construct
  misc_feature 1..213: note = Description of Artificial Sequence: Synthetic coding sequence
  source 1..213: mol_type = other DNA
atgaccatgaacgtgctggaggccggcaagtggaagagcatcgtgcctgcgccaggagagggcctgctggccgtcctgcacatgatggtgtttacagatgctttgcaccgggaacgtagcgtcaagtggcaggctggtgtgtgctacaacgggggcaaagacttcgccgtctcactggcacgacccaaagcggcggagggaatagccgattag

SEQ ID NO: 23840 - DNA, 1392 bp, synthetic construct
  misc_feature 1..1392: note = Description of Artificial Sequence: Synthetic coding sequence
  source 1..1392: mol_type = other DNA
atgagcgtggccatccggaagcggagctgggaggagcacgtgacccactggatgggccagccattcaacagcgatgataggaacacggcttgccaccatgggcttgtggcagactccctgcaggcgagtatggagaaagacgctaccctcaatgtggaccgcaaagagaagtgtgtctctctgccagactgctgccacggatcagaactcagggactttccaggtcgtcccatgggacacctgtcaaaggatgtggacgaaaacgattcgcacgagggggaggaccagtttctgagtttggaagcttctacagaaacacttgtgcacgtgagcgacgaggataacaacgccgatctctgcttgaccgacgataagcaggtgctgaatacccagggacaaaagacatcggggcaacatatgattcaaggggccggttctctggaaaaggccctgcctatcatccagagcaatcaggtcagctctaattcctggggcatcgccggggagacagaactagctcttgtcaaggaatccggcgagaggaaagttaccgactccatttccaaatctctagaactgtgtaatgagatatccctgagcgaaatcaaggatgcccctaaagtgaatgcagtggacaccctcaacgtgaaagacatagcacctgaaaagcagttactgaacagcgctgtcattgcgcagcagcgcaggaaaccggacccaccaaaagatgagaacgagaggagcacttgcaacgtagtccagaacgagtttctcgacacaccttgtaccaataggggcctccccctccttaagacggatttcggctcctgtcttcttcagccaccatcgtgtcccaacggaatgagcgcagagaacggcctagagaaatccggtttttcacagcaccagaacaaatctcctcccaaggtcaaggccgaggacggtatgcagtgtctgcagttaaaagaaacactggccactcaggagcctaccgataatcaggtgagactccgtaagaggaaggagatccgggaagatagagaccgggcaagactggatagtatggtgctgctcattatgaagctggatcagttggaccaggacatcgagaacgcgctcagtaccagtagctccccttcagggactccaaccaacctgcgtcgtcatgtaccagacctggagagtgggagcgagagcggggccgatactatcagcgtgaaccaaacaagggtgaatctgtcttcagatactgaatccacagacctgcctagttccacgcccgtcgctaactccggcaccaaacccaaaactacagcaatacagggaatatccgaaaaggagaaagccgggaaacttaccttctggttctgtttcctggccaacttattctag

SEQ ID NO: 23841 - DNA, 5268 bp, synthetic construct
  misc_feature 1..5268: note = Description of Artificial Sequence: Synthetic coding sequence
  source 1..5268: mol_type = other DNA
atggagacccggagcagcaagacccggcggagcctggccagccggacaaacgaatgtcaaggaaccatgtgggcgcccaccagccctcctgcagggagcagcagtccttcgcagcccacttggaagtcgagcctgtatagcagtctcgcttacagcgaggcttttcactatagttttgccgcacgccctcgccggctgactcaactggctctggctcaaaggcctgagccacaacttttgcgtctgcgccccagctctttacgtacacaagacatcagccacttacttacaggcgtctttcgaaatctgtacagcgcagaagtaatcggagacgaggtgtcagcctccctgatcaaggcacgaggttccgaaaacgagaggcacgaggaatttgtggatcaattacagcaaatcagggagctgtacaagcagcgcctcgacgagtttgagatgctggaacgacacattacacaggctcaggccagagctattgcagagaacgagcgcgtcatgagccaggccggagttcaggatctcgaatccttagttaggctgcccccagtgaaaagcgtgagtcgctggtgtatcgattcagaactgttacgcaagcatcacttaatcagccccgaagattactacaccgacaccgtgccgttccattccgctcccaagggcatttccctgccaggatgttcaaaactgacttttagttgtgaaaaacgctccgtgcagaagaaggagcttaacaagaaattagaggattcctgtcggaagaagttggccgagtttgaagatgagctcgaccacacagtggactcgttgacatggaatctgactccgaaagctaaagaacgaacccgggagcccctgaagaaggcttcgcagcctaggaacaagaattggatgaatcatctacgggtgccccagagggagctggataggttacttctagccagaatggagtcccgaaatcattttctgaaaaatccgcgttttttccctcccaatacccgttacggcggcaaatcactcgtgttccctccaaaaaagcccgcccccataggggaattccaatccactgagcctgagcagtcctgcgccgataccccggtctttctggccaaacctccaatcggcttctttaccgactatgagattggaccagtgtacgaaatggtgattgcgcttcagaacaccaccacaacttctcggtaccttcgcgtactaccaccttcaactccatattttgctctgggtctcggtatgtttccaggcaagggcgggatggtagcacctggcatgacctgccagtatatagtgcagttttttccagattgcttaggcgacttcgatgactttattctggtcgagacccagtcagcgcatacacttctaatccctctgcaagctcgacggccaccccccgtgctcacactgtcaccggtgttggactgtggatactgcttgatcgggggggtcaagatgacccgatttatctgtaaaaatgtcggcttcagtgttggcagattttgcatcatgccaaaaacctcctggccaccactgtcgttcaaggccatcgccaccgtcggcttcgtcgagcagccaccttttgggattctgccttctgtgttcgaactggcccctgggcatgctatcctggtggaagtactgttttcccctaagtccctgggaaaagccgaacaaaccttcatcataatgtgcgataattgccagatcaaagagctcgtgacgattggcataggccagctgatagctctggacctcatttatatcagcggagaaaagagtcagccagacccgggcgagttgaccgacctaactgcacaacactttatccggttcgaacctgaaaacctgcgcagcaccgcccgtaaacaactgattataagaaacgccacgcacgtggagctcgcattttattggcagatcatgaagcctaacttacaacctctgatgccaggggaaacattctccatggattcaatcaaatgttatccagataaagagacggcattctcgataatgcccaggaagggagtgctctcgccccatacagaccatgaattcatattgtccttctcgccccacgaattacgcgatttccattctgtccttcaaatggtgctggaggaagttccagagcccgtgagtagtgaagctgaatccctcgggcactcctcatacagcgtggatgatgtgatagtgctcgagattgaggtgaaaggctcggtggagccctttcaggtcctgctcgaaccatacgctctgatcatccccggtgagaactatatcgggataaacgtcaagaaggctttcaaaatgtggaacaatagtaagtcacccatcaggtatctgtggggtaaaattagcgactgccatattatcgaagtggagcctggaaccggagtgattgagccgagcgaggtgggagactttgagctgaactttacaggcggcgtgccaggtcctaccagccaggacctgctatgcgaaatcgaggactccccctctcctgtcgtgctgcacatcgaagcggtgtttaaaggccccgcactgatcatcaatgtctcagctctccagtttggccttcttaggctgggtcagaaagctaccaactccatacagatacggaacgtgagccagctgcccgcgacttggcggatgaaggaaagtccagtgagccttcaggagcgaccagaagacgtgtctcctttcgatattgagccaagcagtggccagttgcattccctcggagagtgtagggtcgacatcactctggaagcactccactgtcaacacctcgaaaccgtacttgagttagaggtcgaaaacggagcttggtcatacttgccagtgtacgctgaggttcagaagccccacgtgtatctgcagtcatcacaggtcgaggtcagaaacctttacctgggggtgccaacaaaaactaccatcactttgatcaatgggacgctgctgcctacccaattccactggggcaaactgctcgggcaccaggccgagttctgtatggttacagtatctccaaaacacgggctgctcggcccctccgaggagtgtcagctcaaattggaactgaccgctcacacccaggaagagctgacccacctggccttaccctgccacgtgtcgggtatgaagaaaccactggtcctgggaatcagcggcaagccccagggcttgcaggtggccattacgataagcaaagaatcctcagattgctctacagaacagtggccagggcatcctaaggaactgcgcctggactttgggagcgccgtacctcttcggacgagggttacacgccagcttatcctcactaatcgatccccaatacgtacgcggttcagtctgaaatttgaatattttggttctccacaaaactccttgtcaaagaagaccagtctcccaaacatgcccccagccctgctcaagacagtccggatgcaagagcaccttgctaaacgggagcaactggattttatggagtctatgcttagccacggaaagggcgccgccttttttccccatttcagccaggggatgttgggtccttatcagcagctgtgcatagacatcactggctgcgctaatatgtggggtgagtactgggacaaccttatatgcacagtcggggaccttctgccagaagtgatcccagtccacatggcagctgttggctgcccaatttcatccctgagaactacaagctacacaattgatcaggcccagaaagagcccgctatgcgcttcggcacacaggtctctggaggcgataccgtaacccgaacgctgagactgaataacagctcgccttgcgacattaggctggactgggagacctatgttcctgaggataaggaggatcggctggtcgaacttctagttttttacggccccccattcccattgagagaccaagctggcaacgagttggtgtgtccagacacacctgaggggggatgcctcttatggtctcctgggccaagttcaagtagtgaattctcacacgaaacagacagctcagtggaaggctcttcttcagcttccaacagggttgctcaaaagctgatatcagtgatcctccaggcacatgagggcgtaccctccggacacttatactgcatctcaccaaaacaggtggtggtgcctgctggaggctcctccaccatctatattagctttactcctatggtgttgagcccagagattctccataaagttgagtgcacaggttatgccctgggattcatgtcattagacagtaaagtcgaaagggaaatcccaggcaagcgtcaccggctgcaggatttcgctgttggcccactcaaactcgacttgcactcctatgtgagacctgcccagctgtctgtggagcttgattacggaggaagcatggaatttcagtgccaggcgagtgacctgattcccgaacaaccctgtagtggtgtccttagtgagctcgtgactacccaccaccttaaactcactaatacgactgagataccacattacttccggctaatggtgtcaaggcctttttctgtgagtcaggatggggcgagccaggatcaccgggcgcctggccccggccagaagcaggaatgcgaggaggaaacggcatccgcagacaaacagctggtgctgcaagcccaggagaatatgttagtcaatgtgtctttctcattgagcctggagttgttgtcttaccagaagctgccagcagatcaaactctgcccggcgtcgacatacagcaaagcgcctctggggagcgggagatggtgtttactcagaatctactactggaatatacaaaccagacaactcaggtggttccactgagggccgtggttgcagtcccggaactgcaactgtccacgtcatgggtcgacttcggaacctgcttcgtgagccaacagagggtgagggaggtctatctcatgaatttgagcggctgccgctcttactggacaatgctgatgggacaacaggagcccgcgaaggccgccgttgccttccgcgtttcgccaaacagcggactgctggaggcaagatctgctaatgcaccacccacgtcaatagcgctccaggtgtttttcaccgccaggagctctgagctttatgagtctaccatggttgtggagggggtgttgggggaaaagtcttgcaccctgcggctgagaggacaagggtcctacgacgagcggtatatgctgcctcaccagccttag

SEQ ID NO: 23842 - DNA, 5337 bp, synthetic construct
  misc_feature 1..5337: note = Description of Artificial Sequence: Synthetic coding sequence
  source 1..5337: mol_type = other DNA
atggagacccggagcagcaagacccggcggagcctggccagccggacgaatgagtgtcaaggcacaatgtgggctccaaccagtccccctgccggatcctcttcaccctcacagcccacctggaagtcttctctgtactcatcactggcatactcagaggcttttcattacagtttcgcagccaggccaaggagactcacccaattagccctggcgcaaagaccagaaccccagttgttacggctgcggcctagttccttgcggacacaggatatttcccacctgcttactggagttttccgcaatctttattctgccgaggttataggcgatgaagtctcagcgagcctaatcaaggcccgcggcagcgaaaatgaaagacacgaggagttcgtggatcagcttcagcagattcgagaactctacaaacaaagattagatgagtttgagatgttggagaggcatatcacacaggctcaggccagagccattgccgaaaatgaacgtgtgatgtctcaggcaggggtacaggacctcgaatccctggttcgactgcctcccgtgaagagcgtgtcccgttggtgtatcgactcagagcttctcaggaaacatcacttgatatcccctgaagattattacactgacactgtgccctttcacagcgccccaaagggcatctcactgcccggttgctccaaattaaccttctcctgtgaaaaacgatcagtgcagaaaaaggaactcaacaaaaagctggaggactcctgtcggaaaaagttagccgagttcgaagatgaactggatcataccgtggactctcttacttggaatctgacgcctaaggccaaggagagaacgagggagccactcaaaaaggcctcccagcctcgaaacaagaactggatgaaccacctgagggttccccagcgtgagttggaccggctgctgcttgcacgtatggagtcacggaatcattttcttaaaaatcctcggtttttcccgccgaatacccggtatgggggcaagtctcttgtgttcccaccaaagaagcctgcccctataggcgagttccaatcaacagaaccagaacagtcttgtgctgacaccccagtctttctggcaaagccccctattggcttttttaccgactacgagatcgggcccgtgtatgaaatggtaattgcattgcagaataccaccaccacaagccggtaccttcgagtgttgccacctagtactccttatttcgcgctgggcctcggtatgtttccaggcaagggcggtatggtcgccccaggaatgacttgccagtatattgttcagttttttcccgactgtttgggggacttcgatgatttcattttggtagaaactcaaagcgcgcacacgcttcttattccccttcaggcgcggcgaccacccccggtgctaactctctcaccagtgttggactgcggctattgtctgatcggtggggtgaaaatgaccagattcatctgtaagaacgtgggttttagcgttggccggttttgcatcatgcctaaaactagctggcctcccttgtctttcaaagcaatagctaccgtgggcttcgtggaacagcccccctttggcattctgccctcagtttttgaacttgcccctggccatgccatcctggtcgaagtccttttttcccccaagtcactggggaaggccgagcagacttttatcatcatgtgtgacaactgtcagattaaggagctagtgactatcggtattgggcaactgatagccctggaccttatttacatctccggcgagaagagtcagccggatccaggcgagctgacagacttgactgcccagcactttatccgcttcgaacctgagaatctcagaagtactgcacggaaacaacttattatccggaacgcgactcatgtggaactggccttctactggcagatcatgaaaccaaatctccagccattaatgccgggagagaccttctccatggacagtattaagtgttatcctgataaggagactgccttctccataatgccccgcaaaggagtcttgtccccacacactgatcatgagtttatcctgtccttctccccacacgaattgagagattttcacagcgtgctgcagatggtcctggaggaggttccggagccagtgagctcagaagccgaaagcctaggccacagctcatacagtgtcgacgatgtgattgtgctcgaaattgaagtcaagggatcagtggagccgtttcaggtgcttctggaaccctatgctctcattattcccggagagaactacatcggcatcaatgtaaagaaagccttcaaaatgtggaataatagtaagtcacccatacgctatctttggggaaaaatttctgattgccacattattgaagtggaacctggaaccggggttattgagccaagcgaagtgggggattttgagctcaacttcacaggaggggtcccaggtccaacctcacaggatctgctatgtgaaatagaggattctccaagccccgtcgttctgcacatcgaggccgtgttcaaggggccagccctgattatcaacgtgtcggccctgcaatttggtctcttacgactcgggcagaaggcaacgaattcaatccagattcgcaacgtgtcccagttgcctgctacttggagaatgaaggagagtccagtgtccttgcaggaacggcctgaagatgtgagcccatttgacattgagccctcaagcggacagctgcactctctgggtgaatgcagagtagacataactctggaggccctgcattgtcagcacctggaaaccgtgctcgaactggaggtcgaaaatggagcctggtcttacctgcctgtgtatgctgaggtgcaaaagcctcacgtgtacctacagtcatcacaagtggaggtaaggaacctgtatttgggggttcccacgaagaccacaatcacactaataaatggtaccctgctgccaacccagttccactggggtaagctcctcggtcaccaggccgagttctgcatggtgacagtgtccccaaagcatggcttgttaggaccaagcgaagagtgtcagctgaagcttgagctgacagcccacacccaggaggagctcacacacttggcccttccctgtcacgtgtccggcatgaaaaaaccccttgtgcttggaatatccggtaagccacagggtctgcaggtggctattaccatatcgaaggaaagcagcgattgctctactgagcagtggccgggccaccccaaggagctccgccttgattttggaagcgccgtgccacttcggactcgcgtgactaggcagctcattctgactaataggtcaccaatccggacacggtttagcctgaagtttgagtacttcggatccccccagaattcgctcagtaagaagaccagcctacccaatatgccccctgcgcttctgaagactgtgcggatgcaggagcatctggcaaaaagggagcagcttgatttcatggagtcgatgctatctcacggaaaaggggctgccttcttcccgcatttcagccagggaatgttaggcccatatcagcaactgtgcatcgatatcactggatgtgctaacatgtggggagagtactgggacaacctgatctgcaccgtaggcgacctgctgccagaagtcatacctgttcatatggccgctgttggctgcccaatttcttccctcaggacaacaagctacacaatcgaccaggctcagaaggaacctgccatgcgcttcggcacgcaggtcagcggcggcgataccgttactaggacattacgccttaacaattcttccccttgtgacattagattagattgggagacttatgttcctgaagataaagaagataggctggtggagctcttagtgttctacggtccacctttcccccttcgagaccaggccgggaatgaactggtttgccccgacacgcccgagggaggttgcctattatggtcacctggccccagcagctcaagcgagttttcccatgaaacggacagctcagtcgagggctcttcatccgcttcaaaccgggtggctcaaaagctgattagtgtgatactccaggctcacgagggagtcccatccggtcacctgtactgcatctcacctaagcaagtggtcgttcctgcaggtggctccagcaccatttacatcagttttacaccaatggtgttaagccctgaaatccttcacaaagtggaatgtacaggctacgcactggggtttatgtcgctcgattctaaagtagaaagggagattcctggcaaacggcatcggttgcaggacttcgcagttggccccctgaagctagatctgcattcttacgtaagacccgcccagctctctgtggagctcgattatgggggaagcatggagttccagtgtcaagcttccgatcttatccccgaacagccttgtagcggcgttctttctgagttagtgactacccaccatctgaaattgaccaataccacagagatccctcactacttccgtcttatggtaagccgcccattcagcgtcagccaggatggggcctcccaggaccatagggccccgggcccggggcagaagcaggagtgcgaagaggagacagcaagcgctgataagcagctcgtgctccaggcccaggagaatatgttagtgaacgtcagctttagtctgtctctcgagctgctgtcatatcagaaacttcctgcagaccaaaccttgcccggagtggacattcagcagtccgcaagtggcgaaagagagatggtctttacccaaaacctactgctggaatacactaatcagacgactcaggtcgtacccttgcgtgccgtggttgctgtcccggagctgcagctctccacctcatgggtggattttggcacctgcttcgtgtctcagcagcgcgtgcgggaggtctacctcatgaatctcagtggatgccgctcctactggactatgctcatgggggtagtgagttgcacctcacctcgttggtggtggaaggtgtgtagtgtgcgttcacccgcaccctgtggaagcggcgccaaggctcccatgatgcgggatacttgctgtttgacatcccctgaggctcccccccagccttctgcacccggtcctagctggcgcaaaaatatcgcccaagggcttggtgccgctctgcaacacaaagataccgaccttggtacttggggaccactgggcagtagttggaacggacggacgccttttcataatggcctctctctcggacctcatgacatgagctcagagctgacctag

SEQ ID NO: 23843 - DNA, 5277 bp, synthetic construct
  misc_feature 1..5277: note = Description of Artificial Sequence: Synthetic coding sequence
  source 1..5277: mol_type = other DNA
atggagacccggagcagcaagacccggcggagcctggccagccggacaaacgagtgccaggggaccatgtgggcccctacctctccaccagcgggatcatcgtctcctagtcagcctacctggaagtcttctctctattcctccctggcctattcagaggctttccactacagcttcgcggccaggccccggcggctcacccaactggctctggctcaacggcccgagcctcagctccttcgactaagaccatcttctcttcggactcaagacatcagccacttgctgaccggggtcttcagaaacttgtactcagccgaagtgatcggcgatgaagtctcagctagcttgatcaaggcaagaggtagcgagaatgaacggcacgaggaattcgtggaccaactgcagcagattcgggagctttacaagcagaggctggacgaattcgaaatgttagagcggcatattacccaggcccaggcccgagccatcgctgagaacgagagagtcatgagtcaagccggagtgcaggatctggagtctctggtgcgcttaccaccggtaaagtctgtgtctaggtggtgtatcgactccgagctgctgagaaagcaccatctcattagtcccgaggattactataccgacactgtaccttttcatagcgccccaaaggggatttcactgcctggatgtagtaagctgacgtttagttgtgagaaaagatctgtccagaaaaaagaactcaacaaaaagctggaagattcatgtaggaagaaactggcagaatttgaagatgaattggatcacaccgttgattccctaacctggaacttgactcccaaggctaaagagagaacaagagaacccctaaagaaagcctctcagccccgcaacaaaaattggatgaatcacctaagagtgccacagcgcgagctcgatcgcctcttgttggcgagaatggagtccagaaaccatttcctgaaaaatccccgattctttccacccaacacgcgctacggaggcaagagcctggtttttccccccaaaaaacccgcccccatcggcgaattccaatcaacagagccagaacaaagttgcgcggatacacccgtcttcctggctaaaccaccaatagggtttttcacggactacgagatcgggcctgtgtacgaaatggtgatcgcactccagaacacaaccaccacttcccggtaccttagagtccttcccccgagtactccgtactttgcactcggcttgggaatgtttcctggaaagggtggcatggttgctcctggcatgacctgtcagtatattgtgcagtttttccccgactgtttgggggactttgacgatttcatcttggtcgagactcagtcagcccacaccctgttgatccctttacaagctagacgacctccgcccgtcctgacactttcgcctgtgctggactgcggctactgtctgatcggtggagtgaaaatgactaggtttatttgtaagaacgtgggatttagcgtcggacggttctgcattatgccgaagacaagctggccccctctgagcttcaaggcaatcgcaaccgtgggctttgtcgaacagcctccttttggcatcctgcctagtgtgttcgaattggcgcctggccacgcaattctagtggaggttctattcagcccgaaatcattaggtaaggcagagcagacttttatcataatgtgtgacaattgccaaatcaaagagctggtgacgattggcatcggacagctgatagccctggatttgatctatatctctggagagaaatcgcaaccagacccaggcgaactgacggacctgactgcgcaacactttatcaggttcgagcctgagaatctgagatctacagctaggaagcagctgatcatacgcaatgcaactcatgtggaactggccttttactggcagatcatgaagcccaacctccagcctctgatgcccggcgagacatttagtatggactccataaagtgctatcctgacaaagagaccgcattcagtataatgcctaggaagggcgttctctctccccataccgatcatgagtttatcttatctttctcccctcacgaactgcgggatttccactcagtcctgcaaatggttcttgaggaagtgccagaaccagtgtcctcggaggccgaaagcctcggacattcctcctactctgtggatgacgttatcgtgctggaaatcgaggtgaagggatctgtggagccctttcaggtcctgttggagccatacgccctgatcattccaggtgaaaactacatcggcatcaatgtcaaaaaagcctttaagatgtggaataactcaaagtcccccatccggtacctttggggtaagatttcagattgtcacataatcgaggttgaacccgggacgggtgtcatagagccatctgaggtgggagacttcgaacttaactttacaggcggggtccctgggcctacttcacaggacttactctgtgagattgaagatagcccatctcctgtggtcctacacattgaagcagtgttcaaaggacccgctctgatcatcaacgtttctgccctgcagtttggtctactgcgccttggccaaaaggccaccaatagtatacagattcgaaacgtctcccagctccctgcaacatggcggatgaaggaaagccctgtgagcctccaggaacgacctgaggatgtttccccctttgatatcgaacctagctctggacaactgcactccctgggggagtgccgcgtggatattactcttgaagcattacattgtcagcacctggaaacagtcttagaacttgaggtggagaatggagcttggagttacctccccgtgtatgcagaggtgcagaaaccccacgtataccttcagtcaagccaagtggaggtgaggaacctttacctgggggtaccgacaaaaacaacaataactctcatcaatggcactctgctccctacacagttccactggggaaagctgttaggacatcaggcagagttctgcatggtgaccgtgagccccaagcacggcctgttgggccccagcgaggaatgtcaattaaaattagagcttactgcccacacccaggaggagctcacccaccttgccttgccctgccacgtctcggggatgaaaaagccgttggtacttgggatttctgggaagccccagggtctacaggtggccatcactattagtaaagaaagctccgattgctcagtgttttcgaccgagcagtggccgggccatcctaaagaattgagacttgatttcggcagcgcagttccactccgcaccagagtgacacggcagctgatactgacaaaccgcagcccaattagaaccagattttcactaaaatttgagtactttgggagcccacagaactccctctctaagaaaacatctctccccaacatgcctcccgcccttctgaagacagttcgtatgcaggaacacctggcaaaacgcgagcagcttgatttcatggaaagtatgctcagtcatggcaagggggctgcctttttcccccatttctctcagggaatgctggggccataccagcagttatgtattgacattacagggtgtgccaacatgtggggagagtattgggacaatttgatctgcactgtgggtgacctactcccagaggtgatacctgtgcacatggccgccgtgggatgccccatttcctctctcaggaccacttcctacaccatcgaccaagcccaaaaagagcccgccatgaggtttggcacacaggtttctgggggcgatacagtcactcgcacactccgcttgaataattcatctccctgtgacattcggctggactgggagacatatgtcccagaggacaaggaagatagactcgtcgagttactagtattttatggacccccctttcctctgagagaccaggctgggaacgaactggtgtgcccagacacgcccgaaggcgggtgcctgctctggtcacctggacccagtagtagcagcgagttcagccacgaaactgacagctcggtcgaaggctcctcaagcgctagtaatcgtgtggctcagaaactcatttctgtgattctccaagcccatgagggggtgcctagcggacacctgtattgcatttctcccaaacaggtggttgtacctgcagggggcagtagcaccatttacatctccttcacaccgatggtgctgtccccagagatactccacaaggtagagtgtactggctacgctctgggatttatgagcctcgacagcaaggtcgagcgggagattcccggcaaacgtcacagactgcaggatttcgcagtcgggcccctgaaactggatttgcattcctacgtgaggcccgcccagttgtccgtggaactggattacggggggagtatggagtttcaatgccaagcaagtgatctgattccagagcagccctgcagtggcgtgctttccgagctggtgaccacacaccatctgaagctgactaatactaccgagatcccccattattttcggctcatggtgagtcgtcccttttcagtatcccaggacggggcatcgcaggaccaccgcgccccagggccgggtcagaagcaagagtgcgaggaagagactgctagcgccgacaagcagttagtacttcaggctcaagagaatatgctggtgaatgtctccttcagcctgagcctggagctgctgagctaccagaagcttcctgctgaccagacactcccaggcgtcgatatccagcagagtgcttcgggagagagggaaatggtgttcactcagaacctgctgcttgagtacactaatcagaccactcaggtcgtaccactgagagctgtggtggccgtccccgaactgcagctgtcgacttcctgggtggatttcggcacttgcttcgtgtctcagcagagggttcgggaagtgtacctgatgaatctaagcggatgtagatcatactggactatgctaatgggccagcaggagccggccaaagccgccgttgcgtttcgcgtttcaccaaatagcggcctgctggaggcacgcagtgccaatgctcccccaactagtattgctctgcaggtattttttacggccaggtccagcgaattatatgaatccaccatggtggtggagggtgtgctgggcgaaaaaagctgcactcttagactccggggacagggcagttatgacgagcggtacatgctgccccatcagccttag

SEQ ID NO: 23844 - DNA, 237 bp, synthetic construct
  misc_feature 1..237: note = Description of Artificial Sequence: Synthetic coding sequence
  source 1..237: mol_type = other DNA
atgcggccctgcatctggatccacgtgcacctgaagcccccctgccgccttgttgaattactgccatttagctcagccctgcaaggcctatctcatctgtctctaggaaccaccctgccggtcattttacccgaaaggaacgaggaacaaaacctgcaggaactgtcccataatgccgacaaataccagatgggagactgttgcaaagaagaaatcgacgacagcatcttctattag

SEQ ID NO: 23845 - DNA, 2940 bp, synthetic construct
  misc_feature 1..2940: note = Description of Artificial Sequence: Synthetic coding sequence
  source 1..2940: mol_type = other DNA
atgcggggctaccacggcgaccggggcagccacccccggcccgccagattcgccgaccagcagcacatggacgtagggcctgctgccagagctccatacctcctgggaagccgggaagcatttagcaccgagccacgcttttgtgctccccgcgctggcctggggcacatcagtcctgagggtcccctgtccttaagtgagggacccagcgtgggacctgaaggcggacctgctggcgccggcgtggggggaggctcttcgaccttcccccggatgtacccaggtcagggtcccttcgacacatgcgaagactgcgtaggacacccacaggggaagggggccccaaggttgccacccaccctgctggaccagttcgaaaagcagctaccagtgcagcaggacggtttccacacacttccatatcaaaggggtcccgctggagccggccccggaccagccccaggaaccggcacagcccctgagcctcgttcggagtcccctagtcgcatccgccatctggtgcactcggtccagaagctatttgccaaaagccactcactcgaagcccctggaaagagagattataatggaccaaaggccgaaggccggggggggtccggtggagacagctaccccggccccggctcaggagggccacatacatcccaccaccaccatcaccatcaccatcaccatcaccatcagagtaggcatggcaagcggtcaaagagcaaagaccgtaaaggcgatggccggcaccaggctaagtccaccggctggtggtcttccgacgataaccttgattctgattctgggtttctggcagggggtaggccaccgggggaacccggaggccctttctgcctcgaggggcccgacgggagctacagggacctgagcttcaaaggccgtagcgggggatcagaagggcggtgcctggcctgcactggtatgtccatgtcactagacggtcaaagtgttaaaagatcggcttggcatacaatgatggtttcccagggacgcgacggctaccctggggctgggccaggaaagggtctcctggggcccgaaaccaaagcaaaagcaaggacataccactatctccaggtgccacaggatgactggggtgggtatcccaccggagggaaagacggcgagataccatgtcgccggatgcggagtgggagttacattaaggctatgggcgatgaagagagtggagacagtgatgggagccccaagacatctccaaaagctgtggcgagacgatttaccactaggcggagctcatcagtagatcaagcccgcatcaactgctgtgtgccccctagaatccacccacggtcctcgatccccggttattcccgcagcctcaccacaggccagcttagtgacgaactcaatcaacagctggaagccgtgtgcgggagtgtgttcggagagttggagtcccaggctgtggatgctctcgatctgcctggctgtttcagaatgcggtcccacagctacctgagggccatacaggcgggatgtagccaggatgacgactgcttgccactattggcgacacccgccgctgtgagcggacgcccaggttccagttttaactttagaaaggctccccctcctatcccacccggatcccaggccccaccacgcatatccataactgcgcagtcttcaaccgattccgcccacgagtccttcaccgcggctgaaggaccagctaggcgctgtagtagcgcggatggtctggacgggccggcaatgggagcacgaacactcgaattggcacctgtaccaccccgcgcatctccaaagccaccaacattaatcatcaaaacgatccccggccgcgaggaactcaggtctctcgccagacagcgaaagtggcgcccctcgatcggtgtccaggtagaaacaatctcagatagtgatacagaaaaccgatccagacgggaatttcacagtataggcgttcaagtggaagaagataagcgcagggcccggtttaaacgcagtaacagcgtgacagctggcgttcaagcagatttggaactggaaggtttagcaggactagccaccgtggccacagaagacaaggccttgcaattcggtagaagctttcagcggcacgcatctgagccccagcctggcccgagggcacctacctattccgtattccgcacggtgcacacccaaggccaatgggcctaccgggagggctatcctctcccatatgagccacccgcaacagatggtagcccgggaccggctcctgcacccacccctgggccgggtgctggccgcagggactcttggattgaaagaggctcaaggagcctgccagattccggtagggccagcccgtgtccaagggatggcgaatggttcatcaagatgcttcgagcggaggtagagaaactggaacattggtgtcagcaaatggagcgagaagcagaggattacgagctaccagaagagatcctggaaaaaatccgcagtgccgtgggctctactcagctgctgctatcccagaaagtgcagcaattctttcgcctgtgccaacagagcatggaccccactgccttccccgtgccaacttttcaggatctcgctggcttctgggatctgctgcaattgtctatcgaagacgtcaccttgaaatttctggagctacaacagctgaaagcgaatagctggaaactcctcgagccgaaagaggaaaagaaagtcccgccccccattccaaagaagcctttacgaggaagaggggtccctgttaaggaacgaagcctggacagcgtggaccgccagcgccaggaagcacggaaaagactgctggctgctaagagggcagccagtttcagacactcttctgcgactgaatcagcggactctatagagatttacattccagaggctcagacgcggctctag

SEQ ID NO: 23846 - DNA, 5358 bp, synthetic construct
  misc_feature 1..5358: note = Description of Artificial Sequence: Synthetic coding sequence
  source 1..5358: mol_type = other DNA
atgggcatcagcaccgtgatcctggagatgtgcctgctgtggggccaggttctttccactggaggctggatcccgcgaaccaccgactatgcaagtctcatcccctccgaagtcccattggacccaacagtcgccgaaggtagtccctttccatctgaaagcaccctggagagcaccgtggcggagggttctcccatttcactggagtccaccttggaaagcactgttgccgaaggctcattaatcccctcagagtccacactggagagcacagtcgctgagggatcagactcagggctggctctcagactggttaacggtgatggtcgctgtcaaggtcgtgtcgaaatattgtacagaggatcttggggaactgtttgcgacgactcttgggacaccaacgacgccaacgtggtgtgtaggcaactgggctgtgggtgggctatgagcgccccagggaacgcctggttcggccagggctcaggaccaatcgccctcgacgatgtgaggtgctccggtcacgagtcttacttgtggtcctgtccgcacaatggatggctaagccataattgcggacacggcgaagatgccggcgtgatatgttccgcagcgcagccgcagagcacgttgcgccctgagtcctggccagtgaggatttctccgcccgtgcccaccgaagggtcggaatctagcctggccctgaggcttgtcaatggcggagatagatgtcgcggccgggtggaggtgttgtacaggggtagctggggcacagtttgcgatgactactgggatacaaacgatgctaacgttgtgtgccgccaactggggtgtggctgggccatgtcggctcctgggaatgcccaattcgggcagggctctggccctatcgtgctggatgacgtccgctgcagtggacacgagtcctatctatggagctgtccccacaatggatggctgacccataattgcggacacagcgaagatgccggtgtgatatgctctgcgccccagtcaaggcctacccccagtccagacacgtggcccacctcgcatgctagcaccgctggaccagagagctcactggctctcaggctcgttaatggcggcgaccgctgtcaaggccgcgtggaagtactctatcgcggatcttggggaacggtgtgcgatgacagctgggacacctctgacgccaacgttgtctgccgacagcttggatgcggttgggccacatccgctccaggtaatgcacgcttcgggcagggttcgggccccattgtgctggacgatgtgcgctgctccggctatgagagctacctatggtcctgcccccacaacggttggttatctcacaactgtcaacacagcgaggacgctggggtgatctgttctgccgctcacagttggtccaccccctcacctgatacactgcccacaatcacgctaccggccagcaccgtaggctctgaatcttccctggcactaaggctcgtcaacgggggcgatcgctgccaaggaagggtagaggttctataccaggggtcttgggggactgtgtgtgatgattcttgggacactaatgacgccaatgtggtttgtcgccaattgggctgtggctgggctatgtcggcccccggaaatgcacgattcggccagggcagtggacccatcgtcttggatgacgtgaggtgtagcggacacgagagctacctgtggtcttgtccacataacggatggttgtcccataactgcggtcacagcgaggacgctggcgtgatctgtagcgcaagccaatctcgcccaacccctagccccgatacctggcctacttcccatgcctccactgcagggagcgagtcaagccttgccctgcgcctggtgaatggtggcgatcgctgtcaggggagggtagaggtactgtaccgaggtagttggggcaccgtgtgtgatgactactgggatactaatgatgctaatgttgtttgcaggcagctcggttgtggatgggctatgagcgctccagggaatgcacgcttcgggcagggctcagggccgatagtcctggatgatgtcaggtgctccggtcacgaatcatacctgtggtcgtgtccgcataacggatggctatcacacaattgcggacaccacgaagacgccggagtaatttgctcggccagccagtctcagcctactccatccccagacacttggcccacttctcatgcctcgacggccgggagcgaatcctctcttgccctgagattggtgaatggcggggacagatgtcaggggcgggtcgaagtgctgtataggggtagctgggggactgtgtgcgatgattactgggacaccaatgatgccaatgttgtgtgccgccaattaggatgcggatgggctactagtgctcctggtaacgcccgcttcgggcaggggagcggccctatagtcctggacgacgtgaggtgcagcggacacgagagctacctttggtcttgcccccataacggctggttatctcataattgtggacaccatgaagatgccggcgtgatttgttctgcctctcagtctcagcctacgccttcccccgacacgtggcctacctctcgggctagcacggcaggcagtgaatctaccctcgctctgagactggtgaatgggggagacagatgccgcggtcgggtggaagtgctctatcaaggctcgtggggcactgtatgtgatgattactgggacacaaatgatgccaacgtggtgtgcaggcagctgggatgtgggtgggcgatgtccgccccagggaatgctcagttcgggcagggctccggtcccatcgtcctggacgatgtgcgctgcagtggacacgaatcatatctgtggagctgtcctcataatggttggctgtcgcacaactgcggccaccatgaggatgccggcgtgatttgctctgccgcccagagtcagtcaaccccaagacctgatacatggctgacaaccaacctgccagccctcaccgttggctctgaatcaagtctggccctgcggttggtaaatggtggggatcgatgccgaggcagagtcgaggtgctctacagaggctcatggggtacagtgtgtgatgatagttgggatactaacgatgctaatgtcgtctgcaggcagttggggtgcggctgggcaatgtctgccccaggaaatgctagattcggtcaaggaagcggccccatcgtgctggatgatgttagatgcagtgggaatgaaagctatctgtggtcttgtcctcataaagggtggctcactcacaactgtgggcaccacgaggatgccggggtgatctgtagcgcaacacagattaacagcacaaccaccgattggtggcatcccaccactacaacaaccgccaggcccagctcgaactgtggcggatttctgttctacgcaagtggcacgtttagttcaccctcctatccagcctattatcctaataatgccaagtgcgtgtgggagatcgaagtgaattctggatacaggattaacctcggattttcaaacctgaagctggaagctcaccacaactgcagcttcgattacgtagagatctttgacggatctctgaacagtagcctcctcctgggcaagatctgtaacgacacgcgccagattttcaccagttcatataacaggatgactatccactttagaagcgatatctccttccagaacacaggatttctcgcctggtacaatagcttcccttctgacgctactctcagacttgtcaatttaaattcctcatatgggctctgtgccggtcgggtggagatctatcacggagggacatggggcacagtatgtgacgatagttggaccattcaagaggctgaagttgtctgccgccaactgggctgtggacgggccgtgtcagctctcgggaatgcttactttgggagtggtagcggtcccattacattggatgacgtggagtgctccggtaccgaatctaccctttggcaatgccgaaatagaggatggtttagccataactgtaatcaccgggaggatgcaggagtcatatgctcaggcaatcatctgagcacacctgcccccttcctgaatatcacaagaccaaatacagactatagctgcggtggcttcctctcacagccatctggtgatttctccagccctttctacccaggtaactacccaaataatgctaagtgtgtttgggacattgaagtacaaaacaactatcgagtgaccgtgatcttccgcgatgtacaattagagggggggtgcaattacgattatatcgaggtgttcgacggaccatacaggtcttcccctcttatcgcccgcgtgtgcgacggcgctagaggtagctttaccagttcgagtaacttcatgagcattcgcttcatcagtgaccactccatcacacggcggggctttcgagccgaatattactctagtccttctaacgatagcactaatctcctgtgcctgcccaaccacatgcaggcttccgtctcaagatcctatcttcagtcactcggtttctctgcatccgacctggttatcagtacttggaatggctattacgagtgccgcccacagatcaccccaaatcttgtgatcttcaccatcccatactccgggtgcgggacatttaagcaggccgacaacgacacaatcgattattccaactttctcacagccgccgtttctggggggattataaagcgtcgcacggatttgcggattcatgtctcgtgccggatgctgcagaacacctgggtcgacacgatgtacatagccaacgacaccatccatgtggccaacaacacaattcaggtcgaagaggtccaatatggaaatttcgatgtcaacattagcttttacacaagcagtagttttctctaccccgtgacttcgcgaccctactacgtcgacctcaatcaggacctgtatgtccaggctgagatcctacactccgacgcggtcctcaccctctttgtcgacacctgtgtggcatctccgtattctaatgattttacctccctgacttatgatcttattaggtcaggctgtgtgcgggacgacacctacggcccttattcctctccatccctcaggatcgctaggtttcgcttccgggcattccattttctgaaccgttttccatccgtttatttaaggtgtaagatggtggtctgccgcgcatacgacccgagctctcgatgttaccgtggctgtgttctgagatccaagcgcgacgtgggttcctatcaagaaaaggtcgatgtagtgctcgggcctatccagctccagacgcctcctaggcgcgaagaagaaccaaggtag

SEQ ID NO: 23847 - DNA, 5358 bp, synthetic construct
  misc_feature 1..5358: note = Description of Artificial Sequence: Synthetic coding sequence
  source 1..5358: mol_type = other DNA
atgggcatcagcaccgtgatcctggagatgtgcctgctgtggggccaggtcctcagcactggcggctggatccctcggacaaccgactacgccagtctcattccatctgaggtgccacttgatcccaccgtggccgaggggtcgcctttcccatccgagagcaccttggagagtactgtggcagaggggtcaccaatttctctggagagcacattagaaagtactgttgccgaagggagcctgatcccttccgagtccacactggagagcactgtggccgaaggaagcgattcgggcctggccctgcggctggtgaacggggatggacgatgccaggggcgggtagagatcttgtacagaggtagttggggcaccgtgtgcgatgactcatgggacaccaatgacgcgaatgtggtgtgcaggcagttgggctgcggatgggcaatgtccgcccccgggaatgcttggtttggacaggggtctggacccattgcgttagacgatgtgcggtgttccggccacgagagttacctctggtcatgcccccacaacgggtggctttctcataactgtggacacggtgaagacgccggtgtcatttgcagcgcggctcagccccagtccacacttcggcctgaatcctggcccgttagaatttcaccccccgttccgaccgagggttccgagagtagtctcgccctcagactggtcaacggaggagatcgctgcagaggtcgagttgaggttttatataggggcagttggggaaccgtttgtgatgactactgggatactaatgatgcaaatgtggtgtgtagacaattaggctgcggctgggctatgagcgcccctggcaacgctcagtttgggcaggggagcggaccgatcgttctggacgatgtaaggtgctctggtcatgagagttacttatggagctgcccccacaacggctggttgactcataactgtggccactctgaggatgcaggagtcatatgttctgcacctcaatcacgcccaacccccagcccagacacgtggcctaccagtcacgcttccactgctgggcctgagtcaagtctggccctgcgcctggtgaatgggggtgaccgttgtcaagggcgagttgaggtgctgtatcgcggttcctggggcaccgtttgcgatgatagctgggatacaagtgacgcaaacgtggtctgccggcaattgggatgtgggtgggccacatctgcacccgggaatgcccggtttggccagggctctggccccatagtcctggatgatgtgagatgctcaggatacgagtcatatctctggagctgccctcacaatggctggctgagtcacaactgccaacactccgaggacgctggggtgatatgctctgccgcccactcttggtctacaccgtcccctgacaccctcccgaccatcacactcccagcctctaccgtgggcagcgaatcctccctcgctctaaggcttgtgaacggcggtgatagatgtcaagggagagtggaggtcctttatcagggatcgtggggtacagtttgcgatgattcctgggatacaaacgatgcaaatgtggtgtgtcgccagctgggttgtgggtgggccatgtctgcgcccggaaacgctcgctttggccagggttccgggcccattgtcctggacgacgtgcgatgctctggtcacgagtcctacctttggtcgtgtccccacaacggatggctgtcacacaactgcggccactctgaggatgccggcgtgatttgttcagcgagtcagagtcgccccactccatcaccagacacctggcccacgagccacgcgagtacggccggctccgaatcatccttggccctccgacttgtgaatgggggcgatcggtgccagggaagggtcgaagtcctgtaccgcggcagctggggcacggtttgcgatgactactgggatacgaacgacgctaacgtggtgtgccgccagctaggatgtggatgggctatgtctgcacccggtaacgcccggttcggtcaagggtctggacctattgtcttagatgatgtgcgctgttcaggccatgagtcttatctttggtcgtgccctcacaacggttggttgagtcacaattgcggccaccacgaagatgcaggcgtgatatgtagcgcctctcagagccagcctacacctagcccagacacatggcctactagtcacgcctcaacggctggaagcgaaagcagcctggcgctgcgtcttgtaaatggaggcgaccggtgccagggccgagtggaggttctttacaggggctcctggggcaccgtctgcgacgattactgggacacgaatgacgcaaacgtggtttgcagacagttgggctgtgggtgggccacaagtgctcccggaaatgcccgctttggtcagggcagcggacccattgtgctggacgatgttcgctgcagcggtcacgaaagttacctttggtcctgcccacacaacgggtggctttctcacaattgtggccatcacgaggatgcaggcgtgatctgcagtgcatcacaaagccagcccacacccagccccgacacgtggcccacctcccgcgcatcgactgccggcagtgaatctaccctcgcactacgcctggtgaacggaggagatagatgtcgggggagggtagaagttctgtatcagggctcttgggggaccgtgtgtgatgactactgggacacaaacgatgctaatgtggtgtgccgccagctggggtgtggttgggccatgagcgccccagggaatgcccaattcgggcagggatccgggccgattgtgttggacgacgtccgctgctcagggcacgaatcctacttgtggagttgtccccataatgggtggcttagccacaattgtgggcaccacgaagatgctggggtgatttgctcggctgcgcagtcccaatctacaccccgcccggacacttggctgacaactaatctcccagccttgacagttggatctgaatcttccctggccctgcggttagtaaacggaggcgaccgctgcagaggccgagtcgaggtcctgtaccggggcagttggggcacagtttgtgatgacagttgggacactaatgacgccaacgtggtttgccggcaactcggctgcggctgggccatgtcagccccaggtaatgccaggttcggccaaggaagcggcccgatcgttctggatgacgtacgctgcagtggcaatgagtcttacctgtggtcatgtccccacaagggatggctgacacacaactgtgggcatcacgaggatgcgggagtaatctgttcagccacccagatcaacagcacgaccactgattggtggcaccctaccacgacaaccactgcgcgccctagctccaattgcggggggtttctcttctatgccagcggaactttctcttcaccttcctaccctgcgtactatccaaacaatgcaaaatgtgtgtgggaaattgaggtgaactccgggtacaggatcaacctgggcttctccaatctcaaactggaggctcaccataactgctcgttcgattacgtggagatttttgatggcagtctgaatagtagcctcttgctcggcaaaatctgcaatgacacccgccagattttcacaagttcttataataggatgaccatacactttcgcagcgacatatcattccagaacaccggtttcttggcctggtataactcatttccctcagatgccacactcaggctcgttaacttgaactcctcgtatgggttgtgcgcgggcagggtggagatctaccatggggggacatgggggaccgtttgtgatgactcctggacaatacaagaggctgaggtggtttgccgccagctcgggtgtgggagggccgtttcagctttaggcaacgcgtatttcggatcaggctcaggtcccatcaccctcgacgacgtggagtgttccggcaccgaaagcacattgtggcagtgtagaaatagaggatggttcagccataactgcaatcaccgtgaagatgctggagtcatctgctctggcaaccacttgtcaacaccggccccctttctgaacattactcgtccaaatactgactactcctgcggcgggtttttgtctcagccaagtggcgattttagctcaccattttatcctggcaactatcccaacaacgccaaatgcgtgtgggatatcgaggtccagaacaactacagggttacagttatctttagggacgtgcaattggaggggggctgcaactatgattatattgaggtgttcgacgggccctatcggtctagcccgctgattgcccgagtctgtgacggcgccagagggtcgtttacaagcagctctaacttcatgagcatccggttcatttccgaccactcaataacacggagaggcttccgcgccgagtattactccagcccgtcaaatgacagcacaaatttattgtgcctgcccaatcacatgcaggccagtgtgagtaggtcttacctccagagcttaggatttagcgcttccgacctcgtgatttcaacatggaatggttactatgaatgccgtccccagataacgccgaatctggtgatatttactattccttactccggctgtgggactttcaaacaagccgataacgacacaatcgattattctaactttcttaccgctgcagtctctggaggaatcatcaaacggcggaccgatcttcgaatccatgtgtcgtgccgcatgctgcagaacacatgggtggacactatgtatatagccaatgacacaatccatgtggccaataacaccatccaggtggaagaagtgcagtatgggaattttgacgtcaatataagtttttacacctctagtagttttctgtaccccgttaccagtcggccttattatgtcgacttgaatcaggatctctacgttcaggctgagatcttgcactccgatgcagtactaaccctgttcgtggatacctgcgtggcctcaccttactccaacgattttacttctttgacctacgacctgatccggagcggctgtgtaagagacgatacatacgggccctattccagcccaagtcttcgtattgcgaggttccgctttcgtgcatttcatttcttgaatcgattccctagtgtatacctaagatgcaaaatggtggtatgccgggcctatgaccctagttctaggtgttatcgtggatgtgtcctccggtctaagagggatgtaggcagttatcaggagaaggtagatgtggtcctcggacccatacagctccagacgcctccccgcagagaggaggagccaagatag

SEQ ID NO: 23848 - DNA, 7242 bp, synthetic construct
  misc_feature 1..7242: note = Description of Artificial Sequence: Synthetic coding sequence
  source 1..7242: mol_type = other DNA
atgggcatcagcaccgtgatcctggagatgtgcctgctgtggggccaggttctctctactggaggatggattcccagaactaccgattatgcctccctgataccttctgaggtgcccctcgatcccaccgtcgcggaaggctcgcctttcccttcagaatcgactctcgaaagtaccgttgcagaaggcagtcccatctcgctcgagtccactcttgagagtacggtggccgaaggatctctgatcccaagcgaatctacgctcgagagcacagtcgccgaggggagtgactccggcctggccctgcggctggttaacggggatggacgctgccagggcagggtagagatcctgtatcgcggcagttggggcaccgtgtgcgatgattcatgggacacaaatgacgccaacgtggtgtgtagacaactgggatgcggctgggccatgtccgcgccaggtaacgcctggttcgggcagggtagcggtccaatcgcactcgacgacgtgaggtgtagtggccacgagagctatctatggagctgtccccataacgggtggttgtcacacaactgcggccatggggaagatgccggcgtaatttgttctgctgcccagccacagtcaacactcaggcccgaatcttggcccgttaggatctccccaccggtgcctactgaaggatccgagtctagtctggccttgaggttggtcaatgggggcgacaggtgtcgcgggcgggtcgaagtgctatacagaggctcatggggtaccgtttgcgacgattactgggacacgaatgacgccaacgtcgtgtgtcggcaattaggatgtggctgggccatgtctgcccctggaaatgcgcaatttggccagggtagtgggcctatcgtgctggatgacgtcagatgtagcggccacgagtcctacctatggtcctgtccccacaatgggtggttgacacacaactgcgggcactccgaggacgctggggtgatttgctcagccccgcagtcccgacctacgccttcgcctgacacctggcccacttcccacgcgagcacagccggacctgaatcgtctctggccctgcgcctagtcaacggcggggacagatgccaggggcgcgtggaggtgctctatagaggtagttggggtacagtttgcgacgacagctgggacacctctgacgctaacgtggtatgtcgacagctgggctgcggctgggccacttcggctcccggcaatgcacggttcgggcagggctcgggccctatcgtgctggatgatgtgcgatgtagcgggtatgagtcttatctgtggagctgtccccacaatgggtggctgagtcataattgtcagcattccgaggatgcgggcgttatttgttcagccgcccactcatggagtacaccatcccccgacacattgccgacgatcactctgcccgcaagcaccgtaggttcggaaagcagtctcgctctgaggctggttaacggtggagaccgctgccagggccgcgtggaggtcctctatagaggtagctgggggacggtctgcgacgacagctgggacactaacgatgccaacgttgtgtgccggcagctcgggtgcggatgggctatgctggcacctggcaacgcccggttcggacagggtagcgggcccatcgtgcttgatgacgtgcgttgttccggcaatgagagctatctgtggtcatgcccccacaatggttggctgagtcacaattgtgggcactcggaagatgctggagtgatatgcagtgggcccgagagctccctggcattgcgcctcgtgaacgggggggatcgatgtcagggaagagtggaggtgctttatcgtggcagttggggaaccgtatgtgatgactcatgggatacaaatgacgccaacgtggtatgcaggcagctgggatgtggatgggccacgtcagctcccggtaacgccagatttggccaaggaagcggtccaattgtcctcgacgacgtcaggtgttctggccacgagagctatctttggagctgccctaacaatggctggttatctcataactgtgggcatcatgaggatgctggcgttatttgctcagcggcccagagccgctccacacctcgtcccgatacattgagtaccatcacactgccaccaagtaccgttggctctgaaagtagtctaacactgcggctcgtcaatggctccgaccggtgtcaggggagagtcgaagtgttgtatagggggagttgggggaccgtctgtgacgactcttgggacaccaatgacgcaaacgtggtgtgtcgtcaactgggatgtgggtgggcaacgtccgctcccggcaatgcccgcttcggacagggcagtggtccaatagtactagacgacgtccgctgcagtggccatgaatcctacctttggtcctgtccacacaatggctggcttagtcacaactgtggccaccacgaagacgcgggtgtcatttgctctgtgtcacagagccgaccaacccccagccccgatacatggcccacttcccatgcctccaccgcgggacccgaaagctccttggccctgcgccttgtaaatggaggcgaccgttgccagggcagggtggaagtgctgtacagaggctcatggggaaccgtctgtgacgactcctgggatacttctgacgctaacgtcgtgtgccggcagctaggctgtggatgggccaccagcgctcctgggaacgcacgcttcggtcagggctccggccctattgttctagatgacgtcaggtgttcaggctacgagagttacttatggtcttgcccacataacggatggttatctcacaactgtcaacacagcgaggacgccggagttatttgtagcgccgcacattcctggtccaccccctcccccgacaccctgccgactatcacactccctgcaagcactgtggggtcagagtcatctctggcgcttagactggttaacggaggagaccggtgccagggccgcgttgaggtcctgtatcagggtagttggggtaccgtatgtgatgattcttgggacactaatgacgctaacgtcgtttgcaggcaattaggctgtggctgggccatgtcagcacctggcaatgcccgattcggccaagggtccggccccatcgttctcgacgacgtcagatgttccggtcatgagtcttacttgtggtcatgtccgcacaacggctggctttcccacaactgcggacactcagaagatgcaggcgtgatttgttccgccagccagagcaggcccactcccagtccagacacctggccaacatcgcacgcatccaccgcgggctccgagtcctcgctggcgcttaggttggtcaatggcggcgacagatgccaaggacgggtggaggttctgtatcgtggatcttggggcactgtatgtgacgattattgggataccaacgatgccaacgtagtgtgccgtcagctaggatgcggatgggccatgtctgctcccggaaatgctagatttggccaggggtctggtcccatcgttctggacgatgtccgctgttctggacacgaaagttacctgtggtcctgccctcacaacggatggctcagtcataattgcggccaccacgaggacgcgggcgttatctgcagcgcgtctcagtctcagccaacgccatcccccgatacctggcctacttcacacgctagtacagccggcagcgaatcaagcttagctctgcggttggtcaacgggggtgataggtgccagggacgcgtcgaagtgttatacagggggtcatggggaactgtctgcgacgactactgggatacaaatgatgctaatgtagtgtgtcggcagctcggttgtggatgggccacctcagcacctggaaacgccagatttgggcagggtagtgggccaatcgtattagatgacgtgagatgcagcgggcatgagtcatacttgtggagctgtccccataacgggtggctgagtcacaattgcggccaccatgaggatgcgggagtgatatgttccgcctctcaaagtcagccgactccttctccagacacttggcctacgagccatgcctccacagccggctccgagagctcactcgctctgcggcttgtaaacggcggcgaccgttgccaggggcgcgttgaggtcctttaccggggatcttggggtactgtctgcgacgattattgggataccaacgatgccaatgtcgtatgtaggcagctgggatgcgggtgggccacctcagccccaggaaacgcacgttttggacagggctctgggcctatcgtgctcgacgacgtcagatgtagtggccacgaaagctatctctggtcctgcccacacaatgggtggctgagtcacaattgcggccaccatgaagatgctggagtgatctgctccgcttctcagtctcagcctaccccatctcccgacacctggccaacctcacgagccagcacggccggatccgaaagcacccttgccctgagacttgtcaatggcggagaccggtgtcggggacgcgtggaggttttgtatcaggggtcttgggggaccgtctgcgatgattattgggacacaaacgacgccaatgtcgtttgcaggcagctcggatgcggctgggccatgtcggcccctgggaatgcacagtttggccaggggagcggcccaattgtgctggacgacgtgcggtgctccggccacgaaagctacttatggagctgtccccataacggatggctcagtcacaattgtggccatcacgaagatgctggcgtgatctgctctgcagctcagtcccagtctactcctcgaccagacacatggctcacaacgaacctgcccgcgctgaccgttggcagtgagtcgtcattagctctaaggttagtgaacggcggagataggtgtagaggcagagttgaagtgttgtacagagggagctggggaaccgtctgcgatgattcttgggacaccaatgatgcgaacgtggtctgcagacaactgggatgtggctgggccatgtccgccccagggaacgcacggtttggacagggttctggacctattgtgctcgatgacgtgcggtgctccggaaatgaatcatacctgtggagctgcccccacaaaggttggttaactcataactgtggtcaccatgaggatgctggcgtcatttgctcagcaacccagatcaattccactaccaccgactggtggcacccaaccaccaccaccactgcacggcccagttctaactgcgggggcttcctgttctacgctagtggaaccttcagcagcccttcctatccggcctactatcccaacaatgccaagtgtgtgtgggagatcgaagtgaattcaggctaccggatcaatcttggtttttccaacctcaaactggaggcccatcataactgctccttcgattacgttgaaatattcgacggctccctgaactcatccctcttgcttggaaagatctgtaatgacaccagacaaattttcacctcatcttacaacagaatgaccattcacttcagatcggacatatcattccagaatacggggtttctggcttggtacaattctttcccctctgacgcgacactgagactagtaaatctgaatagcagctatggcttgtgtgctggcagagttgagatctaccatgggggaacatggggcactgtgtgtgacgacagctggaccattcaggaagctgaagttgtttgccgccagctcgggtgcggtagagccgtttcagcactggggaacgcctacttcggaagcggcagcggcccaatcacactggacgacgtggagtgtagtggcaccgagagtacattgtggcagtgcagaaaccgcgggtggttcagccacaattgcaatcatagggaggacgctggcgttatctgttcggggaatcatctaagcacacctgccccgttcctgaatattactaggccaaatactgattattcatgcggagggttcttaagccaacctagcggcgatttttcatcccccttttaccccggcaattatcccaataacgcaaagtgcgtgtgggatattgaagtccaaaataattatagggtcaccgtgatctttcgcgacgtacagctggaaggcggctgcaattatgactacatcgaagtgttcgatgggccctataggtcttctccactgatagccagagtatgtgatggggctagaggttcattcacctccagcagtaacttcatgagcattcgtttcatttccgatcatagcataacccgccgagggttccgcgccgagtattacagctccccaagcaatgattccacaaatcttctgtgcctccccaaccacatgcaggcctcggtttcaagatcctacctgcagtccttaggcttctcagcgtcagatctagtaataagcacctggaacggttattatgagtgcagacctcaaatcacacccaatctcgtgatcttcactattccgtatagcggctgtggcaccttcaagcaagccgataacgataccattgactacagtaatttcctcacagcggcggtgagcggcggcatcatcaagcgcagaaccgatttgagaattcatgtctcatgccggatgttgcagaacacctgggtggataccatgtatatagctaacgatacgatacacgtggccaataatacaatccaggtggaggaggtccagtatgggaactttgacgtcaacatcagcttctacacctcatcatcttttctctaccccgtgacctctaggccctactacgtggacttaaatcaggacctttacgttcaggctgagattctgcattcggacgcagttctgaccctgttcgtggacacatgcgtggccagtccgtactctaatgacttcacctctctcacatacgatttgattcgctcgggctgtgtgagagacgacacttacgggccgtactccagccccagcctcaggattgcacggtttcgcttcagagcctttcactttctcaacagatttccctccgtttaccttcgatgtaaaatggtcgtctgcagggcctacgatccctcttctcgctgttaccgtggctgtgtgctgcgcagtaagcgagacgtcggcagctaccaggaaaaggttgacgttgtacttggccccatccaactgcagactcctcctcggcgggaggaggagcccagatag

SEQ ID NO: 23849 - DNA, 5358 bp, synthetic construct
  misc_feature 1..5358: note = Description of Artificial Sequence: Synthetic coding sequence
  source 1..5358: mol_type = other DNA
atgggcatcagcaccgtgatcctggagatgtgcctgctgtggggccaggtgttaagtacagggggttggatccccaggacaacagactatgctagccttattcccagtgaagttcctcttgatcctaccgtagccgagggctcccctttcccaagtgaatccacgttagaatcaacagtggccgagggttctccaatctccctggaaagtacactggagtccaccgtcgccgaggggtctttgattcccagtgagagcactctagaaagtactgtggcggagggctctgactctgggctggctctgcgcttggtcaatggagacggtagatgccagggacgcgtcgaaatcctttatagggggagctggggcacagtgtgtgacgactcatgggataccaatgacgccaatgtagtctgcagacaactaggctgtggttgggctatgtctgctcctgggaacgcctggtttggtcagggaagcggacccattgccttggacgatgtgagatgctctggccacgagagctatctgtggtcttgtccacataacggttggttatcgcataactgcggacatggcgaagacgcaggcgtgatctgttctgcggcacaaccccagagtactctgcgacctgagtcctggcctgtaaggatctctcctcccgtcccaacagagggttcagaaagctcacttgcccttaggctcgtcaacggaggtgatcgatgcagaggccgggtggaagtgctgtatcggggtagctggggcacggtgtgcgatgactactgggacactaatgacgccaacgtggtgtgccggcaactggggtgcggatgggcaatgtcagctccaggcaacgctcagttcggacaggggtctggcccgattgtccttgatgacgttagatgcagtggacacgaaagttacctgtggagctgcccccacaacggctggctcacacacaattgcggacactccgaggacgccggcgtgatttgtagtgcccctcaaagcaggcccactccaagtccagatacctggcccacgtcgcacgccagcacagccggcccagagtccagccttgctttgagattggtcaatggcggggacaggtgccagggccgcgtcgaagtgctctatcggggaagctggggcactgtgtgtgatgattcatgggacacctccgacgcaaacgtggtgtgtcgacagctcgggtgtgggtgggccactagcgcccctggcaacgccaggttcggccaaggctcaggccctatcgttcttgacgatgtgcgttgctccggatatgagtcctacctgtggtcctgccctcataatggttggctttcgcacaactgccagcactccgaggacgctggggtaatctgctctgccgcccactcttggtccaccccaagtcctgacaccctgccaaccatcaccttgccagcgtcaacagtcggttccgagtcatcactggctctgagactggtgaatgggggggacagatgccagggccgggtggaggtgctgtatcagggctcctgggggactgtgtgcgacgactcttgggatactaacgacgccaacgtcgtgtgccggcagctgggatgtgggtgggccatgagcgcacccggaaatgccaggttcggtcaaggcagcggtccaattgtgttagacgacgtccgttgcagcggccatgaatcttacctgtggagctgcccccacaacgggtggcttagccataactgcggccatagtgaagacgcgggtgtaatctgctcggctagtcagtccaggcctacgcctagtcctgatacttggccgacctcccacgccagtacagctgggagcgagtcgtcacttgcgctgcgtttggtgaacggcggggatagatgtcagggcagggtggaagtactctatagaggaagttggggcactgtatgcgatgactactgggatacaaacgacgcaaatgtggtgtgcaggcagctggggtgtggttgggctatgtctgccccagggaacgctcgctttggacagggctcaggaccaattgtgctcgacgacgtacggtgtagcggtcatgaaagctatttatggagctgccctcacaacggctggctgtctcataattgcggccatcatgaagatgctggcgtcatctgttcggcttcccagagccagcctacaccctctccagatacatggcctacttcacacgcctcgaccgccgggtctgagtcttctctcgctttaaggctcgtcaatggcggagatagatgtcaagggagagtcgaggtgctgtaccgaggcagctggggtacagtgtgcgacgattattgggatactaatgatgctaacgtggtgtgtcgccaattggggtgcggctgggccacctctgccccaggcaacgctcgtttcggtcaggggagcggcccaatcgttctcgacgatgtgcggtgcagcgggcacgagagttatctgtggagctgtccccacaatgggtggctttcacataactgtggtcaccacgaggatgccggcgttatctgcagtgcctcccaatcccagcctactcccagccctgacacctggcccacatcccgagcctcgactgccggttccgagtcaaccctcgcactgaggctagtgaatggaggggacaggtgccgcggacgagtggaagtactatatcaggggtcttggggcacagtgtgtgacgactattgggatactaatgacgcgaatgtggtatgccgtcagttaggctgcggctgggcaatgtcggccccgggtaacgcacaatttggacagggtagcggaccaattgtactggatgatgtgcggtgctcagggcacgaatcatacctatggagctgtccccacaacggttggctctcacataactgtggacaccatgaagacgcgggtgtgatttgctctgccgcacagtcacagtcgacaccaagaccagatacctggctgactaccaatctgcccgccctcaccgttggcagtgaaagcagcctggctctcagactcgttaatgggggggatcgatgtagaggtagggtagaggttctgtatcgaggtagctggggcaccgtctgcgatgactcctgggatacaaacgacgcaaatgtcgtgtgtagacaactcggttgtggttgggccatgtcagctcccggtaatgcaagattcggtcaagggagcggccccatcgtgctcgatgatgttcggtgcagcgggaacgaaagttatctatggtcctgcccccataaaggctggcttacacacaattgcggtcaccacgaggatgccggagtgatctgttcagccacacagataaactctacgaccaccgactggtggcaccctactacaactacaacagctagaccctctagcaattgcgggggtttcttgttttacgcaagtggaactttctcatctcctagctatcccgcctattatcctaacaacgctaagtgtgtatgggagattgaggtgaactctggctaccgaatcaatttgggatttagcaatttgaaacttgaggcccatcataactgctcctttgactacgtcgagattttcgatgggagtctcaacagcagcctgctgctgggtaagatttgtaacgatacacgccagatcttcacatcctcgtacaacagaatgacaatccattttcgaagtgatatctccttccagaataccggttttctggcctggtacaacagcttcccgagcgacgccacacttagactggttaatttgaatagtagttacgggctctgcgccggaagggtggaaatttaccatggcggcacttggggcacagtgtgtgacgattcctggacgatacaagaggctgaggtcgtttgccgtcaactgggatgcgggcgtgcagtatccgccctgggaaatgcttatttcggcagcggaagcgggcccattactttggatgatgtggagtgctctggtactgaatctactctttggcaatgtagaaataggggatggttctcacataactgtaatcacagggaagatgctggtgtgatttgcagtggcaatcacctgagcactcccgctcccttcctgaatattactcggccaaacactgactactcgtgcggcggcttcctgtctcaaccctctggagacttcagctctcctttttatccgggcaattatcccaacaacgcaaaatgtgtctgggatatcgaggtgcagaataattacagggtgaccgtcatcttccgcgatgtgcagttggaggggggctgtaactacgactacattgaggtgtttgatggcccctaccgctcaagcccccttattgcgcgcgtgtgcgatggagcccgaggttctttcacctcttcatcaaattttatgtctatacgattcataagcgaccatagcatcacaagacgtggctttagggcagaatattatagcagccctagcaacgactcgaccaacctactgtgtttaccaaatcacatgcaggcctctgtgagcaggagctacttacaaagcctgggcttctcggccagtgatctggtgatatccacttggaacggttactatgaatgccgaccacagataacccctaacttggtcattttcaccataccttactcaggctgcggcaccttcaagcaagccgacaacgataccatcgactattccaacttccttaccgccgctgtctccggcggcatcatcaagagacgcaccgatctacgcatccatgtctcgtgtcggatgcttcagaatacatgggtggacaccatgtacatcgcaaatgataccatacatgtggctaataataccattcaagtcgaagaagtgcagtatggaaacttcgatgttaacataagtttctatacaagcagctcctttctgtatcccgtgacctctagaccttattatgtggacttaaaccaggacctgtacgtgcaggcagaaatcttgcatagtgatgcagtgttgacgttgtttgtggacacctgcgtcgcttcaccttatagcaatgatttcacctctttaacatatgatcttatccgcagtgggtgtgtgagagacgatacatatggtccttattcatctccatcacttaggattgcacggtttcgcttccgggccttccactttttgaacaggtttcctagcgtctacctgagatgcaaaatggtagtctgccgcgcatatgacccgagtagtcggtgctaccggggctgtgtgctgagatctaaaagggatgtcggttcgtatcaggagaaagttgacgtggtcctgggcccgatccaattacagactccacctcggagagaagaggagcccaggtag

SEQ ID NO: 23850 - DNA, 7242 bp, synthetic construct
  misc_feature 1..7242: note = Description of Artificial Sequence: Synthetic coding sequence
  source 1..7242: mol_type = other DNA
atgggcatcagcaccgtgatcctggagatgtgcctgctgtggggccaggtcctcagtactgggggatggataccgagaactactgattatgctagcttaattccgtcagaggttcccctagatcccaccgtggccgaaggaagcccttttccatctgaaagtacccttgagagcactgtggcagaaggcagcccaatttctctggagtctaccctggagtcgaccgtggctgaaggttccttaattccatccgaaagtactcttgagtctacagttgctgagggttcagattctggcttggccctgcgcctggtgaacggggatggtcgatgccaaggaagagtggagatcctgtaccggggatcctggggaactgtctgtgatgacagttgggacacaaacgatgctaacgtagtatgcagacagctggggtgtggctgggccatgtcagcgccgggcaatgcctggttcgggcaggggagcggcccaattgctttagatgacgtaaggtgtagcggacatgaatcttacctgtggagctgcccgcataatggatggctgagtcacaattgcgggcacggggaggacgccggcgttatttgcagcgccgctcagccacagtcaaccctgaggccagaatcatggcctgtgcgtatctcgcccccagtacctacagaaggcagcgagtcctccctggcccttaggctggttaacggcggggatcgatgcagggggagggtagaggttctgtatcgaggatcatgggggactgtgtgcgacgattactgggacaccaatgacgctaatgtggtgtgtaggcaattgggatgcgggtgggcaatgtctgcacccgggaacgcacagttcgggcaggggtcagggcccatagtgctggatgacgtccgttgttcaggccacgagtcctacctgtggagttgtccacacaacgggtggctgacccacaattgcggccactcagaggacgctggagtgatttgctcagcaccacaatctcggcccaccccctcccccgacacctggccaacctcccatgcctctaccgcaggaccagaaagttccttagcactgagactggtgaatggaggcgacaggtgtcaagggcgcgtggaagttctgtatagaggatcatggggaactgtgtgtgatgactcttgggatacctctgacgccaacgtggtctgcaggcagctgggttgcggctgggcaacatccgcacccggcaacgcccggttcggacaggggtcgggccctatcgtgttagatgatgtgaggtgtagcggttatgagtcctatctgtggtcctgcccccacaatggttggctgtcgcacaattgccagcacagcgaggacgccggcgttatatgttctgctgctcattcgtggagcaccccttctcccgataccctgccaactattaccctgcccgcttcgacagtcggctccgaatcgtcgctggcccttagacttgtaaacggtggcgataggtgccagggacgagtggaggtgttgtataggggctcatggggtacagtctgtgatgactcctgggacacaaatgatgctaacgtcgtatgtaggcagctgggttgcgggtgggccatgctggcccctggcaacgcccgcttcggacaggggagcggcccaattgtgctcgacgacgtgcgatgttcaggtaacgaaagctacctgtggagttgtccacacaatggttggcttagccataattgtggccactccgaggacgctggtgtgatatgcagcggccccgagtcaagccttgccctgaggctggtaaacgggggggatcggtgtcaggggcgggtcgaagtgctctatagaggaagctggggaacggtgtgtgatgattcatgggacacaaacgatgccaatgtcgtctgccgacaattgggatgcggctgggcaacaagtgctcccggaaacgcaagatttgggcagggcagcgggcccatcgtcttagacgatgtccgctgttcaggccacgagagctatctgtggtcgtgcccgaataatggatggctgtcccacaattgtggacatcatgaggacgctggagttatttgcagtgccgctcagagccgatccaccccaaggccagacacgctgtccacaattaccctccccccgtccaccgtcggttctgaatctagtctcacgcttaggctcgttaacggatcagacaggtgtcagggaagagtggaggtcctgtaccgcggatcttggggtaccgtatgtgatgacagctgggataccaacgatgccaacgtggtgtgccgccagctgggatgcggatgggccacaagtgctcccggcaacgctaggttcggacagggatcaggccctatcgtgctggacgatgtgcgctgctccgggcatgagtcatatttgtggagttgcccccacaacgggtggctctcccacaactgtggtcaccacgaggacgcgggtgttatctgctcggtgtctcagagtagacctactccctctcccgacacctggccgacttcacatgcctccactgctggccctgaatcctcactggctctgaggctggtcaacggcggtgacaggtgccagggcagggtggaggttctatataggggttcttggggaactgtgtgcgatgactcttgggatacgtccgacgcaaatgtggtgtgccggcaactcggatgcgggtgggcgacttccgcaccaggcaatgccaggtttggccagggctcagggccgatcgttctcgatgacgtgcggtgcagtggttatgaaagctatttgtggtcttgtccgcacaatgggtggctgtcacacaattgccagcattctgaggacgctggagtcatatgcagcgccgcacactcatggtccacacctagccccgacaccctccctactatcacacttccggctagcactgtcgggtcagagtctagcctggccctgaggctggttaacgggggcgatcgctgtcaggggagagtcgaggtcctctatcagggtagctggggcacagtctgcgacgacagctgggatactaatgacgccaacgtcgtatgtaggcagctgggctgtggctgggccatgtccgccccagggaatgccagattcggccagggctctgggcctattgtcctcgacgatgtccgatgctccgggcacgaatcttacctgtggtcatgtcctcacaacgggtggttatcacataattgcgggcattccgaggatgctggtgtgatttgctcagcctcgcagagccgaccaacgccttcccccgatacgtggcctacctcgcacgcctcgaccgctggatccgagtctagcctggccctgcgcctggtaaatggaggcgaccgctgtcaaggccgagtagaggttctgtacagaggcagctggggaacagtgtgcgacgactactgggatacaaacgacgccaacgtcgtttgtcggcaactcggctgcgggtgggctatgtcagcccctggaaatgcgaggtttggccaagggtccggccctatcgttctcgatgacgtgaggtgcagcggacatgaaagctacctgtggtcttgtccacacaacggttggttgagtcataattgcgggcaccatgaagatgcgggtgtgatttgctccgcttctcagagccaaccaacgccatcacccgatacttggcccacttcacacgcttctaccgccgggtctgaatcttcattagctctgcgtctggtcaacggaggagacagatgtcaggggcgggtggaggtgctgtaccgtggcagttggggcactgtctgcgacgactattgggataccaacgacgccaatgtggtgtgtaggcagctggggtgtgggtgggctacctctgcacctggcaatgcgaggtttggacaggggagcgggcccatagttctggatgacgtgaggtgttccgggcatgaatcatatctgtggtcctgtccccacaacggttggctgagccacaactgtggtcaccatgaagatgcaggcgtcatttgtagtgcaagccagtcccaaccaacaccttcccctgacacatggccaacatcccacgcaagcacagcagggagcgaaagttccctcgctctgcgattagtgaacggcggggacagatgtcagggtcgggtagaggtcttgtacagagggtcatggggcaccgtctgcgacgactactgggatacaaatgacgcaaatgtggtctgccgccagctgggatgtggctgggctacatctgcacctgggaacgccaggttcgggcaaggcagtggtcctattgtactggacgacgtcaggtgctctggccatgaatcttatctctggtcttgtcctcataacgggtggctatcgcataattgtggccaccacgaggacgcaggagtgatatgttcggcgtcccagtctcagcctacaccaagtcccgatacctggcctacgtccagagccagcacggcaggtagcgaaagcacactcgctctgcgccttgtgaacggcggtgatagatgcaggggtcgcgtggaagtcctgtaccaggggtcctggggtacggtgtgtgatgactattgggatacaaacgatgctaatgtggtgtgcaggcagcttggttgtggttgggccatgtccgccccaggcaacgctcagtttggtcagggaagcggacctatcgtgttggacgacgtgagatgcagcgggcacgaatcgtacctgtggagctgtcctcacaacggttggttgagccacaattgcggacaccatgaggacgctggcgtcatatgttccgctgcgcagtcccagtcaactcctaggccagatacttggctaaccaccaacctcccagcactgaccgtaggcagcgagtctagccttgccctcagattggtgaacggcggagaccgctgcagaggccgggtcgaagtgttgtacaggggaagctggggcacagtttgtgatgactcctgggatacgaatgacgccaatgtcgtgtgtaggcaattgggatgcgggtgggccatgtccgctcccgggaatgctcgcttcgggcaagggagcggaccgattgtgctcgacgatgtgcgttgttctggaaatgaatcgtatctgtggagctgccctcacaagggttggctgacacacaactgcggccaccacgaagacgcaggggttatatgcagcgccactcagatcaacagtacaaccaccgattggtggcacccaactaccaccacgacggctagaccatcctctaactgtggtggcttcctgttctacgccagcggcaccttttcctccccctcttatcccgcgtactacccaaataacgcaaaatgcgtgtgggaaatcgaggttaatagtggctaccgaatcaacttaggcttctcaaacttgaagctggaggctcaccataactgcagcttcgattatgtggagatcttcgatggcagtttgaactcgagtctgcttttgggtaagatctgtaacgacactcgtcagatattcacatcatcttacaatcgtatgacgatccactttagatctgatattagttttcagaacactggttttctcgcttggtacaattcatttcctagcgatgctaccctgagactggtcaatctcaactcctcatatggactgtgtgccggccgcgtcgagatctaccacggagggacatgggggacagtgtgcgatgatagttggacaatccaggaggccgaggtggtctgtaggcagctcggatgcggccgcgctgtctctgcattgggtaacgcatacttcggtagcggaagtggacccatcaccttagatgatgtggaatgtagcggcacggaaagcaccttgtggcaatgtcggaaccgcggttggtttagccacaattgcaatcatagagaggatgctggcgtgatctgctctggtaaccacctctccactccggctccctttctaaacatcacaagacctaacacagactactcgtgcggggggttcttgagccaaccctccggtgacttttctagccctttttaccctggcaactaccccaataatgcaaaatgtgtgtgggacatcgaggttcagaataattatcgtgtgaccgtgattttccgggatgtccagctggagggggggtgcaattatgactatatcgaagtgttcgacggcccctacaggtccagtccgctgatcgcccgcgtgtgcgatggcgcccggggatctttcacctcttcctctaactttatgtctattcgatttatctctgaccactcgataaccagacgaggctttcgcgcagagtattactcgtcaccctcgaacgattcaacgaacctgttatgtctgcccaaccatatgcaggccagcgtgagcagatcttacctccagagcttagggtttagcgccagtgatttagtcatctccacctggaatggatactacgagtgccgtcctcagattactcccaacctcgttatcttcacaattccatattccgggtgcggcacattcaagcaggctgataacgacacgatcgactattcaaacttcttaaccgctgccgtgagtgggggcatcatcaaacgccgaacggatctgagaatccacgtaagttgccgtatgctgcagaacacatgggttgataccatgtacatcgcaaacgacactattcacgtggccaacaacactatacaggtagaggaggtgcagtacgggaattttgatgttaatatcagcttttacacctcctccagcttcttatatcccgtgacatccagaccttactacgtcgacctgaatcaggacttatatgtccaggctgaaattctacactcagatgctgtcttaacattatttgtggatacttgcgtggcctccccctattccaatgattttacatccctgacctacgatctcattagatccggttgtgttagagacgatacatatggaccatatagtagccctagtctgcgtattgcacggttccggtttcgagcctttcacttcttaaatcgattcccatctgtttacctcagatgcaaaatggttgtatgtagagcatacgacccgtctagccgttgctacaggggctgtgtgcttcggtctaaacgagatgttggctcttatcaagaaaaagtggacgtagtgctgggacctatccaattacaaaccccacccagacgagaggaggaacctaggtag

SEQ ID NO: 23851 - DNA, 7242 bp, synthetic construct
  misc_feature 1..7242: note = Description of Artificial Sequence: Synthetic coding sequence
  source 1..7242: mol_type = other DNA
atgggcatcagcaccgtgatcctggagatgtgcctgctgtggggccaggtgctaagtactgggggatggatccccagaacgacagattatgcctctctcatcccctctgaggtgcccctcgacccaactgttgctgaaggatctccattcccctcggaatcaacactggaatcgactgttgcagagggcagtcctatcagtctggagtctaccctcgaatctacagtggctgagggatcccttattccttctgagagtacccttgagagtaccgtggccgaaggctctgactccgggctggcactccgcttggtgaacggggatggccggtgccagggaagagtggaaatactgtaccgcgggagttggggtacagtgtgtgacgacagctgggataccaatgacgcaaatgtggtgtgccgacaactgggctgtggctgggccatgtctgcccctggaaacgcttggtttggccaaggctccgggcccatcgccctggacgacgttcggtgctccggacacgagtcttacctatggagctgcccacataatggctggctaagccacaactgcgggcatggcgaggacgcaggtgtaatctgtagcgccgcccaaccacaatccactctgcgtcccgagagctggcctgtgaggatttcccccccggtccccactgaaggaagcgaaagtagtctcgctttgcggctcgtaaatggcggcgacagatgtcggggcagagtagaagtgctgtaccgcggaagttgggggactgtgtgcgacgactactgggacaccaacgatgcaaacgtagtttgtcgccaactgggctgtggctgggccatgagcgccccggggaatgcccagtttgggcagggatcaggaccaatcgtgcttgatgatgtgcggtgttctggccacgaaagttacttgtggagttgtcctcacaacggctggctgacacataactgcggtcattccgaggatgccggagttatatgttctgcgccacagagtaggccaacaccaagtcctgacacttggcctaccagtcacgctagcaccgccggcccagagtcatctctggctttgaggctggtcaacggcggtgatcgttgtcaaggaagggtcgaggtgttgtacaggggctcctgggggacagtttgtgacgattcttgggatacaagcgatgccaacgttgtgtgcaggcagctggggtgcggctgggcgacaagtgccccaggtaatgcccgctttgggcagggtagcggtcctatcgtgctggacgacgtgcgctgcagcggctacgagtcttacctctggtcctgtccacacaacggctggctttcccacaattgtcaacactcggaggacgcaggggtaatctgtagcgccgctcacagctggtccaccccttcacctgatacactccctactataactctgccggcttctacggtcggatccgagagttccctagccctgaggttggtgaacggcggagatcgctgtcagggtcgggtcgaggtactgtaccgagggtcatggggtaccgtctgtgacgactcgtgggacactaacgatgcaaatgtggtgtgcagacagttagggtgtggctgggctatgctggctccaggaaatgcccggttcggacagggatccggccccatcgtcctggatgacgtgaggtgtagcggaaacgagtcatacctatggtcttgtcctcataatggctggctgtcacacaactgcggccacagcgaagatgcaggcgtgatctgctcaggccccgagtcatccttggcccttcggctggttaatgggggcgaccgctgccaaggaagagtcgaagtcctttatcggggatcctgggggactgtgtgtgatgattcctgggacaccaatgatgcaaatgtagtctgtagacaattaggctgcgggtgggctacctctgccccagggaatgcacgcttcggacagggcagcggccctatcgtccttgatgacgtcaggtgttccggacatgagagttatctgtggtcctgccccaacaatggttggctcagccataactgcgggcaccatgaagatgctggagtcatctgtagtgccgcgcagagcaggagtacccccagacctgacaccctgagcacaattacactccctccgagtactgtgggtagtgaatcatcactcactctgcggctggttaatggctctgaccgctgccagggcagggtggaggtgttatacagaggctcttggggcactgtttgtgatgactcatgggatacaaatgacgccaatgtcgtgtgcaggcagctcggttgtggctgggccactagcgcgcccggaaatgccaggttcggccagggatcaggacctatagtgctggacgatgtgcgttgtagcgggcatgaaagttacttgtggtcatgtccccacaacgggtggctgtcccacaattgtgggcaccacgaagatgcgggtgtcatttgtagtgtttcccagtccagaccaaccccatccccagacacatggccaaccagccacgcctcaacagccgggccagaatcttcactcgccttgcggttagttaacgggggcgaccgctgccaaggccgagtggaggtgctttatcgtgggtcctggggcaccgtctgcgatgatagctgggacacatccgacgcaaatgtggtttgccgacagttagggtgcggatgggccacctccgctccaggcaatgcaagatttgggcagggcagtggtccaatcgtactcgatgacgtccgttgctctgggtacgagtcttacctctggtcttgcccacacaacgggtggctgtcacataattgccagcactccgaggatgcaggagtgatctgttcagcggcccacagttggtcaacaccttcccccgacactctgccgacaatcaccctgccggccagcacagtgggatccgaatcgtccctcgccctgcgtttagtgaacgggggggaccgctgtcaaggaagagtggaagtgctctatcagggcagctggggcaccgtctgcgatgacagttgggatacgaacgacgcaaacgttgtctgcagacaactgggctgcggttgggccatgtctgcgccaggaaatgcacgttttggccagggatctggccccattgttcttgatgatgttaggtgttctggccatgagagctacctctggagctgtccacataatggatggctgtctcataattgcggacacagcgaagatgctggcgtcatctgcagcgctagccaatcccggcctacaccatcccccgatacgtggcctaccagccatgcaagcaccgcaggctccgagagcagcctggctctaagactcgtgaatggaggagatagatgccagggccgcgtggaagtactttaccgcggatcatggggaactgtttgcgacgattattgggacactaacgacgccaatgtggtgtgccgtcaactgggctgcggctgggctatgagcgcaccggggaacgcacgctttggacagggctcaggtcccatcgtgctggacgatgtcaggtgtagtgggcatgaatcgtatttgtggagttgtccacacaatgggtggctctcccacaattgtggccatcacgaagatgccggggtgatctgttctgctagccaatcccagcccactccctctcccgacacatggccgacttctcatgccagcacagctggatctgagagcagtctggccttaaggctggttaacggcggcgatcggtgccaggggcgagtcgaggtactctaccggggttcctgggggactgtgtgtgatgattattgggacactaatgatgccaatgtcgtgtgcaggcagctcggctgtgggtgggcaacctccgccccggggaatgcaagatttggacaagggagcgggcctatagtgctggacgatgtgcgatgctcaggtcatgagagctacctgtggtcatgccctcacaatgggtggttgtcccataactgtggacaccacgaggacgcaggtgtaatctgttctgcctctcagtcacagccaacccccagccctgacacctggcctacatctcacgcttctactgccggcagtgagtcttccctggctttgcgcttggtaaatggaggcgacaggtgtcagggacgagtggaggtgctgtaccgcggatcttggggcacggtttgcgacgattattgggataccaacgacgccaacgtcgtctgtagacagctgggctgcggttgggcgacatccgctcctggcaatgctcgctttggacagggatccggacccatagtactggacgatgtgcggtgcagtgggcatgagagttatctctggtcatgtccccataatggctggttatctcacaattgtggccatcatgaggacgccggggttatttgttccgcatcacagtctcaaccgactccttcacctgatacctggcctactagcagggcctctactgccggttccgagagcacactcgccttgagactggttaacggtggagacagatgtagaggcagagtagaagtcttgtatcaggggtcgtgggggacagtttgcgacgattactgggacacaaatgatgcaaatgtcgtgtgtagacaactcggatgcggatgggccatgagcgccccaggaaacgcgcaatttggccaaggaagtgggcctatcgtcctggatgacgttcggtgcagcgggcatgagtcctacctgtggtcctgtccacataacggctggctctcacacaattgcggccatcatgaggatgccggggtgatctgttctgccgcacaaagtcagtcaaccccacggcccgacacatggttgacaacaaatctgccagctctgaccgtagggtctgaatctagtctcgctctgaggctcgtcaatggtggagatcgatgcaggggcagggttgaggtcctctataggggaagctgggggacagtgtgcgacgattcctgggatacaaatgacgccaacgtggtttgtagacagctcggatgcggctgggcaatgagcgccccaggcaacgcgcgtttcggacaagggtctggaccgattgtgctggatgacgtgcgctgcagcggcaacgagagctacctgtggtcgtgccctcataaaggctggcttacgcacaactgtggccatcacgaggatgctggtgttatctgtagcgccactcagatcaactcgacaacaacagactggtggcatcccaccacaaccactacagccagacccagctcaaattgtggaggattcttgttctacgccagtggcactttctcatccccatcttatcctgcatactatccgaataacgcaaaatgcgtgtgggagattgaggtcaattccggctacaggattaatttgggcttttccaatttaaaattggaagctcatcataattgcagtttcgactacgtagagatttttgatggaagtttgaattccagcttgctgctgggcaaaatctgcaacgatacccggcagatttttacctcatcctacaataggatgaccattcacttccgaagcgacatctccttccaaaatactgggttcctggcgtggtacaactcctttccatctgatgctacattgcggctcgtgaatttgaactcatcctatggcctttgcgccggacgggtggaaatataccacggcggcacctggggcacagtgtgcgacgactcttggaccatccaggaggccgaggtggtgtgcaggcagttagggtgcggccgcgcagttagtgctttggggaatgcttacttcgggtctggtagtggacccataacgctggacgatgtagagtgtagcggcactgagagcaccctgtggcagtgcagaaaccgagggtggttctcacataactgcaaccatagagaggatgccggcgttatctgttctggaaaccacctgtcaacccctgcaccttttcttaacattacccggccgaacaccgactacagctgcggaggttttctgtcacagccaagtggagatttctccagcccattctatccaggaaactatcccaataatgcaaaatgtgtctgggatatcgaggtgcaaaacaactaccgggtcaccgtgattttcagggacgtccagctggaagggggatgtaactacgattacattgaagtgtttgacggcccctaccggtccagcccactgatcgctagagtgtgcgatggcgctagggggtcattcacgtcttcttccaattttatgtccatcaggtttatcagcgaccatagtatcacccggaggggatttcgtgcagagtattactcctccccaagtaacgattctactaacctgctatgcttgcctaatcatatgcaggcctccgtgtcaagaagctaccttcaatccctggggttctctgcctctgacctggttatcagcacgtggaacggatattacgaatgtaggcctcagattacccctaatctcgtcatctttactattccctattctgggtgcgggactttcaagcaagccgacaatgatactatcgattacagcaactttctgacagcggcagtgagtggcggaatcatcaagcgcagaacagacctgagaattcatgtgagctgtagaatgctgcaaaacacttgggtggatacaatgtacatcgcaaatgacaccattcacgtggccaataacactatccaagtagaggaagtgcagtacggcaatttcgatgttaacattagcttttacacaagcagctcatttctttaccccgtgacatcacgaccatattatgtcgatctgaatcaagatctgtacgtgcaagcggagatcttgcactcagacgcggtgctgacactgtttgtcgacacttgtgtggcatccccgtacagcaatgattttacaagcctgacatacgaccttatcagaagcggctgcgttagagacgatacttacggcccatattcttcaccgtcattgagaattgcccgttttaggtttcgagcgttccatttcctcaacaggttcccaagcgtatatctgcgctgcaaaatggtggtttgccgggcatatgatcctagttccaggtgctaccgcgggtgtgtcctcagatctaagcgcgatgtagggagctatcaggaaaaagtcgacgtcgtgttagggcccattcaactgcagacaccaccacggcgcgaagaggagccgaggtag

SEQ ID NO: 23852 - DNA, 7212 bp, synthetic construct
  misc_feature 1..7212: note = Description of Artificial Sequence: Synthetic coding sequence
  source 1..7212: mol_type = other DNA
atgggcatcagcaccgtgatcctggagatgtgcctgctgtggggccaagtgctcagcacaggtggttggattccaaggacaactgattacgcctcccttatacccagcgaggtccccctggaccctaccgtggccgaaggctctcctttccctagcgagtctactcttgagtccaccgtagccgaaggctcccccatatcattagagagcaccctagaatctaccgtcgctgaggggagcctgatcccttcagaatctaccctggagagcactgtggccgagggtagcgattctggcctggcgcttcggcttgtcaatggggacggacgctgccaggggagagtggagattctctaccgtggttcctggggaaccgtttgtgacgacagctgggacaccaacgacgctaatgttgtttgcaggcaattagggtgtggctgggcaatgtctgcgcccggtaatgcatggttcggacagggatccggaccaatcgccctggatgatgtcagatgctccggccacgagagttatctttggagctgtccccacaatggttggttgtcccataactgcgggcacggggaggatgcaggcgtgatctgctccgctgcgcagccccagagcactctaagaccagaatcctggccagttaggataagtccccccgtgcccaccgagggaagtgaaagcagcctggcccttcgactagtgaatggaggggatcgatgcaggggtcgcgtagaggtgctgtaccgagggtcctgggggacagtttgcgatgattattgggacacgaatgacgccaacgtagtctgtcggcagcttgggtgcgggtgggctatgagcgccccaggcaacgcccagtttgggcagggatccggtccaatagttctcgatgacgtcagatgtagtggacacgaatcatatctttggtcgtgtcctcataatggatggttaacccacaattgtggtcatagtgaggatgcaggggttatctgtagtgcgccacagtcaaggcctacgccatcacccgacacatggcctactagtcatgccagcaccgcaggaccagaaagttctctggctctgaggttagttaacggaggagatcgttgtcaaggccgcgtagaggtgctttatcgcggtagctggggtaccgtatgcgacgactcttgggacacgtccgacgccaacgtcgtatgtcgccagctcgggtgcggctgggccacttcagcgcctggcaacgccaggtttggacagggtagcgggcccatagtcctggatgatgtgagatgcagcggatacgagtcttacctttggtcttgccctcacaacgggtggctgtctcacaattgccaacattccgaagatgctggggttatctgcagtgacacattgcctacaataactctgcctgcttccactgtcgggagtgaatccagtttagctctacgactggtgaacggaggcgatcggtgtcaaggccgtgtggaagttctgtataggggcagttgggggaccgtctgcgacgactcttgggacactaacgatgcaaatgtcgtctgccggcagttgggatgcgggtgggccatgctcgccccaggaaatgcgcggttcggccaggggtcaggacctatcgtgttggacgacgtgaggtgtagtggcaacgaatcgtatttgtggagctgcccccacaatggctggctgagccacaactgcggtcactcagaggatgcaggtgtgatatgttccgggccagagtcttctctggctctccgcctggttaatggaggcgaccgctgccagggcagggtcgaagttttatatcgtggctcgtggggaacagtctgcgacgactcttgggatacgaatgacgccaacgtggtctgtcgccagctcggctgcgggtgggccacgtccgcccctggcaacgcacgctttggtcagggctcagggccgatcgtgctggatgatgtgagatgttctggccacgaaagttacctgtggtcatgtccaaataatggttggctgagtcacaactgcgggcatcatgaggacgccggtgttatttgctccgccgcgcagagccgatcgacccctcggcctgacactcttagtacaattacgctccctccctctacagtgggatctgagtcatctctgaccctgagacttgtgaacggcagcgataggtgccagggtagagttgaggtgctgtaccgcggcagttggggaacagtttgcgacgactcctgggatactaatgacgcaaatgtagtgtgtagacaactgggctgcggatgggctacctctgctcctggcaacgcccgttttggacaggggtcagggcctatcgtgctggacgatgtacgatgcagcggacacgaatcttatctatggtcgtgcccccataacggctggctaagccataattgtggtcaccacgaggatgccggggtaatatgtagcgtgtcgcagagcagaccaacaccatctcctgacacctggccaacctctcacgcttcaacagcagggccagagtctagtctggcccttaggctggttaatggtggcgatcgttgtcagggaagagtggaggtcctttatcggggtagctggggcacagtttgcgatgatagctgggatacaagtgacgccaatgttgtgtgccggcaactggggtgtgggtgggcaacgtccgcacccgggaacgctcggttcggccaagggagcggtcccatcgtccttgacgacgtgagatgttcaggctacgaaagctacctgtggtcctgtccgcacaatgggtggctctcacataattgccagcattcggaagacgccggagtgatctgcagcgcagctcattcctggtcgactccaagcccagacaccctgcccaccattactctgcctgctagtacggtgggcagtgagtcttccctggctcttagactagtgaacggcggcgacagatgtcaggggcgcgtagaggtgttgtatcagggcagctggggaaccgtctgcgacgattcgtgggacacaaatgacgccaatgtggtatgtcgacagcttggatgcggctgggccatgtctgcccctgggaacgcccggtttgggcagggctccggccctattgttctcgatgatgtgcggtgtagcgggcacgaatcctacctctggtcctgcccccacaatggatggctgagccacaattgtgggcacagcgaagacgccggagtcatttgcagtgcaagtcaatctcggcccacccccagtccggacacatggcccacctcacacgcctctacagccgggtccgagagctctcttgcactccgtttggttaacgggggggatagatgccagggcagggtggaggttctttacagagggtcctggggcaccgtgtgcgatgattattgggacaccaacgacgccaacgtcgtgtgcaggcagttgggttgtgggtgggccatgagcgctcccggcaacgcaagatttggccaggggtccggccctatcgtactagacgatgtccgatgctcaggtcacgaatcatacctatggtcatgcccccataacggctggctgagtcacaattgcgggcaccacgaggacgccggagtaatttgtagcgcaagtcagtcccagcccacgccctctcctgatacgtggcctaccagccatgccagcactgccgggtctgagtcctctttggcgttgaggctcgtcaacgggggcgatcggtgtcaaggaagagtggaagtgctgtaccggggctcgtggggcactgtttgcgacgactactgggataccaatgatgccaacgtagtgtgcaggcaacttggttgtggctgggcaacttcagctccaggaaacgctagatttggccaggggtccggccccatcgttctcgatgacgtgcgctgctcagggcacgaatcctacctatggtcatgtccacacaacggctggctcagccacaactgtggtcaccacgaagacgcgggagtgatctgttctgcctctcaaagccagcctacccccagcccagacacctggccaaccagccacgcaagtactgcaggctctgaaagcagcctcgcgctaagactagtaaatggtggagatcgctgccaaggccgcgtcgaggtactgtaccgcgggagctggggcactgtgtgtgacgattactgggacactaacgatgctaacgttgtgtgtcgccaactgggctgcggttgggccaccagtgctccaggaaacgcgagattcggccaaggatcaggccccatcgtcctggatgacgtcaggtgctctggccatgagagctacctgtggtcttgtccccacaatggctggctctcacataattgcggacaccacgaggatgcgggggtgatttgctcagcttctcagagccagcccaccccatccccagacacgtggcccaccagccgcgcgtcaacggctggctctgaatcaaccctcgcactcaggctggtcaacggaggcgatcggtgcaggggccgcgttgaagtattgtatcaaggctcctggggcactgtttgtgatgactactgggatacaaacgacgcaaatgtcgtttgtcgccagctcggatgtggatgggctatgtcagcccccggcaacgcgcagtttggccagggctctggccccatcgttctcgatgacgtaagatgtagcggccacgagagttatctctggtcctgcccacacaatggctggctgagtcacaattgcgggcaccacgaagatgcaggcgttatttgcagcgcagcacagtctcagagcacaccccgaccagatacctggctgacaacaaacttaccagcactaaccgtcggaagcgagtcctctctagccctgaggctggtcaatggaggcgacagatgtaggggaagagttgaagtgctctaccgcggatcgtggggcactgtttgtgatgactcttgggacacaaacgatgctaatgtggtgtgcaggcagcttggctgcgggtgggccatgtcggcccctgggaatgcccgattcggccaggggagcggccctattgttttagatgacgtcagatgtagtgggaacgagagttacttatggtcatgccctcacaagggttggcttacgcacaattgcggtcatcacgaagatgccggcgtgatttgctctgctactcagattaactccaccacaaccgactggtggcaccccaccaccaccacaacggctcggccatccagcaactgcgggggctttctattttatgctagcggtaccttcagctcaccttcctacccagcttactatccaaacaatgctaaatgtgtatgggagatcgaagtcaactccggctatcggattaatctgggttttagtaaccttaagctggaagcccatcacaattgcagctttgactacgttgaaatctttgatgggagcctgaacagtagcctgttactcggcaagatctgcaacgatacccgccaaattttcacttccagctataacaggatgaccattcactttcggtctgacatttccttccaaaacaccgggttcttagcatggtataatagcttcccatctgacgcaactttaagactggtgaatttgaacagtagttatggcctgtgcgcgggccgcgtggagatctatcacggtgggacgtgggggacggtgtgtgacgattcatggactatccaggaagctgaggtcgtgtgcagacaactgggctgtggaagagctgtttcggccctgggcaacgcctattttggttccggatccggccccatcacactagatgatgtggagtgtagcggaactgaaagtaccctgtggcagtgcagaaacaggggatggttcagccacaattgcaatcacagggaagacgccggggttatttgctctgggaaccacctgagtacacctgctccgttcttgaacatcacacgtcccaataccgactattcttgcggaggattcctctctcagccgagcggcgacttttcatccccattttaccctggtaattacccaaacaacgccaagtgtgtgtgggatatcgaggtgcagaacaactatcgcgtgacagtcatctttagggatgtacaactggaagggggctgcaactatgactacatagaggtgtttgacgggccttatcggtcttctcccctgatcgcaagagtttgcgatggagcgagagggtctttcactagttcatccaatttcatgagcatccgctttatttctgaccactcgataactcggcgaggctttcgcgctgagtactactcttcaccctccaacgatagcactaatctgctttgtctgcccaaccacatgcaggcttcagtgagccggtcttatctgcagagcctgggcttcagcgccagtgatctggtcatcagcacatggaacggctactatgagtgccggcctcaaatcacccccaacctcgtgatttttactataccctactcaggatgcggcacattcaagcaggcagataatgacaccatcgactacagtaacttcctgacagctgctgtctctgggggcattattaaaaggcggaccgacttgcgcattcacgtgtcgtgtcgcatgctccagaacacatgggtagacacaatgtatatagctaatgatacaattcacgtagcaaacaatacaatacaggtcgaagaagtgcagtacggtaatttcgacgtgaacatctctttttacactagctcctccttcctgtatccagtgaccagtaggccgtattacgtggacctaaaccaggatctgtatgtgcaggcagaaattctgcatagtgacgcagttttgactctgttcgtggatacctgcgtggcttccccctattctaatgacttcacctctctgacatacgaccttattagaagcgggtgcgtacgggacgatacatacggtccttattcttcaccctctctgagaattgcacgctttcgcttcagggctttccattttttgaataggttccccagtgtctacttgcggtgcaaaatggtcgtctgtagagcgtacgatccctctagtaggtgctatcgggggtgcgtgctccggtctaagcgtgatgttgggtcatatcaagaaaaagtggatgtggttctggggcctattcagctgcagactccccctaggcgcgaggaagaaccgcgttag

SEQ ID NO: 23853 - DNA, 1680 bp, synthetic construct
  misc_feature 1..1680: note = Description of Artificial Sequence: Synthetic coding sequence
  source 1..1680: mol_type = other DNA
atgaccatccacttccggagcgacatcagcttccagaacaccggcttcctggcttggtacaactcttttccctccgatgcaactctgcggctggtgaatttgaacagctcttacgggctctgtgcaggaagagtggagatctatcacggcgggacctggggaaccgtgtgtgacgatagctggactatccaggaggccgaggtcgtctgtcgacagctgggctgcggccgggccgtttccgccctaggaaacgcttactttgggagcgggtcaggtcctataacactggatgacgtcgaatgctcaggcactgaaagcaccctgtggcagtgccgcaatcggggatggttctctcataactgtaaccaccgagaggatgctggagtcatttgttctgggaaccacctgtcgaccccagcacccttcctaaatattaccagaccaaacactgattacagttgcgggggtttccttagccagccttccggagacttctccagtcctttctaccccggaaactacccaaacaacgctaaatgcgtctgggatattgaggtgcagaacaactaccgtgtgaccgtgatcttccgggacgtgcagcttgaggggggttgtaactacgactatattgaggttttcgacggaccttaccggagctcacccctgattgcacgagtgtgcgatggagctcgcggcagcttcacatcatcgtcaaactttatgagcattaggttcatctcagaccattccatcactaggcgcggatttcgcgctgaatactactcctctccaagcaacgacagcactaatttgttgtgccttcccaaccacatgcaggcctctgttagtcgaagctatttgcagagtcttgggttctcagcatctgatctagtgatttctacatggaacggttactacgaatgcagaccacagattacacccaacctggttatcttcactatcccctatagcggctgtgggacatttaagcaggcagacaacgacaccatagattattctaatttcctgacagccgccgtgtcaggtggaatcattaaacgaagaacggaccttaggatacatgtgagttgcaggatgctccaaaacacctgggtggatacgatgtatatcgctaatgacactattcatgtagcgaataacaccatacaggtagaagaggtccagtacggcaattttgacgtgaatatctccttctacactagctcatcctttttgtaccccgtgacatcacgtccctactatgtggatctgaaccaggatctgtatgttcaggcagagatcctgcacagcgatgcagtcttgacgctgttcgtagatacatgtgtggcttcaccgtactcaaacgattttacatcgcttacctacgacctgattcgctcagggtgtgtgcgcgacgatacgtacggcccgtattctagtcctagcctgcggattgcaaggtttcgctttcgcgcatttcacttcctgaatcggtttccgtctgtgtacttaagatgcaaaatggtggtttgccgggcctacgatcctagtagtagatgttataggggctgcgtgttgcgatccaaacgggacgtcgggtcctaccaggagaaggtggatgtcgtgttgggtccaattcagttgcaaactcccccacgtcgggaggaggaaccgcgttag

SEQ ID NO: 23854 - DNA, 3402 bp, synthetic construct
  misc_feature 1..3402: note = Description of Artificial Sequence: Synthetic coding sequence
  source 1..3402: mol_type = other DNA
atgggcatcagcaccgtgatcctggagatgtgcctgctgtggggccaagttctgtcgacaggcgggtggataccaaggacaacagattatgcctcattgattcccagcgaagtgcccttggaccccactgtcgcggaaggttcaccctttccctcagagagtacactggaaagcaccgtagcagaaggaagccccatctcactggaaagcaccctggagtctacagttgccgagggcagccttatcccttcggagagcacactggagtcaaccgttgccgaaggatccgatagtggcctcgcgcttcggctggttaacggtgatggccggtgtcagggtagagtggaaatcttatatcggggttcctggggcaccgtgtgcgacgactcctgggatacaaatgacgcaaatgtggtctgtcgacagctcggttgtggttgggccatgtccgcacctggcaacgcctggttcggccagggtagcgggcctatcgccttggatgacgttcgctgctctggccatgaatcgtatctgtggagctgcccacacaacggctggctctctcacaactgcggccacggcgaagacgctggcgtcatttgtagcgccccacagagtcgcccaaccccgagtcccgatacatggccaacatcccacgcttccaccgccggctcagaaagcagtctcgcgctcaggctcgtcaatgggggagataggtgtcagggtcgggtggaagtgttgtacagaggttcctggggtaccgtctgcgatgactactgggacaccaatgacgccaatgtggtttgtcgacaactgggatgcggatgggccacgagtgccccagggaacgcaagatttggacaaggtagcggccctatcgtcctggatgatgttcgctgctctggacatgagagctacttatggtcgtgtccgcataatggctggctgagccacaactgcggtcaccatgaggatgcgggcgttatttgtagcgccagtcagagccagccgacaccttccccggacacttggcctacctccagagcttccaccgctggcagtgagtccacattggctctgcgcttagtgaacggaggtgacaggtgccggggtcgtgtcgaagtactgtaccagggctcctgggggaccgtctgcgacgactactgggataccaatgatgcaaacgttgtgtgccgacaactggggtgcggatgggccatgtcagcccccggtaacgcccagttcggtcagggttccggccctatagtcttggatgatgttaggtgctccggccacgaaagttatctgtggtcatgcccacataacggctggcttagtcacaactgtggccatcacgaggatgcaggcgtgatctgtagtgctacacagattaacagcactactaccgattggtggcatcccaccaccaccacaacagcacggcctagttctaattgcgggggattcttgttctatgctagtggcacgttctcatcaccatcctatccggcttactaccccaataatgccaagtgtgtgtgggaaattgaggtgaatagcgggtacaggattaacctggggttttcaaacttgaagctcgaggcgcaccataactgtagttttgattacgtagagatcttcgatggcagtctgaattcttcgctgctgttgggaaagatctgtaacgacactaggcagatctttacatcaagttacaatcgcatgactattcactttcgcagcgacatctccttccagaatactggattcctggcctggtataacagcttcccaagcgatgccaccctccggttagtgaatctgaattcctcttacgggctctgtgccgggagggtcgaaatctaccatgggggtacctggggtactgtgtgtgatgacagttggaccattcaggaagcagaggtggtctgcagacagctcggatgtgggcgagccgtttcggcactcggcaacgcttatttcggctctggtagcggccccattactcttgatgatgtggagtgttctggtactgagagcaccctttggcaatgccgcaatcggggatggttctcacacaattgtaaccaccgggaagacgcaggcgtgatttgtagtggaaaccacctaagcacgcccgctccctttttgaatataacaagaccaaatacagattattcctgcggcggttttctttcgcagccttctggggattttagcagcccgttttaccccggaaactatcccaataatgctaaatgtgtgtgggatatcgaggttcagaacaactatcgcgtcaccgttatctttagggacgtgcagctggaaggcggttgtaactatgactatatcgaggtattcgacggcccatatagaagcagccccctgatcgcacgtgtttgtgatggggccaggggaagtttcaccagctcctctaatttcatgtctatccggtttatctctgaccattctataaccagaagaggcttccgggctgaatattattcaagcccatcaaatgactccacaaacctgctgtgtctgcctaatcacatgcaggcatccgtgtcaagaagttacttacagagcctggggttttccgcatccgaccttgtcatatctacctggaatggctattatgagtgccgtcctcagataacacctaacttggttatcttcactataccttactctggatgcggaacatttaagcaagcggacaatgacactatagactattctaacttcctgaccgcggccgtgagcggcgggatcatcaagcgtcgcaccgatttgcggatccatgtgtcttgtaggatgctgcagaatacttgggtggatacaatgtatatcgccaatgacacaatacatgtggcaaacaatacaatccaagtggaggaggtgcagtacggaaacttcgacgtcaacatttcattttatacctctagtagctttttgtacccagtcaccagccggccgtattatgtcgatctcaaccaagacctctacgtgcaagccgaaattctccactccgacgctgtgctgaccctgtttgtggatacctgtgtggcctccccatacagtaatgattttacttcgctgacctatgatcttatcagatccggttgtgtgcgcgacgacacatacgggccgtactctagtcccagtctgcgcattgcgagattcagattccgcgcatttcatttcttaaataggttcccctccgtatacctgaggtgtaaaatggtggtgtgccgggcttatgatccttcgagtcggtgttacagaggctgcgttcttcgttccaagcgagatgtgggtagttaccaggaaaaagtcgacgtcgtcctaggccccatccagttgcagacgcctcctaggagggaggaggaaccacggtag

SEQ ID NO: 23855 - DNA, 7242 bp, synthetic construct
  misc_feature 1..7242: note = Description of Artificial Sequence: Synthetic coding sequence
  source 1..7242: mol_type = other DNA
atgggcatcagcaccgtgatcctggagatgtgcctgctgtggggccaggtgctatctactggtggttggatcccccgcacaacagactacgcgtctctgatcccctccgaagtgccactggatcctactgtggcagaagggagccccttcccatcagagtccaccctggagtcaacagtcgccgaaggctccccaatctctttagagtcaaccctggaaagtaccgtggctgagggttcactgattccatctgaatctaccttggaatccacggttgccgaagggtctgatagcggactggcgctgagactggttaacggagatggtcgctgccagggccgggtggaaatactctatagaggatcctggggcacagtctgcgacgatagctgggacactaacgatgccaacgtagtctgtcgccagttgggatgtggatgggccatgtccgcccctggcaacgcctggtttggtcagggctccggccctattgcacttgacgacgtgcgatgtagcggccacgaaagctacttgtggagctgtccacataatggatggctttcacataactgcggacacggcgaggatgctggagtcatttgctccgcagctcagccacagtccaccctgcgccccgagtcgtggcccgtgagaatatccccccctgtccctaccgagggctctgaaagctcacttgcactgagactcgtgaacgggggagatagatgccggggccgggtagaggtcctatatcgaggcagctggggcaccgtgtgtgacgactattgggataccaatgacgccaacgtggtatgtagacagcttggttgcggatgggctatgagcgctccggggaatgcccagtttggccagggcagcggacccatagttctggatgatgttaggtgttccggacatgaaagctacctgtggagctgcccacacaatggttggttgacccacaactgcggacattctgaggatgctggggtcatttgttctgcacctcaatctcgaccaacccccagtccggacacttggcctacttcccatgctagcactgcagggcccgaaagcagcttggcacttcgattagtcaatgggggggataggtgccagggcagggtggaggtgttatatcgcggcagctggggcacagtgtgcgacgatagttgggatacctctgatgctaacgttgtatgccggcagttgggatgcgggtgggcgacctctgcccccggcaacgcccgattcggacaaggcagtgggcccattgtgctcgacgatgtccggtgtagcgggtacgaatcctacctgtggtcgtgcccccataacggttggctatcacacaactgccagcattccgaagacgccggagtgatctgctccgccgcacattcttggagcaccccctccccagacactctaccaacgatcactttgcctgctagtactgtgggatccgagagctccctggccctaaggctggtcaacggaggggaccgctgtcaagggagagtagaggttctgtatcgaggtagttgggggaccgtatgcgacgatagctgggacactaacgatgcaaacgtcgtttgtagacaactcgggtgtgggtgggcgatgctcgcccccgggaatgccaggttcggacaagggtccggccctatcgtgctggacgacgtcaggtgttctggcaatgagtcctatctgtggtcctgtcctcataatgggtggctgtcccacaactgcggacactccgaggacgccggcgttatatgttccggaccagagtcatccttggccctgcggctggtcaacgggggggacagatgccaggggagagttgaagttttgtaccgcgggtcatgggggacggtttgtgatgattcctgggacaccaacgacgcgaatgtagtgtgtcggcagctcggttgtgggtgggctactagcgcacctgggaacgctagatttggtcagggtagcggacccattgtcctagacgacgttcggtgctcaggacacgaaagctatctatggtcatgtccaaacaatgggtggctttctcacaattgcggccaccatgaggatgcaggcgtgatctgctcagccgcgcagtcacgcagcaccccacgtccagatactttatcgaccattacgttgccacccagcaccgttggttctgagagtagccttaccctcaggctggtcaacggatcggatcgctgtcagggaagggtcgaggtattgtaccgagggtcttgggggaccgtgtgcgacgactcgtgggataccaatgacgcaaacgtagtatgccggcaacttgggtgcgggtgggctacgtcagccccaggaaatgccaggttcgggcagggctcaggcccaatcgtcctggacgacgttcgctgcagtggtcacgagagttatctgtggtcctgtccccacaacggatggctgtcacacaactgtggccaccacgaggatgcaggtgtgatttgctcagtgtcccagtcacgccccacaccaagccccgacacctggcctacatctcacgcctctactgcaggccccgaatcgtcactggctcttagactggtcaacgggggcgatcgatgtcaagggagagtcgaggttctgtaccgaggctcctggggtaccgtctgcgatgactcatgggatacctccgacgcgaacgttgtgtgtagacaactgggatgcgggtgggcgacgtcagcccccgggaatgcaaggtttggacaggggagcgggcccatcgtgctggatgatgtgaggtgctctgggtacgagagctatttgtggagctgtcctcataacggatggttgtcccataactgtcagcacagcgaagacgctggcgtgatctgctctgcagcacatagctggtctaccccaagtcctgataccctgcctacgattacactgccagcatcaacagttggcagcgagagctccctggctctgaggctggtgaacggcggagaccggtgtcagggaagagttgaggtgctataccagggatcctgggggaccgtgtgcgacgactcctgggatacgaatgatgctaacgttgtctgccgacaactcggctgcggctgggcgatgagtgccccaggaaatgctcgctttgggcaggggagcggccctatcgtgctggacgacgtccggtgttccggacacgaatcatatctgtggagctgccctcacaacggatggctgtcacataattgcggtcactcagaggacgcaggggtcatatgcagcgcttctcaatcgagacccaccccatctccggatacctggcccacaagccacgcaagcaccgccggcagtgagtccagcctggctctgcgattggtcaatggaggggataggtgccagggaagagtggaggtcctttatcggggcagttggggaacagtgtgcgatgattactgggataccaatgacgcaaacgtagtgtgtaggcagcttggctgcggatgggccatgagtgcccccggaaacgcccggtttggtcagggcagcgggccgattgtcctcgacgatgtgagatgtagtggccatgaatcttatttatggagctgcccacataatggttggctgtcgcacaattgcgggcatcacgaggacgctggagttatatgctctgcttcccagagtcaacccactccgtcccctgatacctggccaacctcacatgctagtaccgcgggctcagaatcttctctggctctgcgcctggttaacggtggcgaccgatgtcagggaagagtggaggttctataccggggtagttgggggacagtgtgtgatgactactgggataccaatgatgctaacgtcgtatgtaggcagctcggctgcggatgggccacaagcgcaccagggaatgcccgtttcggacagggaagcggacccattgtcttggatgatgtgagatgcagcggtcatgagtcgtacctgtggtcctgcccacacaacggatggctttctcacaactgcggccaccacgaggacgcgggggtgatatgcagtgcatcacaatctcagcccacgccttcccctgacacctggcctacttcacacgcctcaacagccggttctgagtcaagccttgcccttcgtctggtcaacggcggcgacaggtgccaggggcgcgtcgaggtgctctaccgcggaagctggggaacagtgtgtgacgattattgggacaccaatgacgccaatgtggtgtgccgacagttggggtgcggatgggctacgtcagcacccgggaatgcaaggttcggacagggctccgggcctatcgttctcgacgatgtaaggtgctctggacatgagtcttacctttggtcctgtccacacaacggttggctgagccataactgtggtcaccacgaggatgctggagtcatatgtagcgcctcccagagtcagcccacccctagccccgatacctggcccacatctcgagcttctactgccggctcggagtctaccctagccttacgcctagtgaatggaggagatcgctgtcgaggcagagtcgaagttctctatcaggggtcttggggaacggtttgtgacgattattgggacaccaatgacgcaaatgtggtttgtaggcagctaggctgtggatgggcaatgtccgcacctggaaacgcacagtttggtcagggttccgggcctatcgttctagacgacgtcaggtgtagcggtcatgaatcctatctctggagttgccctcataatggttggctgtcgcacaattgtgggcatcatgaagacgctggtgtcatatgcagtgccgcccagagtcaaagtacaccccggcctgatacttggctgaccaccaacctgcccgccctgacagtgggttcggagtcctcccttgctttgaggctggttaacggaggagaccgctgtagaggtagggtcgaagtcctgtatagaggatcctggggtacggtgtgtgacgattcatgggatacaaatgacgccaacgtagtgtgccgtcagctgggttgtgggtgggccatgtcagccccagggaacgcgcgattcggtcaggggagcgggcctatcgtgctcgacgatgtgcggtgttcaggcaacgagtcctacctgtggtcttgcccccacaaaggatggctgacccacaattgcggacatcatgaggacgccggggtgatctgtagcgcaactcagattaactctactaccactgattggtggcaccccacaactacaaccactgcacgccccagctcaaattgtggtggttttctgttttacgccagtggaacattctcgtcaccgtcgtaccccgcttactatcctaacaacgccaaatgcgtgtgggagatcgaagtgaatagcggatatcgaatcaatctcggcttctccaaccttaagctggaggcgcaccacaattgttctttcgactatgtcgagattttcgacgggtccctaaattcctctctgttgttgggtaaaatctgtaatgacactaggcagatatttacttccagttacaataggatgaccatccattttcgctccgatataagttttcaaaatactggcttcctggcatggtacaatagtttcccgtcagatgccacgttaagactcgtcaacttgaatagcagctacggtctgtgcgccggtagagttgagatctaccatgggggtacctggggaaccgtgtgtgatgattcatggacaatccaggaggcggaagtggtgtgccgtcagctagggtgcgggcgggcagtgtcagctctgggtaatgcatactttggatccggaagcggacctatcacccttgatgatgttgagtgctctggcaccgagtcgactctgtggcagtgccgtaatagaggttggttcagccacaattgtaatcatagagaggatgcgggggtgatatgctcaggaaatcatctctctaccccagcccccttcctcaacatcactcgaccgaataccgactatagttgcggcggtttcctgtcccagccgagcggggacttttcctctcccttctatcccggaaattaccctaacaacgctaagtgtgtctgggacatagaagtgcagaacaattacagagttacggtcatctttagagatgtacagctcgaaggagggtgcaactatgattacatcgaggtttttgatggtccatacagatccagccctctgattgcacgagtttgcgatggcgcccgcgggagcttcacttctagctctaactttatgtccattcgttttatttccgatcatagtatcacccgacgaggatttagagccgagtattattcctctccatctaatgattccactaatctgctctgcctccctaatcatatgcaggccagtgtgagccgaagctacttgcagtcactgggtttctctgcttctgacctggtcatctcaacatggaacgggtactatgagtgccgaccacagattacccctaatttggtgatcttcaccattccttacagtggatgtggaacctttaaacaggctgataatgataccattgattattctaactttttaaccgcagctgttagcggtggcattatcaagcggcgcaccgatctgcgtattcacgttagttgtcgcatgctgcagaacacttgggttgacacgatgtatattgcaaatgacaccattcacgttgccaacaatactatacaggtggaggaggtgcagtatggcaactttgatgtcaacattagtttttatacatcctcaagtttcttgtatccagtcacctctcgtccttactacgtagacctcaaccaggacttatacgtccaggcagagatccttcattcagatgcggtactgacactgtttgtcgacacttgcgttgctagcccctatagcaatgacttcacttcactcacctacgaccttatacgctctgggtgcgtgagggacgatacctacgggccttatagctccccaagtctgcggattgcccgtttccgttttcgcgccttccacttcctgaatcgcttcccaagcgtctatttgcggtgcaaaatggtggtgtgcagggcatatgatccttcctccaggtgctatagggggtgcgtccttcgctctaaaagggatgttggttcttatcaggagaaggtggatgtggtcctgggccctatccagttgcagacccccccaagaagagaggaagagccgagatag

SEQ ID NO: 23856 - DNA, 7629 bp, synthetic construct
  misc_feature 1..7629: note = Description of Artificial Sequence: Synthetic coding sequence
  source 1..7629: mol_type = other DNA
atgggcatcagcaccgtgatcctggagatgtgcctgctgtggggccaagttctctccaccggaggatggattcctaggactaccgactacgcgagcttgattccctccgaggtgcccctcgacccgactgttgccgaggggtccccttttccgagtgaatcaactctcgagtccaccgtggcagagggatcaccaatatcattggaatcaacgctggaaagcacagtggctgaagggtctcttatcccaagcgaatctacacttgaaagtaccgtggcagaggggtctgatagcggtctggccttgagactcgtgaacggcgatggtaggtgccagggcagagtggaaatcctgtaccgcggttcatgggggaccgtgtgtgatgatagctgggacacaaacgacgctaacgtagtgtgcagacaactggggtgtggctgggcaatgtccgcacctggcaacgcgtggtttggtcagggcagcggacccattgcacttgacgacgtgcgatgttcagggcatgagtcctatctgtggagctgtccccacaatggatggttgtctcataattgtgggcacggagaggatgccggtgtgatatgctccgccgcgcagccacaatcgaccctacgccctgagagctggcccgtccgaatttcccctcctgtgccaactgagggtagcgagtctagcctagcccttagactagtcaatggaggggatcggtgcaggggaagagttgaggtgctgtatcgcggctcatggggaacagtatgcgacgactactgggatactaacgacgccaatgttgtgtgccgacagcttggatgcggctgggccatgagcgcgccaggcaacgcccagtttgggcagggctccggacctattgtgctggacgacgttaggtgcagcggccatgagagctacctgtggtcctgccctcacaatggatggctgacacataactgtggccacagcgaggatgccggggtgatttgtagcgcaccgcagtcccgccctacccccagcccggacacgtggcccacaagtcatgccagcactgcagggcctgagtcaagcctggccctccgcctggttaatggtggggatagatgccagggacgagttgaggttctgtaccgcggatcatggggtacagtgtgtgacgattcttgggatacctcggacgcgaacgtagtctgccgccaattgggctgcggttgggcgacgagcgcgcccggcaacgctcgctttggccagggcagcgggcctattgtgcttgacgatgtgcgctgttccggctacgaaagctatttatggagctgcccacataatggatggctgtcccacaattgtcagcactcggaggacgcgggagtcatttgcagtgccgcccactcctggtctacgccaagtcctgacaccctgccaacaatcacactccctgcgtctacagtcggtagtgaatcctctctggcccttagactcgtaaacggaggcgacagatgccagggacgggtcgaggttctgtatcgggggtcctggggaaccgtgtgcgacgactcatgggacacaaatgacgcaaatgttgtgtgccggcagctgggctgcggatgggcaatgctggctccgggcaacgcaaggtttggacaagggagcggccccatcgtgctggatgacgtcagatgctctggtaacgagagttacctttggtcgtgtccccataacggatggctatcgcataattgcggtcatagtgaagatgccggggtcatatgcagtggacccgagtccagcctcgctttgcggttggtaaacggaggtgacaggtgccagggtagggtggaggtcctgtatcgaggatcttggggcactgtttgcgatgactcatgggataccaatgacgctaatgtggtctgtagacagttaggatgcggctgggcaacgtctgctccagggaatgctcggttcggccaaggaagcggccctattgttctcgacgatgtgagatgctccggacatgagagttacctgtggagctgccccaacaacggctggctgtctcataattgcggtcatcatgaagatgctggggttatttgttctgcagcgcaatctcggagcaccccccggcccgataccctctccaccattacactccctccttctacagttggatcagaatcttctctgaccttgcgacttgtgaacggcagcgaccgatgtcagggacgtgtggaagtgctgtacaggggctcctgggggacagtctgtgacgattcttgggacaccaatgatgccaacgtcgtttgccgccagctcggatgtggatgggctacttctgcccccggcaacgccaggttcgggcagggctcagggccaatcgtgctggatgatgtgaggtgcagcggccatgagagctatctgtggtcctgcccgcataatggctggctgagccataactgcggccatcacgaggatgccggcgtaatttgcagcgtttcccagtccagaccgacgcccagccctgacacttggccgacctcacacgcgtcgaccgctgggccagaaagcagcctcgccctaagactggtgaatggcggtgataggtgtcaagggagggtcgaagtgctttatagaggctcttggggcaccgtctgtgacgactcctgggacacaagcgacgccaatgttgtatgtcgccagctcggctgcggatgggcaactagcgcccctgggaatgcaagatttggacaggggagtggcccaatcgtgcttgatgatgtgcgatgttctggatacgaatcctacttgtggagttgtccccacaatggatggctctcccacaattgccagcatagcgaggatgccggagtgatttgttctgccgcccattcatggtccacccctagcccagacacgctgccgactatcaccctaccagcctctacagtggggtcagaatcttctctagcactgcggttggtgaacgggggggaccgatgccagggtcgcgttgaggtactctatcagggatcctgggggactgtctgtgacgattcctgggacacgaatgatgccaatgtagtttgcaggcagttggggtgtgggtgggcgatgagcgctccaggcaatgctagatttggacaggggagtggtccaattgtgttagatgacgttagatgctctgggcacgaaagctatttatggtcctgtccacataacggctggcttagtcataattgcggccacagcgaggacgctggcgttatttgcagcgctagccagtcaagacctactccaagccctgatacttggccaaccagtcacgcctccactgcggggtccgagtcttcactggcactgcggctggtgaacggaggcgatcggtgtcagggccgggttgaagtcttgtaccgcgggagctggggaacagtctgtgacgattactgggataccaatgacgctaacgtagtgtgtcgccagcttgggtgtgggtgggccatgagcgcacctggaaacgcccgcttcggacaaggtagcggcccaattgtacttgacgatgtgagatgtagcgggcacgaatcctacctctggagctgcccacataacggctggctgagccataactgtgggcaccatgaggatgcaggggtcatctgttccgcctcacagtctcagcccacgccgagcccagatacatggcctacttctcacgcttcaaccgcagggagcgagtcttctctggcgctgcgcctggtcaacggtggggatcggtgccaaggcagggtcgaggtgctgtaccgcggctcatgggggaccgtctgtgatgactactgggacacaaacgacgccaacgtggtgtgtagacaactgggctgtggctgggcaacctctgctccagggaacgcaaggttcggtcaggggtcaggcccaatcgtgttggatgacgttagatgttcagggcacgagagctacctgtggagctgtccacataatgggtggctgagtcataactgcggtcatcatgaggatgccggggtcatttgctctgcatctcagagccagccgacccccagccccgacacatggcccacttctcatgcctctaccgctggcagcgaatcttctcttgcacttagactcgttaacggtggagatcgatgtcagggtcgagtggaggtattatatagaggctcttggggaacagtgtgcgatgattattgggacaccaacgacgctaacgtggtgtgtagacagttgggctgcgggtgggctacaagcgctccagggaatgcgcgattcgggcaaggcagtggaccaatcgttctggacgatgtgagatgctccggtcatgagtcatatttatggagctgtccacacaatggctggttgtcccacaattgcgggcatcacgaggacgcgggcgtcatatgtagtgcttctcagtcacagcccacacccagtcccgatacctggccgacgagccatgcctcaactgcaggttcagagagctctttagctctccggctggtcaatggcggagaccggtgtcagggtcgagtggaggtgctgtaccgcggaagctgggggactgtttgcgacgattactgggataccaacgacgccaacgttgtctgtcgacagctgggttgtggatgggctaccagcgccccagggaatgcacgcttcgggcaggggagcgggcctatcgtgctggacgatgttcgttgctcaggccacgaatcctatttgtggtcatgtccacacaatgggtggttgtcgcacaactgtggccaccacgaggacgccggagtcatctgtagtgcatctcagtctcaaccaaccccctcaccagacacttggcccacgtctcgggcgagtaccgcagggtcagaaagtacgcttgcgctacgcctggttaacggcggggacagatgcagaggccgcgtggaggtactatatcagggttcctggggtacggtgtgcgacgattactgggacactaacgatgccaacgtggtttgtcgacagctggggtgtggatgggctatgtccgctcccggaaatgcccagttcggtcaaggttctgggcccattgtgctggacgatgttagatgctcagggcacgagtcctacctttggagctgtcctcataacgggtggttaagtcataattgcggccatcatgaggacgctggagtgatctgcagtgccgcccaatcacagagtaccccaagaccggatacatggttgactaccaaccttcctgccctcaccgtggggtctgaatcatcgctggcactgaggttggttaacggcggtgaccgttgccgcggaagggtggaagtgctctaccggggctcttggggcactgtgtgtgatgactcatgggatacaaacgatgcaaatgtcgtgtgccgacaactagggtgcggctgggctatgagtgcacccggaaatgcacgctttggccagggcagcgggccaattgttcttgacgacgtgaggtgttcaggcaatgaatcatatctgtggtcttgcccacacaaaggttggctaacacacaattgcggacatcacgaagacgcgggggtgatatgttctgcaacacagatcaactcaacaaccaccgactggtggcaccctaccactaccacaaccgcccgtccgagttccaactgtgggggctttttgttctacgcctccggtacgttctcttcacctagctaccctgcttactatccgaataacgcaaagtgcgtgtgggagatcgaggtgaatagcggatacagaattaatttaggttttagcaatctgaagctggaagcccatcacaactgcagcttcgattacgttgaaatctttgacggctctttaaattccagcttactcctgggcaagatttgtaatgatacgcgacagatattcactagctcctacaatcggatgactattcactttaggagtgatattagctttcaaaatacaggatttttggcatggtataatagctttcctagcgacgccactctgagactggtgaacctgaacagctcctatggcctctgcgctgggcgcgtggaaatttatcacggaggcacttggggcacagtgtgcgacgactcatggaccatccaagaggctgaagttgtctgcaggcaattggggtgtggccgcgccgtctcggcactcggtaacgcctactttggctctgggtcagggcccatcacactggatgacgtcgaatgctccggaaccgagagcaccctctggcaatgtagaaatagagggtggttctcccacaactgcaatcacagggaagacgccggagtgatctgtagtggaaaccatctaagcactccagctcctttcctcaatatcacgagacccaacactgactatagctgcggaggattcctgagccagccttccggtgatttttcttcccctttctaccctggaaactatcctaataacgcgaaatgtgtctgggacatcgaggttcaaaacaactaccgtgtcactgtgattttcagggatgtacagctcgaaggcggctgcaactacgattatatcgaggtgtttgacgggccctataggtcatcacctctcatcgcaagggtctgtgacggcgcccggggctcctttacaagctccagcaatttcatgtccattagatttatctccgaccacagtatcaccagaagagggtttcgagctgagtattacagctcccctagcaatgattcgaccaatctactgtgtctacccaatcatatgcaagcaagtgtgagtcgtagctacttacagtccctggggttttcagcttctgatttagtcatcagcacatggaatgggtactacgaatgccgcccccagataactccaaacctggtcatcttcacaatcccctattctggctgtggtaccttcaagcaggcagacaacgataccattgactactccaacttcttaacagccgcagtctctggtgggataattaagagacggacagacctgaggattcatgtttcgtgtcgcatgttacagaacacatgggtggatacaatgtatatcgccaacgacaccatccacgtcgctaataatactatccaggtggaagaagtccagtatggtaattttgatgtaaatatctctttttataccagcagctcattcctctacccagtgacctcacgcccctactatgtcgacctcaaccaagatctttacgtgcaggctgaaatcttgcactctgacgcagtgttaacactgttcgtggatacatgcgtggccagtccctactctaacgacttcaccagtttgacctacgacttaattagaagcggatgcgttcgcgacgacacctatggcccctattcaagcccgtctctccgaatcgcacggttccggttccgggcttttcatttcttaaaccgctttccatctgtctacctgcgttgtaaaatggtggtgtgcagagcttatgacccctccagccgctgttaccgtggctgtgtcctccgatcaaagcgagacgttggctcttaccaggagaaggtggacgtcgtgctgggtcctatccagttgcagacacctccgagacgggaagaagaaccccgatag

SEQ ID NO: 23857 - DNA, 7239 bp, synthetic construct
  misc_feature 1..7239: note = Description of Artificial Sequence: Synthetic coding sequence
  source 1..7239: mol_type = other DNA
atgggcatcagcaccgtgatcctggagatgtgcctgctgtggggccaggtcctgtctactgggggttggataccccggaccaccgactatgcctcccttatcccctccgaggtacctcttgatcccactgtggctgagggcagtccctttccttcggagagcacactcgagtctaccgttgccgagggatccccaatctctctcgagtctactttagagagcactgtcgccgaggggagcctcatcccaagtgaatcaaccttggagtccacggtagcagagggttctgactcaggcctggcactgcgtctagtgaatggtgatggcaggtgtcagggcagggtcgagatcctttatcggggatcctggggtactgtttgtgatgactcttgggacaccaacgatgccaatgtggtctgtcggcagctggggtgcggatgggccatgagcgcccccggtaacgcttggtttggacagggttccggcccaatcgcactcgacgatgtgcggtgtagtgggcacgagtcttacctgtggtcttgccctcataacggatggttgtcccataattgtgggcatggggaggacgctggcgtgatttgctctgccgcccagccccagagcacgttgcggccagagagttggccagtgagaatcagcccacccgttccgacagagggcagcgagagctcactggctttgaggcttgtcaatgggggtgacaggtgtcggggccgcgttgaagtcctgtatcgcgggtcttggggcaccgtatgcgacgactattgggacaccaacgacgcgaacgtcgtgtgtcggcagctgggatgcggttgggctatgtccgctcccggaaatgcacagttcgggcagggctctggtcctattgttctagacgatgttcgttgctccggacatgaatcgtatctgtggtcttgccctcacaacggttggttgacccacaactgtggccactccgaagacgcgggagtgatttgcagtgccccccagtccaggccaactccttccccagacacatggcccacctctcatgcctccacagccggtcccgaatcttccctggcattgagattagtcaacggtggtgaccgttgtcaggggcgggtcgaagtgctgtacagaggctcttggggaacagtgtgcgacgattcatgggacacatccgacgcgaatgtcgtttgccgccagttgggttgcggatgggctactagcgcccctggcaatgctcgcttcggccagggatcgggccccatcgtgttagatgatgttcggtgcagtggatacgaatcctacctgtggagctgtcctcacaatggctggttgtcacataattgccaacactcagaagatgccggcgtaatctgctcagcagcccactcatggagcactccttcgccggatactctacccaccataacactgcccgctagcaccgtcggaagcgaatcaagtctggccttgcggctggtaaatggaggagataggtgccaggggcgggtagaagtgctgtatcggggatcatggggcactgtttgcgatgactcgtgggacactaatgacgcaaacgtggtttgccggcagctgggttgtggttgggctatgttggcacccggaaatgcgaggtttggacaaggctctgggcccattgttttggatgatgtgcgctgtagcggcaacgagagctacctgtggagttgtccccacaatggctggcttagtcacaattgcgggcactcagaggacgcaggagtgatttgcagtggccctgaatcttctctggctctgagacttgtgaatggcggcgaccgctgtcagggacgcgtggaggttctctaccggggttcctggggcacagtgtgcgacgactcttgggacacgaacgatgcgaatgttgtctgtaggcaactgggctgcgggtgggcgacatcggctcccgggaacgcacgctttggccagggctctggtccgatcgttcttgacgacgtgcggtgttctggacacgagagctatctttggtcctgtcctaataacggctggcttagccacaactgcgggcatcatgaagatgccggcgtgatctgttcagccgcccagtctaggagtactccacgcccagacacactgagcaccatcacactgccaccttcaaccgtggggtccgagtcctccctgaccctgagactggtcaatggaagtgacagatgtcagggcagagttgaagtgttataccggggcagctggggtaccgtgtgcgatgattcatgggatacaaacgacgccaatgtggtatgccgacagttaggctgcggatgggcaacctcagcgcccggcaacgcccggtttgggcaggggtccggccctatcgttctcgatgatgtgagatgtagcggacacgagagctacctatggagctgcccacataatggttggctaagtcacaattgtggacaccacgaggacgctggcgtaatctgtagcgtgtcacagagccgcccaaccccctcccccgatacttggcccacaagtcacgcctctaccgcagggccagaatcctcactcgctttacggctggttaacggtggagatcgctgccaaggtcgggttgaagtcctatatcggggtagctgggggaccgtctgcgatgactcctgggacacttccgacgcgaacgtcgtatgtcgtcagctgggctgcggctgggcaaccagtgcccctgggaacgcccgtttcggccagggtagcggcccaatcgtactcgatgatgtcaggtgctctgggtatgaatcatacctgtggagttgtccccataacggctggctgtcccacaattgtcagcactcggaagacgcaggtgtgatttgtagtgccgcacactcttggtctacaccctcaccagacactctgcccacaatcacattgcctgcatctactgtcggctctgaatcttctctcgctcttaggctggtgaatgggggggatcgttgtcagggtagagtcgaggttttgtatcaaggctcctggggtacagtgtgcgacgactcctgggatacaaatgatgccaacgtggtgtgccgacaactggggtgtggctgggcaatgtcagccccagggaacgcacggttcggtcaagggagcggcccaattgtgctggatgatgtgaggtgctccggacacgaatcatacttgtggagttgccctcacaatggctggttatcacacaattgcgggcatagcgaggacgcaggtgtgatctgctcggcctctcagtcccggcctaccccctcaccagatacgtggcccacaagtcacgcttcaactgcaggctctgagagtagcttggctctgcggctcgttaacggaggagataggtgtcagggaagagtggaggtgctgtatcgggggtcctggggaactgtatgcgatgattactgggacacgaacgacgcgaatgttgtttgccgccagcttggctgcggttgggccatgtctgctccgggaaacgctaggttcggccagggaagcggccccatcgtgctggacgacgtcaggtgtagtggacacgaaagctacttgtggtcgtgccctcacaatgggtggctcagccacaactgcggtcatcacgaagacgctggcgtgatttgttccgccagtcagtcacaaccgacccctagcccagacacgtggccaacttcacacgcctccacggctggcagcgagtctagcttagctcttcggctagttaatgggggcgatcggtgtcaagggcgagtggaggtgctgtacagaggcagctggggcactgtgtgtgatgactattgggacactaatgacgctaacgtggtttgcaggcaactggggtgtgggtgggcaacgagtgcccccggcaatgcccgtttcggccagggcagcgggcctatcgtccttgatgacgtgagatgcagcggacacgagtcttacctgtggagttgtccccacaacggctggctgtcccacaactgcgggcaccatgaggatgcgggagtaatctgttccgcctcacagagccaaccaacacctagcccagatacatggcccactagccacgctagcacagcaggcagtgagagcagcctggccctcaggctcgtaaatggtggcgaccgatgtcagggtcgtgtggaagtactttatagaggtagctggggcaccgtatgcgacgactactgggacaccaatgacgcaaatgtagtatgcaggcaactcggctgtggatgggcaacgagtgctcctggcaacgcccggttcggccaggggagcggtcctatcgtgctggatgacgtgagatgctctggacatgagagctatctctggagctgccctcataatggctggcttagtcacaactgcgggcaccatgaagacgctggtgtcatttgttccgcatcgcagtcacagcccactcctagccctgacacttggcctacctcacgggccagcacagctggatcagaatcgacgcttgccctcaggttagtgaacggcggcgatcgatgccgtggccgagtggaagtgctttatcagggtagctgggggacagtctgcgacgactattgggacactaacgatgcaaacgttgtgtgcaggcagttagggtgtggatgggccatgtctgctcctggtaatgcacagttcgggcagggaagcgggcccattgtgttagatgacgtgcgctgctccggccacgagagctacctctggagttgcccccacaatggctggctgagtcataattgtggccaccatgaggatgctggcgtcatctgcagcgccgcccaaagccagtcaacaccccgccccgacacctggttgacaaccaacctccctgcattgacagtgggttctgagtcctcccttgccctgcgtcttgttaatggaggagatcgatgcagaggacgggtggaagtgctttaccgtggatcttggggcaccgtctgcgatgattcatgggataccaatgacgcgaacgtagtgtgccgacagctcggttgcggctgggcaatgtcagcccccggtaatgcccgcttcggtcagggctccggccccatcgtccttgacgatgtgcggtgtagtggcaatgagagctacctgtggtcttgcccccataagggttggctgacgcataactgcggccaccatgaggacgcgggtgttatatgcagcgctactcagatcaatagcacaactacagactggtggcatcctacgaccaccacaaccgctagacccagctcaaattgcggcggctttttattctacgcctccgggaccttcagctctccttcatatcctgcatactaccctaacaatgccaagtgcgtctgggaaatcgaagtcaactccggatacaggatcaatctggggttctctaatctgaagctggaagctcaccacaattgctctttcgactatgttgagatctttgatggatccttgaatagttcattactacttggcaagatatgtaacgacacaaggcagatcttcacttcatcctacaaccgtatgactattcattttagaagcgacatcagcttccaaaacacaggcttcctcgcctggtacaatagcttccctagcgacgccacacttaggcttgtgaatctaaactcctcttacgggctgtgcgccggcagagtagagatctatcatgggggaacgtggggtacagtctgcgatgattcttggacaatccaagaggccgaagtggtgtgccgacagttggggtgtgggcgggctgtgtctgcccttggtaacgcgtactttggctctggatcgggacctatcaccctagacgatgtggagtgtagtggaaccgagagcactctgtggcaatgccgaaaccggggctggttttcccacaactgcaatcaccgcgaggatgcaggagtgatttgctcaggcaatcatctgtccacccctgctccctttcttaatataactcggccaaacaactactcctgcggcggatttttaagccagccgtctggggacttttccagtcccttctatcccggcaactaccctaataatgcaaaatgtgtctgggacatcgaagtccaaaataattatcgcgttaccgtgattttcagggacgtgcagctggagggcggctgcaactatgactacattgaggtattcgatggcccataccgcagcagtccactaatcgcccgtgtgtgtgatggcgcacgaggaagctttacatcatctagcaattttatgagcatccggttcatatcagaccattccatcacccgccggggttttcgcgccgagtactacagcagtcctagtaatgatagtacaaatcttctttgtcttcccaatcatatgcaggcaagtgtttccaggagctatcttcagagtctggggttctcagcctcagatctggttatcagtacatggaacggctactatgagtgccggccgcagatcacccctaacctggtgatcttcactataccatatagcgggtgtggcacattcaagcaggctgacaatgacacgattgactactcaaattttttaaccgcggccgtgtcaggtggcatcataaaaagaaggactgacctcagaattcatgtctcatgtcgaatgctacagaacacttgggtagacaccatgtacattgctaatgatactatccacgttgctaataatacaatccaggttgaggaagtgcagtacgggaattttgatgtcaatatctccttctacaccagttccagtttcctgtatccagtgacctccaggccatattacgtagaccttaatcaggacttgtacgtgcaggctgagattttacatagtgacgcggtgctgactctcttcgtggatacctgtgtcgccagcccctattctaatgactttacatcccttacgtatgacctgatcaggagcggatgtgttcgagacgacacatacgggccttatagctctccatctctgaggatcgctcgattccgtttcagagcattccactttctgaacaggttcccatccgtgtatctccgatgtaaaatggtggtgtgtcgggcatatgaccctagcagccgctgttacaggggatgcgtgttacggagtaaacgagacgtggggagttaccaggagaaggtggatgtggtccttgggcctatccaacttcaaacacctcctagaagggaggaagaaccgagatag

SEQ ID NO: 23858 - DNA, 7242 bp, synthetic construct
  misc_feature 1..7242: note = Description of Artificial Sequence: Synthetic coding sequence
  source 1..7242: mol_type = other DNA
atgggcatcagcaccgtgatcctggagatgtgcctgctgtggggccaggtgttgagcaccggcgggtggatcccgcgaaccactgactatgcttccttgattcccagcgaggttccccttgaccctacggtagcggagggctctccctttcctagtgaaagcacccttgagagcaccgtcgctgagggaagcccaattagcctggagtctactctcgagagcacggtcgccgaaggtagtcttataccttcagagtccacactcgagagcaccgttgcagagggttctgactccgggctggcactacggctggtgaacggagacggacggtgtcagggccgggtggaaatactgtaccgggggagttggggcacagtttgtgacgactcctgggacacgaacgacgccaacgtggtgtgtagacagttggggtgcgggtgggccatgagcgcgcccggcaacgcctggttcggtcagggctctggcccgatcgctctggatgatgtccgctgtagtggacatgagtcctacctgtggtcctgcccgcacaatggatggctgagtcataactgtgggcacggtgaagatgcgggtgtgatctgcagcgccgcacagccccaatccaccctgcgacccgagtcctggcccgtgcggatctccccgccagtgccaactgagggtagtgagtcttcacttgccctgcggctggtaaatgggggggacagatgtcgtgggagggtggaggtcctatatcgcggatcgtggggtactgtgtgcgacgactattgggatactaacgatgcaaacgtcgtgtgccgacaattaggctgcggttgggcaatgtcagcccctggaaatgcccaattcgggcagggcagtgggcccattgtgctggatgacgtccggtgctcggggcacgagtcttatctatggtcgtgtccccacaacggatggctgacacacaactgtggccattctgaggacgccggggttatctgttcagcgccacagagcagaccaactccctcgccggatacgtggccaactagccacgcgtctactgccggcccggagtcttcattagcactgcggttggtgaatggaggtgacaggtgccagggacgggtagaggtactatacaggggatcttgggggaccgtctgtgacgattcctgggacacctcagacgccaatgttgtttgtcggcagctgggctgtggatgggcaacctcagcgcctggtaacgctcgctttggacaggggtccggacctattgtcctcgacgacgtaagatgttccggttacgagagttatctgtggtcctgtccccacaacggttggctgtcccacaattgtcagcactcggaagatgccggcgtgatatgcagcgctgctcactcctggtcaacccctagtcctgatacacttccaaccattacgttaccagctagtaccgtgggctccgagagtagcctggccctgcgactggtcaacggcggagaccgctgccagggacgcgtggaagttttgtaccgcggatcctgggggacagtatgtgacgattcttgggacacaaacgacgccaatgtcgtttgcaggcagctgggatgcggatgggccatgctggccccaggaaacgctcgattcggacagggatcaggtcccatagtcctagatgacgttcgctgctctgggaatgaatcttacctttggtcttgtccacataatggatggctgagccacaactgcggtcacagtgaggatgccggggtgatctgcagcggccctgaaagcagcctagccctccgactggtcaatggcggcgacagatgtcaggggcgggtggaggtgctttatagaggatcctggggcaccgtgtgcgatgatagctgggatacgaacgatgctaacgtagtgtgccgacagctgggttgcggctgggccacaagtgcccctgggaacgctaggtttggtcagggttccggccctatagtgttggacgacgtacgatgttcaggccatgagtcttacttgtggagttgcccgaataacggctggctctcccacaactgcgggcaccacgaggacgcgggcgtaatttgttctgctgcacagtcccgttcaactccacggcctgatacattaagtacaataaccctccccccttctaccgttggcagtgagtcaagcttgacattgagactcgtgaacggatccgaccgctgccagggccgggtcgaagtcctgtatagaggctcttggggaacagtgtgtgacgacagctgggacacgaatgacgcaaacgtggtgtgcagacagttaggttgcgggtgggcaaccagtgcgccaggaaatgcaagattcggacaggggtctggcccaatcgtgctcgacgacgtgaggtgttctggacacgaatcttacctgtggtcctgcccccacaatggatggttgtctcacaactgcgggcatcacgaagacgccggtgtcatttgcagtgtgtcgcaatctcgccccactcctagtccagacacttggccgacaagccatgcttctaccgccgggcctgaatcgtcgctcgcactgcggctcgtaaatggaggcgacaggtgtcagggtcgcgtggaagtgctctaccgcgggagctggggcacagtatgcgacgattcttgggacacatctgatgctaacgtggtgtgtcgtcagctggggtgcggctgggcgacaagtgccccgggcaacgccagatttggtcagggcagcggcccaatagttctggatgatgtacggtgttcaggatacgagagctacttgtggtcctgtccacacaacggctggctttcccacaattgtcagcactctgaagatgcaggagtgatttgttctgccgctcacagttggtccaccccttcacctgatacactgcctacaatcacacttcctgcctctaccgtaggctcagagtcctccctggctctccgtttggtgaatggaggtgaccggtgtcaagggcgcgtggaggtgttgtaccaagggtcctgggggaccgtttgcgacgatagttgggacacgaacgatgctaatgtggtatgccgccaactgggctgcggctgggctatgtcagcacctggtaatgctcggtttggccagggcagtgggcccatcgttctggacgacgtgagatgctctggacacgaatcttacctgtggagctgcccgcataacggatggctctctcacaactgcggtcactccgaagatgctggcgttatctgttctgcgtcccagagtcggcctaccccttcccccgacacatggcctacctcccatgcttcaacggccggcagcgaatcctctttggcactcaggcttgtgaatggtggtgatagatgtcagggccgagtcgaggtgctctaccgaggcagctggggcactgtctgcgatgattattgggatacaaacgatgctaacgtggtctgtcggcagctgggatgtggttgggctatgagtgccccagggaacgcacgcttcgggcagggctcaggccctatcgtgttggatgacgtccgatgtagtgggcacgaaagttacctctggagttgcccccataatggatggctgagccataactgtggccatcatgaggacgctggggtgatctgttccgctagtcagtctcaacctacccctagccctgacacctggccgaccagtcacgcctctaccgcaggctctgaaagctctttggccctgagacttgtgaacggcggagaccggtgtcaaggtagggttgaagtcctttaccgaggaagctggggaaccgtctgcgacgactactgggacactaacgatgcaaacgtagtgtgccggcagctgggttgtgggtgggcaacaagcgccccgggcaacgcacggtttggccagggttctggcccgattgtgttagatgatgtccggtgttctggccacgaatcctacttgtggagctgcccacataacggttggttgtcacacaattgtgggcatcacgaggacgcaggggttatatgttccgctagccagagccagcccaccccaagcccagatacgtggccgacttcgcacgcttccacggctgggtcagaatcatccctggcccttagactcgtcaacggtggggatagatgccaaggtcgagttgaggttctgtaccgcggatcatggggtaccgtgtgtgatgactattgggatactaatgatgccaatgtcgtctgtcgccaactgggctgcggttgggccacaagcgcaccggggaatgcaagatttggtcagggatccggacccatcgtgttagacgacgtcaggtgctctggacatgagtcttacctgtggtcctgcccacacaatgggtggttgagccacaactgcggtcaccatgaggatgctggcgtaatctgctccgcatcacagtcacagcccacccccagcccagatacctggcctacgtcgagggctagcactgcaggatccgagagcacactcgcccttaggctggtcaatggcggcgataggtgccggggaagggtagaagtactctatcaaggatcctgggggacagtttgcgatgactattgggatactaacgacgccaacgtggtgtgcaggcagttgggctgcggttgggccatgtcagccccagggaacgctcaatttggacagggaagcgggcccatagttttggacgacgttaggtgctctggtcatgagtcttatctttggtcttgtccccataacggctggctgtcacataattgtggccaccatgaagatgccggtgtgatctgctccgccgcacagagccaaagcactcctcgaccagacacttggttaaccacaaacctgccagcactgacagtggggtcggaatcctcccttgccttgcggcttgtgaacggaggcgatcgatgtcgggggagagtggaggtcctttacagaggtagttggggaaccgtttgtgacgacagctgggacaccaacgatgccaacgtggtttgtagacaactggggtgtgggtgggcgatgtccgcccccgggaacgcccggttcggccagggctctggtcctatcgtcctggacgacgtgcggtgcagcgggaatgagagctacctttggtcatgtcctcataaggggtggctgacgcacaattgtggccaccatgaggacgctggtgttatatgctctgccacccagataaattccacaaccactgactggtggcaccctaccactactactacagcgaggcccagctcaaattgcggtggtttcttgttttacgccagcgggacattttcatccccttcatatcctgcctactaccccaataacgccaagtgtgtgtgggagattgaagtgaattctggataccgaatcaatctgggcttctcgaatctgaagttggaagcgcaccataactgctctttcgactacgtggagatatttgacggatccctgaattcctcgcttctcctggggaaaatttgcaacgacacacggcaaatctttacgagctcttacaataggatgacaattcacttcaggtcagatatctccttccagaataccggattcttggcttggtacaactcatttccaagcgacgcaactctgaggttggtcaacctcaattcctcttacggtctgtgcgcgggccgagtcgagatctatcatggtggaacgtgggggacggtgtgtgatgattcctggaccattcaggaggccgaagtggtatgccgccaattaggttgcggtagagccgtgtctgcactcggaaatgcttacttcggctccggcagcggaccgattacactcgatgacgtagagtgctccggcacagagtccacgttgtggcagtgtaggaatcggggctggttttctcacaactgtaatcatcgggaggacgctggcgtgatttgttccggaaatcacctttcgacgcccgctccatttttgaatatcacccgaccgaacaccgactactcttgcggtggctttctgtcccaaccatccggggacttctcatcaccattttatcccgggaattaccctaacaatgccaagtgtgtctgggacatcgaggtgcagaataactatagggtgacagtgatctttcgcgacgtacagctggaaggaggctgcaactacgattacatcgaagtttttgacggtccctacaggagctcccctcttatcgctcgtgtgtgcgatggcgctcgcggtagctttacatctagcagtaattttatgtctattagatttatttcagatcacagcatcacccgtagggggttcagggctgaatactacagttcaccttccaatgattccacgaacctcctgtgcctacccaaccacatgcaagcctcggtcagccgatcatacttgcaatccctcggcttctcagcctccgacctcgtcatttcaacctggaacggctactatgagtgtagaccacagatcactcctaatctggtcatctttactatcccctatagcgggtgcgggacatttaaacaagccgacaatgacacgatcgactattctaactttctgaccgcggcagtgagtggagggatcataaagcgcaggacagatctgcgcatccatgtgtcatgcaggatgctccagaatacttgggttgatactatgtacattgccaatgacacgatccatgttgcaaacaacactattcaggtggaggaagtgcagtacggcaacttcgacgtgaacatcagcttttacacgtcatccagtttcctgtacccggtgacaagcagaccctactatgtggacctgaatcaagatctgtacgtgcaggctgagattctacactccgatgccgtcctgacactctttgtcgacacctgcgtggcctccccttacagcaacgatttcacctctttgacctacgatctgatccgatcaggctgtgtccgcgatgatacatacgggccatactcctcaccttctctccgtatcgccagattccgcttcagggcatttcatttcctgaacagattccctagtgtctacctgaggtgcaagatggtcgtatgccgtgcatacgatccaagcagtcgctgctaccgcggctgcgttctgagaagcaaacgcgacgtcggctcctaccaagaaaaggtcgacgtggtcctcggacccatccagctacagacaccgccgcgaagggaagaggaacctagatag

SEQ ID NO: 23859 - DNA, 7212 bp, synthetic construct
  misc_feature 1..7212: note = Description of Artificial Sequence: Synthetic coding sequence
  source 1..7212: mol_type = other DNA
atgggcatcagcaccgtgatcctggagatgtgcctgctgtggggccaggttctgagcaccggaggatggatcccccgcactacagactatgcctccctgattcctagcgaggtgcctctcgatcccacggtggcggagggcagcccgttcccaagtgagtcaactttggagagcactgtggcagagggaagccccatctccctagaaagcaccctggagtcaacagtcgctgaggggagtctcatcccgtccgagtcgacactggagagcacagtggctgagggatctgattctggactcgctttgcggctggtgaacggggacggacggtgccaggggagagtagagatcctgtatcgaggaagctggggaacggtctgtgacgactcctgggacaccaatgacgccaatgttgtctgcagacagctgggctgtgggtgggcaatgagcgcgccaggcaacgcgtggtttggccaaggctccggccctatagccctcgacgacgtgagatgcagtggacacgaaagttatttgtggtcatgtccccacaacggatggctgtcccataactgtgggcatggggaggacgccggggttatttgctctgctgcgcaaccccagtcaacactccgacccgaatcatggcccgtacgcatctctccgcctgtccctacagagggaagtgagtccagcttggcactgagattggtcaacggaggggatcgatgtcggggaagggtggaagtgctgtaccgagggagttggggaacagtgtgcgacgattattgggacactaacgatgcaaatgtcgtgtgtcggcagttgggttgcggctgggccatgagcgccccaggaaatgcgcagtttggccaaggaagtgggcccatcgtgctggacgatgtgagatgctccggtcacgaatcatatctttggagttgtccacacaatggctggcttacccacaactgcggccactctgaagatgcaggtgtgatttgtagtgctccacaaagtcggcccacccctagcccagacacctggcccactagccacgccagtacggcggggccagagtcttcacttgccctccgtcttgttaacggtggcgaccggtgccagggtcgcgtggaggtgctgtaccggggctcatggggaacagtgtgtgacgactcctgggatacctctgacgcgaacgtagtatgtcgccaattaggctgcggatgggccacatcggccccaggcaacgctcgctttggacaggggtctggtcccatcgtgctcgatgatgtgcgatgcagcggttatgaatcctacctgtggtcttgcccccacaacggttggctttcccataattgtcaacattccgaggacgcgggcgttatctgttctgacacactccctaccattacacttccggccagcacagttggctcagaatcttccctggctctccgactggtgaacggcggggataggtgtcaaggccgggtggaggtgctgtatcggggatcttggggaactgtgtgcgacgactcctgggatacaaacgacgccaatgtagtctgtcgccaactggggtgcgggtgggctatgctagcacctggcaatgcgaggtttggccagggttcaggcccaatcgtgctggacgatgtgagatgttctgggaacgagtcctatctatggagttgtcctcacaatggttggctctcgcataactgtggccattcagaagatgcaggtgtaatttgttctggaccagaatcttcactagcactgcggctggtgaacggcggggatcgttgtcaagggcgagttgaggtactctatcgaggcagctgggggactgtgtgtgatgactcatgggataccaatgacgcaaacgtcgtgtgtcggcaattaggatgtggttgggctacgtcagcccctggaaatgcccgtttcggccagggctccgggcccatcgtcttagatgatgttcggtgctcaggccatgagtcctatttgtggtcgtgccctaataacgggtggttgagtcataactgcggccatcacgaagacgccggcgttatttgttccgccgcccagagccgcagtaccccccgacctgataccctcagtactataacgctacccccttctacggttgggagtgaatcgtctcttactttacgacttgtgaatggctcagatcgttgccagggacgagttgaggtgctatacagagggtcatgggggaccgtttgtgatgatagttgggataccaacgacgctaatgtcgtatgtaggcaattaggctgtggttgggcaacaagtgcgccaggcaacgccaggtttggtcagggctcaggcccgatcgtgctggacgatgtgagatgcagtggacatgaaagctatctctggtcctgtccccacaacggttggcttagccataattgtgggcaccacgaggacgcaggagtaatatgctctgttagtcaatcccgtccaactccctctcccgatacctggccaacttcccacgcaagcacagctggccctgagagcagtctggctttgcggcttgtgaatggaggagacaggtgccaggggcgggtagaggtgttgtataggggctcatggggaacagtgtgcgatgactcttgggacacaagtgatgctaatgtggtgtgccgccagctgggatgtggctgggcaacatcagcacccggcaacgcccggttcgggcaggggtctggtccaatagtgctggacgatgttaggtgctccgggtatgaatcctatctgtggagttgcccacataacgggtggctgagtcataattgccaacacagcgaggatgctggtgtgatatgctcggctgcgcacagttggtccactccatcaccagacacactgcctactatcactttgccagcaagcaccgtggggtccgaaagctctctggctctgcgtttagtgaacggcggagaccgatgccagggtcgagtggaggtgctttaccaaggatcttggggaacagtatgcgacgattcgtgggacaccaacgatgcaaacgtggtgtgcaggcagcttgggtgtggttgggccatgagtgccccgggcaatgccagattcggccagggctcaggaccaattgtgctagatgatgtcagatgttctgggcacgaatcttacttgtggtcatgtccacacaatggctggctctcacataattgcggacacagcgaagacgccggagtgatttgttcagctagccagtcgagacctacccccagtccggatacgtggcctaccagccatgctagtacggccggaagtgagagctccttagcgttacggttggtgaacgggggggatcggtgccaggggagggtggaggtgctctacagagggagttggggcacagtatgcgatgactactgggacaccaacgacgccaacgtagtctgccgccagctgggctgcggttgggctatgtctgcccctggtaacgcacggtttggacaggggagcgggcctatcgtgttggatgatgtgaggtgcagcggccatgagagctacctttggtcatgtccccataacggttggctttcgcataattgtgggcatcacgaagacgccggcgtgatttgcagcgcctcacaaagccagccaacacctagtccagatacgtggcctacttcgcacgctagtaccgccggcagcgaaagcagcctggctctgcgactagtaaacgggggtgaccgctgccagggcagagttgaagtactgtaccgcggtagctggggtactgtgtgtgatgattactgggacacgaatgacgccaacgttgtttgtaggcagctgggatgtggctgggctacttctgcccccggtaatgcaaggttcggacaaggctctggccccattgtactcgacgatgttcggtgctctggccacgagtcttatctgtggtcttgtccccataacgggtggttgtctcacaactgcgggcatcatgaggacgctggcgtgatctgttctgccagtcagagccagcctaccccctcaccggatacgtggccaacttcacacgccagcacggccggctcggagtcctctttggcactaagactggtgaacggcggagaccgctgtcagggaagagtggaagtcttatacagaggctcttggggaaccgtgtgtgatgactattgggataccaatgacgctaatgtagtgtgcagacaacttggatgcgggtgggctacatccgcccccgggaacgcacgtttcgggcagggctctggtccgatagtgctggatgatgtgaggtgctccggacacgaatcctatctgtggagttgtccacacaatggctggctgtcacataattgcggccaccatgaagacgccggtgtgatctgtagcgcaagtcagtctcagccaaccccttcacctgatacatggcccacctcacgggctagtactgccggctccgaatcaacactcgctctacgcctggtgaacgggggggaccgttgcaggggccgagtggaggtgctgtatcagggcagctggggtaccgtgtgcgacgactactgggacacaaacgatgccaatgttgtgtgcagacagcttggttgcggctgggctatgagcgcccccggcaatgcgcagtttggccaagggagtggaccaattgtgttggacgatgtgcgttgttcgggtcacgagtcctatctttggtcctgcccccacaatggctggttatcccacaactgtggtcaccacgaggacgcgggcgttatttgtagtgccgctcagtcccagtcaacccctcgacccgacacttggttgactacgaatttacctgcgctcacagtcggatctgaaagtagcctggctctaagacttgtcaacggaggggatcgctgtcgcggcagggtagaagtgctgtataggggatcttggggcacagtctgcgatgactcctgggataccaatgacgccaatgtcgtttgccggcaacttggatgtgggtgggcaatgagtgccccagggaacgcccgcttcggccaaggcagcggtcccatagtcctggatgacgtacgctgctcaggcaatgagtcttacctgtggagctgcccccacaaaggctggctgacacataactgcggacatcacgaagatgcaggcgtaatctgctcggcaactcaaattaatagcacaacgaccgattggtggcatcctaccaccactacgacagcccggccttccagtaattgtggcggatttctcttttatgccagcggcaccttttcttcaccgtcatacccagcgtattacccaaataatgccaagtgcgtgtgggagatcgaggttaacagtggatacagaattaacttgggtttttcaaatctcaagctggaggcacatcataactgctcatttgactacgtggagatattcgatggcagtctgaacagcagcctgcttctcggcaaaatctgcaacgacacacggcagatcttcacctccagctacaaccggatgactatccacttcaggtctgatatctctttccagaataccggcttcctcgcctggtacaattccttcccaagcgatgctacactgcgactggtaaatctcaacagtagttacggactatgtgcaggaagagtcgagatttatcatggcggcacgtgggggacagtgtgcgacgattcctggaccattcaggaagctgaggtcgtgtgtagacagttgggctgcggccgagccgtaagcgctctgggcaacgcatattttggctctggctctggcccaatcacgttggacgacgttgaatgctcaggaaccgagtcaactctttggcagtgcagaaatagaggctggttctcccataactgcaaccaccgcgaagacgccggcgttatctgctctggtaatcacctctccacccctgccccttttctcaacatcaccagaccgaacaccgattactcttgtggaggcttcctgtcccagcctagtggagacttctctagccccttttaccccggaaactaccctaataatgcaaagtgtgtctgggacattgaagtccaaaataactaccgtgtgacagtgatttttagagacgttcagctggagggcggatgtaactacgattatatagaggtgttcgacgggccttacaggtcctctcctctgattgccagagtttgcgacggcgctagagggtcctttacctcgtccagcaattttatgtcgatccggttcatctctgatcactctatcactagacgaggtttcagagctgaatactattcctccccctctaacgattctacaaacttgctgtgcctgcccaaccacatgcaggcatccgtgagccggtcctatctgcagtccttgggcttttcagcctccgatttagtcatctctacttggaacggttattacgaatgtcgcccccagatcaccccaaaccttgtcatcttcacaatcccgtactctgggtgtggcacctttaaacaggccgacaacgataccatcgattatagcaactttttgacggcggccgtttcaggcgggatcatcaagcggaggacagacctgcgcatacacgtatcttgtcgaatgcttcagaatacttgggtcgatacgatgtatatagcgaacgacaccatccatgttgccaataacactatacaagttgaggaagtccagtatggaaattttgatgtgaatattagcttttatacatctagtagttttctttaccccgtcacctctcgaccctactacgtcgacttgaatcaggacctttatgtccaggccgagattctgcactccgacgctgtgcttacactcttcgtggatacttgtgtggccagcccatatagtaatgacttcacctccttgacgtacgatctaattcgatctggctgcgtgagagacgatacttatggtccttactcttctccttcgctgcgcattgctcgcttccggtttagagctttccactttctgaatcggtttccatccgtttatttacggtgcaaaatggtggtgtgcagggcatatgacccttcaagcaggtgctacaggggctgcgtattgaggtccaaacgagatgtggggagctatcaggagaaggtagatgttgtgttaggccctatccaacttcagacaccaccacgacgggaagaggagcctcggtag

SEQ ID NO: 23860 - DNA, 5358 bp, synthetic construct
  misc_feature 1..5358: note = Description of Artificial Sequence: Synthetic coding sequence
  source 1..5358: mol_type = other DNA
atgggcatcagcaccgtgatcctggagatgtgcctgctgtggggccaggtcttatccacaggtggatggatcccgcgcacaaccgattacgctagcttgatcccatcggaggtgcccctcgatccaactgtcgcagaaggaagcccatttccctctgagagtacactggagtcaacggtcgcggaaggtagtccaatatccctagaaagcaccctcgagagcacagtcgccgaaggcagtcttataccaagtgagagcaccctcgaatccactgtcgccgaaggtagcgattcaggacttgcgctcagattggtcaacggagacggcaggtgtcagggcagggtggagatactataccgcggctcttggggaacagtgtgcgacgattcctgggacactaacgatgcaaatgtagtatgtaggcaattaggatgtgggtgggcaatgtctgcccctgggaacgcatggttcggccagggatccggccctatagcccttgatgacgtgcgttgttccggccatgaatcatacctgtggtcctgtccccacaatgggtggctgagccacaactgtgggcacggggaagacgctggcgtgatttgtagcgccgcccagccccagtccactttgcggcccgaatcatggcctgtgcgcattagccctcctgtacccaccgagggcagcgagtcgtctttagccctcagactcgttaatggaggtgacaggtgcagaggacgcgttgaagtgctttaccgagggagttgggggacagtttgtgatgattattgggatacaaatgatgcgaacgtggtgtgtagacagctcggatgcggctgggcaatgagcgctcctggaaacgcccaatttggccagggtagcggtcccatcgttttagacgacgttaggtgtagtggccatgagtcatatctgtggtcctgcccacacaatggctggctgactcataattgtgggcactctgaggacgccggcgtgatttgtagcgcgccgcaaagtaggcctactcccagcccagatacttggccgacatctcatgctagcaccgctgggcccgagtcaagcctcgcgcttaggctcgtaaatgggggcgataggtgtcaggggcgggttgaggtactttatcggggatcctgggggacagtttgcgacgactcttgggatacttccgatgcaaatgtcgtgtgtagacaacttggttgcgggtgggccacgtcagcccccgggaatgcccgttttggacaagggtccggcccaatcgtgttagatgacgtccgatgctctggctatgaaagctatttgtggtcctgtcctcataacggatggttatctcacaactgtcaacacagcgaggacgctggcgtgatttgtagcgccgcccactcttggtcaacaccctctccagatacactccctacaataacgctccctgcttcaacggtgggctcggagagctcgcttgctctgaggctggtcaatgggggcgatcgctgccaagggagggtggaggtcctgtatcaaggatcctggggcaccgtctgtgatgattcctgggatactaacgacgcgaacgtggtttgccgacagctggggtgcggatgggccatgagcgcacccggaaatgccaggtttgggcagggctctggtccaatcgtgctcgacgatgtcagatgctctgggcacgagtcatatctttggtcgtgcccgcataacggctggctgagccataactgtggtcatagcgaggacgccggagtgatctgttccgcctctcaatcgcgccccacccctagtccagacacctggcccacctcacacgcctccacagcaggatctgagagctctctagctcttagactcgtcaacggcggggatcgctgtcagggccgagtggaggtgctgtaccgtgggagctggggaacagtctgcgacgactactgggacacaaatgatgctaacgtggtctgtagacagctgggatgtggttgggcaatgagcgctcccggcaacgcacggtttggtcaggggtccggacctatagtgctggatgatgttcgctgcagcgggcacgaaagctacctttggtcctgccctcacaacggctggctgtcccacaattgtggacatcatgaggatgcaggggtaatatgctccgcttcgcagtctcagccaacgccatcacctgacacttggccaactagtcacgcttccacagccggctcggagagtagcctcgccctccgtttggttaacggaggcgaccgttgccagggcagagtggaagtgctgtatagagggtcttggggtaccgtgtgcgatgattactgggacactaacgacgcaaatgttgtgtgtcgccaattgggatgcggctgggcaacctcagccccaggcaatgctcggttcggccagggttcaggacccatcgtcctggacgacgtccggtgctctgggcatgaaagctacttgtggagttgcccacacaacggatggttgtcccataattgtggccatcacgaagatgcaggggtaatttgcagcgccagtcaaagtcagccaaccccgagcccagacacctggccaacatccagagcgagcaccgccggttccgagtctaccctcgcgctccggctggtcaatggaggagataggtgccggggcagagtcgaagtgctttaccagggttcttgggggactgtatgtgatgactattgggacacaaacgacgctaatgtggtgtgccgccagcttggttgtgggtgggcaatgtccgcccccgggaacgctcagtttggccaagggtctggacctattgttttggatgatgttcgctgctcgggccacgaaagctatctgtggtcatgtccgcacaatgggtggttaagccacaactgtgggcaccacgaagatgctggcgttatttgctcagcggcacaaagccagtccacacctcgacctgacacatggttaacaacaaatttgcccgccctaacggttgggtctgaaagtagtctggctctgcgcctggtcaatggcggcgaccggtgtcgaggccgcgtggaggtgctgtaccgcgggtcttggggtaccgtgtgcgatgacagttgggacactaatgatgctaacgtggtatgccgtcagctgggttgcggctgggccatgagcgcccccggcaacgccaggttcgggcagggctctggtcctattgtgttggacgacgtgcgctgcagtggtaatgagagctacctgtggtcttgtcctcacaaaggctggctgacacataattgcggccatcatgaggatgctggcgttatctgtagcgctactcagatcaattctaccactacggattggtggcaccccactaccacgaccaccgcccgcccctcctcgaactgcgggggctttctattctacgcatccggcaccttttccagcccctcgtatccagcctactaccccaataacgcaaagtgcgtctgggagattgaggtgaactccggatacaggataaacttggggttctccaacctcaagttggaggctcaccataattgctctttcgactacgtggagattttcgacggcagcctgaactctagcctgctgctgggcaagatctgcaatgataccagacagatctttaccagcagctacaatagaatgacaatacacttccgaagcgacatttcttttcagaatactggttttctagcttggtacaattcattcccttctgatgccactttacgcctggtaaatctgaactccagttatggactttgcgcaggtagagtcgagatttaccacgggggtacctgggggacggtgtgcgacgactcgtggaccatccaggaggccgaggtagtgtgtcgccagctcggctgcggtcgagcggtgagtgcacttggcaatgcctatttcggcagcgggtctgggccaattactctcgacgacgtcgaatgttcaggtactgagagcaccctctggcagtgccgaaatcgcggatggttttctcacaattgcaatcatagggaggatgcaggggtgatctgctccggtaaccacctgagcacgcccgctcctttcttaaatatcactagaccgaacaccgactatagctgcggtggattcttgtcccagccatccggcgactttagctctcccttttaccctggcaattatccaaataatgccaagtgcgtctgggatattgaggtgcagaacaactaccgcgtgactgtcattttccgggacgtgcaattggaggggggttgcaactacgattatattgaagtgttcgacggaccctatagatcttctccactgatcgcacgggtctgcgatggcgccaggggatcgttcactagttccagtaattttatgtctattagatttatctctgaccatagcattaccagacgcggatttcgggctgaatactactcatcgcccagcaatgactccactaatctgttatgccttccaaatcacatgcaagcgagcgtgtcaagatcttaccttcagtccttgggattcagtgcttcggacctcgtgatcagcacttggaacggctattacgagtgccgaccgcagatcactccaaacttggtgatctttacaataccctatagtgggtgcgggactttcaagcaggccgacaatgacactatcgactatagcaacttcctgacagctgcagtttcaggcgggattatcaagcggcgaaccgatctgcgcatccacgtctcctgtcgcatgttgcaaaacacatgggtggacacaatgtatattgcgaatgacacgatccatgtcgcaaataacaccatccaggtggaggaggttcaatacgggaattttgacgttaatatttcattttacaccagtagcagctttctctatccagttactagtcggccttactacgtggatttaaaccaagacctgtacgttcaggccgaaatcctccactcagatgcggtgcttacactctttgtggacacttgcgtggcgtccccatatagtaatgactttacctcattgacttatgaccttatccgctccggttgtgtgagagacgatacatacggtccctattcgtccccctcgctcagaattgctaggtttcggtttcgagctttccatttcctgaatcggtttccgtcagtgtacctccgctgcaagatggtagtatgccgggcttatgatccctcctcccgttgctataggggatgtgtgttgagatctaagcgagatgttggttcctatcaggagaaagtcgatgtcgtgttggggccaattcagttgcagacccctccccgacgagaggaggagcctcgctag

SEQ ID NO: 23861 - DNA, 597 bp, synthetic construct
  misc_feature 1..597: note = Description of Artificial Sequence: Synthetic coding sequence
  source 1..597: mol_type = other DNA
atggccgccgacatcagcgagagcagcggcgccgactgcaagggcgacccaaggaattccgctaagctggacgcggactacccactcagagtgctgtactgcggcgtgtgttccctgccaaccgagtattgcgagtatatgcccgatgttgcaaaatgtaggcaatggctcgagaaaaactttcccaacgagttcgccaaactgacggtagaaaactcccctaaacaggaagcaggcatctctgaagggcagggcaccgcaggtgaggaggaggagaagaagaagcagaagcgagggggacgaggtcagattaagcagaaaaaaaaaacggtaccccagaaagtgactatagctaaaataccacgcgccaaaaaaaagtatgtgacccgcgtgtgcgggctggctacattcgagatcgatctgaaagaggcacagcgcttctttgcacagaagttttcatgtggagcttccgtgaccggggaggatgaaatcataattcagggtgacttcacagacgacattatcgacgtcatccaggaaaagtggccagaagtagatgacgactctatcgaggacctgggcgaggtgaagaagtag

SEQ ID NO: 23862 - DNA, 1530 bp, synthetic construct
  misc_feature 1..1530: note = Description of Artificial Sequence: Synthetic coding sequence
  source 1..1530: mol_type = other DNA
atggaccccccccgggccagccacctgagcccccggaagaagcggcctcggcagactggcgccctcatggccagttcaccgcaggatatcaaatttcaggacctggtggttttcatcttggagaagaaaatgggaaccactagaagggcttttctcatggaattagcacgcaggaagggattcagggtggaaaatgagttgtccgacagtgtgacccatatcgtcgccgagaataattccggatccgacgtcctcgagtggctgcaggctcagaaggttcaagtttcatcgcagcctgagctgctggatgttagttggctcatcgaatgtataagagccgggaagcccgtggaaatgaccggcaagcatcagctcgtggtccggagagactattccgactctaccaatcccggccccccaaaaaccccacccatcgcggtccaaaagatctcccagtacgcttgccaaagaagaaccactcttaataattgcaatcaaatctttacagatgcatttgacatcctggctgagaattgcgaatttcgcgaaaacgaagactcgtgcgttacattcatgcgagctgcctcagtcctgaagagcctcccgttcaccattatcagcatgaaagacaccgaggggatcccatgtttgggatctaaggtaaagggaataattgaggaaatcattgaggatggtgaaagttccgaggtcaaggcggtgctgaacgatgagcgatatcagagctttaaactgtttacttcagtatttggggtgggactcaagaccagtgagaagtggttccggatgggattccggacactttcaaaagtccgctccgacaaatccctgaaattcacaagaatgcagaaagctgggttcttatattacgaagatttggtgagctgcgtgacacgcgccgaggccgaggctgtgtcagtgctcgtgaaggaggctgtgtgggctttcctgcccgacgccttcgtcacgatgaccgggggttttcgcagggggaagaagatgggccatgatgtcgactttcttattactagcccgggctcgacagaggacgaggagcagctgctccagaaagtcatgaatctgtgggagaagaaaggcctgttgctgtattacgacctggtggaaagcacatttgagaagttgcgactgcccagccgaaaagttgatgccctggaccactttcagaaatgctttttaatctttaaactgccacggcagcgggtggacagtgaccagagttcctggcaggaagggaaaacgtggaaagccattcgcgtggatctggtactgtgtccctacgagcgaagagctttcgcactgctggggtggacggggagccgacagtttgaacgagacctccgacgctacgccacgcacgaaagaaaaatgatcctggataaccatgctctatacgataaaacaaagcgaattttcttaaaggcggaaagtgaggaagagatcttcgcccacctgggcctggattacattgagccatgggaaaggaatgcttag

SEQ ID NO: 23863 - DNA, 1527 bp, synthetic construct
  misc_feature 1..1527: note = Description of Artificial Sequence: Synthetic coding sequence
  source 1..1527: mol_type = other DNA
atggaccccccccgggccagccacctgagcccccggaagaagcggccacggcagacgggtgccctgatggcgtctagccctcaggacataaagtttcaggatctggtggtgtttattttagaaaagaagatggggacgacacgcagggcatttctcatggagctggctcgcaggaaaggattccgagtcgagaacgagctgagcgatagtgtgactcatattgtggccgagaataatagcggctctgacgtcctagaatggctgcaagctcagaaggtgcaggtatcctcgcaacccgagctgctggatgtctcttggctcatcgagtgcattcgagccgggaaacccgtagagatgactgggaaacatcagctggtggttcgtcgtgactatagcgactctaccaatcccgggcctcccaagactccacctatcgctgtacagaaaatcagccaatatgcctgccagcgaaggactacactgaacaattgcaatcaaatattcaccgacgcttttgacatattggccgaaaattgcgaattcagagaaaatgaggacagctgcgtgacatttatgagagcggcaagtgtcttgaaatctctccccttcaccataatcagcatgaaagatacagagggcattccttgtctcggcagcaaagttaaggggattattgaggagattatcgaggatggggagtcgtccgaggtcaaggctgtcttaaacgatgagcgctaccaatcattcaaactcttcacctccgttttcggggttgggctgaagaccagtgagaaatggttccggatggggtttcgtaccttgagtaaagtgcgctccgacaaatccttgaagtttactagaatgcaaaaagctggattcctgtactatgaagatcttgtcagctgcgtgacacgggctgaggctgaggcagtctctgtgttggtgaaagaggctgtgtgggctttcctgcccgatgcctttgttaccatgaccggcggtttcagaaggggcaagaagatgggacacgacgtggatttcctaattacgtctccagggagcactgaagacgaggagcagctgctgcagaaggtaatgaacctgtgggagaagaaaggtctgctgctgtactatgacctggtggagtcgacattcgagaagctaaggctcccatcacggaaagtggacgcactagaccacttccagaagtgtttcttgatcttcaaacttccacgtcagcgggttgattcagaccagtcttcgtggcaagagggaaagacttggaaggccattagggtggacctggttctgtgcccctatgagagaagggctttcgcactcctgggatggaccggaagtcggtttgagcgggatctaaggcggtatgcgactcatgagcgcaagatgatacttgataatcatgccctctacgacaaaactaaacgtatctttcttaaggcggagtcagaagaagagatttttgcccacttaggccttgactatatagaaccttgggagcggaacgcttag

SEQ ID NO: 23864 - DNA, 2544 bp, synthetic construct
  misc_feature 1..2544: note = Description of Artificial Sequence: Synthetic coding sequence
  source 1..2544: mol_type = other DNA
atggaggccgcccggcccagcggcagctggaacggcgccctgtgccgcctcctgttacttaccttggcaattttgatattcgccagcgacgcctgcaaaaatgtgacactccacgtgccctcaaaactcgatgcagaaaagctagttggtcgcgttaatcttaaggagtgttttacagccgcaaatctcatccacagctccgacccagactttcagatacttgaggacggaagcgtgtacaccaccaatacgattctgctgagcagcgagaagagatccttcaccatcttgctcagtaacaccgagaaccaggagaaaaaaaagattttcgtcttcctcgagcaccaaaccaaggtactgaagaaacgccatacaaaagaaaaagtgttaagacgcgctaagcgcagatgggcacccatcccttgttcaatgctcgagaactctttaggccctttccccttatttttacagcaggttcagtccgataccgctcagaactataccatctactattccatccgcggtcccggggtggatcaggagccacggaaccttttctacgtggagcgggacaccggaaatctgtattgcaccagacctgtcgatcgcgaacaatacgaatcttttgagattatcgcctttgccactacgcctgacggatacactccggagctcccgctaccgttgataattaaaattgaagatgaaaacgataactacccaatctttacggaggaaacctatacttttacgatcttcgagaattgtcgggtgggcacgactgtcggccaagtgtgcgccacagataaagacgagccagacacgatgcacacaagactgaaatacagtatcatcggccaggtcccgccttcccctacgctgttctccatgcatccaaccactggggtcataaccacgacttctagtcagcttgaccgggagctgatagataagtaccagctcaaaataaaggttcaggatatggatggccaatattttgggctacagaccacttccacctgtatcatcaatatcgatgatgtgaacgaccatctccctacatttacgaggacaagctatgtgacctcagtcgaggaaaacactgttgacgttgagattcttagagtcaccgtcgaagataaggatcttgtaaataccgcaaactggcgagctaactataccattcttaagggaaatgaaaatggaaattttaagatcgttaccgatgccaaaactaatgaaggcgtgttgtgtgtcgtcaagcctttgaactacgaggaaaaacaacaaatgattcttcagataggagtggtgaatgaggcacctttcagccgcgaagcctcacctaggtccgcaatgagcacagctactgtcacagtcaacgtcgaggatcaggatgaaggacccgaatgtaatcctcccattcaaactgtgaggatgaaagaaaacgcagaagtggggaccacctccaacggctacaaagcctacgacccagaaactcggtcttcctctggcattagatataaaaaacttaccgatcccaccgggtgggtaaccattgacgagaatactggaagtatcaaagtgttcaggtctttggaccgcgaagcggagacaatcaaaaatgggatttacaatataacagtgctggctagcgaccaagggggtcgcacctgcaccggcaccctaggaatcatactgcaggacgtgaatgataatagcccattcatccctaaaaagaccgttatcatttgtaaacctactatgtcctccgctgaaattgttgcagtggaccctgatgagcccatacatgggccccccttcgatttcagccttgagtcatccaccagtgaagtgcagaggatgtggagactgaaggccattaacgataccgccgccagactgtcttatcaaaacgacccccccttcggatcttacgtagtgcccatcacagttcgtgatcgcctcggcatgtctagcgtgacctcactcgatgtcacactgtgtgattgcatcacagagaatgactgcacacatagggtggacccacggatcggagggggcggcgttcagttaggaaagtgggctattctcgcaattttactcggtatagcactactcttttgcatcttgtttaccttggtctgtggtgctagtggaacttcaaaacagccaaaggtgatcccagacgacttggcccagcagaacctgatcgtgtccaatactgaggccccaggtgacgataaggtctacagtgctaatgggttcacaactcaaacggtgggggccagtgcccagggtgtatgcggaaccgtgggctccggcatcaagaacggggggcaggaaacaattgaaatggtcaagggtggtcaccagacctctgagagctgccgcggggccggccaccatcacaccctagactcgtgcagaggagggcatactgaggtggataattgcaggtatacttattcagagtggcacagttttacccagccacggctgggggaggagtcaattcgcgggcacaccttaattaaaaactag

SEQ ID NO: 23865 - DNA, 2706 bp, synthetic construct
  misc_feature 1..2706: note = Description of Artificial Sequence: Synthetic coding sequence
  source 1..2706: mol_type = other DNA
atggaggccgcccggcccagcggcagctggaacggcgccctgtgcaggcttctcctactcacgttagccatactgatcttcgcatccgatgcctgcaaaaatgtgacgcttcatgttccatcgaaactcgacgctgaaaagcttgtagggcgcgtgaacctaaaggagtgtttcacagctgcaaatcttatccattcttccgacccagattttcagattcttgaggacgggagtgtgtatacaacgaatacaatactcttatctagtgagaaacgaagcttcaccatcctgctcagtaacaccgagaatcaggaaaagaaaaaaattttcgtatttctcgagcatcagaccaaagtccttaagaaaagacacacaaaggagaaggtgctgcgacgagccaaaagacggtgggcaccgattccatgttccatgttggagaacagccttgggccattccccctgtttttgcagcaggtccagtcagataccgcacagaactacaccatatactacagtatcaggggacccggggtggaccaagagccacggaacctcttttacgtggaacgtgacactgggaatctctattgcactcgtccggtggaccgggaacagtatgagtcattcgagatcattgcatttgcgactacgcctgacggatatacaccggagctgccgttacccctgatcattaagattgaagacgaaaacgataactacccaatctttactgaggagacctatacctttaccatcttcgagaactgtcgtgtcggcaccaccgtaggtcaggtatgtgcaactgacaaagacgagccagacacaatgcatacaagactgaagtatagcataattggacaggttccacctagccctactctgttcagtatgcacccgaccaccggagtgataaccacgacatccagccaactggaccgagagctgatcgataagtaccagctgaaaatcaaagtacaggacatggatggacagtacttcggcctgcagactacttcgacttgcatcattaatatagacgacgtaaacgatcacctcccaacgttcactcggacttcctacgttacttctgtggaggagaataccgtggacgtcgagattctccgggtgacagtggaggataaagatttagtgaatacagctaattggagagcgaattacaccattctgaaaggcaacgagaatgggaactttaagattgttacggatgccaaaacaaatgagggcgttttatgcgtcgttaagcccctcaattacgaggagaagcagcaaatgatcctgcagataggcgtggtgaatgaggcacctttctccagggaggcaagtccccgatcggccatgagcacggccactgtgacagtgaacgttgaagatcaggacgagggtccggagtgtaatccccccatccagaccgtaagaatgaaggagaatgctgaagtgggaacaacaagtaatgggtacaaggcctatgacccggaaaccaggagtagtagtggaatcaggtacaaaaaactgactgaccccacagggtgggtcaccatcgacgaaaatacaggaagtattaaggttttcagaagcctggaccgagaagctgagaccattaaaaatggaatctataacattaccgttttggcgtccgatcagggtggcaggacctgtacgggcactttgggtataatcctccaagatgtcaatgacaatagtccatttatacctaagaaaaccgtcatcatttgtaagccaaccatgtcatctgcggaaatcgtcgctgttgaccccgatgagcctatacacggaccaccctttgacttcagtctggagagctccacaagtgaggtacaaaggatgtggagactgaaggcgataaatgacactgcagctcgcctaagttaccagaatgacccgccttttggcagctacgtggtgccaatcacagttagggatcgcttgggcatgtcctccgtgacctcacttgatgtgacgctgtgcgactgcatcacagagaacgattgcactcacagggtggacccaaggatcggaggcggaggcgtccagcttggaaaatgggctatcctggccattctgctggggatcgctttactgttttgtattctcttcacactagtgtgtggggcgtctgggacctctaagcagccgaaggtgattccagatgatctggcacagcagaatctgatagtatccaacactgaggccccaggagacgacaaggtgtattcagccaacggatttactactcagaccgtgggagcttcggctcagggcgtctgtggtacggtcggatctggcataaagaatgggggtcaggagaccattgaaatggtgaaaggggggcaccaaacttcagagtcgtgccgaggtgctggacaccaccacacattagacagctgcagaggggggcacactgaggtcgataactgcaggtacacgtacagtgagtggcatagcttcacccaacccagacttggtgaaaaagtgtacctgtgtaatcaggatgagaatcacaagcatgcacaggactatgttctgacttataactacgaggggcgggggagcgttgccggaagcgtgggctgctgctctgaaaggcaggaggaagatggcctagagttcttagacaatcttgaaccaaagtttcgtactttagctgaagcatgcatgaagcgttag

SEQ ID NO: 23866 - DNA, 2745 bp, synthetic construct
  misc_feature 1..2745: note = Description of Artificial Sequence: Synthetic coding sequence
  source 1..2745: mol_type = other DNA
atggaggccgcccggcccagcggcagctggaacggcgccctgtgccgccttctcttgttaactttggcgattttaatatttgcttccgacgcctgtaaaaacgtaactctgcacgtgccatccaaactcgatgcagagaaactcgtcggccgagtaaacctaaaggagtgttttaccgctgcgaatctgatccactcatcggatcccgatttccagatcctcgaggatgggagcgtatatacaacgaacacaattcttcttagttctgagaaaagatccttcacaatactgctttccaatactgagaaccaggagaaaaaaaaaatttttgtatttctggagcatcagactaaaatttctctcttagtaccatggctgtgcctggtggccgaagtattgaaaaaacggcataccaaggaaaaggtactccgtagggctaagagacggtgggcgcctattccttgcagcatgttggagaacagtttggggccctttcctctgtttttgcaacaggtgcagtcagacacagcccagaattatacaatctactatagtattcgcggacccggagtcgaccaagagcccaggaacctgttctacgtggagcgcgatacaggtaatctttactgtactcggccggtggatcgcgagcagtacgaatcatttgagatcattgcattcgccactacaccggatggctatactccagagctcccattgcccctgattatcaagatcgaggacgaaaacgataactatcccatcttcactgaggagacatatacattcactatcttcgagaactgtcgtgtcgggacaactgttggacaagtgtgtgccaccgataaggacgaaccggacacaatgcacactcgcctgaagtattccatcatcggtcaagtaccacccagccccactctgttcagtatgcaccccaccactggcgtgatcacgactaccagttcacagctggacagagagcttatagacaaatatcagcttaagattaaggttcaggatatggatgggcaatacttcggactgcagacgacgtcaacatgcatcataaatattgacgatgtaaatgaccaccttccaaccttcacaagaaccagctacgtgacaagtgtcgaagagaacacggtggatgtggagatcttgagagtaaccgtggaagataaggacctggtgaatacagccaattggagagcgaattacacgattctcaagggcaatgagaacggaaatttcaagatcgttacggacgctaagacaaacgagggtgtgctgtgcgtggtcaagccacttaattatgaagagaagcagcagatgattctgcaaattggggttgtcaacgaggccccattctccagagaagcatcaccacgctctgccatgtccacagccaccgtgaccgtaaacgtagaggaccaggacgagggacctgagtgcaatcccccgatccagactgtccgaatgaaagagaatgcagaagtcggcaccacctccaatgggtataaggcctacgacccagaaacccggagttcctcaggaataaggtacaagaaactcacagatcctacaggttgggtgactatcgacgaaaacaccggcagcataaaggtctttcgaagcctggatagggaggccgagaccatcaaaaacgggatctataacatcacagttctggcctcggatcaaggcggacgaacttgtacaggaactctggggattatcctgcaggacgttaacgacaactcccccttcatacctaagaagaccgtcattatctgtaagccaaccatgtcatcagccgaaattgtggcagtggaccccgacgaacctatacacggacccccttttgacttctccctcgagtcttctaccagcgaagtgcagcgcatgtggaggcttaaggctattaacgatacagccgctcggttatcttaccagaacgatcccccatttggaagctatgtcgtccccattacagtgagggatagattagggatgagctctgttaccagcctggacgtgacactgtgcgattgcattacggagaacgactgtacacatcgggtagatccaagaatcgggggcggaggtgtacagctgggcaaatgggcaattctcgctatcctgctgggcattgctttgctcttttgcatcctttttacgttggtctgtggggcaagtggaactagcaaacagccaaaggtgatcccagacgacctagctcagcagaatctgattgtcagtaatactgaggctcctggcgacgacaaagtatactctgccaatgggtttacaacccagacagtgggtgcctccgcccagggtgtgtgtggtacagtcgggtcaggcatcaagaacggaggacaggaaactattgaaatggtgaagggtggacaccagacctctgaatcctgtagaggagccggacaccaccacactttggattcatgtcgaggcggtcacaccgaggtggataactgccggtatacctatagcgaatggcactcgttcactcaaccaaggcttggagaaaaggtgtatctatgtaaccaagacgagaaccataagcatgctcaggactatgttctgacatacaactatgaaggcaggggctctgtggccgggtcagttggctgttgctctgagcggcaagaagaggacggtctcgagttcctggataatttagagcctaagtttagaaccctcgcggaggcatgcatgaagcggtag

SEQ ID NO: 23867 - DNA, 2004 bp, synthetic construct
  misc_feature 1..2004: note = Description of Artificial Sequence: Synthetic coding sequence
  source 1..2004: mol_type = other DNA
atgaagatgatcaccacccagttcctgcagaagaagctgatcctgctccagtttctaaagattgcagaatgggggaccaccgtcggacaagtctgcgccactgacaaggatgaacctgacactatgcatactagacttaagtactctattataggtcaggtgcctccatcaccaactctgttttctatgcacccgaccacgggggttattaccacgacatcgagtcagttggacagggagctgatcgacaaataccagctgaaaattaaggtacaagatatggatgggcaatattttggattacaaactacttctacctgtatcatcaacatcgacgacgttaatgatcatcttcccacctttacacgtacatcctacgtaacgtcagtggaggagaatacagtggacgtggagattctgcgcgttacggtggaagacaaggacctggttaacaccgcgaattggagagccaattataccatcttgaaaggaaatgaaaatgggaacttcaagattgtgaccgacgcaaagactaacgagggagttctctgcgtagtaaagcctttaaactacgaagaaaagcagcagatgatcctgcaaattggggtggttaatgaggccccattctcccgcgaagctagccctaggtctgcaatgtctactgcaacggtcacagtgaatgttgaggatcaagacgagggcccagaatgcaatccaccgattcagaccgtacggatgaaggagaatgctgaggttggaactacatcaaacggatataaagcatacgatcctgaaacccggagctcaagcggtataagatacaagaaacttactgaccccactgggtgggtgaccatcgacgaaaacactggctctatcaaagtgttccgctcactggatagagaagcagaaactattaagaatggcatctacaacattactgtgttggcatcagaccagggtggtcggacctgtactggtaccctcggaatcatccttcaggatgttaacgataacagtcccttcatccctaagaagaccgtcatcatctgtaaaccaacgatgtccagcgccgaaatcgttgccgtggaccccgacgaaccaattcacgggccaccatttgatttcagcttggaaagttctacgtctgaggtgcagagaatgtggaggctaaaggccataaacgacacagcagcccgtctgagctatcaaaacgatcccccctttggcagttacgtggtgcctatcactgtacgcgatcgactggggatgagttcagtcacgtcacttgacgttacactctgcgactgtatcaccgagaacgactgtacgcacagagtggatcccaggatcggtggaggaggggtccagctgggtaaatgggcaatattggccatactgctgggcatcgcccttttgttctgtattctcttcaccctggtctgcggagcatcgggaaccagcaaacagcctaaagtgattcccgacgatttggcgcaacaaaacctcattgtgtctaacacagaggcccccggagacgacaaagtatactctgctaatggtttcacaacgcagaccgtgggcgcaagcgcccagggagtgtgcggaaccgttgggtcaggcataaaaaatggggggcaggaaactatcgaaatggttaagggcggccaccagacgagcgagagttgtcgcggcgcgggccatcatcatactttggattcgtgtcgcggtggtcacaccgaggtcgataattgtcgctatacttattcagaatggcattcattcactcagcctaggctgggagagaaggtctacctgtgcaaccaagatgagaaccacaaacatgcccaggactatgtcctgacgtataattatgaaggcaggggcagcgtcgccgggtctgtgggctgctgttccgagcggcaggaagaagacggcctagagttcctggacaacctggagcccaaatttcgaacgcttgcagaggcctgtatgaaaagatag

SEQ ID NO: 23868 - DNA, 3000 bp, synthetic construct
  misc_feature 1..3000: note = Description of Artificial Sequence: Synthetic coding sequence
  source 1..3000: mol_type = other DNA
atgatgggcctgttcccccggaccaccggcgccctggccatcttcgtggtggttatccttgtgcatggggagttgaggattgagacgaaaggtcagtacgacgaagaagaaatgaccatgcagcaggcaaagagacgacagaagagagagtgggttaagttcgccaagccgtgtcgggagggagaggacaattcaaaaagaaaccccatcgcaaaaatcacctcagattaccaggcaactcagaaaattacctataggatatccggggtgggcattgatcagcctccctttggaatttttgtagtcgataagaatactggcgatatcaacatcacagccatcgtggaccgggaggaaactcctagcttcttgatcacatgtcgagcactgaacgcgcaaggcctggatgtggagaaaccgctcattctgactgtgaaaattcttgatattaatgacaatccccccgtgtttagtcagcagatctttatgggcgaaattgaagagaactccgcctccaattccctcgtaatgattctgaacgcgacagacgccgatgaacctaaccatctcaacagcaagatcgcgttcaagattgtgtcccaggagcccgccggtacgcctatgtttctcctgtcaaggaacaccggcgaagtccggaccttgacaaacagccttgatagggagcaagcaagttcctacagacttgtggttagtggtgcagacaaggacggagagggtctttcgacccagtgcgagtgcaacatcaaggtgaaggacgtgaatgataattttccaatgtttagggatagtcagtactcagccagaatagaagagaatattttgtcatcggaactgttgcgattccaggtgaccgacctggatgaagagtacacagataactggctggccgtgtacttttttactagcggcaacgaagggaactggttcgaaattcagacagatccacgaaccaacgagggcatcctcaaggttgtgaaggccctcgattatgaacagctccagtcagtcaagctgtccatcgccgttaaaaacaaagctgagttccaccagagcgtgatcagcagatatagggtgcagtccactcccgtgaccatccaagtcatcaacgtgagagagggcatagcatttagacccgcttccaagacttttaccgttcagaagggaatatccagtaaaaaactagtggattacattctgggcacctatcaggcaatcgacgaggacaccaacaaggccgccagcaacgtgaagtacgtgatggggcgaaacgatggagggtatctcatgatcgactccaagactgccgagatcaagttcgtgaaaaatatgaacagggatagtactttcatagtcaacaaaactattacagcggaggtgctcgcaattgacgagtatacgggaaagacatccacgggcaccgtctatgtaagagtgcctgactttaacgacaattgccctacggctgtgcttgagaaagatgccgtctgctcttcttctccctctgtggtagtgtccgcccgcactcttaataaccgctacaccgggccctatacattcgcattggaggaccaacccgttaagctgcctgctgtctggtccatcaccactctcaatgccacttctgctctccttcgagcacaggaacagattccacctggcgtttaccatatcagcctggtcctgacagactctcagaacaatagatgcgagatgccacggtccctgaccctggaggtgtgtcagtgtgacaaccggggaatttgcggcaccagttaccccacaactagccctggaacacgatacgggcgcccacattccggcaggctgggtcccgccgctattggactgttgctattgggattattgctgctcctgttggcccctctccttctgcttacatgcgattgtggcgccggctccacagggggcgtgaccggtggatttattcctgtgcccgacgggagcgaggggacgattcatcagtggggcatcgaaggcgctcatccagaggacaaggagataacgaatatctgcgttcccccggtgacagcaaacggagctgattttatggagtcatccgaagtctgtacaaatacatacgctaggggcacggcggtcgagggcacgagtgggatggaaatgaccacgaaattgggtgctgccacagaatctggcggagcggccggcttcgccacaggaacggtttccggtgcagcctcaggttttggcgctgcgaccggcgtgggaatttgctcatcaggtcaatcaggcacaatgaggacgcgtcatagcaccggaggaacaaataaggattacgctgacggagctatttcaatgaatttcctggactcctacttttctcagaaagcctttgcctgcgcagaagaagatgacggacaagaagccaatgattgtctgctcatttacgataatgagggagctgacgcaaccgggtcgcccgtcggatccgtgggatgctgtagctttattgccgacgacctggatgacagtttcctggacagcctgggccccaaatttaaaaaactggcagagatctccctgggagtcgacggggaggggaaggaggttcagccacctagtaaagacagcgggtacgggattgaaagctgtggtcaccctatcgaagtgcagcaaacaggcttcgtaaagtgccaaaccctgagcgggtctcagggcgcttcggccctgagcacctctggttccgtgcagcctgctgttagcatccctgatcccctgcagcatggcaactatctcgttactgagacctactcagcgagcggtagcctcgtccagccatccaccgctggattcgacccacttctgactcagaacgttatcgtgacagaacgggtgatttgtccaattagcagtgtgcctgggaacctggcaggtcccacccagcttcggggttcccacactatgctctgcacggaggacccttgtagtcgcctgatctag

SEQ ID NO: 23869 - DNA, 8616 bp, synthetic construct
  misc_feature 1..8616: note = Description of Artificial Sequence: Synthetic coding sequence
  source 1..8616: mol_type = other DNA
atgagctgcaacggcggcagccacccccggatcaacaccctgggccgcatgatacgcgctgaatccggcccggatctccgctacgaggtaaccagtggtggtggcgggacctcccgtatgtattactctcggcgtggtgtgattacagaccaaaactcagacggctactgtcagactggtaccatgagcaggcatcagaatcagaacaccattcaggagctgttacagaactgctccgactgccttatgcgtgccgaactaatagtgcagcccgaactcaaatacggggacgggattcagcttaccagatcacgcgagctggacgagtgctttgcccaagcaaatgatcagatggaaattttagatagcctgatacgtgagatgagacaaatgggccagccatgtgacgcttaccagaaaagacttctgcaactgcaggaacagatgcgcgcattatataaagcaataagcgtccctcgggtgagacgagcttcctcaaagggagggggcggctatacgtgccagtcgggatctggatgggatgagttcacaaaacacgttacatcggagtgcctaggctggatgagacagcaaagggccgaaatggacatggttgcttggggtgtggacctagctagcgttgaacaacatatcaactcgcataggggtattcataactcaatcggtgactacagatggcagctcgataagatcaaagccgacctgagggagaagagcgctatatatcaactggaggaggaatatgaaaatctgctgaaggcctctttcgagagaatggaccacctaaggcagttgcagaatatcatccaggctaccagccgcgagatcatgtggataaacgattgcgaggaagaggaactgttgtacgactggtccgacaaaaataccaatatagctcagaagcaagaggcattctccatcaggatgagtcaattagaggtgaaagaaaaagagctgaataaacttaagcaagagtcagaccagcttgttttgaatcagcaccctgcgtccgacaaaattgaagcgtatatggacacattgcaaacccagtggagttggatcctgcagatcaccaagtgcatagacgtacatctcaaagagaatgcagcttactttcagttttttgaagaagcccaaagcaccgaggcctacttgaagggacttcaggactcaatcagaaagaaatatccctgcgacaagaatatgcccttgcaacacctattagagcaaatcaaggaattagagaaggagcgcgaaaagatattggagtataaaagacaggtacaaaaccttgttaataagagcaagaaaattgtacagctgaaaccccgcaatccggactatagaagcaacaagccaatcatcctgagggccctctgcgactacaagcaggatcaaaaaatagtgcataagggggacgaatgtatactgaaagataacaacgaacggtcaaaatggtatgtgaccgggcctgggggcgtagacatgcttgttccatcagtcggcttaattatcccccccccaaatccactggctgtggatctgagctgcaaaatagagcagtattatgaggctatactggcactatggaatcaactgtacataaatatgaaatcacttgtgagttggcactactgtatgatagatatcgagaaaattagagctatgactatcgcaaagctaaaaactatgaggcaggaggattacatgaagaccattgccgacttggagttgcattatcaggagttcattaggaattctcagggatccgagatgtttggggacgacgataaaaggaaaatccagtcccagtttaccgacgcccaaaaacattaccagactctggtgatccaactgcctgggtaccctcaacaccagactgtcacaacaaccgagatcacccatcacggaacttgtcaggacgtgaatcacaacaaggtgatcgaaaccaatcgggagaatgacaagcaggagacctggatgctgatggagttacagaaaataagaaggcagatcgagcattgcgaaggaagaatgaccctcaagaatttgcccctggccgaccagggctcctctcaccatatcaccgtcaaaatcaacgagctcaaaagcgttcagaatgactctcaagccattgctgaggtcctcaaccagctcaaggatatgctcgccaactttcggggcagtgagaaatattgctatttacaaaatgaagtattcggtctctttcagaaactggaaaacataaacggcgtgacagatggttacctgaactccttgtgcaccgtcagagcgctgcttcaggctatactgcagacagaagatatgctaaaggtctacgaggcacggctcaccgaggaagagacagtgtgtttagacctggacaaagtcgaggcctataggtgtggcttaaagaagataaagaatgatcttaaccttaaaaaaagtctgctagccacaatgaaaaccgaacttcagaaagcgcagcagatccatagccagacgtcacagcagtatccgctgtacgatctcgatcttggcaagtttggtgagaaagttacccagctgactgataggtggcagcgaatcgacaaacaaatagatttcaggctctgggatctcgaaaagcagattaagcagctcagaaactatagggacaactaccaggctttctgtaaatggctttacgacgccaagagacgccaggattctctagagtcaatgaagttcggagattctaacaccgtcatgagatttctgaacgagcagaagaacctacatagtgagatttccgggaagcgtgacaaatcagaggaggtgcagaagattgctgagctgtgtgccaactctattaaagattatgagctccagcttgccagctatacgtccggtttggagactctgctgaacatccctatcaaacggaccatgatacagtccccatccggcgtgatcctccaggaagctgccgacgtgcacgctcgttatatcgagctgctgacccggagcggcgactattaccgtttcctttctgaaatgctgaagtcactggaggacctcaaactcaagaacaccaagattgaggtcttagaagaggaactccgtcttgcccgagacgccaattcggaaaattgcaataagaacaagttcttagatcagaacttgcagaaatatcaagccgagtgcagccagtttaaggccaaactggcctccctcgaggaactgaagagacaggcagagctggatggtaagtcagctaagcaaaatctggataagtgctatggccaaataaaagagttgaacgagaagatcacccggctgacttatgagatcgaagacgaaaagcgtagaagaaaaagcgtagaagatagattcgaccagcaaaaaaatgattatgatcagcttcaaaaagcgagacagtgcgaaaaagaaaatttgggatggcagaaattggagtccgaaaaggctattaaagaaaaggagtacgagatcgagcggttaagagtgctactccaggaggaaggcacacgcaagcgtgagtatgagaacgagctggcaaaggtcagaaaccactacaacgaggagatgagtaacctgcggaacaaatacgagacggagattaatatcactaagaccaccatcaaggagatttcgatgcaaaaagaggacgactctaagaacctgcggaatcaattggatagactgtcaagagagaaccgggacctaaaagacgagatcgtcagactgaacgacagcatcctgcaggctaccgagcagcgccgccgcgccgaggagaacgcattgcagcaaaaggcgtgcggttccgaaatcatgcaaaaaaaacaacatttggagatagagttaaaacaggttatgcagcaaagatctgaggacaacgcacgtcataaacagtccctggaggaggctgccaagacaattcaggacaaaaacaaggaaatagagaggctcaaggcagaatttcaagaggaggcaaagcggcgatgggaatatgagaacgaactctcaaaagtgcggaataactatgatgaggagattatctcactcaaaaatcagttcgaaaccgagatcaatattactaagacgacaattcaccagctaaccatgcagaaggaggaggacacttccggctaccgggcacaaattgacaacctgacgcgagagaaccggtctctttcagaggagatcaaaagactgaagaacacgctgacgcaaacgacagagaacctaagacgcgtcgaggaggatattcagcaacaaaaggccactgggagtgaagtcagtcagcggaagcagcagcttgaggtggaactccggcaagtcactcagatgaggactgaggaaagcgtccgctacaagcagagcttggacgacgccgccaagactattcaggataagaacaaggagatcgaacgactgaagcagctgattgacaaagaaacaaatgataggaagtgtctcgaggatgagaatgcacgactccagcgggttcagtacgacctccaaaaggccaactcgagtgccacagaaacaatcaacaagctcaaagtccaggagcaggaactgactagactcagaatagactacgagcgagtcagccaggaacggacagtgaaagatcaggatattactcgctttcagaacagtctgaaggagttgcagcttcaaaagcagaaagttgaagaagagttaaataggctaaaacgtactgctagcgaggactcctgcaagcgcaagaaactggaggaagaattagaggggatgcgtagatcactcaaagaacaagctattaaaatcaccaacctgacccagcaattagaacaggcctcaatcgttaagaagagaagcgaagacgatctgcgtcagcagagggatgttctcgatggccacctcagggagaagcagcgcacccaggaagaactgagaagactttcctcagaagtggaagcactgcgtagacaactgctccaggaacaggaaagtgtgaagcaggcccacctcaggaatgaacacttccagaaagccattgaggataaatccagatcgttgaatgaaagtaagatagagatcgagcgactgcagtctttgacggagaatttgacaaaggaacacctgatgttggaagaggaactacggaatctgcgcctcgaatacgacgacctgaggcggggaagaagcgaggccgactcagataaaaacgccacgatcttggaactgcggagtcagctgcaaatatctaacaatcgcaccctcgagctccaaggcctgattaacgatctgcaacgcgaacgggaaaatctaagacaggaaattgaaaagttccagaagcaggcgctggaggcaagcaatagaatacaggagtcaaagaaccaatgcacccaagtcgtgcaggagagagagtcgttattagtgaaaattaaggtcttagagcaggataaggccagactccagaggctcgaggatgaactgaatcgcgctaagagcaccctcgaggctgaaacacgagtgaagcaacgcctggagtgcgagaaacagcaaatccagaatgatctgaaccagtggaaaactcagtactcccggaaggaggaagctattcgtaaaatagaatcagagagggaaaagagcgagcgtgagaaaaatagtctgcggagcgagattgagagactccaggcggaaatcaaacgaattgaagaacggtgccgacggaaactggaggattcgacaagggaaactcaatcacagctggagactgagcggagtcgctatcagagagaaatcgataagctgcggcagcgtccctatggttcacaccgtgagacccagactgagtgcgaatggaccgtggatacgtctaagttagtgttcgatggattgcggaaaaaagtcactgccatgcagctttacgagtgtcagcttatagataaaacaactttggacaaactgctcaagggaaaaaaatcagtggaagaagtggccagtgagatacagccgtttttgcgcggggccggcagcatagcaggagcatccgcttcaccaaaggaaaagtactctttggtcgaggctaaacgaaagaagctgatctccccagagtccaccgtgatgctcctggaagcacaggcagccactggaggtatcatcgacccccacagaaacgagaagctgacggttgactccgcaattgctcgtgatcttattgattttgacgacagacaacagatatacgctgcagagaaggcgattaccggttttgacgatccattctccgggaaaacagtgagtgtcagcgaggcaatcaaaaaaaacctaattgaccgagaaacaggaatgaggttactggaagctcagatcgcaagtgggggagtggtggatccggttaacagcgttttcctccccaaagacgtagccctggcccggggtttgattgacagagatctgtatcgatcattgaacgacccccgggactcacagaagaacttcgttgaccccgtaactaaaaagaaggttagttacgtgcagttaaaggagagatgccggatagagcctcacaccggattgctactgctgtctgtgcaaaaacgctctatgagcttccagggaattcgacagccggtgacagtgactgagctggtggacagcggaatcctgagaccgtccactgtcaatgagctcgaatctggtcaaatttcttacgacgaggtgggggaaaggatcaaggatttcctgcaggggtccagttgcattgcaggcatctacaatgaaacaacaaagcaaaagcttgggatctacgaggctatgaagatcggcttggtaaggcctggcacagcgctggaactcctggaggcacaggccgctacaggcttcatcgttgacccagtgagcaaccttcgcctgccggtggaggaagcatataagcggggcttggtgggcattgagttcaaggaaaaactcctttccgccgaaagagctgtcacagggtataatgaccctgaaaccggaaatatcatatccctgttccaggccatgaataaggaactcatcgagaagggccacggtattcggttgctggaggcccagatcgccaccggcgggattatcgacccaaaggaatctcataggctgccagttgatatcgcgtataaaagggggtatttcaatgaagagctctccgaaattctgtcagaccctagcgatgacacaaaggggttctttgatcccaataccgaggaaaacttaacttacctgcaactcaaagaaagatgcattaaggacgaggagacagggttatgccttctgccgctgaaggagaaaaagaaacaggtgcaaacttcacagaagaacaccctgagaaaaagaagagtcgtaattgtcgaccccgagactaacaaggagatgtcagtccaggaggcctacaaaaaaggcctcattgattacgagacttttaaagagctctgtgagcaggaatgtgagtgggaggagattaccatcacaggctctgacggctctactagggtggttctggtcgaccgcaagaccggaagccagtacgatatccaagacgccatagacaagggactcgtggacagaaagttctttgaccagtacaggtctggcagcctttcacttactcaatttgctgatatgatctccctgaagaatggtgttggaaccagcagtagtatgggctctggcgtgtctgatgacgtgttctcaagttctagacacgaaagcgtctccaagattagtacaatcagctctgtgaggaacctcaccatacgctctagttccttttccgatacgttggaagaatcctcccccatcgcagcgattttcgacaccgagaacttggaaaaaatttccatcactgagggcatagaaagaggtattgttgacagcatcaccgggcagaggctattggaggcccaggcctgtaccggcggaatcatccaccccaccacagggcagaaactctcgctgcaggatgccgtcagccaaggggttatagaccaagacatggctaccagactgaaacctgctcaaaaggcttttataggattcgagggggtgaagggtaagaaaaaaatgagcgccgcagaggcagttaaagaaaaatggctcccctatgaggcgggccagcgttttctcgaatttcagtatttgactggaggattagtggatcctgaggtgcatggacggatcagtacagaggaggccatcaggaagggattcatcgacggccgggccgctcaaaggcttcaggatacatcatcgtacgccaaaatactgacatgtccgaaaacaaagcttaagatctcctataaggatgccattaaccgctctatggtcgaggatatcacggggttaagactgttagaagccgcatctgtttccagcaaaggactcccttccccatataatatgtccagtgcacctggctcaaggtccgggtcccggtctggaagtcgcagcggttctagatccggctcacggtcaggatccaggcggggcagctttgacgctacaggaaactcttcatactcatactcctattcattttcctcttcgtcaattggtcattag

SEQ ID NO: 23870 - DNA, 2862 bp, synthetic construct
  misc_feature 1..2862: note = Description of Artificial Sequence: Synthetic coding sequence
  source 1..2862: mol_type = other DNA
cagcagcagcgggccgagatggacatggtggcctggggcgtggacctggcgagcgttgaacaacacattaattctcaccgcggaattcacaacagtatcggagactacaggtggcagcttgacaaaatcaaggctgacctgcgagaaaagtctgccatctaccagttggaggaagagtatgaaaacctgttgaaagccagctttgaacgcatggatcatctgcgacagctgcagaatatcatccaggctaccagccgcgaaattatgtggatcaatgattgcgaggaggaagagcttctttacgattggagtgacaaaaacacgaatatcgcccagaagcaggaggccttcagcattcgtatgtctcaattggaagtcaaggaaaaagagctgaacaaactgaaacaggagtctgaccagctggttctaaatcagcatccagcaagcgataaaatcgaggcatatatggatacactgcaaacccaatggtcctggatcctgcaaattacaaaatgcattgatgtacatctcaaggaaaacgccgcctatttccagtttttcgaggaggctcaaagcactgaggcctatctgaagggcctccaggattccattaggaagaagtacccgtgtgacaagaatatgccacttcaacatcttctcgagcaaatcaaggagctcgagaaggaaagagagaaaatccttgagtataagagacaggtgcagaatctggtgaataaatccaaaaagattgtgcagcttaagccgcggaaccctgattaccggtctaacaagcccattattctgagggcgttgtgtgactacaagcaagaccagaaaattgtccacaagggagacgagtgtatcttgaaagataacaacgagaggtctaagtggtacgttaccggccctgggggggtggacatgttggtaccctcagttggccttatcataccaccccccaacccccttgccgtggacctctcgtgtaaaatagagcagtattatgaagcaatcctggccctgtggaaccagctgtacataaacatgaaatcgctcgtgtcgtggcactattgtatgattgacattgaaaagatcagagcaatgaccattgccaagctgaagactatgagacaggaagattacatgaaaacgatcgctgatcttgaactccattatcaagagttcatcagaaattctcagggctcagagatgtttggtgatgacgacaagcgcaagatccagagccagttcaccgacgctcagaagcactaccagacacttgttattcagttgcctggctacccgcaacaccaaacggttactacgacagaaatcacacatcatggcacctgccaggatgtgaaccataataaggtgattgagactaatcgggagaacgacaaacaggaaacatggatgctgatggaacttcaaaagatccggcgccagatagagcattgcgaggggcgaatgacactgaagaatcttccattggccgatcagggcagcagtcaccatattacggttaagataaatgagcttaagtctgtgcagaacgatagccaggcgattgccgaggtgctgaaccagctgaaggatatgctggcaaacttccgcggctcagagaagtactgttatctccaaaacgaggtcttcggcctgtttcagaaactggagaatataaatggagtcaccgatggctatctgaactctctgtgtaccgtcagggcgttgctgcaggcaattctccagacagaggatatgctgaaagtgtatgaagcacgcctgactgaagaggagacggtgtgtctcgacctcgacaaggttgaggcctaccggtgcggacttaagaaaattaaaaacgatctcaacctcaagaaaagtctccttgcgacgatgaaaacggagctccagaaagcccagcaaatccactctcagacctcacagcagtaccccctgtacgacctggacctgggcaaattcggagaaaaggtgacacagctgaccgatcgatggcaacgcattgacaaacagatcgattttcgcctctgggacttagagaaacagattaagcaactgagaaattatcgtgataactaccaggctttttgcaagtggctgtacgatgctaaaaggaggcaagactccctggagtccatgaaattcggggattctaacaccgtcatgaggtttctgaacgagcagaagaacttgcacagcgaaatttcagggaagcgcgacaaatccgaggaggtccagaagatagccgaactgtgcgccaattcaatcaaggactacgagttacaactggctagctatacaagcggcctggaaacattgctgaacataccaatcaaaagaaccatgatccagtccccaagcggggtgattctccaggaggctgctgacgtccatgcccggtacatagaactactcactcgcagtggcgactactacagattcttgtccgagatgttaaagagcctggaggaccttaaattaaaaaacacaaagattgaagttctcgaggaagagctgcgccttgcaagagacgcaaactctgagaactgtaataagaataaatttctcgaccagaatttacagaagtaccaggcagagtgctctcagttcaaagctaagctcgcctcgctcgaagaactaaaacgccaggcagaactcgacgggaagtctgcaaaacagaacctggacaaatgctacggacagattaaggagctcaatgagaaaattacccgcctgacctacgagattgaggacgagaagaggaggcggaagagcgttgaggatcgcttcgatcaacaaaaaaacgactacgaccagctccagaaggccagacagtgttag

SEQ ID NO: 23871 - DNA, 6819 bp, synthetic construct
  misc_feature 1..6819: note = Description of Artificial Sequence: Synthetic coding sequence
  source 1..6819: mol_type = other DNA
atgagctgcaacggcggcagccacccccggatcaacaccctgggccggatgatcagggccgagtctggtcctgacctccgatacgaggtcacctccggaggtggtggaacttccagaatgtattacagtaggcgaggggttatcacagaccagaacagcgacggctattgccagaccgggaccatgtcacggcaccagaatcagaataccattcaggagctgctccaaaattgttccgattgcctgatgcgcgcagagctgattgtgcagcctgaacttaaatatggggatgggatccagctgactaggtctcgggagctggacgagtgtttcgctcaggcgaacgaccaaatggagattctggacagcttgatcagagaaatgaggcagatggggcaaccttgcgatgcgtaccagaagcgacttttgcagctgcaggagcagatgcgcgccctctacaaggcaattagcgtgccaagagtgcgtcgggcttcctctaagggtggcggaggatacacttgccaatccggctcggggtgggacgagtttaccaaacatgttacaagcgaatgtttgggctggatgcgacagcagcgcgctgagatggatatggtggcctggggtgtagacctagcttctgtggagcaacacatcaattcgcaccgaggtatccacaacagtatcggcgactatcgttggcagcttgataagattaaggctgacctgagggagaaatctgcgatctaccagctggaggaagagtacgagaatctgctcaaagctagtttcgagagaatggatcacctccggcagctgcagaacattatccaggcgactagcagggagataatgtggatcaacgattgcgaggaagaagaacttctgtatgactggtccgacaagaataccaacatcgcacaaaagcaagaggcctttagtataaggatgtctcagctcgaagtaaaagaaaaagaactgaataagctcaaacaggagtccgatcagctggtgctgaaccagcatccagcatctgataaaattgaagcttatatggacacacttcagacgcagtggtcgtggattctgcagataactaagtgcatcgatgtgcacctcaaggaaaatgcagcctattttcagttctttgaggaggcccagtccacagaggcatacttgaagggcttgcaggattccatccgcaaaaaatatccctgcgacaaaaacatgcctcttcagcacctgctggagcagatcaaggaattggaaaaagaacgagagaagattctcgaatacaagcggcaggtgcagaatctggtgaataagagcaaaaagatagtgcagttgaagccgcggaatcccgactacaggtcgaataagcccatcattctgagggcattgtgcgactacaagcaggatcagaagatagtgcacaagggagatgagtgtatcctgaaagacaataacgaacgctctaagtggtacgttactggcccagggggcgtagatatgctcgttcctagcgtgggcctgatcatcccaccaccaaatcctcttgccgtggacttgtcttgcaagatcgaacagtattatgaggccattctcgccctatggaaccagctatacataaatatgaaatcattggtgtcttggcactattgtatgatagatatagagaagatccgcgccatgaccattgctaaactcaaaacaatgcgacaggaagattacatgaaaacaatcgcagacttagagctgcactatcaggagtttattcgcaatagccaaggctcagagatgtttggggatgatgataagaggaagatccaatcacagtttacagacgcacaaaaacactaccagaccctcgtgattcagctgcccgggtacccccagcatcaaaccgtaactaccactgagatcacccaccatggaacctgccaggacgttaatcataataaagttatcgagaccaatcgcgagaacgacaaacaggaaacatggatgctgatggaactccagaagattcggaggcagatagaacattgtgaaggaaggatgaccctgaaaaatctgcccttggctgatcaaggctctagccaccacattacagtgaagattaacgagttgaagagcgtgcaaaacgactcccaggctatagctgaagtgctgaatcagctcaaggatatgctggcgaactttagggggtctgaaaaatattgctaccttcagaacgaagttttcgggttattccaaaagctggaaaatattaatggggtaactgatgggtatttaaattcactttgcaccgtcagggccctgttgcaggcgatcctccagacggaggacatgcttaaagtgtatgaggccagactcaccgaggaggaaacagtgtgccttgacttagataaagtggaggcatatcgctgcggattgaagaaaattaagaatgacctgaatctgaagaagtctctgctggccacgatgaaaaccgagctgcagaaggcgcaacagattcactcacagacaagccagcagtaccccctgtacgacttggatctcggaaagttcggtgagaaggtgactcaacttaccgatcggtggcagaggattgataaacagattgatttccgattgtgggatctggaaaagcaaataaaacaactaagaaattatcgggacaattaccaggcattctgcaagtggctctatgacgccaaacgtaggcaggacagtctggaatcaatgaaatttggcgattcaaacactgtcatgcgctttctcaatgagcagaagaacctgcacagtgagatctctggaaaacgggacaagagcgaggaagtacagaagattgccgagttgtgtgccaattcaattaaagattacgaacttcagctagcaagctatacttccggactggagactctgcttaatatccctattaagaggactatgattcagtctccatccggggtgatactgcaggaggctgctgacgtgcatgcccgctatattgaactcctgactagatctggagattactatcgtttcctgtctgaaatgctcaagtcactggaggatctcaaactgaaaaacaccaagatcgaagtgctggaagaagagctcagacttgcacgcgatgctaactctgaaaattgtaacaaaaacaagttcctcgaccagaacctacagaagtaccaagccgagtgctcacagttcaaggcaaaactggccagcctagaggagctgaagcgccaggcggagttggatggaaagtctgccaagcaaaatctggacaaatgttatgggcagataaaagaactcaatgaaaagataaccagattaacctacgagatcgaggacgaaaaacgaagaaggaaatctgtagaagatcggttcgatcaacaaaagaatgactacgatcaactgcagaaagctagacagtgcgagaaggaaaatcttggctggcagaaactggagagtgaaaaagccatcaaggagaaagagtacgagatcgagcggctgagagtgcttttgcaggaggaaggaacaagaaaaagggagtacgagaacgagcttgctaaggccagtaatagaatccaggagagtaaaaaccagtgtacccaagttgtgcaggagcgagagagcctgttagtaaagatcaaggtcctcgagcaagacaaagcacggctgcagcgcctcgaagatgaactgaacagggccaaatccactctcgaagccgaaacccgcgtgaagcagcggctcgagtgtgaaaagcaacagatccagaatgacttgaatcagtggaagacccagtacagtagaaaggaagaagcgatcaggaagatcgaatctgagcgggaaaagtccgagagggaaaagaatagtctccggtctgagattgaacgactacaagctgaaattaaacggattgaggaaagatgccgtaggaagcttgaagatagtacaagggaaacccagtcccaattagagactgaacgatcccggtaccagcgtgagatagataagctccggcagcggccctatgggtctcacagggagactcaaactgagtgcgaatggaccgtggatacctcaaagctggtcttcgacggtctgagaaagaaagttacagctatgcaactgtatgagtgccaactgatagacaagactactctggataagctgctgaagggtaagaagtctgtcgaagaggtggcaagcgaaatccagccattcctgagaggcgcaggctctattgcgggggccagtgcaagccccaaagaaaagtactcactcgtagaggccaagcgaaaaaagctgatcagcccagagtctactgtaatgttattagaagcccaggccgccactggcggcatcatcgatcctcaccgcaatgagaagttaacagtggacagcgccattgcaagagaccttattgatttcgatgacaggcagcagatttacgccgccgagaaggcaatcactggcttcgacgaccctttcagcggaaagaccgttagcgtttccgaggctatcaaaaagaacctgatcgatcgcgaaacgggcatgcggctgctagaggcccagattgcttccggtggcgtggtcgatccggtaaacagcgtatttttgccaaaggatgtcgcactggctaggggccttatcgaccgggacctgtataggtccctgaacgatcccagggattcccagaagaattttgtggaccccgtcactaaaaaaaaagtttcttacgtgcagcttaaggagagatgcaggatcgagccacacactggtctgcttctgctgtccgtgcaaaaacgaagtatgtctttccaaggtattaggcagcccgtaaccgtcactgagttagtcgattcaggcatcctgcggccatctacagttaacgagctggagtcagggcagatctcttacgacgaggtcggagagcgcatcaaggattttttacagggttcctcatgtattgcaggtatctacaacgagaccaccaagcagaagctggggatttacgaggccatgaaaatcgggcttgtaaggccaggaaccgccctggagttgctggaggctcaggcagccaccggcttcattgtggacccagtctctaatctccggctgcccgttgaagaagcctacaaacgtggcctggttgggatcgagtttaaggagaagctcctgagcgccgaaagagccgtaaccggatataatgatccagagactggcaatataattagcctcttccaggcaatgaataaggagctgatagaaaaaggtcacggcattcgtttgctcgaggctcagatcgcaacaggaggtataattgatcccaaggaatcccatcggctgcccgtagatatagcgtacaagcggggttacttcaacgaagagctctccgagatcttatccgaccctagcgacgacacaaaggggttctttgatccaaacaccgaggagaatctaacgtacctccagcttaaagaaagatgcatcaaggacgaggagacaggcctctgcctgctcccgctgaaggagaaaaaaaaacaggtgcaaacctctcagaaaaacacattgcgcaagcgcagagtcgtgatcgtagatccagagaccaacaaggaaatgagcgtacaggaagcttataagaagggccttatcgactacgaaaccttcaaggaactctgtgagcaagagtgtgagtgggaagaaattacgattaccggaagcgacgggtctacgcgagttgtgctagtggaccgaaagaccgggtcccagtacgatatccaggacgccattgacaagggactcgtcgatcgcaaattcttcgatcagtatcggtccggaagtctgtcactgactcaattcgctgacatgataagcctgaagaacggtgtgggcacctcctcctctatggggagcggtgttagtgacgatgtgttctcatccagtagacacgaatccgttagcaagatttccacaattagttccgtgcgcaatctgacaattagatccagttcattttctgacacgctggaggagtcttcccctattgccgctattttcgacacagaaaacctagagaagatttcaataacagagggcatcgagcgagggatcgtcgatagcataacggggcagcgcttgttggaggcacaggcgtgcaccggcgggatcatacaccccaccaccgggcagaagctgagtctgcaggatgcagtgtcacaaggagttattgaccaggatatggctaccagactaaaacctgcacagaaagcttttatcggcttcgagggagtcaagggaaaaaagaagatgtctgcagccgaagctgtgaaagaaaaatggctgccttacgaagcaggtcagagatttcttgagttccagtacttgactggtggactagtagacccagaagtgcacgggcgaatcagcaccgaggaggccattaggaagggctttattgatggccgtgccgcacagcgtctccaggataccagctcatatgccaagattctgacatgccctaagaccaaactcaagatatcatataaagatgccattaaccggtccatggtcgaagacataaccggtttaagactgctggaagcagcaagtgtgtcttcaaagggtctgcctagtccctacaatatgagtagcgcccccggcagccgatctggctcaagaagcggctcccggtcagggtctcgcagcggatctcggtccggctcccggagggggtcattcgacgctactggcaatagcagttactcgtactcttactccttttcttctagctccattgggcactag

SEQ ID NO: 23872 - DNA, 507 bp, synthetic construct
  misc_feature 1..507: note = Description of Artificial Sequence: Synthetic coding sequence
  source 1..507: mol_type = other DNA
atggagccccccaacctgtaccccgtgaagctgtacgtgtacgacctgtccaagggtctcgcaagacggctcagccccatcatgctagggaagcaactagaagggatttggcacactagtattgttgttcacaaagatgagttctttttcggatcggggggtatctcttcatgcccaccaggggggacactgctgggaccgcctgactccgtcgtggatgtcggctccacagaagtcactgaagagatttttctggaatacctatcttccctgggggagagtttattcagaggagaggcgtataacctgttcgagcataattgcaacacattttctaacgaagtagcgcagtttctgaccggccgtaaaatcccgtcctatattacggacttacctagcgaggttctatcaaccccattcggccaggcgttgcgcccgcttttggactctatccagattcaacctcctggcggttctagtgtgggtagacccaacgggcagtcatag

SEQ ID NO: 23873 - DNA, 561 bp, synthetic construct
  misc_feature 1..561: note = Description of Artificial Sequence: Synthetic coding sequence
  source 1..561: mol_type = other DNA
atgaagagcgacttctacttccagaagagcgagccccacagcctgtcttccgaggcactgatgcggagggccgtgtcactggtgacagatagcacttccaccttcctatcccagactacgtatgccttgatcgaggccatcacggaatacacaaaggccgtatacaccctgacgtcattatataggcaatacacgagtctgctgggaaaaatgaacagtgaagaggaggatgaggtctggcaggtgattattggcgcccgtgctgagatgactagtaaacatcaggagtatctcaaactggaaaccacttggatgactgcagtggggctgtctgaaatggcggcagaagccgcctatcaaacaggggctgatcaagcttctattactgcaagaaatcacatccagctggtgaaactccaagtcgaagaggtgcaccaactcagcaggaaggccgagaccaaactggctgaagcacagatagaagagttacgccaaaagacacaagaagaaggtgaagagagagctgaatccgagcaggaggcgtacttgagggaagattag

SEQ ID NO: 23874 - DNA, 588 bp, synthetic construct
  misc_feature 1..588: note = Description of Artificial Sequence: Synthetic coding sequence
  source 1..588: mol_type = other DNA
atggccgccctgaagagctggctgagccggagcgtgaccagcttctttcggtatcggcagtgtctgtgcgttcctgttgtggctaattttaagaagaggtgcttttcagaactgattagaccttggcataaaaccgtgacgattggattcggggtcacgctttgcgcggtgcctatagctcaagccgtgtacaccctcacctccctgtaccggcagtacacgagcctgttgggaaaaatgaatagcgaggaggaagacgaagtgtggcaagtcatcatcggcgcacgagcagaaatgacctctaagcaccaagagtaccttaagttagagacaacatggatgaccgcggttggcctttcagagatggctgccgaggcggcctaccaaacaggagcagatcaggccagtatcacagctcggaaccatattcagctggtgaagcttcaggtggaagaagtccaccaactgtcacggaaagccgagaccaagctggctgaagctcagattgaagaactgaggcagaagacccaggaggagggggaggaacgcgccgagtcagagcaggaagcatacctgcgcgaggactag

SEQ ID NO: 23875 - DNA, 588 bp, synthetic construct
  misc_feature 1..588: note = Description of Artificial Sequence: Synthetic coding sequence
  source 1..588: mol_type = other DNA
atggccgccctgaagagctggctgagccggagcgtgaccagcttcttcagataccggcagtgtctttgcgtgccagtggtagcaaatttcaaaaaaaggtgcttcagcgagctgatccgcccctggcacaagacagttactatcggcttcggcgttacactctgcgcagttcccattgcccaggcagtatataccctgacctcactctaccggcagtacactagtctactgggcaaaatgaatagcgaggaagaagacgaggtctggcaggtgatcatcggggcaagagcagagatgacatccaaacatcaggagtaccttaaactcgaaaccacttggatgactgcagtgggcctgtcagagatggcggcagaagccgcatatcagaccggagctgaccaggcttctataaccgcccggaaccacatccagctcgtgaaactccaggtcgaggaagtgcaccaactaagccgtaaggctgagactaaattagccgaagcacaaatagaggaactaaggcagaagacacaggaagaaggcgaagagagagccgagagtgagcaggaagcctacttgagggaggactag

SEQ ID NO: 23876 - DNA, 720 bp, synthetic construct
  misc_feature 1..720: note = Description of Artificial Sequence: Synthetic coding sequence
  source 1..720: mol_type = other DNA
atggccgccctgaagagctggctgagccggagcgtgaccagcttctttcgctaccgccaatgtctctgcgtgcccgtcgtggccaatttcaagaaaagatgtttttcagaactgattcgcccatggcacaagacagtaaccattggctttggagttaccctgtgtgccgtacctattgcccagaagtccgagccgcattcccttagcagtgaggcactaatgcgaagggctgtctctctcgtgacggactctacctccacgttcctgtcacaaaccacctatgcgctgatcgaggccatcacagaatacacgaaagccgtttacacactgacctcgctttacaggcagtatacatcgctcctgggaaagatgaatagtgaggaggaagacgaggtgtggcaggttatcatcggtgctcgggcagagatgacttcgaagcaccaggagtatctgaagcttgaaaccacttggatgacagccgtgggactctctgaaatggctgcagaagcggcctatcagactggggccgaccaggcctcaataacggccaggaatcacattcagctggtgaagctgcaagtggaagaagtccatcaactgagcagaaaggccgaaacgaaactggccgaagcacagattgaagagcttagacagaagacgcaagaggagggcgaggagcgcgctgagtcggagcaggaggcgtatctgagagaagactag

SEQ ID NO: 23877 - DNA, 561 bp, synthetic construct
  misc_feature 1..561: note = Description of Artificial Sequence: Synthetic coding sequence
  source 1..561: mol_type = other DNA
atgaagagcgacttctacttccagaagagcgagccccacagcctgtcatccgaagcactgatgagaagagccgtatctctcgtgaccgactcgacaagtacattcttatcccagaccacctatgcattgattgaggctattactgaatataccaaagctgtttataccctgacctccctctaccggcagtatacttccctccttggtaaaatgaatagcgaagaggaagacgaggtatggcaggtcatcattggcgcaagagctgagatgaccagtaagcaccaagagtatttaaagctggagactacatggatgacagctgtcgggttgtctgaaatggctgctgaggcagcctaccagacaggtgcggatcaagcgagcataacggcccgaaatcacatccaactcgtgaagctccaggtcgaagaggttcaccagctaagtcgcaaggcagagaccaaactggcggaggcacagattgaagagctgcgccagaaaacccaagaggagggtgaggaacgggcggagagcgaacaggaagcctatctcagggaggactag

SEQ ID NO: 23878 - DNA, 3822 bp, synthetic construct
  misc_feature 1..3822: note = Description of Artificial Sequence: Synthetic coding sequence
  source 1..3822: mol_type = other DNA
atggagccccccggcggcagcctgggccccggccggggcacccgggacaagaaaaagggtagatccccggacgaactgccgtctgctggcggggatggcggaaaaagcaagaaatttactctaaagcgcctgatggctgacgagttggaacgttttacgagcatgcggattaagaaagaaaaagagaagccgaattctgctcatcgcaacagtagtgcgtcttatggagatgaccccacggctcagagcctccaggacgtaagtgatgaacaggtactggtgttgtttgaacaaatgctcctggacatgaacctaaacgaggagaagcaacagcccctccgggagaaggacattatcattaagagagaaatggttagccagtatctgtacacctcaaaggcaggcatgtctcagaaggagtcctcaaagtctgccatgatgtatatccaagaactaagatcaggattgagagatatgccactattgtcctgcttggagtcattaagggtctccttgaacaataatcccgtgtcttgggtgcagacttttggcgcggaaggcctggcatcactcctggacattcttaaacggctccacgatgagaaagaggaaaccgcaggttcgtacgactctcgaaacaaacatgaaatcatccgctgtttgaaggctttcatgaacaataaatttgggatcaagacaatgctggagacagaggaggggatcttactgctcgtccgcgccatggatccggcagtgccaaacatgatgatcgacgccgcaaaattgctgtctgctttatgcatcctgccacagcctgaggacatgaacgagagggtgctggaggccatgacagagcgcgcggaaatggacgaagtcgaaagattccagcctctgctcgacggactcaagagcggaaccacaatagctctcaaagtaggctgcctccagctgattaacgctctcattaccccagcagaagagctcgacttccgggtccatattcggtcggagctgatgcgcttaggcttgcatcaggttctacaggacttgagagagatcgagaacgaggacatgagggtccaactgaacgtctttgacgaacagggcgaggaggactcttacgatctgaaaggtaggttggatgacatcagaatggagatggatgactttaacgaggtcttccagatactgctgaacacagtgaaggattctaaagcggagccacactttctaagcattctgcaacacttgttgctcgtaaggaacgattacgaagccaggcctcagtactacaagctgattgaggagtgtatctctcaaattgttcttcacaagaacggcgctgacccagatttcaagtgccgacacctacaaattgaaattgaagggctaatcgatcagatgatcgataaaaccaaggtggagaaatcagaagctaaagctgccgagctcgaaaaaaaattggactccgagcttacggcgcgccacgagttgcaggtcgaaatgaaaaaaatggaatctgatttcgagcagaaactgcaggacctgcagggcgagaaggatgccttgcacagcgagaagcagcagatcgccacagaaaaacaggacttggaagctgaagtttctcaactgaccggagaggtggccaagctcacgaaggagctggaagatgccaagaaggagatggcctcactttctgctgccgccatcaccgtccccccatccgtaccgtcgcgcgctccagtgccacctgctccacctctacctggggattcgggcaccatcatcccccctcctcctgcacctggcgattccacgacgcctccccctccccctcctccccccccccctcctccacccctgcccggaggcgtgtgtatcagttccccacctagccttcctggaggtactgcgatctcccccccgccacccctgtccggggacgccaccatcccacccccaccccctctccctgagggtgtcggaatcccttccccgagttccctccccggaggcaccgccatcccaccccccccacccctgcctggctccgcacgcataccaccgcccccaccaccgctgcctggatctgccggaatacctccacctcccccccccctgcccggggaagctggaatgcccccacccccaccacccctgcccgggggccccgggatcccccccccccctccctttcccgggggacccggaataccacccccacctccaggtatgggtatgccgccaccacctccctttggcttcggtgtgcccgccgctcccgtactgccttttggccttactcccaagaagctgtataagccggaagttcagctgcgcaggcccaactggtctaaactagtcgcagaagatctaagccaggactgcttctggaccaaggtcaaagaggatcgcttcgagaataacgaactgttcgcaaagttgactctgaccttttcagcccaaactaaaaggaccaaaaaagcaaagaaggatcaggagggcggcgaggaaaaaaaatcggttcagaagaagaaggttaaggaactcaaggtgctggacagcaaaactgcacagaatctttctatattcctcggcagctttcgcatgccatatcaggagattaagaatgttattctggaggtaaatgaggccgtactgacagagagcatgatacagaatcttattaaacaaatgcccgagcctgaacagttaaagatgctgtctgagttgaaagatgagtacgacgaccttgcggagagcgaacagtttggcgtggtgatgggcacagtcccccgtctgcgccctaggctaaatgccattctcttcaagcttcagttcagcgagcaagtggaaaacatcaagcccgagatcgtttctgtgacagccgcttgcgaagaactgcgaaaatcggagagcttcagtaacctgctggaaatcactctgctcgtgggaaattatatgaatgctggcagcagaaacgcaggggcattcgggttcaatataagcttcttgtgcaagttaagggataccaaatcaacggaccagaaaatgaccctcttgcactttctggcggagttgtgcgagaatgactaccctgacgtacttaaatttcccgacgagttggcacacgtggaaaaggctagtcgtgtctctgctgagaatctgcagaaaaatctagaccagatgaagaaacagatctctgatgttgagagagatgtgcaaaactttccggcagccacagatgagaaagacaaatttgtggaaaaaatgacgatattcgtgaaagacgctcaggagcagtacaacaagctccggatgatgcatagcaacatggagaccttgtataaggaactgggagagtattttctgttcgatcctaagaagctgtctgtggaagagttctttatggatttgcacaattttcggaacatgttcctgcaagcagtaaaagagaatcagaagagacgcgagactgaagagaagatgaggagggccaagctcgcgaaagaaaaagccgagaaagagcgcctcgagaaacaacaaaaacgggagcagcttatagatatgaacgccgagggagatgaaactggcgtgatggactccctgctggaggccctgcaaagcggtgcagccttcagacggaaacgcgggccgcgacaagccaacagaaaggccggctgcgccgtcacctctctacttgctagcgaactcacaaaggatgatgctatggctgcagtacccgctaaggtctctaaaaattcggaaacattcccgacaattttggaggaagccaaagagctggtcgggagagcctcctag

SEQ ID NO: 23879 - DNA, 3810 bp, synthetic construct
  misc_feature 1..3810: note = Description of Artificial Sequence: Synthetic coding sequence
  source 1..3810: mol_type = other DNA
atggagccccccggcggcagcctgggccccggccggggcacccgggacaagaaaaaggggagatcccccgatgagctgccctctgccgggggggacggaggaaagtctaagaaattcacccttaaacgactcatggccgatgagctcgaacgatttacctccatgcggattaagaaggagaaagagaagcctaatagcgcccatcggaacagtagcgcttcatatggcgatgatcccacagcccagtctttacaggacgtgagcgatgagcaagttttggtcctgtttgagcagatgctgctggacatgaacttaaatgaggaaaagcaacaacctctgcgagagaaggatataatcattaagagagagatggtgtctcagtacctttacacatccaaggcaggtatgtctcaaaaagagagcagcaagtccgccatgatgtacatccaggagctccgtagcgggcttcgagatatgcctttgctgagctgcctggaatcactacgtgtctcactgaacaataatccggtgagctgggtgcaaacgtttggcgcagaaggtctggctagcttactggatatcttaaaaagacttcacgacgaaaaggaggagacagcgggcagctatgactctaggaataaacacgagataatccggtgcctgaaggcattcatgaacaataagtttggcattaagactatgctggaaacggaagaggggattctccttctggtgcgggccatggatcctgctgttcccaatatgatgatcgatgccgctaagctgttgtctgctctgtgtattcttcctcagcccgaggatatgaacgagagggtgctggaggcaatgaccgagcgagcagaaatggatgaagtcgagcgcttccagcccttgctggacgggctgaagtctggcaccactatcgccctcaaggttggatgtctgcaactaatcaatgctctgattacccccgccgaagagctcgattttagggttcatataagatccgaactgatgcgtctgggcctgcatcaggtgcttcaggacctgagggaaattgaaaatgaggacatgcgagtgcaacttaacgtatttgacgaacaaggtgaggaggactcctacgacctgaagggacggttggacgacattaggatggagatggatgattttaacgaggtgtttcagatcctccttaataccgttaaagattctaaagccgagccccattttctgtctatcctacaacacctcctgttagttagaaacgactatgaggcccggcctcagtattacaaactgatagaagaatgtatctcccagattgttctacacaagaatggtgcggatccagactttaagtgtcgccacctgcagatagagattgaaggactcattgaccagatgatcgataagacaaaggtggaaaaatcagaagccaaggcagccgaactcgagaagaaactggattctgagctcactgcaaggcacgagctccaggtggagatgaagaaaatggagtcagactttgagcaaaaactgcaagatctgcagggcgaaaaggacgccctacactctgagaagcagcagatcgcaactgagaaacaggatctggaggcagaggtctcgcagttaactggagaagtagctaagcttacaaaagagctggaagatgccaagaaagagatggccagcctatctgctgccgcaattaccgtgcccccctccgtgcccagcagggcccccgtgcccccagccccacctctcccaggcgactctggaactataattcccccgccgcctgccccgggcgactcaacgacgccacccccccctcccccacctccgcctcctccaccccctctgcccggtggtgtgtgtatttcttctccgccttcgctaccgggcgggaccgccatcagtccccccccaccgctgagcggagatgccaccataccacctccacctccgctaccagaaggcgtaggaatcccctccccatcgtcccttccagggggcactgccatacctccccctcctcctcttccaggaagcgcccggataccaccacctccacctcctctcccaggctctgccggcatcccaccgcccccacccccccttccaggagaagccggtatgcccccccctccgccacctcttccgggcggaccaggcataccaccacccccgccttttccaggcggccctggaattccccccccccccccgggcatgggtatgccaccccccccaccattcggctttggtgtgcccgctgctccagtgctgccgttcggactgactcctaaaaagttatacaagcccgaggtacaattaagaagaccgaattggtcaaaacttgtagctgaagacctgagccaggattgcttttggacaaaggtgaaggaagataggttcgaaaacaatgaactgtttgcgaaactgaccttgaccttttcagcccagacaaagaccaagaaagaccaagagggaggtgaggaaaaaaaatccgtgcaaaaaaaaaaagtgaaggaactgaaggtgctggacagcaagaccgcacagaatctgagtattttcctgggttcctttcggatgccatatcaggagataaaaaatgtcatcttggaggttaatgaggctgtgctgaccgaatccatgatccagaacctcattaagcagatgcccgaaccggagcagctgaaaatgctttctgagctgaaggacgaatacgatgatctggctgagagtgagcaattcggtgtcgtcatgggaaccgtgccaaggttgcggccacgcctcaacgccatactgttcaagctacaattcagtgagcaagtggaaaacatcaaaccagaaatagtgtctgtcacggccgcttgtgaagaacttagaaaatccgaatcgttcagcaatctcctcgaaattactctgttggtgggaaactatatgaatgctggatcccgcaacgcaggagccttcggattcaatatcagctttctgtgtaaattgagggatacgaagtccacggatcaaaagatgactctcctgcatttcctggccgaactctgtgagaacgactatcctgacgtacttaaattccccgacgaactggcccacgtggagaaggctagcagagtaagcgctgaaaacctccagaaaaacctggatcaaatgaaaaagcaaatttccgacgtcgaaagagacgtgcagaactttcctgccgctaccgatgagaaggataagtttgtggagaagatgacgtctttcgtaaaggatgcccaggaacagtacaacaaactgcgcatgatgcattccaacatggagactctttataaggaattaggagagtattttctttttgaccccaagaaactcagtgtggaagagttcttcatggatttacacaatttccgaaatatgtttctgcaggctgtgaaggagaaccaaaagcgccgagagactgaagaaaagatgcgacgggcaaagctcgctaaggagaaagccgaaaaggagcgtcttgaaaagcagcaaaaacgcgaacagctgattgacatgaatgcggagggcgacgagacgggggttatggacagtctgctcgaggctctgcagtcaggcgctgcctttagacgcaaacggggcccacgtcaggctaatcggaaggcagggtgtgctgttacatcactcctggcaagcgagctgaccaaggatgacgcaatggccgctgtgcctgccaaggtgtctaaaaactccgagacatttcctaccattctggaggaggccaaggagttagtgggtagagccagttag

SEQ ID NO: 23880 - DNA, 3792 bp, synthetic construct
  misc_feature 1..3792: note = Description of Artificial Sequence: Synthetic coding sequence
  source 1..3792: mol_type = other DNA
atggagccccccggcggcagcctgggccccggccggggcacccgggataaaaaaaagggtcgctcaccggatgaactcccctcggccggtggcgatgggggaaaatctaaaaaattcctggagcgcttcacatctatgagaatcaagaaggaaaaggaaaagcctaattctgctcaccgaaactccagcgcctcttacggagatgatccgaccgcccagtccctgcaggacgtctctgatgagcaagtgcttgtgttgtttgagcaaatgctgctggatatgaacctcaacgaggaaaagcagcagccgttgagagaaaaggatatcattatcaaaagagagatggtctcacagtatctctataccagtaaggcaggcatgagtcagaaagagtcttctaaatcagcaatgatgtacattcaggaactcaggtcaggactgagggacatgcctctcctctcctgtcttgaatctctcagagttagcttgaacaataaccccgtgtcctgggtccaaactttcggcgctgaggggctggctagcctactggatattcttaaacggctccacgacgagaaggaggaaaccgcaggcagttatgattcgcgcaacaagcacgagatcatacggtgcttaaaggccttcatgaacaacaagttcggaatcaagaccatgctggagacagaggagggcatcttattgctggtgcgcgccatggatcctgcagtacccaacatgatgatcgatgctgcaaaactcctgtccgcactctgcattctaccccagcccgaagatatgaatgaaagggtcctggaagccatgacagaacgagcagaaatggatgaggtcgagcgcttccagcctctgctggacgggctcaagtcgggcactacgatcgccctgaaagtaggctgcctgcagttaatcaacgccctgatcacacccgctgaggagcttgattttagagtacatatacggtcggagctgatgagattggggctgcatcaggttctccaggatctcagagaaattgaaaatgaggacatgagagtacagcttaacgtctttgatgagcaaggcgaagaagactcttacgacttgaagggacggctcgacgacatccgcatggagatggatgactttaatgaggtgtttcaaatactgctgaataccgtcaaagattctaaggctgagccccattttctttctatcctgcagcacctgctgctagtgcggaacgactacgaagctaggcctcaatattacaaattaatcgaggagtgcatcagccagatcgtgcttcacaaaaatggagcagatcccgattttaagtgcaggcatttacagatcgaaatcgaaggactgatcgaccaaatgatcgataagacaaaagtcgagaaaagcgaagcgaaggctgccgagttggagaagaagctggacagcgaactgactgctcggcatgagctccaggttgagatgaagaagatggagagtgattttgagcaaaaactgcaggatttgcaaggtgagaaggatgctctacacagcgagaagcaacagatagcaactgagaaacaagatctggaagcggaagtgagccagctaaccggcgaagtcgcgaagctgacaaaagaactcgaagacgcgaagaaagagatggcttctctcagcgccgctgcaattacagtcccgccttctgtcccatctcgcgcccctgtacccccagcccccccgctccctggcgattctggtaccataattcccccaccaccagctcctggtgatagtacaacaccccctcccccaccacccccccctccaccccctccccccctcccaggaggcgtgtgtatctcctcaccgcccagtctgcccggcgggacggctatctcaccccctccacctctgtctggggacgccactatccctcccccgccccctctgcccgagggcgtcggaatcccttcaccttcctctttacctgggggcacagctatcccacctcccccgcccctgcccggatctgctcggatccccccaccccccccacccttgccagggtccgcaggcatccctccccctccccctcccctaccaggagaagcgggtatgccaccaccaccgcccccgttgccagggggacccggaatcccccctcctcccccattccccggcggccccggcatccctccaccacctccggggatgggaatgcccccccctcctccttttggatttggtgtaccagccgcccctgttttgcctttcgggcttacccctaaaaaactgtacaaacccgaagtgcagctgagacggccaaattggtctaagctggtagccgaagatctgtcacaagattgtttctggacaaaagtgaaagaggaccggtttgagaataatgaattattcgcaaaactcacgctcaccttcagcgcacagactaagacttccaaggccaagaaagaccaggaaggcggcgaagaaaaaaagtccgtacagaaaaaaaaagtaaaagaattaaaggtgctggatagcaagacggcacaaaatctgtctatatttttggggagtttcaggatgccctaccaggagattaagaatgttatccttgaggtgaatgaggctgtactgactgagagcatgatccagaatctcattaagcagatgcctgaacctgagcagttgaaaatgctatccgagctgaaggacgagtacgatgacttggctgagtcggaacagttcggagtcgtgatgggcactgtgcctaggttgcgcccaagactaaatgcgatcctcttcaagctccagttttctgaacaggtcgagaacatcaaacccgagattgtgtccgtaacagcagcatgcgaagaactacggaaatccgaatcattctccaacttgctcgaaatcacactccttgtgggtaactatatgaatgccggaagtcgcaacgccggtgcatttggcttcaacatttcctttctgtgcaaactgcgcgatactaagtctacagaccagaagatgactctgctgcactttctcgcggagctgtgtgagaacgattatcctgacgtgcttaaattcccggacgaactcgcacacgtcgaaaaggcctcaagggttagtgccgagaatctacagaagaatctggaccagatgaaaaaacagatcagtgacgtcgagcgggatgttcagaacttccctgctgccaccgacgagaaggataagtttgtggagaagatgacttcctttgttaaagatgcccaggaacagtataacaaattacgaatgatgcattcaaatatggaaacactttataaggaactaggcgagtattttctatttgatccgaagaagctctctgtggaagaattttttatggatctccacaattttagaaatatgttcctccaggctgtcaaggagaatcagaagcggcgggaaaccgaggaaaaaatgagacgcgccaagctcgcaaaagaaaaagccgagaaggaacggctcgagaaacagcagaaaagggaacagctgattgatatgaacgccgaaggggacgaaacgggcgtcatggactctctgttggaggcactccagagcggagccgcattcaggaggaagagagggccccgacaggctaatcggaaggctggatgcgccgttacctccctcctggcctctgagttgacaaaggatgatgccatggctgcagttcccgctaaagtttctaagaatagtgaaacctttcctactatattagaggaagcaaaggaactggtagggcgagcctcatag

SEQ ID NO: 23881 - DNA, 3819 bp, synthetic construct
  misc_feature 1..3819: note = Description of Artificial Sequence: Synthetic coding sequence
  source 1..3819: mol_type = other DNA
atggagccccccggcggcagcctgggccccggccggggcacccgggacaaaaagaagggacgatccccggatgagctgcccagcgcaggcggcgacggaggtaagtctaagaaattcacattgaagcgcctgatggccgatgaactggaacggttcacatccatgcgtatcaagaaggaaaaggagaagcctaactccgcacaccgcaattcatccgcgtcatacggggacgaccctaccgctcaatcactgcaggacgtgtccgatgagcaggtccttgtgctttttgagcagatgctgctcgatatgaatctaaacgaggaaaagcagcaaccattacgagaaaaggatatcattattaagagggaaatggtgagtcagtatctgtatacctctaaagcgggcatgagccagaaggaatcatctaaaagtgccatgatgtatatccaggagctaaggtcagggttgcgagacatgccacttctctcgtgcctggagagcctgcgcgtaagccttaataacaacccggtcagctgggtccagacattcggcgctgagggtctggcctctctcctggacattctcaagcgcttacatgatgaaaaagaggaaacagctggatcatacgactccagaaataagcacgaaattattcggtgcttgaaggccttcatgaacaacaagttcggtattaagaccatgctggagaccgaggagggcatcctgctgctggttcgagctatggatcctgctgttccgaacatgatgatagacgccgcaaaattgctctctgctctgtgtatcttacctcagccagaagatatgaacgaacgagtgttagaagccatgaccgaaagagccgaaatggatgaagtcgaaagattccagccactgctggatggattgaaatcagggaccaccatagccctcaaggtgggctgtctgcagttaatcaatgccctcatcacaccagccgaagagctggattttagggtccatatcaggagcgagctcatgcggctgggactccaccaggtcttgcaagatctgcgcgaaatagaaaatgaggatatgcgtgtacagctgaacgtgtttgacgagcagggcgaggaggattcatacgacctcaagggcaggttggatgacatacgaatggagatggatgactttaatgaagtcttccagatcctcttaaatacagttaaggactccaaggcggagccccactttttaagcatccttcagcacctgttgctggtcagaaacgactacgaagctcggccccagtactacaaactgattgaagagtgcataagccagattgttctccacaagaatggtgcggacccggacttcaagtgtcggcatctccagattgagatcgaagggctgattgaccagatgattgataaaaccaaagtcgagaagtctgaggccaaggctgcggaacttgagaagaaactcgacagtgagcttaccgccaggcacgaacttcaagtggagatgaagaaaatggagtcagacttcgagcaaaagctgcaggatttacagggagaaaaggatgctttacactctgagaaacaacaaattgcaaccgaaaaacaagacctcgaggcagaagtgtctcagttgaccggagaggtggcgaagctcactaaggaactggaagacgccaaaaaagagatggcttccctttcagccgccgctattaccgtgcccccttcagtgcccagccgtgctccggtcccgccagccccgcccttacccggcgactcagggaccatcatcccccctcctcctgctccaggagactctacaactcccccgccgcctcctccccccccaccaccacctcctccactcccaggcggggtctgcatctcctcacctccctccctgcccggggggactgccatatctcccccaccccctctgagcggcgatgccacaattcccccgcccccaccactgcccgagggcgtggggatccccagcccctcgtccctgccaggcgggacggcaatccctccgcccccgccactaccaggttctgcgaggatccccccccctccaccaccactgcctggatctgcagggatacccccccctccaccgcctcttcccggggaagctgggatgccacccccccctccacccctcccaggtggccccgggatccctccccccccccctttccctggcggtccaggaattccacctccgccgccaggtatgggcatgccccctccacccccgtttggatttggagtgcctgctgctcctgtactgccgttcgggttaacaccgaaaaaactgtacaagccagaggttcaactgcgtcgacctaattggagcaaactcgttgctgaagacctctcacaagactgcttttggacaaaggtgaaagaggatcgattcgaaaataatgaactatttgctaaattaaccttgacgtttagcgcccaaaccaagacatcaaaagcaaagaaagatcaagaaggcggggaggaaaaaaaatcagttcaaaagaagaaggtgaaagaactcaaggtgctagacagcaagactgcacaaaatctctcgatattcttgggatcctttcggatgccctaccaggaaatcaagaacgtgatactcgaggtcaatgaggcagtgctcacggagtcaatgattcaaaatctaatcaaacagatgcctgagccagagcaactgaagatgctgagcgagctgaaggacgagtatgacgatctcgccgagtctgagcagttcggggtggtcatggggactgtgccaaggctgaggccacgtctcaatgcaatcctgtttaaactgcagtttagcgaacaggtagagaatatcaagcctgagattgtaagcgtgaccgcggcctgtgaggaactacgcaaatccgaatcattcagtaaccttctggagataactcttcttgtgggaaattatatgaatgccgggtcgcgtaacgccggcgcctttgggtttaacatctccttcttgtgcaagttacgcgacaccaaatctactgaccaaaaaatgactctgctccactttctagcggagctttgcgaaaatgactatcccgacgtgctgaaattcccagacgaactggcgcacgtcgaaaaggcttccagagtctctgcagaaaatctgcaaaaaaatctggaccaaatgaaaaaacagatctccgacgtcgagcgggacgtacagaatttccctgcggctacagacgagaaagacaagttcgtcgagaaaatgacgtcattcgtgaaggatgcccaggaacagtacaataagctgcgcatgatgcatagcaacatggagaccttgtacaaagagctgggcgagtactttttgtttgatccaaagaaactctccgtggaggagttctttatggacctgcacaattttaggaacatgttcctccaggcagtcaaggagaaccagaagcgaagagagacagaggagaagatgaggcgcgctaagttggctaaggagaaggccgaaaaggagagacttgagaaacagcagaagcgagagcaactgatcgacatgaatgcagaaggagacgaaaccggtgttatggattccctgctggaagccctgcagtcgggggccgcctttcgccgaaaacggggacccaggcaagccaaccgtaaagcaggttgcgcagtcacatcacttttggcctcagagttgacaaaggatgacgcaatggccgccgtgccggccaaggtgtccaaaaattctgagacatttccaaccatactggaggaagctaaggagctagtggggagggccagttag

SEQ ID NO: 23882 - DNA, 3747 bp, synthetic construct
  misc_feature 1..3747: note = Description of Artificial Sequence: Synthetic coding sequence
  source 1..3747: mol_type = other DNA
atggagccccccggcggcagcctgggccccggccggggcacccgggataagaaaaagggccgctctcctgacgaactaccgagtgcaggcggcgacggaggcaagtcaaagaagttcctggagcgatttacctcgatgaggatcaaaaaagagaaagagaagcccaactccgcacaccggaactccagcgcgagctacggcgacgaccctacagcacaaagtctgcaggatgtgagcgacgagcaagtgctggtattgtttgaacaaatgttgctggacatgaaccttaacgaagaaaagcagcaaccacttagggaaaaagacataatcataaaaagggagatggtaagccagtacctctacacatccaaagctggaatgtcacagaaggagagttcaaagagcgcgatgatgtacattcaggaacttcgatctggattgagggacatgcccttgctgagctgccttgagagcttgagggtgtccctaaataacaaccccgtgtcctgggtgcagacttttggggccgaaggcctggcctcactcctggatatcctgaaaaggcttcacgacgagaaggaagaaacagctggatcttacgacagccgcaacaaacacgagattatacgctgcctgaaggcctttatgaacaataaatttgggatcaaaaccatgctcgaaaccgaggaggggattctcctgctggtgcgggcaatggaccctgctgtccctaacatgatgatcgacgctgctaagcttctcagtgccctctgtatactccctcaacctgaggacatgaatgaacgtgttctcgaggccatgacagaaagggccgaaatggacgaggtagagagattccaaccgctcctggatgggctgaaatctgggacaaccattgcactgaaagtagggtgcttgcagctgattaacgctctaatcacgcccgcagaagaactggacttcagggtccatattagatccgaactaatgcggctcgggttgcatcaggtgttgcaggacttacgggagatagaaaatgaggatatgagagttcagttaaatgtcttcgatgaacagggggaggaggatagctacgacctgaaggggcggcttgacgacatacgcatggagatggacgacttcaacgaggtgttccagattttgctgaacacagtgaaggattcaaaggctgagcctcatttcttgagtattcttcagcacctgctgcttgtgaggaatgattacgaggcgaggcctcaatattacaaactcatcgaggaatgtatatcacagatagtgctgcacaaaaacggagctgatcctgatttcaaatgccgccatctccagatcgaaattgaaggtttgatcgatcaaatgattgataaaaccaaggttgaaaagtccgaagctaaagccgcggaattagagaaaaaactggacagcgaactgaccgccagacatgagctgcaggtggaaatgaagaagatggaaagcgactttgagcagaagctacaggacttgcaaggggagaaagatgccctgcattctgagaagcagcaaattgccaccgagaagcaagacctagaggctgaggtgtcccagctgaccggagaagtcgctaaactaaccaaggaactcgaggatgccaagaaggagatggctagcctctctgccgccgcgattacagtcccgccctcagtcccatcacgggcgccagtgccacccgcacctcctctccctggtgactccgggacaatcatcccaccgccacccgccccgggcgattccaccactccccctcccccgcctcctcctccccccccccctccgccactccccgggggaacggctatcagcccccctcctcctttgtcgggggacgctacaatcccaccccccccccctctgcctgagggggtggggatcccaagtcctagctccctgcccgggggtaccgcaataccaccaccgccacccctgcctgggtccgctagaatccctcctccccctccccctttgcccggctcagccggcatcccacctccgcccccacccctgccaggggaggcaggaatgcctccccccccccccccactccctggcggaccaggaatccccccacccccccccttccctggcgggccaggcattcctcctcccccccccgggatggggatgcccccccccccaccatttggctttggcgttcctgccgctccagtccttccgttcggactcaccccaaagaaattgtacaaacccgaggttcagctgagacgcccaaactggtccaagctagtcgcagaagacctttcgcaggactgcttttggacgaaggtgaaagaggacaggtttgagaataacgaactcttcgctaaactcaccctgaccttctctgcacagaccaagacgaaaaaagaccaggaggggggggaagagaagaaaagcgtgcaaaaaaaaaaagtgaaggagctgaaagtgctcgactccaagactgcccagaacctgagcatctttcttgggagctttcggatgccttaccaagagatcaagaatgtgatcctggaagtgaacgaggccgtgctaactgaatcaatgattcagaatctcatcaagcaaatgcccgagccggagcagttgaaaatgctctctgagttgaaggacgaatacgatgacctcgccgagtcagaacagtttggtgtggtaatgggcacagtgcccaggctgagaccccggctgaacgcaatactgtttaaactgcagttttcagagcaggtggagaacatcaagcccgagatagtgtccgttacggctgcctgcgaggagctgcgcaagagtgagagcttcagtaatttgttggagatcaccctcctggtgggtaattacatgaacgcgggatcccgtaacgccggagcgttcggatttaatatcagcttcctctgcaagctgagagacactaagtcaaccgatcagaaaatgaccctgttgcatttcttggcagagctgtgtgagaatgattaccccgatgttctgaagttcccggacgagctggcacacgtggagaaggcatcaagggtctctgctgaaaacttgcaaaagaacctggatcaaatgaagaagcaaatctccgacgtagaacgtgatgtgcagaactttcctgccgctacagatgagaaggataaattcgtagagaagatgacaatatttgtcaaggatgcacaggaacagtataacaagttgcggatgatgcattccaatatggaaacactgtacaaggagctgggcgagtacttcctcttcgatccaaagaaactgtctgtcgaggagttctttatggacctccacaatttccggaatatgtttctacaggccgtgaaagagaaccagaagagacgcgagactgaggaaaaaatgcgccgggcaaaactcgcaaaggagaaggctgagaaagaacggctagagaagcagcaaaagagagaacagctaatcgatatgaatgctgagggggatgaaaccggggtgatggattctcttttggaagcactacagagtggggctgcattccgccgcaagcgcggcccccgacaggccaatcgaaaagctgggtgtgctgttacgagccttttagctagcgagttaacaaaagacgacgctatggcagccgtccccgctaaagtgtctaagaacagcgagacattccctactattctagaggaggcgaaggagttagtgggcagggccagctag

SEQ ID NO: 23883 - DNA, 3795 bp, synthetic construct
  misc_feature 1..3795: note = Description of Artificial Sequence: Synthetic coding sequence
  source 1..3795: mol_type = other DNA
atggagccccccggcggcagcctgggccccggccggggcacccgggataagaaaaaggggaggagcccagacgaattgccttctgccggaggcgatggagggaagagtaaaaaatttctggagcgatttacatccatgagaatcaagaaggagaaggaaaagcctaacagcgcacatcgcaattcctctgcgagctacggcgatgaccctacagcacagagtcttcaggatgtgagcgacgaacaggttctggtcttgttcgagcagatgctgctagacatgaatctgaacgaagaaaagcaacagcccctcagggaaaaggacattattatcaagagagaaatggtatctcagtatctgtatacatcaaaagcaggtatgtcacagaaggagtcctccaagtctgcaatgatgtacattcaagaactccgttcaggactccgggacatgccactcctcagctgtctcgaatccctccgcgtatccctgaataacaaccccgtatcgtgggtccagacctttggtgcggaaggattggctagcttgctggacatcctcaagcgcttgcacgacgagaaagaagaaacggcaggctcttacgacagcaggaacaaacatgagattatccggtgtttaaaagccttcatgaacaataaatttggaattaagacaatgctggaaacagaagagggaatccttctactggtgcgggccatggatcctgcagtgcctaacatgatgatcgatgctgccaaactgttatctgcattgtgtatcctacctcaacccgaggatatgaacgagcgtgttctggaagccatgacagaacgggccgaaatggacgaagttgagagatttcagccattattagatggtctcaagagcggaactactatcgccctcaaagtggggtgtctccaactcatcaacgctctcataactccagctgaggagctggattttcgtgtgcatatccgctcagagctcatgcgcttaggactccatcaggtgctgcaggatctcagagagatcgagaatgaggacatgcgcgtccagctgaacgtgttcgacgagcaaggggaagaagactcttacgacctgaagggacggttggacgacattcgaatggaaatggacgacttcaacgaggtcttccagatcctactcaacacagtgaaggattccaaggctgaaccacatttcttgtctattctgcagcacctgctcctggtccgcaacgattatgaagcacgtcctcaatactacaagcttattgaggagtgcatctcacagattgtgcttcacaagaatggagctgatccagatttcaagtgtaggcacctgcagattgaaatagaagggcttatcgaccagatgatcgacaagaccaaagtggagaaatccgaagcgaaagcagctgagcttgagaagaagttggactctgagcttacagcgagacacgagctccaggtagaaatgaagaagatggagtcggacttcgaacagaaactgcaggatcttcagggcgagaaagacgctctgcattccgagaaacagcaaatagcaaccgagaaacaagacctggaggccgaggtttctcagcttactggggaagtcgcaaagctgaccaaggagcttgaggatgctaagaaggagatggccagtctttcggctgccgctataactgttcccccctctgtgccctcgcgggctcccgtgccacctgcgcctccccttcctggagactctggcactattatccccccccccccagcccccggcgattccacaacgccgccacctcccccaccaccgcccccgccaccacccccattgcctgggggcgtctgtatttccagccctccaagtctaccaggcggtacagctattagtcctcctcctccactcagcggggatgcgacgatccccccaccccccccactccctgaaggcgtagggatcccaagcccctctagcctgcccggaggcaccgcaatccctcctccgcctccactgcctggaagtgcacgtataccccccccaccaccccctcttcctgggagtgctggcatcccgccccccccccctccacttccaggagaagctgggatgccacctcctcccccgccactcccaggaggtccgggcatcccgccccctccgcccttcccaggcggccccggcattccacctccaccccctggcatgggcatgccacctcccccaccctttggattcggggtgccggctgcaccagtgctgccatttggcctgactcccaagaagttgtacaaacccgaggtgcagctccgccggcctaactggtccaagttagtagcagaagatctgtcccaagactgcttttggactaaagttaaggaggaccgattcgagaacaacgagctgttcgctaaattgacactcacgttctctgcacagacgaaaaggacgaagaaagccaaaaaggatcaggaagggggcgaagaaaagaagtcagtccagaaaaagaaagtgaaggaattgaaggttctggattcgaagacagctcagaatctgagtatctttctggggagcttccgaatgccttatcaggagataaagaatgtgattcttgaggtcaacgaggccgtgctgacagagagcatgattcaaaaccttatcaaacagatgcccgaacccgaacagctgaaaatgctgtcagagcttaaagatgagtatgacgatttggccgagagcgagcagtttggcgtggtaatggggaccgtaccaaggctgcgccctcgattaaacgctattctcttcaaactccaattctctgagcaagttgagaatattaaaccagagatagtgtcagtgacggccgcctgtgaggagctgagaaagtcagaatctttttctaacctgctggaaatcacgttattagtcggaaactacatgaacgctggcagtcgtaacgccggagccttcggtttcaacatctccttcctatgcaagttgagggacaccaaaagcacagatcagaaaatgacactcttacacttcttggccgagctttgcgaaaatgactacccagatgttctcaagttccctgatgagttagcgcatgtcgagaaggcaagccgcgtgtccgccgaaaatctgcagaagaatctggatcaaatgaagaagcagataagcgacgtggaaagagatgttcagaactttcccgccgcgaccgacgagaaggacaagtttgtggaaaaaatgaccattttcgtgaaagacgcgcaggagcagtacaataagctgagaatgatgcactcaaacatggagacgctgtataaagaactcggggagtattttctgtttgatccgaaaaagctatcagtggaagagttcttcatggacctgcacaacttcaggaatatgttcctgcaagcagtgaaggaaaaccaaaaacggagggagacagaagaaaaaatgcgacgggccaagctagcaaaggagaaggccgagaaggagcgtctggagaagcaacagaagagggagcagctcatcgatatgaacgcggagggtgacgagaccggcgtcatggacagtctactggaggctctccaatcaggcgcagcctttcgccgtaagcgcggtccaaggcaggctaaccggaaagcaggctgtgcggtgacatcacttttagctagcgagctgaccaaggacgacgccatggcagccgtgcctgcgaaagtctcaaagaatagtgagactttcccgaccattctcgaagaggccaaggagctggtggggagagcttcctag

SEQ ID NO: 23884 - DNA, 855 bp, synthetic construct
  misc_feature 1..855: note = Description of Artificial Sequence: Synthetic coding sequence
  source 1..855: mol_type = other DNA
atggccagcctgagcgccgccgccatcaccgtgccccccagcgtgccatcgagggcgccagttcccccagctccaccattgcccggtgactccggtaccataatacctcctcctccagccccaggggacagcaccaccccaccccccccaccccctccgcctccccctccacccccacttcccggaggtgtttgcatttctagccctccttcgctgccaggggggacggccatctctccccccccaccactatccggagacgcaactatcccacctccaccaccattgccggagggagtcggaattccctctccctcaagcctgcccgggggaaccgccatacctcctcccccgccactcccaggttcggctaggatcccccccccgcccccacccctccctggaagtgccgggatccccccccctcctcctcctctgccaggggaagcaggaatgcctccacccccccctcccctgcccgggggccccggcattccacccccccccccttttccaggcggacccggcatcccccccccccctcccggtatgggcatgccacccccaccacctttcgggtttggggtccccgccgccccagtgctgcccttcggactgacaccgaagaaattatacaagccagaggtgcagcttaggcggcctaattggtccaaactggtggcagaagacttatcgcaggactgtttttggacaaaagtgaaagaggaccgctttgagaacaatgaactctttgctaagcttacactgacgttttcggcccagacgaagagtgaaaaggctaagaaagatcaggaaggcggggaggagaagaagagtgtccaaaaaaaaaagtag

SEQ ID NO: 23885 - DNA, 513 bp, synthetic construct
  misc_feature 1..513: note = Description of Artificial Sequence: Synthetic coding sequence
  source 1..513: mol_type = other DNA
atgtactgccagttcgccagcttccagtacacctgccagccctgcaggggccagagaatgctgtgtacacgggattccgaatgttgcggcgaccagctctgtgtatggggccactgtacgaaaatggccactaggggcagcaatgggactatttgcgataaccagagggattgccaaccaggcctgtgctgcgcgtttcagcggggcctcctttttcccgtatgcacgcctctgcccgtggaaggcgaactgtgccacgatccagcaagtcggctgttggacctcattacatgggagctggaacccgacggtgctctcgataggtgcccctgcgcgtccggacttctctgccagccgcacagtcactcgcttgtttatgtatgcaaacctacatttgtaggctcgcgcgaccaggatggtgagatcctcctgcctcgggaggtacctgatgagtatctagcagcgtcttggagaaggtgcgcccgttcctggcgcacctggaggggagcatag

SEQ ID NO: 23886 - DNA, 1053 bp, synthetic construct
  misc_feature 1..1053: note = Description of Artificial Sequence: Synthetic coding sequence
  source 1..1053: mol_type = other DNA
atgcagcggctgggcgccaccctgctgtgcctgctgctggccgccgcagtccccaccgcccccgcaccagccccgactgcaacgtcagcaccagtcaaaccaggcccagccctgtcttatccccaggaggaggcaacactgaacgaaatgtttagggaagtggaagaactgatggaggatacgcagcacaaacttaggtctgcagttgaagaaatggaggcagaggaggccgcagctaaggccagttcagaagtgaatctggccaatcttccaccctcgtatcacaatgaaacaaacaccgacacaaaggtggggaataacaccatccacgtgcatagggagatccacaagattacgaacaaccagaccgggcagatggtgtttagcgaaaccgttatcactagcgtaggagacgaagagggaagaagatcccatgagtgcattatcgatgaggattgtggcccctccatgtactgccaattcgcttctttccaatacacctgccagccatgtaggggtcagcgaatgctgtgcacacgcgacagcgagtgttgtggcgatcagctctgcgtgtggggtcactgtaccaaaatggctacccgcggatcaaacggcactatctgcgataatcagcgagattgtcaacccggactctgctgcgccttccaacgagggcttttgttcccggtgtgtacccccctgcccgtggagggcgagctgtgtcacgacccagcgagtagactgcttgatctcataacgtgggagctcgagcctgatggcgcactggacagatgcccatgcgcgtcaggcctgctgtgtcaaccccattcccatagcctagtgtatgtgtgtaagcctacgtttgtgggctcgcgcgatcaggatggagagatattgcttcctcgggaggttccagatgaatacgaagtgggaagtttcatggaagaggtccgacaggaacttgaggatttggaacggtccctaaccgaggagatggctctgcgcgagccagctgccgctgccgcggctctcctggggggagaggagatctag

SEQ ID NO: 23887 - DNA, 882 bp, synthetic construct
  misc_feature 1..882: note = Description of Artificial Sequence: Synthetic coding sequence
  source 1..882: mol_type = other DNA
atggaggacacccagcacaagctgcggagcgccgtggaggagatggaagctgaggaggccgctgctaaggcaagttccgaggtgaacctggcaaatctaccgccgagctatcacaatgaaacaaacacagatacgaaggtcggtaacaacacaatccacgtacaccgggagatccacaagatcactaacaaccagacagggcagatggtcttcagcgaaacagttatcacttctgtgggtgacgaagaagggagacgcagccacgagtgcatcatcgacgaagactgtggacctagcatgtattgccagtttgccagcttccaatacacctgccagccatgtagaggacagagaatgctgtgtactagagacagcgaatgttgtggggaccaattatgcgtgtggggacactgtactaagatggcaaccagaggctccaacggcacgatttgcgataatcagcgagactgccagcccgggctgtgctgtgcgttccagaggggcctgctgttccccgtctgtacacctctccctgtcgagggagaactttgccatgatcctgctagtagactgctggacctcataacatgggaactggagcctgacggagcacttgacagatgcccatgcgctagcggtctactgtgtcagcctcactcccatagcctggtgtacgtgtgcaagccaacattcgtagggtcacgggaccaggacggcgagatcctgcttccacgtgaagtgcccgatgagtacgaagtcgggagcttcatggaggaggttcgacaggagctagaggatctcgaacgaagcctgactgaggaaatggccctcagagaaccggccgcagcagctgcagccctgctaggcggagaggaaatttag

SEQ ID NO: 23888 - DNA, 1053 bp, synthetic construct
  misc_feature 1..1053: note = Description of Artificial Sequence: Synthetic coding sequence
  source 1..1053: mol_type = other DNA
atgcagcggctgggcgccaccctgctgtgcctgctgctggccgccgctgtgccgacggctccggctcctgctccgacagccacatcagccccagtgaaaccaggtcccgccctcagttatccccaggaagaagcaacgctcaatgagatgttccgggaggttgaggaactcatggaggacacccagcacaaactcaggagtgccgttgaggagatggaggctgaagaagccgctgccaaggcaagctccgaggtcaacttagccaatctgcctcccagctaccataatgagacaaatacagacacaaaggttggaaataatacgatccacgtgcatcgagagatccacaaaatcaccaacaaccagaccggacaaatggtcttcagcgaaaccgtgattacgagtgtcggcgacgaagaaggaagaaggtcccacgagtgcatcattgatgaggattgcggcccatctatgtattgtcagtttgcttcttttcagtatacatgtcagccgtgtcggggccaacgtatgctgtgtacacgtgatagtgagtgttgtggcgatcagctatgtgtgtgggggcactgtaccaaaatggccacacgaggtagcaacggtactatatgcgataatcagcgtgactgccagccaggtttatgttgtgctttccagcgtggactgctcttccccgtgtgcacccccctgcccgtcgagggcgagctttgtcatgatcccgcctcaagactgctggatcttattacgtgggagctggaaccagacggcgccctagataggtgcccatgcgccagcgggctgttatgccaaccacactcacactctctcgtttacgtgtgtaagcccacatttgtaggctctcgcgaccaggacggggaaatccttctgccccgtgaggtgcctgatgaatacgaagtagggtcattcatggaggaggtcagacaggaactggaggacctggagcggtctctgacggaggaaatggcccttcgagaacctgcagctgccgctgcagctcttttgggcggcgaagagatctag

SEQ ID NO: 23889 - DNA, 969 bp, synthetic construct
  misc_feature 1..969: note = Description of Artificial Sequence: Synthetic coding sequence
  source 1..969: mol_type = other DNA
atgcagcggctgggcgccaccctgctgtgcctgctgctggccgccgccgtaccgaccgcacccgctccggccccaacagccaccagcgcgccagtgaaaccaggccctgctttaagttaccctcaagaggaggcaacccttaacgagatgttcagggaggttgaagagcttatggaggatacacagcataaattaagaagcgcagtagaggaaatggaggccgaggaagccgctgctaaggccagctcagaggttaatctggcaaatctcccaccatcgtaccataacgaaaccaacacggatacaaaagtcggcaacaatactatccatgttcacagggaaattcacaaggagtgcatcatagacgaagattgtggtcctagtatgtactgccaattcgctagctttcagtacacatgtcagccttgtcgggggcagcgcatgctttgcacaagagacagtgagtgctgcggtgatcagctttgcgtttggggacactgtaccaaaatggcgacacgaggctccaacgggactatttgcgacaatcaacgtgactgtcaacccggtctttgttgcgcctttcaacgcggcctgctgttccctgtgtgtactccccttcccgtagaaggcgagctctgccacgatcccgcctcgcgcctgctagatctaatcacctgggagctggagcctgacggggccctcgatcgttgcccttgtgcctctggcctgctctgtcagcctcactcccactcactagtgtatgtctgcaaaccaacatttgttggatcgcgggatcaggacggcgaaattcttctgccacgggaggtacctgatgaatatgaagtgggcagcttcatggaggaagtccgccaggagttagaggatttagaaagatccctaaccgaagaaatggcgcttagagagccagcagccgcagctgctgctctcttaggtggggaagaaatctag

SEQ ID NO: 23890 - DNA, 708 bp, synthetic construct
  misc_feature 1..708: note = Description of Artificial Sequence: Synthetic coding sequence
  source 1..708: mol_type = other DNA
atgcagcggctgggcgccaccctgctgtgcctgctgctggccgccgctgtccccaccgcaccagcgccagcaccaactgccacttcagcacctgtgaaacctgggccagcacttagctatccccaggaagaggccactcttaacgaaatgttcagggaggtcgaggagctgatggaggatactcaacacaagctgcgatccgctgttgaggaaatggaagctgaggaggctgccgccaaagcttcctcggaagtcaacttagcgaaccttcccccaagctatcacaatgagactaacaccgatacgaaagtaggcaataacactatccacgtccacagggagatccacaagataaccaacaaccagacaggtcagatggttttttccgagaccgtgataaccagtgtgggagatgaggaaggacgccggtctcacgagtgtataattgacgaagactgtggtccgagcatgtactgtcaattcgcctcttttcagtatacctgccaaccttgccgcggacagagaatgttgtgcacaagggacagtgaatgctgcggcgaccagctgtgcgtttggggccattgcaccaaaatggccacacggggctcaaacggaaccatatgcgataaccaaagggactgtcaacccggcctttgctgtgcttttcagcgtggcctgttgtttcctgtgtgcacccctctgccctag

SEQ ID NO: 23891 - DNA, 2301 bp, synthetic construct
  misc_feature 1..2301: note = Description of Artificial Sequence: Synthetic coding sequence
  source 1..2301: mol_type = other DNA
atgaagaccccctggaaggtgctgctgggcctgctgggcgccgccgctctcgtgaccatcataaccgttcccgttgtcttgcttaacaaagggacagacgatgccacagccgatagtcgcaaaacttacaccctgaccgactacctcaagaacacctatagactgaagttgtacagcctccgctggatatcagatcatgaatacctgtacaagcaggaaaacaatattcttgtgttcaacgctgaatatggcaattcctccgttttcctggagaacagtaccttcgatgaattcggacattctattaacgattactcaatatcccctgacggacagtttatcctcctagaatacaactatgttaagcagtggcggcactcctacactgcatcatacgacatttatgatctgaacaagagacagttaataaccgaggaacgaattcccaacaatacacagtgggttacttggtcgcccgtcggccacaaactcgcgtacgtttggaacaacgacatatatgtgaagatcgagccgaatcttcctagttatcgaatcacttggaccggtaaggaagatatcatctacaatggaatcacagattgggtgtacgaagaagaggtgttcagcgcatactctgccctttggtggagtcccaatggcacctttttggcttacgctcagttcaacgacaccgaagtgccattgattgagtacagtttctattcggatgaatctctacagtaccccaagaccgtaagagtcccatatccgaaagctggagcagtcaacccgacagtaaaatttttcgtggtcaatactgattccctatcgtcggtcaccaacgccacatcaatccaaatcaccgcacccgcttcaatgctgatcggggatcactatctctgtgacgttacctgggctacccaggagaggatttctctacaatggctccgacggatacagaactatagtgtcatggatatctgcgattacgatgagagttccggcagatggaactgtctggtcgcacggcagcacatcgaaatgtccactacaggatgggttggacggtttcgtccttctgagccccatttcacactggatggaaacagtttttacaaaattatatcaaacgaagagggctatcgacatatttgctacttccaaattgataaaaaggactgtactttcattacaaaaggcacctgggaagtaattgggattgaggcactgacttctgactatctgtattacatttccaatgaatacaaagggatgccgggcggacgcaacctgtacaaaatccagttgtccgattacacgaaggtgacgtgcctgtcctgtgaacttaatcccgaacgctgccagtattatagtgtcagttttagcaaagaggccaagtattaccaactccgctgcagcggacccggtcttcctctttacacgctgcattcctccgttaatgacaagggcctccgggtgctcgaggataactccgcattagataagatgctacagaatgtgcaaatgccctccaagaagttggactttatcattctgaatgagacaaaattctggtatcagatgattctgccccctcatttcgataagtctaaaaagtatccgttgttacttgatgtgtatgccggcccctgcagtcaaaaagccgacacagttttcaggctaaactgggccacctacctggcaagtaccgaaaatattatcgttgcctccttcgacggaagagggtccggctaccagggggacaagattatgcacgccattaatagaagattgggcaccttcgaagtcgaagatcagatcgaagctgcccgccagttttctaagatgggattcgtagacaataagaggattgctatctggggctggtcatatggcggctatgtgaccagtatggtcctgggatctggcagcggtgtatttaaatgtggcatcgccgtggcccctgtctcccgatgggaatattacgattctgtctatactgaacgttatatgggccttccaactccagaagacaatctggatcattatcgtaacagtaccgtaatgtcaagggctgaaaattttaagcaggttgagtacctgctgattcatgggaccgcagatgataacgtacacttccagcagtcagcccaaatctctaaggccctcgttgatgttggcgtggattttcaggctatgtggtacactgatgaagaccacgggattgcgtccagcacagcccatcagcatatctatacgcacatgtctcattttattaaacaatgcttcagtctgccatag

SEQ ID NO: 23892 - DNA, 645 bp, synthetic construct
  misc_feature 1..645: note = Description of Artificial Sequence: Synthetic coding sequence
  source 1..645: mol_type = other DNA
atgaacgtgttccggatcctgggcgacctgagccacctgctggccatgatcctgctcctgggaaagatttggagaagtaagtgttgcaaaggtatcagtgggaagtcacagattctgtttgccctcgtatttactacccgctacctcgatctgtttacaaactttatctcaatctataacactgttatgaaggtcgtgtttctgctgtgcgcctatgtaactgtgtacatgatctatggcaaatttagaaagacttttgattcggaaaacgacaccttcagactggagttcctgctggtacccgtaattggcttatctttccttgaaaattatagttttacacttttggaaattctgtggactttctccatttatttggagtctgtcgctatccttccccagctattcatgatttcaaagacaggagaagctgagactattaccacacattatctgtttttcctcggcctgtatagggctctttacctggcaaactggattcgccgttaccaaaccgagaatttttacgaccagattgccgttgtctctggagttgtgcagactatcttttactgtgactttttctatttatatgtgaccaaggtgcttaaaggtaagaagctgagtctaccaatgccgatttag

SEQ ID NO: 23893 - DNA, 498 bp, synthetic construct
  misc_feature 1..498: note = Description of Artificial Sequence: Synthetic coding sequence
  source 1..498: mol_type = other DNA
atgaaggaggaccaggtggtggccgaggagcccggcttccaggacgaggaggagtcgctcttccaagacattgatctgctccagaaacacggcataaacgtggctgacataaaaaagctgaagtctgtaggcatctgcacaataaagggtatacagatgacgacacgacgagctctgtgcaatgtcaagggactgtctgaggccaaagtggacaagatcaaagaagccgcaaataagctgatcgagcctgggttcttgactgcctttgagtacagtgagaagcgtaaaatggtttttcacattactaccggcagccaagagtttgataaactgcttggggggggaattgagtccatggctattacggaagcctttggcgagtttcgtactggcaaaacacagctgagccatacgctgtgcgtcacagcccagcttcctggtgctggcggctatcccggaggaaagattatctttattgacacggagaatactctgtag

SEQ ID NO: 23894 - DNA, 420 bp, synthetic construct
  misc_feature 1..420: note = Description of Artificial Sequence: Synthetic coding sequence
  source 1..420: mol_type = other DNA
atgaaggaggaccaggtggtggccgaggagcccggcttccaggacgaggaggagagcctgttccaggatatagatctcctccagaaacatggcattaacgttgcagacattaagaaactgaaatccgttgggatctgtaccattaaaggcattcaaatgaccacacgccgggcactctgcaacgtgaaaggattatcagaagcaaaggttgacaaaattaaggaggcagcgaataaattgatcgagcctggttttctgacagcctttgaatactccgagaagcgcaaaatggtctttcatattacgaccggcagccaggagtttgacaaactcctggggggtggcatagaatcaatggcaatcactgaggcttttggtgagttccgaacaggtaagacgcaactgtcacacacgctatag

SEQ ID NO: 23895 - DNA, 858 bp, synthetic construct
  misc_feature 1..858: note = Description of Artificial Sequence: Synthetic coding sequence
  source 1..858: mol_type = other DNA
atgaaggaggaccaggtggtggccgaggagcccggcttccaggacgaggaagaaagcctgttccaagatatagatttgttgcagaaacacgggattaacgtggcagacattaaaaagttaaagagcgtagggatatgtacaattaaagggattcagatgacaacgcggcgcgccttatgtaatgtcaagggtttatccgaagccaaggtggacaaaattaaggaggctgccaacaagctgatagagccaggctttctcaccgcgttcgaatacagcgaaaagcggaagatggtctttcacattacgaccgggagccaggagttcgacaagctcctcgggggcggcatcgaatcaatggcaataaccgaggcttttggagagtttaggaccggaaaaacgcagctaagtcacaccttgtgcggagagcatcaaatggagctgttagattacgttgcagctaaattccatgaagaggctggaatcttcaagctactgatcatagatagcattatggctctcttcagagtcgattttagcggtcgaggagagctggcagagcgacaacagaagctggcacagatgctcagtagactccagaagatttctgaggagtacaacgttgccgtgtttgtaaccaaccagatgaccgccgaccccggggcaaccatgaccttccaagctgatcccaaaaagcccataggaggccacatactggcccacgcttcaacgactagaattagcctcagaaagggacgcggagagttacggattgccaaaatctacgacagtccagagatgcccgagaatgaagccacattcgctattactgccggtggcattggggacgcaaaagagtag

SEQ ID NO: 23896 - DNA, 612 bp, synthetic construct
  misc_feature 1..612: note = Description of Artificial Sequence: Synthetic coding sequence
  source 1..612: mol_type = other DNA
atgaaggaggaccaggtggtggccgaggagcccggcttccaggacgaggaggaaagcctctttcaggacatcgacctactccaaaaacacgggatcaacgtggcagatatcaaaaaattgaaaagcgtcggtatttgcactattaaagggattcagatgaccacacggcgcgccttatgtaacgtcaaaggcctatctgaagcgaaggttgacaagattaaggaggccgcaaataaactgattgaacctggatttctgacagcgttcgaatatagtgagaaacgtaagatggtgtttcatataactacaggaagtcaggaattcgataaactcctgggcggcggtattgagagtatggccatcacagaggcatttggcgagttccgaacaggcaaaacccaactttcccatacgctgtgtggcgagcatcagatggagttgttggactacgttgccgccaagttccacgaggaggctgggattttcaaattgttgatcattgattccattatggccctgtttagagtggatttctcaggaagaggtgagcttgccgaacgtcaacagaagttggcacagatgctttccaggctccaaaagattagcgagtag

SEQ ID NO: 23897 - DNA, 1599 bp, synthetic construct
  misc_feature 1..1599: note = Description of Artificial Sequence: Synthetic coding sequence
  source 1..1599: mol_type = other DNA
atgaacggcgtgctgatcccccacacccccatcgccgtggacttctggagtttgcgacgggcaggcactgcgcgcctattttttctatcacatatgcactccgaccacactgtgggcctaagctcaacctgggctcgccccctctactgtagccccattactgcacacttgctgcacaggcacctgcaggtcagcaaacagtggattcaagccttggaggtcggggagtcacatgtgctgccgctggatgagatcggccaggaaaccatgactgtcaccttgctcgatgccaaccattgtcccggcagcgtcatgttcctgtttgagggctacttcggaaccatcctgtataccggagatttcagatacactcctagtatgctgaaagagcccgcgctgaccctcggcaagcagattcatactctatacctcgacaacaccaactgcaaccctgcccttgtgctgccaagcaggcaggaggctgcccatcaaatagtccaactgatcaggaagcaccctcagcacaacataaagataggcctgtattccctcggcaaggagtccctgctggaacagctggccctcgagtttcagacatgggtggtgttgtctcccaggagactcgagctggttcagctgttggggctggcggacgtgttcaccgtcgaggaaaaagcgggtcgaatccatgctgtcgatcatatggaaatctgtcacagcaacatgctccggtggaaccagactcatcctaccatagccatattgccaacttccaggaagatccattcgagccatccagacattcacgtgattccatactctgatcactcctcttacagcgaactaagggcgttcgttgccgccctgaagccttgccaagtggtgcccatagtgtcccgccgcccctgcggaggcttccaggattctctgtcccctaggatttctgtgccattgataccggattcagtgcaacagtatatgagttcttcctcacggaagccctcactgttgtggctcctcgaacgtcgcctgaagcgccctcggacccaaggcgtcgtattcgagtctccagaagaaagtgcagaccaatcccaggcggacagggattccaagaaggcgaagaaggaaaaattgtctccctggccagccgacttagagaaacagccttcccaccacccgctccgtataaagaagcagctctttcctgacctctacagcaaggagtggaataaggcagtccctttctgcgagagccagaaaagagtgactatgctgactgcacccttgggcttttcagtgcacctccgaagtactgatgaagagtttatttcacaaaagacccgcgaggaaatcgggctcgggagtcctttggtgcctatgggcgatgatgatggaggacccgaggccacagggaaccagagcgcatggatgggacatggctcgcccttatcccacagcagtaaaggaactccgcttctggccaccgaatttcgggggcttgcgcttaagtacctgctcaccccggttaactttttccaagccggttacagcagtcggcggttcgatcaacaagtggaaaaatatcacaaaccttgctag

SEQ ID NO: 23898 - DNA, 1734 bp, synthetic construct
  misc_feature 1..1734: note = Description of Artificial Sequence: Synthetic coding sequence
  source 1..1734: mol_type = other DNA
atgaagcaccaggagcggttcctgttccagggcaacaacggcaccgtgctgtacactggcgacttccggcttgcacaaggcgaggcagcccgcatggagctccttcacagtgggggacgagtcaaggacattcagagcgtatatttagacacaactttctgtgacccgaggttttatcagatcccctcacgggaggaatgcctttcgggtgttctggagctcgtaaggagttggatcactcgctccccatatcacgtggtgtggttaaattgtaaggcggcatatggctatgagtacctctttacaaacttgtccgaagagctcggagttcaagtgcatgtaaataagttggacatgttcagaaatatgcccgagattctgcatcatctcacaaccgatagaaatacacaaattcatgcctgtaggcaccccaaagccgaagaatactttcagtggtcgaaacttccttgtgggattaccagccggaatcgaatcccactacacataatctcaatcaagcccagtacgatgtggtttggggaacgaagtcgcaaaacgaatgtcatcgtgaggacgggagagtctagttaccgcgcatgtttctcttttcactcttcgtatagcgagattaaggattttttaagttacctgtgtcccgttaatgcttatcccaacgtcattccagtggggacgactatggataaggtggtggagatactgaaaccactctgcagatctagccagagcacggagccgaaatataaacctctgggcaaactgaagcgggcgcggacagtccatcgggacagcgaagaggaggacgactacctgttcgacgacccactcccgatcccactcagacataaagtcccataccccgaaaccttccaccccgaagttttttctatgacggccgtcagcgaaaagcagcctgaaaagttgcggcagactcccggatgttgtcgcgccgaatgcatgcagtcttctcgtttcactaacttcgtggattgtgaagagtccaatagcgagagtgaggaggaggtcggcatcccagcaagtttgcagggagatctcggctcagttctgcatttgcagaaagctgatggcgatgtgccccagtgggaagtgttttttaaaaggaacgacgaaatcacggatgagtcccttgagaatttcccctccagcaccgtggccggcggatcccagagcccaaagttattttcagattctgatggcgagtcaacacatataagctcccaaaattcctcccagagcacccacataacggaacagggatcacagggctgggacagccagtctgacacagtgctgttaagtagccaggagagaaacagcggtgacataacttccctcgataaggcggattatagacccaccataaaggagaatatccctgcatctcttatggagcagaacgtcatttgcccgaaagatacatactccgatttaaagtcacgggataaggatgtcaccatcgtgcctagtacaggcgaacctaccaccctgagttcagagactcatattcccgaggagaaaagcctgctgaacctgtccacaaatgcggattcccagtctagcagtgattttgaggtgccctctactcctgaggctgaattgcctaagcgggaacacctgcagtatctctacgagaaactggccaccggagaaagcatcgccgtcaagaaaaggaagtgcagtctgctagacacatag

SEQ ID NO: 23899 - DNA, 255 bp, synthetic construct
  misc_feature 1..255: note = Description of Artificial Sequence: Synthetic coding sequence
  source 1..255: mol_type = other DNA
atgttcctgttccagggcaacaacggcaccgtgctgtacaccggcgactttcgactggctcagggcgaggcggctaggatggagttactacatagcggtggtcgcgtgaaagatatccagtccgtttacctggacaccaccttctgcgatcccagattttaccagatcccttcgagagaagagtgtctcagtggagtgctggagcttgtgaggagctggatcacacggagtccttaccacgtagtctggctgtag

SEQ ID NO: 23900 - DNA, 1038 bp, synthetic construct
  misc_feature 1..1038: note = Description of Artificial Sequence: Synthetic coding sequence
  source 1..1038: mol_type = other DNA
atggacaaggtggtggagatcctgaagcccctgtgccggagcagccaaagtacggagcctaagtacaagccactcggtaaactcaagagggcccgcaccgtccatagagactccgaagaggaggatgactatcttttcgacgatcccctgccaatccctttgcgccataaggtgccttacccagaaactttccaccccgaagtgttctcaatgactgccgtctctgaaaaacagcctgagaagctacggcagaccccagggtgctgtagggctgagtgcatgcagagctcaagattcacgaatttcgtcgattgcgaggagtccaatagcgagagcgaggaggaggttgggatccccgccagtctccaaggcgacttgggaagtgttctccatcttcagaaagcagacggcgatgtgccacagtgggaagttttttttaaaagaaacgacgaaatcacggatgagtcactggaaaacttcccctccagcactgtcgcaggaggctctcagtctccaaaattatttagcgactcagatggcgagtcgacgcatatttcctcccagaactctagccagtcaacacacatcacggaacagggctctcaaggttgggattctcagtcagataccgtgctgctaagcagccaggagcgtaattctggagatataacaagcctcgacaaggccgactatagacccacaatcaaggagaacataccagcaagccttatggagcaaaacgtaatctgccctaaagacacgtacagcgatctcaagagccgagacaaggatgttaccatagtgccctctacgggcgaacctacaactctttcctccgaaacccacatccccgaagagaagagcttgctaaatctgtcaaccaacgctgattcacagtcatctagcgatttcgaagttccaagcacacccgaggccgaacttcctaaaagagaacatctccagtacctatatgagaaactagcgaccggcgagtccattgccgtcaaaaagcgcaaatgtagcctgctcgacacctag

SEQ ID NO: 23901 - DNA, 1734 bp, synthetic construct
  misc_feature 1..1734: note = Description of Artificial Sequence: Synthetic coding sequence
  source 1..1734: mol_type = other DNA
atgaagcaccaggagcggttcctgttccagggcaacaacggcaccgtattgtacactggagacttccgacttgctcagggagaagccgctaggatggagctgctgcactctggcggccgggtcaaggatattcaaagcgtgtatctcgacacaaccttctgcgaccctagattttatcaaatcccatcccgagaggaatgtcttagtggagttctggaactggttcggagctggatcacccgtagcccctaccacgtggtgtggctaaattgtaaagctgcctacggctacgagtacttgtttacgaacctcagtgaagagctgggcgtgcaggttcacgtcaacaagttagacatgtttcgaaacatgcctgagatactccaccacctgacaactgacaggaatactcagattcatgcttgccggcatcccaaggctgaggaatattttcaatggtccaagttaccctgcggtatcacatcaagaaatcggatacctcttcatatcatctcaattaagccctctacaatgtggtttggagaacggtcgcgcaagaccaatgtcatagtgagaaccggcgagagcagctacagagcatgtttctccttccacagtagctattccgaaatcaaagattttctgtcttatctgtgtccggtgaatgcatacccgaacgtgatacccgtgggcaccaccatggataaagtggttgagatattgaaaccactgtgcaggtcctcacagagtactgagcctaaatacaagccgctaggtaagctgaagcgggcgaggactgttcaccgagacagcgaggaagaggatgactatctctttgatgatcccctgcccataccactgagacacaaggtgccttaccccgagacctttcatccagaggtgttctctatgaccgctgtgtctgaaaaacaaccggaaaagctgagacagacacccggatgttgccgggcagagtgcatgcagtcatctagatttacgaactttgtggactgtgaagaatccaacagcgagagtgaagaggaagtgggcattccagcttctctgcagggtgatctggggagcgttctgcatcttcaaaaggcggatggcgatgttccacaatgggaagtattctttaaacggaatgacgaaataacggacgagtcattagagaatttcccatcttccacagtcgcagggggaagtcagtcccccaagctgtttagcgatagcgacggcgagtcaactcacatatcatcccagaactcctctcagagcacccatattaccgagcaaggctctcaaggctgggactcgcagtccgataccgtcctcctgtctagtcaggaacgcaattcaggggacattacctcactcgataaagcagactatagacctactattaaggagaatatccctgcctcgctgatggagcagaacgtgatttgtccaaaggacacatactccgacctaaaaagccgcgataaggatgtaacaattgtgccgtctactggcgaacctacaacgttatcttctgagacccacattccagaagaaaaatcactgctgaacctgagcacgaacgctgattctcagtcttcctcggatttcgaggtgcccagtacccctgaagccgagctacctaaaagagagcacctccaatacctttacgagaagcttgctaccggcgaaagtatcgccgtgaagaagcggaagtgtagcttacttgatacctag

SEQ ID NO: 23902 - DNA, 1734 bp, synthetic construct
  misc_feature 1..1734: note = Description of Artificial Sequence: Synthetic coding sequence
  source 1..1734: mol_type = other DNA
atgaagcaccaggagcggttcctgttccagggcaacaacggcaccgtcctttacacaggcgacttcaggctggctcaaggagaggccgctcgcatggagctgttgcacagcggtggacgcgtgaaggatattcaatcagtatatctggataccacattctgcgacccgcggttttaccagataccatcacgcgaagaatgtctttccggtgtgctggagctggtccgctcttggataactagatccccataccatgtggtctggctgaactgcaaggccgcctatggctatgaataccttttcaccaatctgagtgaagagctcggagtgcaggtacatgtcaacaaattggacatgtttcggaatatgcctgaaatcctgcaccacctgactactgatagaaacactcagatacacgcttgcagacacccaaaagctgaggagtactttcagtggtcaaagcttccttgcggcattacaagccgcaatcgcatcccgctgcacattatttctatcaagccgtctacaatgtggttcggcgagcggagtcggaaaacaaatgtgattgtgaggactggcgagtcgtcctaccgcgcttgcttcagcttccacagttcatattctgaaatcaaggatttcctctcctacctctgccccgtgaatgcctacccgaatgtcatccctgttggcaccaccatggacaaagttgtagagattctgaaacctctttgccgatcatctcagtcaaccgaacctaaatacaaaccgctgggcaagctcaaacgcgcccgtacagtccatcgggacagtgaggaagaagatgattatctgtttgatgaccccctgccaatcccacttcggcacaaggttccttatcctgagacctttcacccagaggtgttcagtatgacagcggtcagcgaaaaacagccagaaaaacttcggcagaccccagggtgttgtcgcgccgagtgcatgcagtcatctcggtttacaaactttgttgattgcgaggaatcaaactccgagagcgaagaagaggtggggattcccgctagtcttcagggagatcttggcagcgttttgcatctgcagaaagctgatggggatgtgcctcaatgggaagtgtttttcaagcgaaacgatgagattactgatgagagcctcgaaaacttcccatcctccaccgtggccgggggctcccagtcccccaagctcttttcagattccgatggtgaatccacccacattagttcacagaactcttctcagagtactcatatcactgagcaggggtcgcagggatgggattcacagtcagacacagtgcttctgtcttcccaggagaggaactccggagatataacaagtctggataaagccgactatcgccccacgatcaaggaaaacatccctgcttcattgatggagcaaaatgtcatctgtccaaaggatacttattcagatctaaagagcagggataaagacgtgaccattgtgccgagcaccggagaacctaccaccctctcgtctgagacgcatataccggaggagaagtctctattgaatctgagtacaaacgccgacagccagagttcctctgactttgaggtaccgtcaaccccagaagctgaattgcctaagcgggagcacctccagtacctttatgagaaacttgctacgggagaatccatcgcagtgaaaaagcgcaagtgctcccttttagacacatag

SEQ ID NO: 23903 - DNA, 1719 bp, synthetic construct
  misc_feature 1..1719: note = Description of Artificial Sequence: Synthetic coding sequence
  source 1..1719: mol_type = other DNA
atgttcctgttccagggcaacaacggcaccgtgctgtacaccggcgactttcgtctggcacaaggcgaagcagcaagaatggaacttctgcattcaggagggcgggtgaaggatattcagtctgtttatctggatacgacgttttgcgatccccgtttttaccagatacccagtcgcgaggagtgcctcagtggcgtactagagcttgtgagaagctggattacaaggtcgccctatcacgtggtgtggctgaattgtaaggcggcttacggctacgaatacttgttcactaaccttagcgaagaacttggcgtgcaggttcacgtgaacaaacttgacatgttcaggaatatgcccgaaattctgcatcatctgacaacggataggaacacccagattcacgcctgcagacaccccaaggctgaggaatacttccaatggtccaagttgccatgtggtattaccagccgcaatcggatccctctccatatcattagcatcaaaccatcaaccatgtggttcggcgagaggagtcgcaaaactaacgtcatcgtacggaccggggagagttcgtaccgcgcatgtttttctttccattcctcctactccgaaatcaaagactttctgtcctatctgtgtcccgtaaatgcctatcctaacgtgataccagtggggactaccatggataaagtcgtggagatattgaagcccttgtgtcggtcttcccaaagcaccgagccaaaatacaaacctctgggaaagctgaaacgcgcccgcactgtgcaccgcgattctgaggaagaagatgactatcttttcgatgatcccctcccaatccctctacggcacaaggtcccttacccagagacatttcatcccgaggtgttcagcatgaccgcagtctcagagaagcagccggagaagttgaggcaaaccccggggtgttgtagggccgaatgcatgcagagctctagattcacaaacttcgttgactgcgaagaaagtaatagtgagtccgaggaagaagtgggaatcccggcctcgctgcagggagatctaggaagcgttctccatttacaaaaggctgatggcgatgtgccccaatgggaggtgttctttaagagaaacgacgagataaccgacgagtctcttgagaacttcccgtccagtaccgtcgccggcggaagtcagagtcccaagctgttctcagacagcgacggagaatctacacatataagctcgcaaaactcttctcagtccacccacattacagagcaaggctcacaaggctgggacagccagtccgacactgtcctgctctcttctcaggaaaggaactccggagatataacatccttagacaaggccgattacaggcccaccattaaagaaaacatcccggccagcctgatggaacaaaatgtcatttgtccaaaagatacctactcagacctgaagagcagggataaggacgtcactatcgtgccatccacaggagagcccacaaccctgagctcggaaacgcatattccggaggaaaagtcacttctcaacctaagtacgaacgcggacagtcagtcaagctctgacttcgaagtccctagcacccctgaagcggagcttcccaaacgcgagcacctacaatatctctacgaaaaactagcaacaggcgagtcgattgcagtaaaaaagcgcaagtgctccctgctggacacatag

SEQ ID NO: 23904 - DNA, 1719 bp, synthetic construct
  misc_feature 1..1719: note = Description of Artificial Sequence: Synthetic coding sequence
  source 1..1719: mol_type = other DNA
atgttcctgttccagggcaacaacggcaccgtgctgtacaccggcgattttcggttggcacagggcgaggccgcaaggatggagctgctgcactccggcggacgcgtgaaagatattcaaagcgtctacctggacaccacattttgcgaccctcggttttaccagattccatcgagggaagaatgtctatctggggtattagagctggtacgctcctggatcacccgtagcccgtaccacgtggtttggctgaattgcaaggccgcctacggttacgaatatctctttaccaacctttctgaagagctgggtgttcaggtccatgtcaacaagctggatatgtttagaaatatgcccgagatcctgcaccaccttaccactgacagaaatacccagattcacgcatgccgccatcctaaggctgaggagtacttccagtggtccaagctgccatgcggaattacctcacggaatcgaattcctttgcacataatctccattaaacctagcactatgtggtttggggaaaggagccgaaagactaatgttattgtgcgcaccggcgaatcttcttatcgtgcctgcttcagttttcacagctcttattccgagataaaggacttcctgtcttacctgtgcccggtgaacgcttatcccaacgttatacctgttggaacaactatggataaagtggtggagatcctgaagccattgtgcaggagttcacagtcaacggagcccaagtacaagcccctgggtaagctgaagcgcgctcggaccgttcatcgtgactccgaggaggaggacgactatctgtttgatgatcctttgccaattccgcttcggcataaggtgccttaccccgagaccttccaccccgaagtcttttcgatgactgccgtctcggaaaaacagccagaaaagctaaggcagactccagggtgttgtcgcgcagaatgtatgcagtcttcccgctttacaaacttcgtggactgcgaggaaagcaactccgagtcggaggaggaagtcggcatacccgccagcttgcagggcgacctcgggtccgtgctgcacctccagaaagctgatggagatgtgcctcagtgggaagtctttttcaaacggaacgacgagatcaccgatgagagcctcgagaactttccatcctcgaccgtggcgggaggctcgcaaagcccaaagctgtttagtgacagtgacggagagtcaacacacattagctcacaaaacagctcccagtcaacacacattactgaacagggcagtcaagggtgggactcccagtctgatactgtcctgctctcctcccaggaacggaattccggggatattacaagcctcgataaggctgattacaggcctactatcaaggaaaacataccagccagcctgatggagcagaacgtgatttgtcccaaggatacctacagtgatctcaaaagcagggataaggatgtgaccattgtgccatctaccggagaacctactacactgtcctccgagacccacatcccagaggagaagagcctgctgaacttgtcaacaaatgccgactcccagtcctcttctgatttcgaggtgccctctacccctgaggccgagttaccaaagagagagcatctgcagtacctatatgagaagctggctactggtgaatctattgctgttaaaaagcgtaagtgctctctcctggacacctag

SEQ ID NO: 23905 - DNA, 1719 bp, synthetic construct
  misc_feature 1..1719: note = Description of Artificial Sequence: Synthetic coding sequence
  source 1..1719: mol_type = other DNA
atgttcctgttccagggcaacaacggcaccgtgctgtacaccggcgattttagactcgcacaaggagaggccgcgaggatggaacttctgcacagcggaggccgcgtgaaggacatacagtccgtttacctagataccacgttctgtgatcccaggttttatcaaataccatctcgagaggagtgtctctccggagtgctggagctagtgcgtagttggattaccaggtcaccttatcatgtagtgtggttaaactgtaaggcagcatatggatatgagtatctgtttacaaatttgagtgaggagttgggggtccaggtccacgtgaacaaactggacatgtttcgtaacatgcctgaaattctccaccacctgacaactgacaggaacactcagattcatgcctgccgacatcccaaggcagaggagtatttccaatggagcaagctgccatgtgggatcacatccaggaacaggattcccctgcatatcatttcaatcaagcccagtaccatgtggtttggcgagcgatctagaaagacaaatgtgatcgtgaggacaggcgaaagcagctacagggcgtgcttcagctttcatagcagttacagcgagatcaaggacttcctgtcttacttatgtcctgtcaatgcttatcccaatgtcatcccagtcggcacaacaatggataaggtggtggagatcttaaaacccttgtgtaggagttcccagagtactgaacccaagtacaagcctctgggcaagcttaaaagggcccgaactgtccaccgcgattccgaagaggaagatgactaccttttcgatgacccgcttcctatcccgcttagacacaaagtgccttaccccgaaacattccatcctgaggttttttccatgacagccgtctctgagaaacaacctgagaagctgaggcagacgccaggctgctgccgcgcagaatgcatgcaatcttctaggttcacgaatttcgttgactgtgaggaatccaatagcgagtcggaggaggaagtgggcatccctgcgagtctacagggtgacctgggctccgttctgcatcttcagaaagccgacggcgatgtgccccagtgggaagtattcttcaagcgcaacgatgagatcacagatgaaagtctagagaactttcctagtagtacagtggccggaggctcccagtctcccaaactgttttcagacagtgacggggagtccacacacatctctagtcagaatagttcacagagcacccacatcaccgaacaagggtcccaagggtgggattctcaatccgatacagtcctattgtcctctcaggagaggaacagcggagatatcacatccctggataaagcggactacagaccgacgatcaaggaaaatatcccagcttcactgatggaacagaacgtgatctgtcccaaagacacatacagcgacctaaaatcaagggataaggacgtgaccattgtcccttccaccggggagcctacaaccctgtcgagtgaaacgcatatcccagaagaaaagagtctcctgaatctatcgacgaatgccgactcacagtcgagctcggacttcgaagttccttccactccagaagccgagctgcccaagcgcgagcacttgcagtatctgtacgagaagctggcaacgggagagtctatagccgtcaaaaagcggaaatgctctctgctggacacttag

SEQ ID NO: 23906 - DNA, 2079 bp, synthetic construct
  misc_feature 1..2079: note = Description of Artificial Sequence: Synthetic coding sequence
  source 1..2079: mol_type = other DNA
atgagcagcttcgagggccagatggccgagtaccccaccatcagcatcgaccgatttgacagagaaaacctccgggcacgcgcctattttctgtcccattgtcacaaagatcacatgaaaggcttgcgcgcccctacattaaagcgaagactggagtgttctctgaaggtgtatttgtactgttcacccgtcaccaaggagctgctgctgacaagcccgaaatataggttttggaaaaagagaataatttccatcgagattgaaacgccgactcaaatttctcttgtggacgaagcgagcggggaaaaggaggagatcgttgtgactctgctcccagccggccactgcccaggctctgtaatgttcttgtttcaagggaataatggtaccgttttgtataccggggactttagattagcacaaggcgaggctgccaggatggaattgctacactccggtggtagggtgaaggacatacagtccgtgtacctagatacgactttctgcgaccctagattttaccagatcccatccagagaggagtgcctgagtggggtgctcgagctcgtgcgttcatggatcacccggagtccttatcacgtcgtgtggctgaactgtaaagccgcctacggctatgagtacctgtttacaaatctctcggaagaactgggggtgcaagtgcacgtaaataaattggacatgttcagaaacatgcccgaaatattgcaccatctcactaccgaccgaaacacccaaattcatgcctgtagacaccctaaagctgaggagtactttcagtggtccaagcttccgtgcggtataacttcccggaataggatacccctccacatcatcagcattaaaccatcaactatgtggttcggggagagatcccggaagaccaacgtgatcgtgagaacgggggaatcatcctatcgggcctgtttttccttccattcttcttacagtgagatcaaagactttctgtcctatttgtgtcctgtgaacgcctatccaaacgtgatacccgttggcactaccatggacaaggtggtagagatccttaaacccttgtgtcgcagctcgcaaagcacagagccaaaatacaaaccactgggcaagctcaaaagggcccggaccgtgcatcgcgattctgaggaggaggacgactacttgtttgatgatcccctgccaattcccttgcgacacaaggtcccttacccagagacattccatcccgaggtgttctctatgaccgcagtctcagagaagcagccagagaagctgagacagacccccggttgttgcagggcagagtgtatgcagtcaagccgattcaccaatttcgtagactgtgaggagagtaacagcgagtccgaggaggaggtaggcataccagcttctctgcaaggcgacttgggctccgtcttgcacctgcagaaagcagacggagatgtgccacagtgggaggtgttttttaaacggaacgatgaaatcactgatgagtccctggagaacttcccctcttcaacagtggccggcggaagtcagagccccaaactgtttagcgattccgatggtgagtcaacacatatcagttcacagaacagtagtcagtccacccatatcactgagcagggctctcaaggttgggactctcagtctgacactgtcctgctatcttctcaggagaggaatagcggagacatcacatcccttgataaagccgattaccgcccaacaatcaaggagaacattcctgcctccctgatggaacaaaacgttatctgcccaaaggacacgtatagtgatctcaagagccgcgataaggacgtgaccattgtgccttccacgggggagccaacaaccttgtcttccgagacacacatcccagaggaaaaaagcctgctgaacttatccaccaacgccgatagtcagtcttccagcgattttgaggtgccaagcacccccgaggccgagctccccaagcgtgaacacctgcaatatctgtatgaaaaacttgctaccggcgagagtatcgctgtgaaaaagcggaagtgttccttgctcgatacatag

SEQ ID NO: 23907 - DNA, 1305 bp, synthetic construct
  misc_feature 1..1305: note = Description of Artificial Sequence: Synthetic coding sequence
  source 1..1305: mol_type = other DNA
atgagcagcttcgagggccagatggccgagtaccccaccatcagcatcgatcgcttcgaccgagagaatctgcgagcgcgagcttacttcctctcccactgccataaggatcacatgaaaggtctccgagcacctaccctcaaacgtagactcgagtgcagccttaaggtctacctgtactgtagcccagtgactaaggaactcctcctgacctccccaaaatatagattttggaaaaaacgaattatatcaattgaaattgagacaccgactcagatcagtcttgtagacgaagcgtccggggagaaggaggagatcgtggtgaccctcctgcccgccggccactgtcccggaagcgtcatgttcctttttcaagggaacaacggtacggtactctataccggagattttaggttggcccagggggaggcagctcgcatggagttacttcattccggtggtcgggtcaaggacattcagtcagtctatctcgacacgaccttttgcgacccgagattttatcagatcccttctagagaagagtgcctctcaggcgttctcgaacttgtgcgctcatggatcacccggagtccctatcacgtggtgtggctgaattgcaaggccgcttacggctacgagtacctcttcactaacctgtccgaggaactgggagtgcaagtgcacgtgaataagctggacatgttcaggaacatgcccgaaatcctgcatcaccttactacagaccggaatacccaaatacacgcatgccgacaccccaaggccgaagagtattttcagtggagtaagcttccttgtggcattactagtcgcaatcgcattccactgcatataatcagtatcaaaccctccacaatgtggtttggagagcgctctagaaaaacaaatgttattgttcggaccggcgaatcatcttatagagcatgtttttcttttcatagtagttactctgagatcaaggactttctgtcctacttgtgccctgtgaacgcatatcctaatgtgatccccgttggaacaaccatggacaaggtagtcgagattctcaaaccactgtgtagaagtagccagtccactgagcctaagtataagcctctcggaaaactgaaacgagctcgaaccgttcacagggactccggcagtcactcagtgacccaagctcgcatgcgttggtgccatcacgatagcctgtatccgttaactccagggattaaacgttcgtcctgcctgtccttgttgacatcgtggatcacaggggcatatagacacgcccagttgatgatctag

SEQ ID NO: 23908 - DNA, 1719 bp, synthetic construct
  misc_feature 1..1719: note = Description of Artificial Sequence: Synthetic coding sequence
  source 1..1719: mol_type = other DNA
atgttcctgttccagggcaacaacggcaccgtgctgtacaccggcgactttaggcttgcacagggcgaagccgccaggatggagctgttgcactcggggggccgggtgaaagatatacagtctgtgtatcttgatacgacgttctgtgaccctaggttctaccagattccaagcagggaggagtgcctatccggtgtcttggaactcgtgcggtcctggattacacgtagcccttaccacgtagtttggttaaattgtaaggctgcctacggctacgagtacctttttactaacctgagtgaggaactgggagtgcaggtccacgtgaataagctggacatgttccgcaacatgccagaaatacttcatcacttgacgaccgataggaacacccagattcacgcctgccgccatcctaaggcagaggaatacttccaatggagcaaattgccatgcggaattacttcacgcaaccgcattcctctccacattatcagcatcaaacccagtacaatgtggtttggcgaaaggtcacggaaaaccaatgttattgtgcggacaggggaatccagctatagggcctgttttagcttccatagctcatactcagagatcaaggacttcctctcttacctttgtcccgtgaacgcttacccgaatgtcatccccgttggcacaactatggacaaagtggtggaaatcctgaagcctctgtgccgaagctcccaatcaaccgaaccaaaatacaaaccactggggaagctgaaacgagctaggactgtccacagggattccgaggaagaagatgattacctgttcgatgatcctctacccatccctcttaggcacaaagtgccctatccagagacatttcatcccgaggtgttctcaatgacagcagtgagcgagaagcagccagagaagctcaggcaaacaccgggatgctgtagagcagagtgtatgcagagctctcgctttactaattttgttgattgtgaagagagcaattcggagagcgaggaggaagtcggcattcccgcatccctccaaggtgacctcggttccgtgctgcatttgcagaaagctgatggcgacgttccgcagtgggaggtttttttcaagcgtaacgatgagattaccgacgagtccttagagaacttcccatcttccacagtcgccggtgggtcccaatcacctaagctgttcagcgactcggatggtgagtctacacacatctctagtcagaattcctcacagagtacacatatcaccgagcaaggcagccaagggtgggatagccagagtgatacagtgctcttgagctctcaggagcggaacagtggggatattacgagtcttgacaaggccgactaccggcctactataaaggaaaacatcccagcctctcttatggagcaaaatgtgatctgtcctaaagacacctactcggacttgaaaagccgggataaagacgtcacaattgtccccagtactggtgagcccacaacactatcttctgagactcacatacccgaggagaagagtctcttgaacctgagcaccaatgctgattcacagtcctctagtgatttcgaggtaccatccacaccggaagccgaattgccaaaaagagaacaccttcagtacctgtatgagaaactggcaacaggcgagtctatcgctgtcaagaagcgaaagtgttctctgctcgatacatag

SEQ ID NO: 23909 - DNA, 354 bp, synthetic construct
  misc_feature 1..354: note = Description of Artificial Sequence: Synthetic coding sequence
  source 1..354: mol_type = other DNA
atggagctgctgcacagcggcggccgggtgaaggacatccagagcgtctatttggatacgacattttgtgacccccgtttttaccagatcccatcacgagaagaatgtctgagcggagttctcgagttagttaggtcatggatcacccgatccccctaccacgtagtgtggttaaattgtaaagccgcctatgggtacgagtacctgttcacaaacctgtctgaggagctaggagttcaggttcatgtcaacaaactggatatgttccgaaatatgcccgaaattctgcatcatctcacgactgatagaaacacacagatccacgcttgcagacaccctaaggcggaggagtag

SEQ ID NO: 23910 - DNA, 1719 bp, synthetic construct
  misc_feature 1..1719: note = Description of Artificial Sequence: Synthetic coding sequence
  source 1..1719: mol_type = other DNA
atgttcctgttccagggcaacaacggcaccgtgctgtacaccggcgacttccggcttgcccaaggggaggctgctcggatggagctgcttcactctggaggacgtgtcaaggatatccagtctgtctacctggacacaaccttttgcgacccgagattctaccagatcccctctagggaagaatgtctctccggcgtcttagaactggtgcgatcatggatcactcgatcaccgtatcacgtggtctggctcaattgcaaggctgcctacggctacgaatacctgtttaccaatctctcagaggagctcggcgtccaagtccacgtaaataaacttgatatgttcaggaatatgcccgagatccttcaccatctgacaactgataggaatacgcagattcacgcgtgcagacatcccaaggccgaagaatattttcagtggagtaagctgccctgtggaataacctctagaaacagaatacccctgcacatcatctcgattaaacccagcacgatgtggttcggcgagcggagtagaaaaactaacgttattgtgaggactggcgagagtagctatcgtgcctgctttagcttccatagttcatactccgagatcaaggacttcctgtcatacctgtgccctgttaatgcctacccgaatgtcattcccgttggcacaactatggacaaggtggtcgagatcctcaaaccactgtgtagatcaagccagagtaccgagcccaaatacaagccactcggcaaacttaagagagcccggactgtccaccgggatagtgaggaagaggatgattacctgtttgatgaccccctgccaattccactacgccacaaagttccatatcctgagacctttcatccagaggtattttctatgaccgccgtgtccgaaaagcagccagaaaagttgcgacagacaccaggatgttgtcgtgccgaatgcatgcagtcatccagattcacaaattttgtggattgtgaggagagcaactcagagtccgaagaggaggtcgggatacccgctagtctgcagggggatcttggatcagtgcttcacctgcaaaaggccgacggtgatgtgcctcagtgggaagttttctttaagaggaacgacgagatcacagatgaatccttggaaaatttcccctccagcacagtagcagggggcagccagtctccgaagctattcagtgactcagacggagagagcacccatatcagtagtcagaacagctcccagagtacccacataaccgaacagggcagccaggggtgggattctcagagtgataccgtcctgctgagcagtcaggaacggaatagcggtgatatcacttctttagacaaagctgactataggccgacgattaaagaaaatataccagcctctctgatggaacagaatgttatctgcccgaaggacacctactccgacctgaagtcccgggataaagacgttaccattgtaccctcgaccggagaacctacaactctgagcagcgagactcacatcccagaggagaagtccctgctgaacctgtctaccaatgcggactctcagtcctctagcgactttgaggtgccttccactcctgaagccgagttgcccaaaagggagcacctccagtacctgtatgaaaagctcgccactggagagtccatagccgtgaagaagcggaaatgctcactgctggacacttag

SEQ ID NO: 23911 - DNA, 174 bp, synthetic construct
  misc_feature 1..174: note = Description of Artificial Sequence: Synthetic coding sequence
  source 1..174: mol_type = other DNA
atgaagcaccaggagcggttcctgttccagggcaacaacggcaccgtgctctacacaggcgacttccgcctggcccagggcgaagccgcacggatggaactgctccatagtggggggcgcgtcaaggatattcaatccgtgtaccttgacaccacgttctgtgaccctaggtag

SEQ ID NO: 23912 - DNA, 807 bp, synthetic construct
  misc_feature 1..807: note = Description of Artificial Sequence: Synthetic coding sequence
  source 1..807: mol_type = other DNA
atggaggtgaccggcgacgccggcgtgcccgagagcggcgagatccggaccctcaaaccatgcctcctccgtagaaactattctcgcgaacagcacggggtcgccgcctcctgcctggaagatcttagaagcaaagcttgtgatatcctggctattgataaatccctgactccagtgactttagtgctggccgaagatgggaccattgtggatgatgatgactactttctttgtctgccctcaaacactaagttcgtcgccctggctagcaacgagaagtgggcctacaataacagcgacggaggcaccgcctggatctcacaggagagctttgacgtagatgagactgatagtggggccggattaaaatggaagaacgtggccagacagctgaaagaggacctgtcctccatcatcctgctttctgaggaggaccttcagatgttggtcgacgctccttgtagtgatctggcccaagagctgcgacaaagttgcgccaccgtccagaggctgcagcacactctacaacaagtactggaccagagggaagaagtcagacagtctaagcagctgctgcagttataccttcaggccctcgaaaaagaagggagtctgctaagcaagcaggaggagagcaaggccgcattcggagaggaggttgatgcagtcgacacggggatatctagggaaacctcctcagacgtggccctagcttcccacattctcacagccttgagggaaaagcaggcaccggaactgtcactcagcagccaggatctggaggtcggagggaatcaggggcattag

SEQ ID NO: 23913 - DNA, 996 bp, synthetic construct
  misc_feature 1..996: note = Description of Artificial Sequence: Synthetic coding sequence
  source 1..996: mol_type = other DNA
atggaggtgaccggcgacgccggcgtgcccgagagcggcgagatcaggactctgaagccttgcttactgagacgaaactactcaagggagcagcacggcgtcgctgcttcctgcctggaggatctgagaagcaaggcttgtgacatcctggctattgataagagtctcactcctgtgaccctggttctggctgaagatgggactatcgtggatgacgatgattatttcttatgcctgcccagtaacacaaaattcgttgccctggcaagcaatgaaaagtgggcctacaataactctgatggagggactgcatggatctcccaagaaagtttcgatgttgatgaaaccgactccggagcgggcttgaaatggaagaacgtagcaaggcagctaaaagaagacctgtcttccatcattttgctgtccgaggaagacctccagatgcttgttgacgccccatgcagcgatcttgcccaggaactccggcagtcttgtgccacggttcagcgactccagcacacactccagcaggtgctagaccagagagaggaggttaggcagagtaagcagctgcttcagctgtaccttcaggccctggagaaggagggttcactgctttcaaagcaggaggaaagcaaggcagcgttcggcgaagaggtcgacgcggtcgacaccggcatatccagagaaaccagcagcgacgtagcactggcctcccacattctgacggccctgcgagagaagcaggcccctgagctcagcttatcctcccaggatctcgaattggtgacaaaagaggaccccaaagccttggccgtggcactgaactgggacatcaaaaagactgaaaccgtccaggaggcttgtgaaagggagctcgccttgaggctgcagcagacacagagcctgcactccctgcgaagtatttccgctagtaaggcatccccgccgggtgatctgcagaatcctaagagagcgcggcaggaccctacttag

SEQ ID NO: 23914 - DNA, 510 bp, synthetic construct
  misc_feature 1..510: note = Description of Artificial Sequence: Synthetic coding sequence
  source 1..510: mol_type = other DNA
atggccgccgagagcctgcccttcagcttcggcaccctgagcagctgggagcttgaggcctggtacgaagacctacaggaggtactgtcatcagacgagaatggcggtacctacgtgtccccccctggtaatgaggaggaggagtcaaagatttttacgaccctggacccagcttctctggcatggctcaccgaagaggagccagaacctgctgaagtaacatctacttcacagagccctcactcccctgattccagccagagcagccttgcacaggaagaagaagaggaggatcaggggaggacccgcaaaaggaagcagtcagggcatagccccgcgcgcgccgggaaacagcggatgaaggaaaaagagcaggagaacgagagaaaggttgcccagctggctgaagagaacgaaaggctgaaacaagaaattgagagactcacccgagaggtggaggctactcgacgcgccctgattgatcgtatggtaaatctgcatcaagcctag

SEQ ID NO: 23915 - DNA, 510 bp, synthetic construct
  misc_feature 1..510: note = Description of Artificial Sequence: Synthetic coding sequence
  source 1..510: mol_type = other DNA
atggccgccgagagcctgcccttcagcttcggcaccctgagcagctgggagctagaggcatggtacgaggacctacaggaggtcttgtcctccgacgagaatgggggcacttacgtatcaccccccggcaacgaggaggaagagagtaagatattcacaacgctggaccctgcaagtttagcctggctaactgaggaagagcctgagcccgccgaggtcacatcgacaagccagtctccccatagccctgattctagccagtcgtctctggctcaggaggaggaagaggaggatcagggccgaacccgcaaacgtaagcagagcggccactctcccgccagggccgggaagcagagaatgaaggaaaaggagcaggaaaacgaacgcaaggtggcacagctggctgaggaaaatgagagactgaagcaggagatcgagaggctgacacgggaagttgaggcaacaaggcgggccctgatcgacagaatggtaaacctccaccaggcttag

SEQ ID NO: 23916 - DNA, 438 bp, synthetic construct
  misc_feature 1..438: note = Description of Artificial Sequence: Synthetic coding sequence
  source 1..438: mol_type = other DNA
atggagctggtgcccgccaccccccactaccccgccgacgtgctgtttcagacagaccccaccgcagaaatggccgctgagtccctcccattctcctttggcaccttatcgagctgggagctcgaagcgtggtatgaggatctccaagaggtactctcaagcgacgaaaatggaggtacttacgttagtcctccagggaacgaggaagaggaatcaaaaatcttcactacactggaccccgcaagcttagcctggctgaccgaggaagaaccggagcccgctgaggtcacgagcacatcccagtcaccccactcccccgattccagccagtcatctctggcacaggaagaggaggaagaagaccaggggcgtactagaaaaaggaagcagtcaggccactctcccgccagagccggcaagcagcgaatgaaggaatag

SEQ ID NO: 23917 - DNA, 579 bp, synthetic construct
  misc_feature 1..579: note = Description of Artificial Sequence: Synthetic coding sequence
  source 1..579: mol_type = other DNA
atggagctggtgcccgccaccccccactaccccgccgacgtgctgttccagactgatccaacagccgagatggctgccgagagcctgccctttagctttggcaccctcagctcatgggagctggaggcctggtacgaggatcttcaggaggtcctgagttccgacgagaatggcgggacatatgtctcccccccaggaaacgaggaagaagagagcaagatcttcactacattagaccctgcatcactagcctggttgactgaagaagagcccgagcctgccgaggttaccagcactagccaatccccacattctcctgattcctctcagagtagtttggcgcaggaggaggaggaggaggatcagggcagaacacgaaaacggaagcagtctggccattccccggcaagagcgggaaagcagaggatgaaagaaaaagagcaggagaacgagaggaaggttgcccagcttgcagaggaaaacgaaagacttaaacaggagattgaacgactgacccgtgaggtagaggccacacggcgggcactgattgataggatggtcaacctgcatcaagcctag

SEQ ID NO: 23918 - DNA, 579 bp, synthetic construct
  misc_feature 1..579: note = Description of Artificial Sequence: Synthetic coding sequence
  source 1..579: mol_type = other DNA
atggagctggtgcccgccaccccccactaccccgccgacgtgctgttccaaactgacccgacggcagaaatggcggcggagtccctgccattctccttcgggacattgtcttcttgggaactggaggcctggtacgaagacttgcaagaggtcctgagctccgacgaaaacggtggcacgtacgtttctcctccgggtaacgaggaagaggaatccaaaatcttcaccacattagatcccgctagtcttgcctggctgaccgaggaagagcccgagcccgcagaggtcacgagcactagtcaaagccctcacagcccggacagcagccagagctccctggcccaggaagaggaggaagaagatcagggacgtacgcgcaagaggaaacagagcggccacagtcccgcccgcgccggcaaacagcgcatgaaggaaaaagagcaggaaaatgaacgcaaggtggcccagctcgctgaggagaacgaacgcctcaagcaggagattgaaagacttactcgggaggtggaggccactagacgggccttgattgatcgaatggtgaatctgcatcaggcttag

SEQ ID NO: 23919 - DNA, 864 bp, synthetic construct
  misc_feature 1..864: note = Description of Artificial Sequence: Synthetic coding sequence
  source 1..864: mol_type = other DNA
atggccagcctggaggtgagccggagcccccggcggagccggcgggagttggaagttcgatctcctcgacaaaacaagtactcagtgcttctccctacttataatgaaagggaaaacctacctctgattgtctggctgctggtgaagtcattctctgaatctggcataaattatgagatcataatcattgacgacgggagtcctgacggcacgagagacgtggccgagcaactggagaagatatacggctccgatagaatactgcttaggccaagagaaaagaagttgggactgggcaccgcttacattcatggcatgaaacacgccaccggaaattacatcatcataatggacgccgacctctcacaccatcccaaatttattccggagttcatccgcaagcagaaagaaggcaattttgatatcgtgagtggcactcgctataagggcaatggcggagtgtatggctgggatctgaagaggaaaatcatcagcgacggcgttctgccctgctgccccggatggtctctgctgggatccagtgatccagcgatcctggccagctgggactatagtagaggagcaaatttcttgactcagatactactgagacctggcgcaagtgatctcacagggtcatttcgcctttatcgaaaggaagttctggagaaactgatcgaaaaatgtgtgtctaaagggtacgtgttccaaatggaaatgatcgtgcgcgctcgccagttgaactacaccatcggggaagtgcccatctcatttgtcgacagagtgtacggggaatccaagctggggggaaacgaaattgtcagttttttgaagggcctactcactctgtttgcaaccacctag

SEQ ID NO: 23920 - DNA, 768 bp, synthetic construct
  misc_feature 1..768: note = Description of Artificial Sequence: Synthetic coding sequence
  source 1..768: mol_type = other DNA
atggccagcctggaggtgagccggagcccccggcggagccggcgggaattggaggtacgatcccccaggcagaacaaatattccgtgctgcttcccacttataatgagcgggagaatctgccattgatcgtgtggctgcttgtgaaatctttctcggagtccggaatcaactacgaaatcattataatcgacgatgggtcacctgatggtactcgagatgtggcggagcagttggaaaaaatatacgggagcgatcgcattctgctcaggccacgggaaaagaaactcggattgggaaccgcatatatccatggcatgaagcacgctacagggaattacataatcatcatggatgccgatctgagccaccatcctaagttcatccctgaattcatcagcgatggcgtgctgccatgttgccccggatggtcactgctgggctcctctgacccggctatcctcgcatcctgggattactccagaggagccaactttctcactcaaattctgttgcgcccaggcgctagcgatcttaccggatccttccgcttataccggaaagaggtgttggaaaaactcattgaaaagtgtgtgtccaaggggtatgtcttccagatggaaatgattgttagagcacgccagctgaactacaccatcggggaagtgcctataagctttgttgatagagtgtacggcgagtcaaagttgggtggcaacgaaattgttagcttcttgaaagggcttctgacgctctttgcaaccacatag

SEQ ID NO: 23921 - DNA, 888 bp, synthetic construct
  misc_feature 1..888: note = Description of Artificial Sequence: Synthetic coding sequence
  source 1..888: mol_type = other DNA
tgagccagcctggaggtgagccggagcccccggcggagccggcgggagttggaggtgcgatctccacgacaaaataaatactcggttcttcttcctacctacaatgagcgcgaaaacttgccgctgatcgtgtggctccttgttaagagcttttcagaatcagggattaactacgagatcatcatcattgatgatgggagcccggacggaactagagacgtggcagaacagctcgagaagatttacggtagcgatcggattttgttgagaccccgcgagaagaaactcggacttgggactgcctatattcacggaatgaaacacgccacaggtaactatatcattatcatggatgccgatctgtctcaccatcctaaattcatccccgaatttattcggaaacagaaagagggtaacttcgacatcgtgtccggaacacgttacaaggggaatggcggagtctacggttgggatctcaaacgcaagatcatcagcgacggcgtgctcccttgttgtccgggttggagcctacttggtagcagtgatcctgccattctcgcttcctgggattatcgatgtgaacctccgcggttagcatctcggggtgcgaactttcttacgcaaattttgctcagaccaggagccagcgacctaacggggtcattccgcctttatagaaaggaggttcttgagaaattgattgaaaagtgtgtgtctaaaggttatgtcttccagatggagatgatcgttcgggcacgtcagttgaattatactataggggaagtgccaattagttttgttgacagagtatacggagagtccaaacttggaggtaatgaaattgtctctttcctgaaagggctcctgacactctttgctacaacctag

SEQ ID NO: 23922 - DNA, 783 bp, synthetic construct
  misc_feature 1..783: note = Description of Artificial Sequence: Synthetic coding sequence
  source 1..783: mol_type = other DNA
atggccagcctggaggtgagccggagcccccggcggagccggcgggaactggaagtgaggtcccccaggcaaaataagtactccgtactcctacccacttataatgagcgagaaaacttgccactcattgtatggctgctagtaaagtcattttccgagtctggcatcaactacgagatcattatcatcgacgacgggtcccctgatgggactcgcgatgtcgccgaacagctcgaaaaaatctacggcagcgatcgtattcttttaaggccccgggagaagaaactcgggcttggtacagcttatatccatggaatgaaacacgccacggggaactacatcatcatcatggacgctgacctgagccaccaccctaaatttattccagaattcatcagaaagcaaaaggaaggcaatttcgatatcgtgtctggaacccgttataaaggtaatggtggcgtgtacggatgggacctcaaaagaaaaataatctccagaggggccaattttttgacacagatcttgctgcgcccaggtgccagcgacttgaccgggtcatttcgcttgtatcggaaggaggtgttagagaagctaatcgaaaagtgtgtatccaaggggtatgtattccagatggaaatgatcgtccgcgcaagacagctcaactatactatcggcgaggtgcccatatcattcgttgaccgggtgtatggggagagcaaattgggcggcaacgaaattgtctcattcctgaagggccttttaactttgttcgcgaccacttag

SEQ ID NO: 23923 - DNA, 666 bp, synthetic construct
  misc_feature 1..666: note = Description of Artificial Sequence: Synthetic coding sequence
  source 1..666: mol_type = other DNA
atggccagcctggaggtgagccggagcccccggcggagccggcgggaattggaggtcagatcccccagacagaacaaatacagtgtgctcttgcccacatacaacgagcgcgagaatctgccattaattgtatggttgctcgtgaaatctttctcagaatctgggatcaactacgaaattattataattgacgacggctcaccagacggaacccgcgacgtggccgaacagcttgagaagatttatggctcagaccgcattctgttacgaccaagagaaaagaaattggggttggggacggcctacatccacgggatgaaacatgccacaggtaactatatcattattatggacgccgacctgtcccaccacccgaagttcattccagagttcatctctgacggcgtcctaccctgctgtcctggctggtctctgctgggttccagtgatccggctattttggcaagctgggattactcccggggagccaactttttaacgcagattctgctgcggccaggcgcctctgatttaaccggctccttccggctgtaccgcaaagaggtcctggagaagctcatcgagaaatgtgtgagtaagggatacgttttccagatggagatgatcgtcagggcccgccagctcaactacaccatcggggaatag

SEQ ID NO: 23924 - DNA, 888 bp, synthetic construct
  misc_feature 1..888: note = Description of Artificial Sequence: Synthetic coding sequence
  source 1..888: mol_type = other DNA
atggccagcctggaggtgagccggagcccccggcggagccggcgggagctcgaggtgcggtctcctcgccagaacaagtattctgttttgctgccaacctacaatgaacgtgaaaacctaccattgattgtgtggcttctagtgaagagcttcagtgagagcgggatcaattacgaaatcataattattgatgacggcagccccgatggcactcgggacgtggcagaacagctggagaagatatacgggtccgaccggatcctgctccgtccacgtgaaaaaaaattggggcttggcaccgcctatatccatgggatgaaacatgccaccggaaactacatcataattatggacgctgatttatcccaccatcctaagttcatcccagaattcataagaaagcagaaggaggggaactttgatattgttagcggtactagatacaaggggaacggcggcgtgtacggctgggatctcaaacggaaaatcatttcagacggagtgctgccatgctgccctgggtggagtcttctcggtagctctgaccccgccatacttgcatcctgggattatagatgtgaaccccctcgtctggcatctagaggggccaatttcttaactcagatcttactgcgcccgggggcgagcgacctgaccgggtcatttcggctctatagaaaagaggttctggagaagctgatcgagaaatgtgtgtcgaaaggttatgtgtttcagatggaaatgatcgtaagggccaggcagctcaactacacaatcggcgaggtccccatatcattcgtggacagggtgtatggagagtcaaagctgggtgggaatgaaatcgtcagctttctcaagggcctgcttaccttattcgctaccacctag

SEQ ID NO: 23925 - DNA, 1332 bp, synthetic construct
  misc_feature 1..1332: note = Description of Artificial Sequence: Synthetic coding sequence
  source 1..1332: mol_type = other DNA
atgcggcggcaggtgatggccgccctggtggtgagcggcgccgccgagcagggcgggagagacggccccgggcggggccgtgctccgagaggtagagtggcaaatcaaataccacccgaaatcctcaagaatccacagctgcaagcagcgatccgcgtcttgccaagcaactacaacttcgaaattcccaaaactatttggaggatacaacaagcccaggccaaaaaggtggcactgcagatgcccgaaggtctgctgttattcgcgtgtacaatcgttgatatcctggaacgctttactgaagctgaagtgatggttatgggcgacgttacatatggggcctgctgcgtagacgactttaccgcgagagctttgggcgctgacttccttgttcactatggccacagctgcctcatccccatggatacaagcgcacaggactttcgggtgctttacgtgttcgtggatatccgtattgacactacacacctgctcgattcacttcgcctgacattcccacccgcaactgcacttgctcttgtctcaactatacagttcgtatctacactacaggcagctgcacaggaacttaaagctgagtatagggtgtcagttccacagtgcaaacctctgtctccaggggagatcctggggtgcacctccccgaggctttccaaggaagttgaggcagtggtgtacctgggagatggaaggttccacctagagtcagtaatgattgccaatcccaacgtgcctgcctatcggtacgacccctactcaaaggtgttgagccgggagcactatgatcaccaaagaatgcaggccgcacgacaagaagcgatagcgaccgcacggtctgccaaaagctggggcctcatcttgggcacactggggcgccagggctcaccaaaaatccttgaacacttagaaagccgactgcgagccctgggtctgagctttgtcaggttgctcctaagcgagatattccctagcaagctgagcctccttcctgaagtggacgtttgggtccaagttgcatgcccgagactcagcattgattggggcacagcctttcccaaacccctgctgacaccctatgaggcagcggtggcactgcgtgacatctcatggcagcagccctatcccatggatttttacgcaggatcgagtctgggcccatggacagtcaaccacggtcaagatcggcgaccacacgctccgggcagacccgcacgggggaaggtccaggagggcagcgctcgacctccgtccgctgtggcttgcgaagattgttcctgcagagacgaaaaggtcgcaccactcgccccttag

SEQ ID NO: 23926 - DNA, 1146 bp, synthetic construct
  misc_feature 1..1146: note = Description of Artificial Sequence: Synthetic coding sequence
  source 1..1146: mol_type = other DNA
atgatcgacaccctgcggcccgtgcccttcgccagcgagatggccatttctaagaccgtcgcatggctaaacgagcaacttgagttaggaaatgagcggcttctcctgatggactgtagaccccaggaactgtacgaaagttcccatatcgaatctgcaattaatgtggctattccagggatcatgctgcgccgccttcagaagggcaacttgcctgtacgggcactattcacccgaggagaggatagggaccggttcacaagacggtgcggcacggacaccgttgttttgtacgatgaatcctccagtgattggaacgagaacactgggggcgagagtgttctgggtctgctgctgaagaagctgaaagatgaggggtgtagagctttttacttggaggggggtttctctaagttccaggccgagttctccctgcactgcgaaacaaacctcgatggctcttgctcctcttcctctcctccactcccagtcctggggcttggcggtcttaggattagttctgactcatcctccgacatcgagagcgatctggacagagaccctaattccgccaccgactctgacggcagccccctgtcaaattctcagcccagctttccagtggaaatcctgccgtttctctatcttggctgcgcaaaggatagtacaaatctggacgtcctggaggagttcggtatcaagtacattctgaatgtgacaccaaacctgcctaatttgtttgagaacgccggcgagtttaaatataagcagatccctatttcagatcattggtcacaaaacctgtcccagttcttccccgaagccataagttttatcgatgaagccaggggcaaaaattgtggggtcctagtgcactgtttagccgggatcagtagatcagtcaccgtcaccgtagcctacctaatgcaaaaactgaacctgtctatgaatgacgcttacgatatcgtgaagatgaagaaatcgaacattagtccaaacttcaatttcatgggccaactcctggatttcgagcggactttggggctatcctccccatgcgacaaccgggtgcctgcccagcaattgtatttcacaaccccttctaatcaaaatgtttatcaggtggatagcctgcaatcaacctag

SEQ ID NO: 23927 - DNA, 708 bp, synthetic construct
  misc_feature 1..708: note = Description of Artificial Sequence: Synthetic coding sequence
  source 1..708: mol_type = other DNA
atgatcgacaccctgcggcccgtgcccttcgccagcgagatggccattagtaaaacagtagcttggctgaacgaacagctggagctcggcaatgagcggctgctgctgatggattgcagaccacaagagctctacgagagctcccatatagagtctgccatcaacgtggctattccaggtatcatgcttaggcgcctgcagaagggtaacctacccgtcagggctctgtttacaagaggagaagatagagaccgatttacaagacgatgcggaacggatacagttgttctgtatgatgagagttctagcgattggaatgaaaacaccggcggggaaagcgtcctgggcctgctccttaagaaattgaaggacgagggctgccgggcattctatctggaagatgaagctcgcggaaagaattgtggcgtgcttgtacactgcctggctgggatcagccgttctgtgaccgttactgtggcctacctgatgcagaagttgaacttgagcatgaacgatgcttacgacattgttaaaatgaaaaaaagtaatatctcccccaatttcaatttcatgggacagctgttggatttcgagcgcaccctcgggctctccagtccatgcgataaccgcgtccccgcccagcagctatactttaccaccccaagtaatcagaacgtttatcaggtggacagtctccaatctacctag

SEQ ID NO: 23928 - DNA, 354 bp, synthetic construct
  misc_feature 1..354: note = Description of Artificial Sequence: Synthetic coding sequence
  source 1..354: mol_type = other DNA
atgatcgacaccctgcggcccgtgcccttcgccagcgagatggccatctccaagaccgtggcttggctcaacgaacagctcgaactggggaatgagcggctgctgctcatggattgtcgtccgcaggagctctatgaaagtagccatattgagagcgccattaacgtggcgatccccggcatcatgctgcgccgattgcagaaaggaaatttgccagttagagctctgtttaccaggggtgaggatcgagaccggtttacccgtcgatgcgggaccgacaccgtggtactctatgacgagagtagttccgactggaacgaaaatacaggcggagagtcggtgctcggcttgtag

SEQ ID NO: 23929 - DNA, 1545 bp, synthetic construct
  misc_feature 1..1545: note = Description of Artificial Sequence: Synthetic coding sequence
  source 1..1545: mol_type = other DNA
atggccgacgccgaggtgatcatcctgcccaagaagcacaagaagaagaaggagaggaagtctctaccagaggaggacgtggctgagattcagcacgctgaagagttcctgatcaaacccgagtcaaaggtcgccaaactggatactagccagtggccactcctactcaaaaacttcgataagctgaatgtaagaactacccactatacccccctggcctgtggaagcaatccactcaaacgggaaataggagactacattcgaaccggctttatcaatttagacaagccatcaaacccaagcagccacgaagtcgtggcttggatacgaaggattctcagagtagaaaaaactggacacagtggtaccctggacccgaaggttactggttgcctgattgtgtgcattgagagagcgacacggctcgtgaagtcgcagcagtccgcaggaaaggagtacgtcggcatagtcaggctgcacaacgctattgagggagggacccagttaagcagggccttggaaactctgactggagcactgtttcaacgcccccctctcatcgccgccgtgaagcgccaactaagggtgcgaactatctatgagagcaaaatgatagagtatgatcccgaacgccggttgggtatattctgggtatcttgcgaggcaggtacctacatacgcacgctgtgtgttcatttagggctccttctgggggttggggggcaaatgcaggagcttaggcgggtgaggagtggggtgatgtcagaaaaggatcatatggtgaccatgcatgatgtgcttgatgcccagtggctgtacgacaatcataaagacgaaagctatcttagaagagtcgtgtaccccctggagaagcttttgacctctcataagaggcttgtgatgaaggactctgccgtgaacgccatctgttatggtgccaagatcatgctgccgggtgtgctcaggtacgaagacggtatcgaagtcaaccaggagatcgtggtaatcaccacaaagggtgaagcaatatgtatggctattgctctgatgacgaccgcagtgatctccacctgcgaccatggcatcgtcgccaaaattaagcgtgtaatcatggagcgggacacttacccccgaaagtggggcctgggcccaaaggcatcccagaagaaactgatgataaaacagggcctgctggataaacatgggaaacctactgattctacccctgccacctggaagcaggagtacgtagattattccgaatcagccaaaaaggaagtggttgccgaggttgttaaagcgccccaagtcgtggccgaggccgccaaaacagccaagcgcaagcgtgagagcgagtctgaaagcgatgaaacaccacctgccgcaccgcagctgattaagaaggagaaaaagaagtctaagaaggataaaaaggcaaaggctggtctggagagcggtgcagagcctggagacggggatagtgataccacaaaaaaaaagaagaaaaagaaaaaggcgaaggaggttgagttagtgagtgaatag

SEQ ID NO: 23930 - DNA, 7245 bp, synthetic construct
  misc_feature 1..7245: note = Description of Artificial Sequence: Synthetic coding sequence
  source 1..7245: mol_type = other DNA
atggccgagaacgtggtggagcccggcccccccagcgccaagcggcccaagttgtccagccccgccctctctgcttctgcaagcgatggcaccgatttcggctccctgttcgatctcgagcacgacttgccagatgaacttataaacagcaccgaacttgggttgaccaatggcggcgacattaaccagcttcaaacctctctggggatggtgcaggatgccgcctcaaagcacaagcagttgtccgagttgttgcgaagtggaagtagtcccaatctgaacatgggagtggggggccccggccaggtcatggcgtcccaggctcagcaaagctcacccggcctgggccttattaattccatggtgaagagccccatgactcaagccgggctgacatctccaaatatgggcatgggcacaagcgggcccaaccaaggtcctactcagtctacgggaatgatgaatagccctgtgaatcagcctgcaatgggcatgaatacaggtatgaatgccggaatgaaccccgggatgctggccgcaggaaatggacaggggataatgccaaaccaggtcatgaatgggtccatcggagccgggcgcggcaggcagaatatgcagtacccaaatcccggaatggggtccgcaggcaacctgctaaccgagccgctccagcagggctctccccagatggggggccaaacgggcttgcggggccctcagccactgaagatggggatgatgaataatcctaatccatatggaagtccatatactcagaatcctgggcagcagattggcgcaagtggtctgggtttacagatccaaactaaaacagtgctgagcaacaacttgagcccttttgccatggataagaaagccgtgcccggaggggggatgccaaacatgggacagcaaccagcaccacaggtgcagcaacccggcttggtaaccccagtggcacaagggatgggttccggggcccatacagcagaccccgaaaagagaaagcttatccaacagcagttagtactgttattgcacgcccacaagtgccagcggcgcgagcaggctaacggggaggtgcggcagtgtaatctgccacactgtagaaccatgaagaatgtgcttaaccacatgactcactgccagagcgggaaaagttgtcaggtggcacattgtgcgagtagcagacagattatctctcattggaagaactgcaccaggcatgattgcccagtctgtctgcctctcaagaacgctggagataaacggaatcagcagcccattctgactggtgcgccagtgggtctgggtaatccaagcagcctgggcgtgggccaacaatccgcacctaatttgagtacagtatctcagatagaccctagctcaattgagcgcgcatacgccgctctgggcttaccgtaccaagttaatcagatgccaacgcaaccgcaggtgcaggccaagaatcagcagaatcagcagccgggacagtcccctcagggaatgaggccaatgtcaaatatgtccgcgagtccaatgggcgtgaatggcggcgtcggcgtacagaccccaagcctattaagcgatagcatgctccactccgccattaatagtcagaatcctatgatgtctgaaaacgccagtgtgccttcacttggcccaatgcctaccgctgcacagcctagtaccacggggattcgtaagcagtggcatgaggatattactcaggatctacggaaccacctggtgcataagctcgttcaggcaatattcccaacacccgatcccgccgccctcaaggatagaagaatggaaaacttagtggcttacgcccgcaaagtggagggggatatgtacgagtccgccaataaccgcgccgagtattatcaccttctcgcagagaaaatatacaaaatccagaaggagctggaggaaaagagaaggacccgacttcagaaacaaaacatgcttcccaacgccgcggggatggtcccagttagcatgaaccctggccctaatatgggacaacctcagcccggtatgacttcaaatggcccactgcctgatccctcaatgattcgtgggagcgtacccaatcagatgatgccccggatcaccccccagtccggcttaaatcaattcggacaaatgtccatggctcagccaccaattgtacccaggcagacacctccccttcagcatcacggtcagcttgctcagcccggagcgctcaacccgccaatgggctacggtccacgcatgcagcagccttctaaccagggtcaatttcttccccagacccagtttccatctcagggcatgaatgtgacaaatatacctttggccccgtcctctgggcaggccccagttagccaggcacaaatgagcagttcttcttgtcctgtaaatagccccatcatgcctcctggatcccaggggtcccacatccactgccctcaacttccacagccagccttacaccaaaattcaccctctccagtgccctctcgaacacccacacctcaccacactcctcccagtatcggggctcagcaaccccccgctacaaccatccctgcccctgtccctaccccaccggccatgccacctgggccccaaagtcaagcattacacccccctcccaggcagaccccgacacctcctacaacacagctgccccagcaggtgcagcctagcctccctgccgccccttccgcagatcagccacagcaacagccaaggagtcagcagagtaccgcggcgagcgtgcccaccccgacagccccactgttgccaccccagcctgctacacctctctcccaaccggctgtttctattgaaggtcaggtgagcaatcctccctctacatcatctacggaagttaattctcaggcaatcgcagaaaaacagccgtcgcaggaggtgaagatggaggctaaaatggaagtggatcagccggagccagccgacacccagcccgaagatatctctgagtctaaggtcgaagattgtaagatggagagcaccgaaactgaagagcggtcaacagagctgaagacagagattaaggaggaggaagatcaacctagcaccagtgcgactcaatccagccctgcgcctggccaaagcaaaaagaagatcttcaaacccgaggagctccggcaggcccttatgcctacactggaggccctttaccgccaggaccccgagtctctcccctttagacagccggtggacccacagctgctcgggattcctgactacttcgacatcgtcaaaagccccatggatctgtccacaataaagaggaaactggacacaggccagtaccaagagccatggcagtacgtagatgatatctggctcatgtttaacaacgcgtggttatataatcggaaaacctctagagtttacaagtactgctccaagctcagtgaggtttttgagcaggagattgaccctgtgatgcagtctctaggatactgttgtgggcgtaagctcgagttttctccccaaacactgtgttgttatggtaagcagctttgcaccattccaagagatgcgacatattactcttaccaaaacaggtaccatttttgcgaaaagtgttttaatgagatccagggagagtcggtaagcctgggcgatgatccgtcccagcctcaaactacaataaataaggaacagttcagcaagcggaagaacgacacactggatccagaattgttcgtggagtgcaccgagtgtggcagaaagatgcaccagatttgtgtgcttcaccacgagataatttggcccgcaggttttgtgtgcgatggatgtttgaaaaaaagcgcccggacccgaaaggaaaacaagttttctgcaaagcgactacccagtacccgactcggcacattcttagaaaacagggtcaacgatttcttgcgtaggcagaaccacccagagtcaggcgaggtcaccgtcagggtcgtgcatgccagcgacaaaaccgtggaagttaagccgggcatgaaggctcgatttgtggacagcggcgagatggccgaatcgttcccttataggacaaaggcgctcttcgcctttgaagaaattgacggcgtggacctctgctttttcggaatgcatgtccaggaatacgggagcgactgcccgcccccaaatcaacgtagagtgtatatctcctacctcgattcagtgcatttttttaggcctaaatgcctgcgcaccgccgtgtaccacgaaatactgattggataccttgaatatgttaagaagctgggatacactactggtcacatttgggcctgtccacccagcgagggcgatgactatattttccattgtcaccctccagaccagaaaattcctaagccgaagcgactccaggagtggtataagaaaatgttagacaaagcagtatccgaacgcatcgtgcacgattataaagatatctttaagcaagccactgaggatcgcctaacctcagccaaagaactcccttattttgaaggggatttttggcccaacgtgttagaggagagtatcaaagagctggaacaggaagaagaagagagaaaaagagaagaaaatacaagcaacgaatctactgatgtgaccaaaggcgatagcaagaacgctaagaaaaaaaataacaagaagaccagcaaaaacaagtcctccctgtcaagggggaataagaaaaaacccggaatgccgaatgtatctaacgatctaagccaaaagctctatgctaccatggaaaagcataaagaggtctttttcgtaattagactgatcgcaggccctgccgcaaatagcctgccgcctattgtggatcctgaccctttgatcccctgcgacttgatggacggccgggacgcttttctgacactggcacgagataagcatcttgagttcagttctctgagaagagctcagtggagtaccatgtgtatgctggtggaacttcacactcaaagccaggaccgctttgtctacacatgcaatgaatgcaaacaccatgtggaaacacgttggcattgtaccgtgtgtgaggattatgacttgtgcatcacctgttataacaccaagaatcatgatcacaaaatggaaaagctgggactgggattagacgacgaatccaacaatcagcaggcagccgctacccagagtcctggggactcccggaggctctcaatccagcgatgtattcagtccttagtccatgcttgccagtgtaggaacgcaaactgcagcctccccagctgccagaaaatgaagcgagtagtacagcacacgaaaggctgcaagcggaaaactaacgggggatgccccatctgtaaacagcttattgccctgtgttgctaccatgctaaacactgtcaggaaaacaagtgtcccgtccccttttgtctgaatatcaaacaaaagctgcgtcagcagcagctccaacaccgcctgcagcaggcacagatgttgcggcgtcggatggcatccatgcagcggaccggtgtggtcggccagcagcaggggctgccctctcccacacccgccacccctacaaccccaactggtcagcagcctactacaccccaaacaccacaacctacttcgcaacctcagcccactcccccaaacagcatgccaccatatctgccccggactcaggcggctggccctgtgtcccagggcaaggcagcaggtcaagttaccccgcctacccctcctcaaactgctcaaccaccccttccggggccacctcctgcagctgtggagatggccatgcaaattcaacgagccgccgagacacagaggcagatggcccacgttcaaatcttccagcggccaatacagcaccagatgcccccgatgacacctatggccccaatggggatgaatcccccaccaatgacccggggccctagtggacatctagaacccgggatgggtcccactggtatgcaacagcagcctccatggtcacagggcggactgccgcagccgcagcagttgcagtccggaatgccccggcccgcaatgatgtctgtagcacagcatggccagccacttaatatggcgcctcagcctggtctgggacaggtgggtattagtcccctgaagcctggaactgtgtcgcagcaagctctccaaaacctgctgcggactctgcgatcaccctctagtccacttcagcagcagcaagtcctgtctattctccatgctaaccctcagctcttagcagctttcataaaacaaagggctgcaaaatacgctaactcaaacccccagcctatccccggccaacccggaatgccacaggggcagccaggcctgcagcccccgacaatgcctggccagcagggtgtgcattcaaacccagcaatgcaaaacatgaacccaatgcaagcaggtgtgcaaagggccggtctgccacagcagcagccgcagcagcagctgcagcccccaatgggcggcatgagtccacaagcccagcagatgaatatgaatcataacacaatgccatcccagttcagagatatactgcgcagacagcagatgatgcagcagcagcagcagcagggcgcaggccctggaattgggcctggcatggccaaccacaatcaattccaacagccccaaggagtgggatatccacctcagcagcaacagagaatgcagcatcatatgcagcagatgcaacagggcaatatgggccaaatcggacagctgccacaggcactgggggccgaggcgggggcgtccctgcaggcctatcagcaacgtctgctgcagcaacagatgggttcccccgtgcaaccgaaccccatgtctccacaacagcacatgctgcccaatcaggcgcagtcccctcatctgcagggccagcaaataccaaactcactctccaatcaggtgcggtctccccagccggtgcccagtcccagaccacagtcccaaccgccgcacagttcccctagccctcggatgcagccccagccttcaccgcatcatgtctctcctcagacgagttccccccatcccggtcttgtggccgcccaggcaaatcctatggaacaggggcacttcgcctccccggatcagaacagcatgctttctcagctcgcttctaaccccggtatggccaacctgcacggcgcatctgctaccgatctgggcctttctacagacaatagcgatctgaacagtaacctgagccaatccacactggacatccactag

SEQ ID NO: 23931 - DNA, 1314 bp, synthetic construct
  misc_feature 1..1314: note = Description of Artificial Sequence: Synthetic coding sequence
  source 1..1314: mol_type = other DNA
atggccctggccggcgcccccgccggcggcccctgcgcccccgccctggaagcactgctaggggccggagccctgagactgctggatagcagccagattgtaatcattagcgccgcccaggatgctagcgccccccccgcgcctactggtccagctgcccccgctgcaggaccgtgtgatcccgacctgttgctgtttgctacaccacaggcccctaggccaactccttctgctccacgacctgcgctggggcggccacccgtcaagaggaggctggacctagagactgatcatcagtacctcgctgagtcgagcggcccagcaaggggaagggggagacaccccgggaaaggtgtcaaatctccaggggagaaatcccggtacgagaccagcttgaacttaaccaccaagcggtttcttgagctgttaagtcattcagctgatggagttgtggacttgaactgggccgcggaggtcctgaaagtgcagaaaaggagaatctatgatattactaacgtgctggagggtattcaactgatagcaaaaaaatcgaaaaatcatattcagtggcttggcagccacacaacggtgggcgtgggcggcagactggagggtctgactcaggatctgcggcagctacaggagtctgagcagcagctggatcacctgatgaacatatgcactactcagctgaggttactgagtgaggataccgattcccagagactggcttacgttacctgccaagatttaaggtccatcgccgacccagccgaacagatggtaatggttattaaggctccgccagagactcagttgcaggccgtagattcaagtgagaattttcagattagcctgaagtccaagcagggacccatagatgtgttcttatgcccagaggagacagttggcggtatctcgccaggtaaaacaccaagtcaggaggttaccagcgaagaggaaaaccgcgccactgattccgcaaccatcgtaagtcctccgccaagttcccctccgtcttccctaacaacagacccgtctcagtcattgctcagcttggagcaggaacctctgctgtctaggatggggtcacttcgggcccctgtcgatgaggacaggctgagtccacttgttgccgccgactctctcttagaacatgtcagggaagacttcagcgggttgttgcctgaagagtttatctcgctctctccccctcacgaagctttagactatcacttcggattggaagagggcgaggggattagagatctgttcgactgcgatttcggggatctgacccccctggatttctag

SEQ ID NO: 23932 - DNA, 1242 bp, synthetic construct
  misc_feature 1..1242: note = Description of Artificial Sequence: Synthetic coding sequence
  source 1..1242: mol_type = other DNA
atggccgaggccggcccccaggccccccccccccccggcaccccctcacggcacgagaagagcttgggtctgttgaccaccaaatttgtgtctttgttgcaagaggccaaagatggcgtcctggatctgaagttggcagccgacactttggccgtacgtcagaagcgccgtatttacgacattaccaatgttctcgaaggcatcgggctcatagaaaagaagtctaaaaatagcatccagtggaagggggtgggccctggctgtaatacccgggagattgctgacaagctgatagaattgaaggccgagatcgaagagttgcagcagagagagcaggagctggatcagcataaggtctgggtgcagcagagtattcgtaacgtgactgaggacgtgcaaaacagttgccttgcctatgtcacacatgaggacatttgccgctgctttgccggtgatacactgctcgctattcgcgccccctcagggacctccctagaagtgccaatcccagagggactgaatggtcagaaaaaatatcagatccatctcaagtcagtctccggaccaattgaggtgctgctggtgaacaaagaggcatggtcaagtcctccagtcgccgtgcccgttccgccgcccgaggatttactgcagagcccctcggccgtgagtacccccccccctctccccaagcctgctctggcccagtcacaggaggccagccggcccaacagcccccagctgacacctaccgccgttcccgggtccgccgaggtgcaaggcatggcggggcctgctgcagagattaccgtctctggaggccccgggaccgacagcaaagactccggcgaactcagttccctgccgctgggccccactacgcttgacaccaggcccttgcaatccagcgccctcctcgacagctcaagctcctctagctctagttcttcctcttccagtaactccaactcctcgtcctcttctggccccaatcctagcacctccttcgagccgattaaagccgacccgaccggtgtccttgaactgccaaaggaactgtctgaaatattcgaccccacgagagagtgcatgagctcagagctgcttgaggaactgatgtcttctgaggtttttgcaccattacttcgcctgagcccaccacccggcgatcacgactatatctacaaccttgacgagtcagaaggcgtttgcgatctgtttgacgtccctgtattaaatctctag

SEQ ID NO: 23933 - DNA, 1164 bp, synthetic construct
  misc_feature 1..1164: note = Description of Artificial Sequence: Synthetic coding sequence
  source 1..1164: mol_type = other DNA
atgaccggcaagctggccgagaagctgcccgtgaccatgagcagccttctaaatcaactgcccgacaacttatatcctgaagagatcccatccgctttgaacctcttctcaggcagtagcgatagcgtggtgcactacaaccagatggctacagagaatgttatggacatcggcctgaccaatgagaagcccaatcctgagctgagttatagtgggagcttccaaccagctcctggcaataagaccgttacgtatctgggaaaatttgcctttgactccccaagtaactggtgccaggataacattattagcttgatgagtgcaggtattctgggggtgccgccggcctccggcgctctgtccacgcagaccagtaccgcctctatggtgcaacccccccagggagatgtcgaggcgatgtaccccgccctgccaccatacagcaattgtggcgacctgtactccgaacctgtgagctttcacgatccgcaaggaaaccctggcctggcatactccccacaggattatcagagtgctaaaccagctctggattctaacctcttcccaatgatccctgattataatttgtatcatcaccccaatgacatgggaagcatcccggaacacaagcccttccagggcatggaccctataagagtgaatccacctccaatcactccactggaaacaatcaaggcgtttaaagacaaacagatacatcctggctttggttcacttccccaacctcctctaaccctaaagccgatccgccctaggaagtaccctaaccgccccagcaagacacctctacacgagcgaccccacgcctgtcccgccgaaggctgtgatcggcgcttcagtcggagtgatgaactgacacggcatctcagaatccataccgggcacaagccctttcagtgtagaatttgcatgcgcagttttagtaggtcagatcaccttacgacccacattcgcactcacaccggcgaaaaaccttttgcatgtgagttttgtggccgaaaatttgccagatccgacgagaggaaacggcacgccaagatacacttgaaacagaaggaaaaaaaggccgagaaaggaggtgcccccagtgcctccagcgcccccccagtgtctctggccccagtggtgaccacctgtgcctag

SEQ ID NO: 23934 - DNA, 687 bp, synthetic construct
  misc_feature 1..687: note = Description of Artificial Sequence: Synthetic coding sequence
  source 1..687: mol_type = other DNA
atggacatcggcctgaccaacgagaagcccaaccccgagctgagctacagcgggtcttttcagccggcccctggtaataagacagtgacaatgatccctgattacaatctgtaccaccaccctaatgatatgggatctatcccagaacataagccatttcaggggatggaccccattcgtgtgaatccccctccgataactccgctggagaccattaaggcgttcaaggacaagcagattcaccctggcttcggaagcctcccgcagccccctctaacgctcaaaccaatacgcccaaggaagtaccccaatagaccctccaaaacacctctacatgaaagaccacacgcttgtccagccgaagggtgtgaccggaggttctctcgttcggacgagctaacacgccaccttcggattcacaccggacacaaaccgtttcagtgcagaatttgcatgcgatctttcagccgcagcgatcatttgacaacccacatcaggactcacactggcgagaaaccgtttgcttgcgaattctgcggcagaaaatttgcgcgcagtgatgagcgaaagcggcacgcgaaaattcacctgaagcagaaagagaaaaaagctgagaaaggcggagcacctagcgcaagttccgcccccccagtgtccctcgcacctgtcgtaactacatgtgcctag

SEQ ID NO: 23935 - DNA, 1050 bp, synthetic construct
  misc_feature 1..1050: note = Description of Artificial Sequence: Synthetic coding sequence
  source 1..1050: mol_type = other DNA
atggagccctgcgccgcctggagcccccggggcggccgggagaacgtgatggacatcgggctgacaaacgagaaaccaaatcccgagctttcatatagtggatcttttcagccagcccctggcaataagactgtgacatacctcggcaaatttgctttcgatagccctagcaattggtgccaggataacattatcagcttaatgtctgctggcatccttggagtgcctccggcttccggcgcattgtccacccaaacgagcacagctagcatggttcaaccgccccagggggatgtggaagccatgtatcctgccctcccaccctactctaattgtggggacctctattctgagccagtctcttttcacgacccgcagggtaaccccggcttggcttacagcccccaggactaccagtctgcaaaaccggccctcgacagtaacttgtttccaatgatcccagactacaacctgtatcaccatcccaatgatatggggtccattcccgagcacaagccctttcagggcatggacccaattagagtcaacccaccaccaattacgcctctcgagacgatcaaggctttcaaggacaagcagatccacccggggtttgggagcttgccacagccaccgttgaccctgaaacccattagacctaggaaatacccaaacaggccaagcaaaactcctttgcatgagcgccctcacgcatgccccgctgaaggatgcgaccgtcggttttcacgttcggacgaactgaccaggcatctccggattcacaccggccacaagcccttccagtgcagaatttgcatgcgttccttctctagatccgatcacctcacaacccatataagaacgcatactggcgagaagccatttgcgtgtgagttctgtggccgaaagttcgctaggagtgacgaaagaaagagacatgctaagatacatttaaagcaaaaggaaaaaaaagccgagaaaggcggcgccccttctgcatctagcgcaccccctgtctcgctggcacccgtggttactacttgcgcctag

SEQ ID NO: 23936 - DNA, 3696 bp, synthetic construct
  misc_feature 1..3696: note = Description of Artificial Sequence: Synthetic coding sequence
  source 1..3696: mol_type = other DNA
atggccagcgtgtggaagcggctgcagcgggtgggcaagcacgcctctaagtttcagttcgttgcttcctaccaggagcttatggtagaatgtacaaaaaagtggcagcctgacaaactggtcgtcgtttggacgcgccgcagccgcagaaagtcatctaaagcccacagctggcagccaggcatcaaaaacccttaccgcggagtggtggtttggccagttcctgaaaatattgagatcaccgtcaccctctttaaagatccgcatgcagaagaatttgaagacaaggaatggacctttgtgatcgagaatgagagcccttccgggagaaggaaagcactggccactagtagtatcaatatgaagcagtacgccagccccatgcccacccagactgacgtgaagctgaagtttaagccactgtccaagaaagtcgtgtccgctgctttgcagttctcactgagctgtatatttctccgcgagggcaaagccactgacgaagacatgcagagcctggccagcctcatgtccatgaagcaggccgatattggcaacctcgacgactttgaggaggacaatgaggacgatgatgagaaccgggtgaaccaggaggaaaaggccgctaaaattacggaaatcgtgaaccagttaaacgccttgtcctcactggatgaggatcaggatgattgcatcaagcaggcaaatatgagaagtgccaagtccgcttcgtcttccgaggagcttatcaacaagctgaacttcttggacgaagctgagaaggatttggcaacagtcaattctaaccccttcgatgaccccgacgccgccgagctgaacccgtttggcgaccctgactccgaagaaccaatcacagagactgcttctccgagaaagacagaagacagcttctacaacaactcttacaacccctttaaggaagtccagacaccacagtatctaaatccatttgacgagcccgaggcttttgtcacaattaaggactcacctccacaaagtaccaaaaggaaaaatatacgccccgttgatatgagcaagtacctttatgccgactcaagtaagactgaggaggaggagttggacgagtccaatcccttttacgaaccaaagagtacccctcccccgaataacctcgtcaaccccgtgcaagaattggaaacagaacgcagagtaaagcggaaagcacctgccccaccagtgttgtctcctaagaccggcgtgctgaatgaaaatacagtatctgccgggaaagacctttctaccagccccaaaccaagtcctattcctagccccgtattgggacgcaagcctaacgccagtcagagtctcctggtctggtgcaaagaggtcacaaagaactaccgtggcgtgaagattacaaactttacgacatcatggcggaatggcctgtctttttgcgccatccttcaccactttaggcctgatctcatagactacaaaagcctgaacccacaagacattaaagagaacaataagaaagcatatgatggattcgctagtattggaatctctcgcctcctggagccctcagacatggtactgttggccatccctgacaaactaacagtgatgacgtatttataccagatacgcgcccatttctcaggccaggagctgaatgtcgtgcagatcgaagagaattcgtcaaagtccacgtataaggtcgggaattacgaaaccgacacaaactcatctgtggatcaggagaagttctatgccgagctttctgatctcaagagggagcccgaattacagcagcccatctccggcgccgtcgatttcttgtcccaagatgatagcgtgtttgttaacgacagcggcgttggcgagagtgagtctgagcaccagactcctgacgatcatttatcccctagcaccgcctctccttactgccgccggacgaagtccgacacagagcctcaaaaaagtcaacagtcatccggccgcactagcggaagtgacgaccccggaatttgcagcaacacagatagcacccaggcccaggtgctgttggggaagaagcgcctcctgaaggctgagactctggaactgtctgacctgtacgtgagcgacaaaaagaaagatatgtcaccgccttttatctgcgaagaaactgatgagcagaaacttcaaactctggatatcggttccaaccttgagaaggaaaaattagaaaactcccgtagtctggaatgtaggtctgacccagaaagcccgatcaagaagacatccctgagccccaccagcaagcttgggtacagctactctcgagacctggatctcgccaagaagaaacacgcctctttaaggcagactgaatctgatccagacgcagacaggactactcttaaccatgcagatcactcctccaagatcgtccagcatagactgctcagcaggcaggaggagcttaaggaaagagccagggttctgctggagcaggccaggcgagacgccgcactgaaagcaggcaataagcacaacacaaacactgccacccctttctgcaaccgtcagctatcagatcaacaggacgaggaaaggaggcggcaactcagggagagggcccgacaactgatcgcagaggccagatccggagtaaaaatgtcggaactgccatcatatggagagatggccgctgaaaagctcaaggagcgatccaaggcgagcggtgatgagaatgataatatcgagattgacacgaatgaggagatacccgaggggttcgtggttggcgggggtgacgagctgactaacctagaaaacgatctggatacgcctgaacaaaattctaagctggttgacctaaagctgaaaaagctgctcgaggtgcagccccaagtcgcaaactctcctagcagcgcggcccagaaagcagtaactgagagctcagagcaggatatgaaatccgggaccgaagacttacgaacggagcgtctgcaaaaaactacggaacggttccgcaacccggtcgttttcagcaaggattccacagtccgaaaaacacagctacaatcattctctcagtatatcgaaaaccgccccgaaatgaagcgtcagaggagtatccaggaggacaccaagaagggcaatgaagagaaggcagccataaccgagactcagaggaaaccttccgaggacgaggtgctgaacaaggggttcaaggacacaagccagtacgttgtgggggagcttgctgccttggaaaatgagcagaagcagatagacactcgcgccgcactggtcgaaaaaagactgcgctatctgatggacaccggcaggaacaccgaggaggaggaagccatgatgcaggagtggtttatgctggtcaacaagaaaaatgctctcatccgccgaatgaatcagctgtcacttctggagaaggagcacgacctcgagcgcaggtacgagctgctgaatagggaattacgggcgatgctggccatagaggattggcagaagacagaggcacagaagagacgtgaacaactcctgttggacgaattggtggccttggttaacaagcgggatgctcttgtcagggacctggatgcacaggagaagcaggccgaggaggaagacgagcaccttgaaagaacattagaacaaaataaagggaaaatggccaagaaggaggagaaatgcgtactgcagtag

SEQ ID NO: 23937 - DNA, 3591 bp, synthetic construct
  misc_feature 1..3591: note = Description of Artificial Sequence: Synthetic coding sequence
  source 1..3591: mol_type = other DNA
atggccagcgtgtggaagcggctgcagcgggtgggcaagcacgccagtaagttccaattcgtcgcttcttatcaggaactcatggttgagtgtaccaaaaaatggcagcctgacaaactcgtcgtggtctggactcggagatcccgcaggaaatcaagcaaggcccattcctggcagccaggtattaaaaatccctacagaggcgtggtggtgtggccagtccccgaaaacatcgagataacagtgactctttttaaggaccctcacgctgaggagttcgaggataaagaatggactttcgtcatcgagaacgagtctcccagcggaagaagaaaagctcttgctaccagctctataaacatgaaacagtacgcgtcacccatgccaactcagaccgacgttaagctgaagttcaagccgctctctaaaaaagtggtttctgcggccttgcagtttagcctcagttgcatattccttcgtgagggtaaggctactgacgaagatatgcagtccttggccagccttatgtcgatgaaacaggccgatattggtaacttggatgacttcgaagaggacaatgaggacgacgatgaaaaccgagtaaaccaggaggagaaagctgcaaaaataaccgaactgatcaataagctcaacttcctggacgaggcggaaaaggatctggccaccgtcaattcgaacccgtttgacgatcccgacgcagccgaactcaacccctttggggacccggattctgaagaacctatcacggaaacggcctccccccgaaaaacagaggatagcttctacaataattcctataatccttttaaggaagtgcagacgccccagtacctaaatcccttcgatgagccagaggccttcgtgacgattaaagattcaccaccccagtcaactaaacgaaagaacattcggcctgttgatatgtcgaagtacctgtacgccgactcctcgaagaccgaggaggaggagttggatgaatctaacccattctacgagcccaagtctacacccccccctaataacctcgttaaccccgtgcaggagcttgagacagaaagacgcgtgaagagaaaagcaccagccccccccgtgctatctcctaaaacaggggtcctgaatgaaaataccgtatccgcgggcaaagatttgtctaccagcccgaagccctctccgattcctagtcctgtcctgggtaggaaacctaatgccagccaaagtttgctggtttggtgcaaagaggtaacaaaaaactatagaggcgtgaaaatcacaaactttacgacaagttggaggaatggcttgagcttttgcgcaatccttcaccattttcggccggatctcatcgactataaatcactgaaccctcaggacatcaaggagaataataagaaagcctacgacggatttgcctcgattggtatcagtagattacttgagccatccgacatggtgttgctcgccatcccagacaaattaacagtgatgacatacctgtatcagattagggcccactttagcggacaggagttgaacgttgtgcagatcgaagagaactcttctaaatcaacatacaaggtcggcaactacgagaccgataccaatagctccgtcgaccaggagaaattttacgcggagctctccgacctgaaacgggagcctgaactccagcagccgatctctggtgcagtcgacttcctctcccaggacgattccgtgttcgtgaacgatagtggcgtgggagaatccgagagtgaacaccaaactccagacgatcacctgtccccctccactgcttctccatattgccggaggacaaagtccgacaccgaaccccagaagagccagcagtctagcgggcgcactagcggaagcgacgaccccggcatctgttcaaatacagattctacacaagcccaggtgttgctggggaaaaagcgcttgctgaaggccgagaccctggagctttctgacctgtatgtttccgacaaaaaaaaagacatgagccccccttttatatgcgaggagacggatgagcagaaattacagaccctcgacatcggctctaatctggagaaagaaaaactcgagaatagccgctcgttagagtgccggtcagaccccgaaagcccaattaagaagacgtccctctcacccacttctaaactggggtactcttactctcgcgatttagacctggccaagaaaaagcacgcttccttgcgccagacagagagcgatccagacgctgataggaccacattgaatcacgcagatcacagtagcaagattgtacagcatcgactgctttccaggcaggaagagttgaaggagagagctagagtcctgttggaacaggctcgcagagacgcagcactgaaagccgggaataagcacaacactaataccgccacacccttttgtaacaggcagctaagcgaccagcaggatgaagaacgaaggagacagctgcgagaacgggcccgccagttaatcgccgaagccaggagtggggtgaagatgtctgagcttcctagctatggtgaaatggccgctgagaagttgaaagagagatccaaagcaagcggcgacgaaaatgataacattgagatcgacacaaacgaggaaattcctgaaggttttgttgtggggggaggggacgagctcacaaaccttgagaatgacttggatactcctgaacagaactccaagttggttgatttgaagcttaaaaaactcttggaggtgcaaccacaggttgcaaacagtcctagcagcgcagcccagaaggctgttactgagtcctctgagcaggatatgaagtccggcactgaggacctcagaactgaaaggctgcagaagactaccgaacgttttcgaaaccctgtagtgttttctaaagactccactgtccggaaaacgcaactgcagagctttagccaatatatagagaatcgaccagaaatgaagcgccaaagatccatccaggaagacactaaaaaagggaacgaagagaaagcagccatcactgagacacagcgaaaaccgtcagaagacgaggtgttgaacaagggtttcaaagacacctctcaatacgtagtgggcgaactggctgccctggagaacgagcagaaacagatcgatactagggcggcgttagtcgagaagcgtctgagatacttgatggacacagggagaaatacagaggaagaggaagccatgatgcaggagtggtttatgttagtcaacaaaaagaacgctctgattcggcgcatgaaccagctgtccctgcttgagaaagaacacgacctcgaacgtcgttatgaattgctcaatagggagcttcgtgctatgctggctatcgaggactggcaaaagactgaggcacagaaacgcagagaacagctgctactagacgagctggtggcactcgtgaataagagggacgccttggtacgggacctcgatgcacaggagaagcaggcagaagaagaagatgagcacttggagcggacactagaacaaaataaaggaaagatggcaaagaaagaagaaaagtgtgttctgcaatag

SEQ ID NO: 23938 - DNA, 3483 bp, synthetic construct
  misc_feature 1..3483: note = Description of Artificial Sequence: Synthetic coding sequence
  source 1..3483: mol_type = other DNA
atggccagcgtgtggaagcggctgcagcgggtgggcaagcacgcctctaagtttcagtttgtcgcctcctaccaagaactgatggtggagtgtacaaaaaagtggcagccggataagttggtggtcgtctggacaaggaggtcccgccgcaagagtagcaaagcccactcttggcaacccggcatcaaaaatccctaccgaggggtggtggtgtggccagtgccagaaaatattgaaatcacagttaccttgtttaaagatccacacgccgaggagtttgaagacaaggaatggacttttgtgatcgagaacgagtcgccatccggacgaagaaaggccctggccacctccagcattaacatgaaacagtacgctagtccgatgcccacccagaccgatgtaaagctgaaatttaagccactgtctaagaaggttgtcagcgcagccctccagttttcactatcctgcatcttcctgcgggagggaaaagcgaccgatgaggatatgcaaagtcttgccagcctgatgtcaatgaagcaggcagacatcggcaatctcgatgactttgaggaggataacgaagacgacgatgagaatagggttaatcaggaggagaaggcggctaagatcaccgagctcatcaacaaactcaatttcctggatgaggctgaaaaagacttggccactgtgaattccaaccctttcgacgaccctgacgccgcagaattgaatccattcggcgaccccgacagtgaggaaccaattaccgagacggcctccccccgcaaaaccgaggattcattctataataattcctataacccatttaaagaagtccagactcctcagtatctaaatccctttgacgagccagaggcatttgtgacgatcaaggactccccaccgcagagcactaaacgaaaaaacattagacccgtggatatgagcaaatacctttatgccgattcatctaagacagaggaggaggagctggacgaatcaaatcccttctatgagcctaaatccactccacctcctaacaacctggttaaccctgtccaagagctggagaccgagcgtcgggttaaaaggaaggcacctgcaccacccgtgcttagccctaaaacaggggtcctaaacgagaacactgtttccgctggaaaggatttatcgaccagcccgaaaccaagtccgatcccttcgcctgtgctaggaagaaaacccaacgccagccagagcttattagtttggtgcaaggaagtaaccaagaattacagaggcgtgaagatcactaatttcaccaccagttggcggaacggtctgagcttctgcgccatattgcaccatttccggccagatcttatagactataagagcctgaaccctcaggacattaaagaaaacaataagaaggcctatgatggcttcgcatcgataggtattagccggcttctggagcctagcgatatggtactgctggcaattcctgataagctcactgtgatgacgtacttatatcagattagggcccacttctccggccaggaactgaatgtcgtgcagatcgaggagaactccagcaagtctacgtacaaagtgggaaactatgagactgataccaactcatcagtggaccaagagaaattctatgcggaactttctgacctaaagcgcgagccagagctgcagcagcccatctccggtgctgtggattttttaagccaggatgacagtgtgttcgtgaacgactctggagttggagaaagcgagtctgaacatcagacccccgatgatcacctgagcccgtccacagctagtccctactgcagacgaactaagtccgacacagaacctcagaagagccagcagtcatctggccgcacctctggaagtgacgaccccgggatctgttccaacacagatagcacccaggcacaagtgctgctcggcaaaaagcgacttctgaaggcagagaccctcgaactgtctgacctgtatgtgtcagacaagaagaaggatatgtctccaccttttatttgtgaagaaaccgacgagcagaagttgcagactttagacattggttctaatttggagaaagagaaactggaaaactcacgcagcttagaatgccgcagtgatccagaaagccctatcaagaaaacttccctatccccaaccagtaaactggggtacagctattctagggacctggatctggcaaagaaaaaacatgctagcctacgacagacagagtctgacccagacgcagacaggactacgctcaaccatgcagaccactcctctaagatcgtgcagcatcgactgctttcccgccaggaggaattgaaggaaagggccagagtcttgctcgaacaggcaaggagggacgccgctctgaaggccggcaataagcacaacaccaacaccgccactccattttgtaatagacagttatctgatcagcaggatgaggaacgccgtcggcagctgcgggaacgtgcacggcagctgattgccgaggcccgctctggcgttaagatgtcagagctgccgtcctacggggaaatggcggcagaaaaattaaaagaaaggtcgaaagcatccggggaacagaattctaagctggtcgacctcaagttgaagaagctactggaggtccaaccacaggttgccaatagcccatccagtgccgcccagaaagccgtgacagagtcatccgagcaggacatgaagtctgggaccgaagacctgcgaactgagcggctgcagaaaactacagagagatttcgcaatccagtggtcttcagcaaggatagcactgtgagaaaaacacagctccagtctttctcacagtacattgaaaatcggccagaaatgaagaggcagcgctcaattcaggaagacacaaagaagggaaacgaggagaaagcagcaattacagaaactcagaggaaaccctccgaggacgaagtgctgaacaagggttttaaggacacaagtcagtacgttgttggagagttggcagctctggaaaatgagcagaagcagatcgataccagagccgctttggtggagaagaggctgaggtacctgatggacaccggccgtaacactgaagaggaagaagccatgatgcaggaatggttcatgttggttaataaaaaaaatgctctgataaggcgaatgaaccagctttcccttctggaaaaggagcacgacttggagagacgctacgagcttctgaatcgcgaattaagagccatgctagcaatcgaagactggcagaaaacagaggcccagaaaaggagggaacagctattgcttgacgaactcgttgcgctagtgaataagcgagacgcccttgtgagggaccttgacgcgcaagaaaaacaagccgaagaggaggacgagcacttagagcgaaccctcgaacagaataaggggaaaatggccaaaaaagaggaaaaatgcgtgctgcagtag

SEQ ID NO: 23939 - DNA, 3591 bp, synthetic construct
  misc_feature 1..3591: note = Description of Artificial Sequence: Synthetic coding sequence
  source 1..3591: mol_type = other DNA
atggccagcgtgtggaagcggctgcagcgggtgggcaagcacgcctcaaaatttcaatttgtcgcatcctaccaggaactgatggtggagtgtactaagaagtggcagcctgataagctcgtcgtggtgtggacccgcagaagcaggcgaaagtcctccaaggcccactcgtggcagccggggatcaaaaacccctaccggggtgtagttgtgtggccagtgccagagaacatagagatcacagtgaccctatttaaggatccacacgcggaagaatttgaagataaagaatggacgttcgtaattgagaacgagtccccatcaggtcgacggaaagctcttgcaacttcctccatcaacatgaagcagtatgccagtccaatgcctacgcagacggacgtcaaactgaaatttaaacccttgtccaaaaaggtggtgagcgcagctttgcagttttccctctcatgtatctttctgagagaaggtaaggcaacagacgaggatatgcagagtcttgcatctctgatgtctatgaagcaggccgacatcgggaacctcgacgactttgaggaggacaatgaagacgatgacgagaatagggtcaaccaggaagaaaaggcagcaaaaatcaccgaactgatcaataaactcaacttcctcgacgaggccgagaaagaccttgccacagtgaattcaaatccttttgacgacccggatgccgcagagcttaacccattcggcgaccccgatagtgaagagcccatcacggaaacggcatccccaaggaaaacagaggactctttttacaataatagctataacccttttaaggaggtgcagacacctcagtatttaaatcccttcgatgagcctgaggcctttgtgaccattaaagacagccctccgcagtcgacaaagaggaagaatataaggcccgtggacatgagcaagtacctttatgcggacagtagtaaaactgaggaggaggagcttgacgagtcgaaccccttctacgagcctaaaagcactcctccaccaaacaaccttgtcaatcctgtgcaggaactggagactgaacgcagagtcaagagaaaagctccagctccccctgtcctgtcccccaagaccggcgttctcaacgagaatacagtgagtgccgggaaggatttgtcaacaagccccaagcccagtccaattccttctccagttcttggccgaaagcccaatgcaagccaatcgctactggtatggtgtaaagaagtcacaaaaaactacagaggcgtcaagataacgaactttaccacatcgtggcggaatggtctttcattctgcgctattctgcatcactttcgccctgacttgatagattacaagtctctcaacccgcaggatataaaggagaacaacaaaaaggcttacgacggtttcgcctccattgggatcagcagattattggagccaagcgatatggttctgttagccatccctgataaacttaccgtgatgacatacctgtaccagatccgggcccacttttctggccaggaactgaacgtggtccaaattgaagagaattcttctaagagcacctataaagtcggcaactatgagactgacacgaattcctctgtggatcaggaaaagttttatgcagaactgtccgaccttaagagagagcccgaactgcaacaacctatcagcggcgcggtggatttcctctcgcaggacgactcagttttcgtgaacgactcgggcgttggggagagcgagtcggagcaccagactcctgatgatcacctaagcccgtctactgccagtccgtactgcaggagaaccaagtcagatacagagccacagaagagtcagcaaagctccggacgcactagtggcagcgacgaccctggtatctgtagcaacacagactcaacacaagctcaagttttattgggtaagaagcgcctcctgaaagcagaaacgctggaactcagcgatctatacgttagcgataaaaagaaagacatgagcccacctttcatctgcgaagagacagatgagcagaaactgcagacacttgatattggctcgaatctagagaaagagaaactcgagaactcccgcagcctcgagtgcagatccgatcctgagagtccaattaaaaagacctctttatcccctacatcgaagttgggttacagctactcgagggacctagatttggctaaaaagaagcatgcttccttacggcagacggaaagcgaccccgatgctgacagaacaacccttaaccatgccgatcacagctcaaaaatcgtgcagcaccggctgctgtctaggcaggaggaactgaaagaacgggcacgggttttactggaacaagccaggagggacgcagcccttaaagccggaaataagcataatactaacactgctacaccattctgcaatagacagctttctgatcagcaggacgaagaaagacgccgccagctgagggagcgggcaaggcaacttatcgccgaggcccgcagcggtgtgaaaatgtccgaactgccatcctatggtgaaatggctgctgagaagttgaaagagagatccaaagcgagtggcgatgagaacgacaatatagaaatagataccaatgaagaaatccccgagggcttcgtggtgggtggcggagatgaacttacaaatttggagaacgacctcgatacacctgaacaaaactctaagctggtggatctcaagctgaagaagctcttagaagtccagcctcaggtggccaactccccttctagtgccgcccagaaagcggtcaccgagtcctctgaacaggatatgaaatcagggactgaggatctgagaaccgagagactgcagaaaacgactgagcgcttccgtaacccagtcgtattcagtaaggactctactgtcaggaagacacagctgcagtctttctcccaatatatcgagaacagacctgaaatgaaacgccaacgaagcatccaggaggatactaagaaggggaatgaagagaaagcggcgatcaccgaaactcagcgcaaacccagtgaagatgaagtcctgaacaagggcttcaaagacacatcacagtatgtagtgggcgagctggcggcactagagaatgaacagaaacagatcgatacccgggctgctcttgtagagaagagattaagatatctgatggacactggtagaaacaccgaggaggaggaagccatgatgcaagaatggtttatgctcgtgaataagaagaacgccctcatcaggcgaatgaaccagcttagccttttggagaaagaacacgacttagagaggcgatacgagctcctgaacagagagctccgtgcgatgctcgcgatagaggattggcagaagacagaggcccaaaagcgacgagagcagctgcttctggacgagctggttgcgctcgtgaacaagagggatgcccttgtcagagatcttgacgctcaggagaagcaggcggaggaggaagacgagcacctggagcgaactctggagcagaataaaggcaagatggccaaaaaggaggagaagtgcgttctgcagtag

SEQ ID NO: 23940 - DNA, 933 bp, synthetic construct
  misc_feature 1..933: note = Description of Artificial Sequence: Synthetic coding sequence
  source 1..933: mol_type = other DNA
atggccagcgtgtggaagcggctgcagcgggtgggcaagcacgccagcaagtttcagtttgtggcctcataccaagagctgatggtggagtgtactaaaaagtggcagcccgacaaactggttgtcgtttggactcgtcgttcccgacgcaagtcctcgaaggcccattcttggcaaccaggcattaaaaacccgtaccgcggggtggtggtctggccagtgccagaaaacatcgaaatcaccgtgacgctgtttaaagatccgcatgcggaggaattcgaggataaggaatggaccttcgtgatcgagaatgaatccccttcagggcgaagaaaggcactggccacgtccagtatcaacatgaagcaatacgcttcaccgatgccgacccagacagatgtgaagttaaagtttaaaccgctgtccaagaaagtggtctccgcagctctgcagttctccctgtcctgtatcttcctccgagaggggaaggccacagacgaggatatgcaatctcttgccagcctcatgtcgatgaaacaggctgacatcggaaacctggacgattttgaggaggataacgaggatgacgacgaaaatagagtcaaccaggaggaaaaggctgccaagataactgagttgatcaataagctgaactttcttgatgaagccgaaaaagacctggcgacagtcaattctaacccctttgatgaccctgacgctgcagagctgaatccgtttggagatcctgactctgaagaaccgataacggaaacagcctctccaaggaagaccgaagatagcttctacaacaacagttacaatccttttaaggaagtacaaacgccacagtaccttaacccattcgatgaaccagaggccttcgtaactattaaggatagcccaccccagtcaaccaaaagaaagaacatatag

SEQ ID NO: 23941 - DNA, 234 bp, synthetic construct
  misc_feature 1..234: note = Description of Artificial Sequence: Synthetic coding sequence
  source 1..234: mol_type = other DNA
atggccagcgtgtggaagcggctgcagcgggtgggcaagcacgcctcaaagtttcaattcgtggctagctatcaagaactgatggtcgagtgtaccaagaagtggcagcctgacaagctggtggtggtgtggacccgacgctcccggcgcaaatcctcaaaggctcattcctggcagcctggcatcaagaacccgtacaggggcgtggtcgtctggcccgtaccagaaaactag

SEQ ID NO: 23942 - DNA, 3483 bp, synthetic construct
  misc_feature 1..3483: note = Description of Artificial Sequence: Synthetic coding sequence
  source 1..3483: mol_type = other DNA
atggccagcgtgtggaagcggctgcagcgggtgggcaagcacgcctccaagttccaatttgtagcctcgtaccaggagctgatggtggagtgtacaaagaaatggcagcctgacaagctggttgtcgtgtggactcggcgctctcgtcgaaagagtagcaaggcccacagctggcagccggggatcaagaacccctatcggggcgtcgtggtctggcccgtaccagaaaatattgagatcacggttaccctatttaaggatccccacgcagaggagttcgaggataaggagtggacatttgtcatagagaatgagagcccgagcggtcggcgcaaagcgctggctacctcttcaatcaatatgaaacagtatgcttcacctatgcccacacaaactgatgtgaagctgaagtttaagccattatcaaagaaggttgtgagcgccgcattacagttctctcttagctgcatcttcttaagagaggggaaggccacggatgaagatatgcaatctttagcatctctaatgtcaatgaagcaagcagatatcgggaatcttgacgacttcgaagaagataatgaggatgatgatgagaatcgggttaatcaggaggaaaaagcagctaagatcacggagctcatcaataaattgaacttcctcgacgaggcagagaaagatctggccactgtgaacagcaacccttttgacgatccagacgccgcagagctgaacccgtttggggatcctgactctgaggagcccataactgaaacagcttcgcctaggaagacagaggactctttctacaataacagctataaccccttcaaagaggtacagacaccccagtacctaaatcctttcgacgagcctgaggcgttcgtgacgatcaaggattcccccccgcagagcacaaagcgcaagaacatacggcccgtggatatgtcaaagtatctatatgccgacagctccaaaacggaagaagaggagcttgacgagtcaaatcccttttacgaacccaagtccacacccccacccaataacctcgttaacccggttcaggagctagagacggaacgccgtgttaaacgaaaggctcccgctcctcccgtcctttctcccaaaacaggagtcctcaatgagaatactgtaagcgcggggaaggacctgtcaactagcccgaagccttctccaattccttccccggttttgggcagaaaacctaacgcctcccagagcctgcttgtgtggtgtaaggaggttacaaaaaattatcgaggcgtaaaaattactaactttacaactagctggagaaatggcctgtctttttgtgccatccttcaccactttagacctgaccttatcgactataagagcctgaatcctcaggacattaaggagaacaataagaaggcatacgacggcttcgcctctataggcatttcgcgtcttctggagccatcagatatggtgctcctagccataccagacaaactgactgtgatgacctatctctaccagattagggcccattttagcggccaggagttaaacgttgtgcagattgaggagaactcctcaaagtccacctataaagtaggcaactatgagacagacacgaatagctccgttgatcaggagaaattctatgccgaactctctgacctcaaaagagaacctgagctgcagcagccaatcagtggagcggtggactttctttctcaggacgatagcgtattcgtgaatgacagtggcgttggtgaatctgagtccgaacaccagacccccgatgaccacctgtcacctagcaccgccagcccgtactgtcggaggaccaaaagtgatacggaaccacagaagtcccagcaatcctcaggcagaacctcaggctctgacgaccccgggatctgtagcaacacggactccactcaagcacaagtcctattaggaaaaaaaagactgctgaaagcagaaaccctggagctaagtgacctgtacgtttcagacaaaaagaaggatatgtcaccgccatttatctgcgaggagaccgatgaacagaagctgcagaccctggatattggctccaacctggagaaggaaaagcttgaaaactctcgaagcctggagtgccggagcgacccggagtctccaattaagaagacatccttaagtccaacaagcaaattggggtatagttattcccgcgacctggacttagctaagaaaaagcacgcatctctgcggcaaaccgagagtgacccagatgccgaccgcactacactgaatcatgccgaccactcatcgaaaattgtgcagcatcgtttgctgtctagacaagaggagctcaaggagcgtgcacgcgtgctcctagaacaggctcggcgggacgccgcgctaaaggcaggcaataagcacaacacaaacactgctacacccttctgcaacaggcaattgtcagaccagcaggatgaggaaaggcggagacagctgcgggagcgtgccaggcagttaatcgcagaagccagaagcggagtcaagatgtccgagcttccttcttatggagaaatggccgccgaaaagctgaaggagcgttcaaaagcttccggcgagcaaaattcaaagctggtggacctcaaattgaagaagctgttggaagttcagccccaggtggccaatagcccctccagcgcggcgcagaaagccgtcacggaatcctccgaacaggatatgaaaagcggtacagaagatcttagaactgagcgcctgcagaagactaccgagaggttcagaaatcctgtggtcttttcaaaagacagcacagtacggaaaacccaattgcagagcttttctcagtacatcgagaacagaccagagatgaaaaggcagaggagcattcaggaggacacaaagaagggcaacgaggaaaaggccgccattaccgaaacccagaggaaaccttcggaggacgaggtgctcaataaaggcttcaaagatacaagccagtatgtcgtcggcgagcttgctgcgctagagaatgaacaaaagcagatcgatactagggccgccctggtcgaaaagcgcctgagatatttaatggataccggccgcaataccgaggaagaagaagcaatgatgcaggaatggttcatgcttgtgaacaagaaaaacgctcttattcgacggatgaatcagctatcgctactggaaaaggagcacgacttggagcgtagatatgagctgcttaacagagagcttcgggccatgctagccatcgaggattggcaaaaaactgaggcccaaaaaaggcgggaacaactccttctcgatgagttggttgctctggtgaacaagagagatgccctcgttcgggacctcgatgcccaggagaagcaggcagaggaagaggatgagcatctcgaaaggactcttgaacaaaacaagggaaagatggctaagaaggaagagaagtgcgtactgcagtag

SEQ ID NO: 23943 - DNA, 609 bp, synthetic construct
  misc_feature 1..609: note = Description of Artificial Sequence: Synthetic coding sequence
  source 1..609: mol_type = other DNA
atgaagcggcagcggagcatccaggaggacaccaagaagggcaacgaggagaaggcagcaatcaccgagactcagaggaagccttctgaggacgaagtcctgaacaaaggctttaaagacaccagccagtatgtggtcggagaactggccgctctcgagaatgaacagaaacagattgatacccgcgcggcactcgtggagaaacggttacgttatctaatggacacaggccggaacactgaggaagaagaggccatgatgcaggagtggttcatgctggtcaataagaagaatgctctgatcaggagaatgaaccagctgtcactcctcgagaaggagcacgacttggaaagaaggtacgagttgttaaacagggagttgcgtgcaatgctggccattgaagattggcaaaaaactgaggctcagaaaagacgtgaacaattgctcctggatgagctggtcgctctcgtgaacaagcgtgatgccctggtgcgcgatctggacgcccaggagaagcaagcagaggaggaggatgaacatctagaacggaccttggaacaaaacaaagggaagatggccaagaaagaagagaagtgcgtgcttcaatag

SEQ ID NO: 23944 - DNA, 1287 bp, synthetic construct
  misc_feature 1..1287: note = Description of Artificial Sequence: Synthetic coding sequence
  source 1..1287: mol_type = other DNA
atggaccccagcgtgaccctgtggcagttcctgctgcagctgctgagggaacagggaaacggccatattatctcttggacttctagagacggcggcgagtttaagctcgtggatgctgaagaggtcgctcgcctgtggggccttcgcaaaaataaaaccaatatgaattatgataagctgtctagagctctacggtactactacgataagaatattatccggaaagtgtcggggcagaagtttgtgtacaaattcgtaagttaccccgaagtggcaggctgtagcacagaagactgcccaccacagcctgaggtgtccgtgacttcgaccatgccgaacgtagctcccgccgccatccatgcagcgccaggagacaccgtgtccggcaaaccaggcactccgaagggggccgggatggcaggacccgggggccttgcaaggtcctctcgcaatgaatacatgaggtctggactgtattccactttcacaatccagagcctccaaccacagcccccaccccaccctcggccagcagtcgtcctaccctctgccgccccagcaggggccgccgctcctccatccggatctaggagcacatcaccaagcccactggaggcttgtctggaggccgaggaagcaggactacccctgcaggttatcctgacgccaccggaggctccgaacctgaagtctgaggaactgaacgtcgaacctggcctgggcagggccctcccgccggaggtcaaagtcgagggcccaaaggaagagctggaagtggcaggcgaaagaggtttcgtaccggagactactaaagccgaacctgaagtgccacctcaggagggagtgcctgcccggctgccagctgtggtaatggatactgccggccaggctgggggacatgccgcttcttcccccgaaatctcccaaccccagaagggacgaaaaccccgggacttggagctcccactatccccgtcccttctcggaggacccgggcctgagagaacaccaggatctggatccggatccggtctgcaggcacctggacctgctctaacccccagcttgctacccactcataccctgacacccgtgctgctgacgccatcatcactgcctccttctattcacttctggtctacactgagccccatagcccccaggagcccagcaaagttgagctttcagttcccatccagcggtagcgcccaagttcatatcccgtctatatcggtagacgggctctctactccagttgtactcagccctggtcctcaaaagccatag

SEQ ID NO: 23945 - DNA, 288 bp, synthetic construct
  misc_feature 1..288: note = Description of Artificial Sequence: Synthetic coding sequence
  source 1..288: mol_type = other DNA
atggaccccagcgtgaccctgtggcagttcctgctgcagctgctgagagaacagggaaatggccacatcatcagttggacttcccgcgatgggggggagttcaagttggtcgacgcagaggaagtggctcgcctgtggggattacgcaagaacaagacaaatatgaattacgacaagctgtctcgcgctctgaggtattattacgacaagaacataattcgtaaggtctcagggcagaaatttgtgtacaaatttgtaagttatccggagtcccattgcgcaccatag

SEQ ID NO: 23946 - DNA, 1287 bp, synthetic construct
  misc_feature 1..1287: note = Description of Artificial Sequence: Synthetic coding sequence
  source 1..1287: mol_type = other DNA
atggaccccagcgtgaccctgtggcagttcctgctgcagctgctgcgggagcaaggaaatggacacatcatcagttggactagcagggacggaggtgaattcaagcttgtcgacgctgaggaggttgcaaggttgtgggggttgcgtaagaacaaaaccaatatgaattatgacaaactgtctagagcactgcgctactattatgataaaaatattatcagaaaggtaagtggccagaagttcgtgtataaatttgtgagctacccagaggtagccggctgtagtacagaagattgccccccacagcccgaagtcagcgttacctcaactatgcctaacgttgccccggctgctatccacgcagccccaggcgacaccgtaagtggaaaaccgggaacccctaaaggcgctggaatggccgggcccggcggcctggcgcgtagcagcaggaatgaatacatgagatcaggcctgtactcaaccttcacaatacagtctttgcagccccaaccacctcctcaccctcggcccgcggtcgtcctcccttcggcagccccggcaggtgctgccgctcctcctagcggctccaggtctacctcaccctcacctctcgaagcatgtctggaggctgaagaggcaggattgcccctacaagtcatccttaccccgcctgaggcccctaatctgaagtccgaagaactgaacgtagagccagggctggggagagccctgccccctgaggttaaggtggagggcccaaaagaggagctggaggttgcaggcgaacgcggatttgtgcctgaaacaacaaaagctgaaccagaggtcccgccccaggagggcgtgccagcccgactacccgctgtagtgatggacacggcagggcaggccgggggtcatgccgcatctagcccggagatctcccaacctcagaagggccgaaaaccaagggacttggagttaccgctctctccaagtctgctggggggtcccggaccagaaagaactccaggctccggctctggctctgggcttcaggcacccgggcccgcactgacaccaagcctacttccgactcatactctaacccccgtcctgttaaccccctcctctctgccaccaagcattcatttctggagcaccctaagccctatcgctcccaggtcgcctgcaaaattatccttccagtttcccagcagcggaagtgcccaggtgcacatccctagcataagcgtcgacggactgtccaccccagttgtactgagccctggccctcaaaaaccatag

SEQ ID NO: 23947 - DNA, 366 bp, synthetic construct
  misc_feature 1..366: note = Description of Artificial Sequence: Synthetic coding sequence
  source 1..366: mol_type = other DNA
atggacaccgccggccaggccggcggccacgccgccagcagccccgaaatctcccagcctcaaaaagggaggaagccccgggatcttgaactccccctgagcccgagccttctgggtggacccggccccgaacggactcctgcgctactccctacacataccctgactccagtgctgcttactccatcttcactccctccctctattcatttctggtccacactctcgccaatcgcgccccgctcacctgcaaagctgtcattccagtttccttcaagtgggagtgcacaggtgcacattccgagcattagcgtggacggattgtctactcctgtcgtgctgtcaccaggacctcagaagccatag

SEQ ID NO: 23948 - DNA, 1713 bp, synthetic construct
  misc_feature 1..1713: note = Description of Artificial Sequence: Synthetic coding sequence
  source 1..1713: mol_type = other DNA
atgagcgagcagagcatctgccaggcccgggccgccgtgatggtgtacgacgacgccaacaaaaagtgggtccctgcggggggaagcaccggattcagcagagtacacatatatcatcatacaggaaacaacacctttcgcgtagtcggcagaaaaatacaggaccaccaggtcgtgataaactgtgctatccccaagggactaaagtacaaccaggccacccagacttttcaccaatggcgggatgcccgtcaggtgtacggactgaattttggatcaaaagaggacgcaaatgtgtttgccagcgctatgatgcacgcgctggaggtcttaaactcccaggaaaccggtcctacacttccgcgccagaactctcagttgccagctcaggtgcagaacggcccctcgcaggaggaattggagatccagaggcgccaactccaggagcagcagcgccagaaggaattggaacgggaaagactggaacgggagcggatggagcgggagagactggagagggaacgactagagcgagagagactcgagcgggagaggctggagcaagagcagctggagcgcgagcgccaggaacgtgaacgtcaagagcgattggaacgccaggagcgtcttgaaagacaggagcgcctagagcgccaggaaaggttggacagggagcggcaggaacgtcaggaacgagagagactcgagcgcctggagcgagagcgccaagaacgtgagcgacaagagcaactggaaagagaacagctagagtgggaaagggagaggcgcatatcctccgctgcagcacccgccagtgtggagacaccattgaactcagtgctgggcgactcttcagccagcgagccaggactgcaggctgcttcccagccagccgaaaccccaagtcagcaaggcatagtgcttggccctcttgccccccccccccccccgccactgcccccgggaccagcccaggcatcggtggccctcccacccccacccggcccaccaccaccccccccactgccgagcaccggtccccctccccctcccccacctcctccactcccgaaccaggtgccgccccccccacccccccccccggccccccccctccccgcttcggggtttttcctagcctcaatgtcagaggacaaccgcccactaaccggcctcgccgcggccattgccggagcgaaactgcgtaaagtttctagaatggaagacacttccttcccatcaggggggaacgccatcggggtgaattccgcaagcagcaaaaccgacaccggccgcggcaacggacccctcccacttggcgggtctgggctaatggaagaaatgtctgccttgcttgcccgacgccggcgcatcgcagaaaagggctcaacaatcgaaactgaacaaaaagaggataagggtgaagactccgagcccgtgacctcgaaggcttcttcaactagtacccctgaacccacgcgcaagccatgggaacggactaacacgatgaacggcagcaagtctcctgtgatctcccggcccaaatcaactccactgtcccaaccatctgcgaatggagtgcaaaccgagggacttgattatgatcggctgaagcaggacatcctagacgagatgcgcaaagaactgacgaaattaaaagaagagctgattgacgcgattaggcaggaactctctaagagcaataccgcgtag

SEQ ID NO: 23949 - DNA, 1776 bp, synthetic construct
  misc_feature 1..1776: note = Description of Artificial Sequence: Synthetic coding sequence
  source 1..1776: mol_type = other DNA
atgagcgagcagagcatctgccaggcccgggccgccgtgatggtgtacgacgacgccaataagaagtgggtccccgctggaggatctactggcttttctagagtacacatttaccaccatacgggtaacaacaccttccgggtggtagggcggaagatccaagatcatcaagtggtcattaattgtgccatccctaaggggcttaagtataatcaagccacacagacgtttcaccagtggcgcgacgcccgccaggtgtatggtctcaacttcggttcaaaagaggacgccaatgtgttcgcatccgcgatgatgcatgcacttgaagtgctcaacagccaggagaccggaccaacactcccgaggcaaaatagccagctgccagcccaggtccagaacggccccagccaagaagaactggagatacagcgcagacagctgcaagaacagcaacgacagaaggagctggagcgagagcggctagagcgggagagaatggagcgagaacgcttggaaagggagcgcttggaaagagaaagacttgagcgcgaacgactggaacaagagcaattggagcgggagaggcaagaacgcgagcgccaagaaagacttgagcgtcaggagcggctcgaacggcaggaaaggctggaacgtcaggagcggctggacagagagcggcaggaacggcaggaacgcgagagactggaaagacttgaaagggagcggcaggaaagagaaaggcaggagcagctggagcgcgaacagctagagtgggagcgggagcgcaggatatccagtgctgcagcacccgcatcggtggaaacgccactgaactccgttctgggagattcgagtgcttcggagcctggacttcaggccgcatctcaaccagcggaaaccccatctcaacagggtatcgtgcttggtccacttgcaccccccccaccccccccactgccaccgggccccgctcaagcctcagttgctctgcctccgccacctggacccccgcctccacctccactgccatcaactgggcctccccctccccctcctccccccccgttgccaaaccaggtgcctcccccacccccacctccgcccgcgccccctctcccagccagtggattttttttggcaagcatgtctgaggacaatcgtccacttactgggctagccgcggctattgctggagctaagctgaggaaagtgtcccgtatggaggatacctctttcccttcgggcggaaacgccataggcgttaattccgctagttccaagaccgataccgggcggggcaacggaccgcttcctctgggaggaagtgggctgatggaggagatgagcgctctgctcgctcgccgtagaaggattgccgagaaagggagcactattgagacagagcagaaagaagacaaaggcgaggacagtgagcctgttacaagcaaggcctcttcgactagtacgccggagcctacgcgcaaaccctgggagaggacaaacaccatgaacgggagtaagtccccggtgatttctagacgcgattctccaagaaagaaccagattgtgttcgacaataggagctacgacagcctgcaccggcccaagtccactccgttgagtcagccttcagccaacggagttcagacagagggactggactacgaccgactgaaacaggatatcctggacgagatgcgtaaggaactgacgaaactcaaggaagaacttattgacgctataagacaagaactgtcaaagagtaacaccgcctag

SEQ ID NO: 23950 - DNA, 1599 bp, synthetic construct
  misc_feature 1..1599: note = Description of Artificial Sequence: Synthetic coding sequence
  source 1..1599: mol_type = other DNA
agcgagcagagcatctgccaggcccgggccgccgtgatggtgtacgacgatgctaataagaagtgggtgcctgcaggagggtcgacaggttttagccgggtccatatctaccaccacacaggtaacaatacctttagggttgtgggacgtaaaatccaggaccaccaggtggttattaactgtgcgatccctaaagggctgaagtacaaccaagcaacacagacttttcatcagtggagagacgcaagacaggtgtacggactcaactttgggtcaaaggaggacgccaatgtcttcgcctcggcaatgatgcatgcactggaggtgctgaacagtcaggaaacaggacccaccctgcctcgccagaactctcagctgcctgcccaggtgcagaatggcccctcacaggaagaactggagattcagcggagacagcttcaggagcaacagagacagaaggagctggagcgcgagcgtcttgaacgggaacgaatggaacgagaacgcctggagagggagaggcttgagagggaacgcctggagagagaaaggttggagcaggaacagttggagagggagcgccaagagcgcgaacgtcaagagcgcctcgaacggcaagagagactggagagacaggaacggctcgaacgccaggaacggctggaccgagagcggcaggagcgccaggaacgcgaacggttggaacgactagaacgggagcgacaggagagagagagacaggaacagttagaacgcgaacaactcgaatgggaacgggaaagaaggataagctctgctggaatagtactcggaccactggcaccacctccccccccccctctcccgccaggcccagcccaggccagcgtcgcattacctcctcctcctggaccaccgccccccccgcctttgccatctacaggtcctccaccacctccccctccccctccgctgcccaaccaggttccacccccacctccccccccgcctgctccgcccttacccgcctccggctttttcttggcatctatgtcggaggacaatcgtcctcttactgggctcgctgctgccatagcaggcgccaaactacgcaaggtgtcgcggatggaagatacctcctttccttccggggggaatgctataggggtgaactccgcaagcagtaagactgatactggacgtggtaacggccccttgcccctgggggggagcggactaatggaagaaatgtcagcacttcttgcccggcgccggcgcattgcagagaagggatctaccatcgaaaccgagcagaaggaagacaagggagaggactctgagcctgtgacttccaaggctagtagcacatctaccccagaaccaaccaggaagccctgggagaggacaaacactatgaacggctctaaaagccctgttataagccgtcccaaatcaacacccctgtcacaacccagtgccaacggggtgcaaactgaaggcctcgactacgatagacttaaacaggatatcctggatgagatgcgaaaggaactgaccaaattgaaagaggagctgattgatgctatccggcaagagctgagcaaatccaacaccgcttag

SEQ ID NO: 23951 - DNA, 1878 bp, synthetic construct
  misc_feature 1..1878: note = Description of Artificial Sequence: Synthetic coding sequence
  source 1..1878: mol_type = other DNA
atggaccggggcaccctgcccctggccgtggccctgctgctggccagttgttcactgtcccccactagcctggctgagaccgtccattgtgacttgcagcctgtgggcccggaacgtggcgaagttacatacacgactagccaggtatctaaagggtgtgtggctcaggctcccaacgctatactggaagtacatgtcctgtttctggagtttccaactggcccaagtcagctggaattgaccctacaggcaagcaagcaaaatggcacatggcccagggaagttctactggtattgtctgtaaacagctctgtgttcctgcatttgcaggccctcggaatccctctgcacctggcttataatagttccctggtgacttttcaggagccaccaggagtcaatacaacagaactacccagcttccccaaaacacagatacttgagtgggccgctgaaaggggcccaataacatctgctgcagagctgaacgatccacagtctatcctgcttagactgggtcaagcccagggctcactgtccttttgtatgctcgaggcctctcaagacatggggagaacattagagtggcgacctcgcactcccgccctggtccggggctgccacctggaaggtgtggccgggcataaggaagcgcacatactaagggttctgccaggacatagtgccgggccccggacagtcactgtgaaagtggagctgtcttgcgccccaggagatttagacgcagtcctgatcctgcagggccccccatacgtgagctggctgatagatgctaaccacaacatgcagatctggactacgggagagtattcttttaagatatttcccgaaaagaacataagaggatttaagctgcctgacacccctcaagggctgctaggagaggctcgcatgctcaacgcaagtattgtggccagcttcgtggagctgcccttggcaagcatcgtgtctctccacgcttcttcctgtggaggcagactgcagacttcccccgctcctatccagaccactccgcccaaggacacgtgttctcctgaactcctcatgtcacttatccagacaaagtgcgccgacgacgccatgacactcgtacttaaaaaagagctagttgcacatttgaaatgtactatcacgggcttgactttttgggacccgagctgcgaagcagaagacaggggggataagttcgttctgcggtcagcttacagtagctgcggtatgcaggtttctgcctccatgatttccaatgaagctgtcgtgaatatcctgagctcatcttcaccccagcgaaagaaagtgcactgtcttaatatggacagtctgagcttccagctgggattgtacctgagtccccactttctgcaagccagtaacacgatcgagcctggccagcagtcttttgtgcaggtgcgcgtgtccccatctgtctccgagttcttgttgcagctggactcttgccatttggatctgggcccagaaggcggaaccgtggagctgattcaaggcagagccgcgaaggggaactgtgtgagtctgctctcaccctcccccgagggcgacccaaggttctcttttctcctgcatttctatacagttcctatccccaagaccggcacactgtcttgtacagtggcgcttcgccccaaaactggctctcaggaccaagaggtgcatcgcacagtgttcatgcgtttaaatatcatctccccagacctgtctggctgcacctccaagggcctcgtgctgcctgcggtactcggcatcactttcggtgccttcttgatcggtgctctgcttacagccgctctctggtatatttatagccatacccgcgagtacccgcgcccgccacagtag

SEQ ID NO: 23952 - DNA, 1977 bp, synthetic construct
  misc_feature 1..1977: note = Description of Artificial Sequence: Synthetic coding sequence
  source 1..1977: mol_type = other DNA
atggaccggggcaccctgcccctggccgtggccctgctgctggcctcttgtagcctctcacctacgtccctcgccgagactgtgcactgtgacctgcagccagtgggccctgagagaggagaggtcacttacaccacaagtcaggtctcaaagggctgtgtggcccaggccccaaacgctatcctggaagttcacgtgctctttcttgagtttcctacgggcccaagtcagttagagctgactctgcaggcttctaaacagaatgggacatggcctagggaggtgcttctcgtacttagcgtgaacagctcggtttttttgcatttacaagcccttggaatacctctccatcttgcttataattcttctctggtaacatttcaggagcccccgggtgtgaacacaaccgaattaccaagttttccaaaaacccagattctcgaatgggccgctgaacgcggtccaattaccagcgcggctgagttgaatgatccacagtccattttgctcagactggggcaagctcaggggtctttatctttttgcatgctggaggcaagccaggacatgggtaggactctggagtggaggccaagaactcccgcccttgtgcgtggttgccacttagagggggttgcagggcacaaggaggctcatatccttcgcgtgttgcctggtcacagcgccggtccacggacagttactgttaaggttgaactcagctgcgctcccggtgatctggatgccgtcctgatcctgcaggggcccccttatgtgtcatggctcatcgacgccaaccacaatatgcagatatggacaactggcgaatatagcttcaaaatctttcctgaaaaaaatattcgggggtttaaattgccagatacgccacagggcctgctgggggaggcccggatgctgaatgcttctattgttgcttctttcgttgaacttccgctggccagtatagtgtcactgcatgcatcttcatgcggtgggcggctccagacaagtccagcccccattcagaccacacctccgaaggacacgtgtagccctgagcttctgatgtccctcatccagaccaaatgcgccgacgatgccatgaccctagtcctgaaaaaggaattggtggcacaccttaagtgtacaattacagggctgactttctgggatccgtcttgcgaggccgaagaccgaggcgacaagtttgtacttcgttcagcgtactcctcctgtggcatgcaggtcagtgcatccatgatttcaaatgaagcagtggtgaatatcttgtcaagttctagtcctcaacggaaaaaagtgcactgtctcaatatggatagtttgagctttcagctgggactctacctgtctccgcattttttgcaggcatccaatacaatcgagcccggccagcagtcctttgttcaggtacgggtttctccgagcgtgtccgagtttcttttgcagctcgattcatgtcacttggatcttggccccgaagggggcaccgtcgagcttatccagggccgagctgccaaaggaaattgtgtctcactgttgtctccctcgcccgaaggggatccccgattctccttcctgcttcatttttatacagttccaatccccaagaccggtacgttgagctgtacggttgctttaagacccaagaccgggagtcaggatcaagaggtacatcgaaccgttttcatgaggctgaatatcattagcccagacctgagcgggtgcacctcaaagggcctggtattgcccgcagtgctggggattacctttggagcatttctgatcggcgcccttctgactgcagcactgtggtacatttactcccacacacgaagtccctccaagcgggagcccgtggttgccgtggccgcacctgccagtagcgagtccagttcaactaaccattctataggatctactcagtccaccccctgttcaacttcaagcatggcatag

SEQ ID NO: 23953 - DNA, 1977 bp, synthetic construct
  misc_feature 1..1977: note = Description of Artificial Sequence: Synthetic coding sequence
  source 1..1977: mol_type = other DNA
atggaccggggcaccctgcccctggccgtggccctgctgctggcctcttgctccctgtctcccacctctctcgcagagacggttcactgcgacctccaacctgtgggccccgagagaggggaggtcacctacacaacctcgcaagtctccaagggttgcgttgcacaggcccctaacgccatcctggaagttcacgtgctattcctggagtttcctacaggaccttctcagctagaactgactttacaagccagtaagcaaaacggcacatggcctcgggaggttcttcttgtgctcagtgtgaactcatctgtgttcttacaccttcaagccctgggcatacccctccacctggcgtacaattcttctctggtcacttttcaagaaccccccggtgtcaatacaaccgaactgccaagcttccctaagacccaaatactcgagtgggccgccgagcgagggcctataacctcagcagctgagctcaatgatcctcagtccatactgctgcgcctggggcaggcccagggcagtctctctttctgcatgttagaagctagccaagatatgggacggaccttggagtggcggcctagaacaccggcgcttgtgcgaggatgccatcttgagggagtggcaggccataaagaagctcacatcttgagagtgctccctggtcactctgcgggtcccaggaccgtcaccgtgaaagtcgagctctcctgtgcccccggagatcttgatgccgtacttattcttcagggccctccatacgtttcctggctgatcgacgccaatcataatatgcaaatatggacgactggcgaatacagttttaagatctttcccgaaaaaaacataagaggcttcaagctgcctgacactccacagggactcttaggcgaggcccgcatgctgaatgccagtatcgtggcgagttttgtggagcttcctctggcctctattgtctctctacacgcaagctcatgtgggggaagattacagacatcaccagcaccaatccagaccacaccccctaaggatacgtgttctcctgagctcctgatgtccctcatacaaactaaatgcgccgatgacgcaatgaccctggtgcttaaaaaagagcttgtcgcccacctgaaatgcaccatcactggacttaccttttgggatcccagctgcgaagctgaggatagaggggacaaatttgttcttcggtccgcttacagcagctgtggaatgcaggtgagtgcctcaatgatctccaacgaagccgttgtgaacatcctgtcttcatcgtcgccccagcggaaaaaagtccattgtctgaatatggattccctgagcttccaactggggttgtatttatctccgcactttttgcaggcttccaacactatcgagcccggtcagcagtcgttcgttcaggtcagagtctcccctagtgtttcagagtttctattgcagctcgatagctgtcacttggatctgggccctgagggtggcaccgtggaacttatacaagggagggccgcaaaaggcaactgtgtgagcctactttcccctagtccagagggggacccgcggttcagtttcttgctgcacttttatacagtgccaatccctaaaaccggaaccctgtcatgtactgtggcccttaggccgaaaaccggatcacaggatcaggaggtccaccgtactgtttttatgcggcttaacataatcagccccgacctctcaggttgcacctccaaaggcctagtgttgccagccgtgctggggatcacctttggtgctttccttattggcgctctgctgaccgccgccctgtggtatatctatagtcacactaggtcgccgagcaagcgcgagcctgttgtcgccgtggcggccccggcgtcgtcagagagcagctccacaaatcatagcatcggatctactcagtccactccgtgtagtacgagttcaatggcttag

SEQ ID NO: 23954 - DNA, 1431 bp, synthetic construct
  misc_feature 1..1431: note = Description of Artificial Sequence: Synthetic coding sequence
  source 1..1431: mol_type = other DNA
atgctggaggccagccaggacatgggccggaccctggagtggcggcctcgaactcctgcactggtacgggggtgtcatctggaaggcgtggcgggacataaagaggctcacattctccgcgttctccctggccattccgcaggccccaggaccgtaaccgttaaggtggaactctcatgcgcccccggcgatctagacgcggtcctgatcctccagggcccaccctacgtcagctggctgattgacgcaaatcataacatgcagatttggaccaccggggaatactctttcaaaatttttcccgagaaaaatatacggggattcaaactccctgatactccacagggactcctgggagaggcccggatgctcaatgctagcattgttgccagctttgtggagctcccactggcttccatagtttcactgcacgcctccagctgcggaggtcgtctgcagaccagccccgcccccatccagactactcccccgaaggacacttgttctcctgagctcctgatgtccctgatccagacaaaatgcgcagatgacgccatgaccctggtgttaaaaaaagaactggttgcccacctgaagtgcacaattacaggtctgacattctgggaccccagctgcgaggctgaggacaggggagacaagttcgtgctgcggtctgcatacagctcttgtggaatgcaggtgtctgctagcatgatctccaatgaagccgtcgtcaacattttgtccagctcatcgccacaacggaaaaaggtccactgcctgaatatggattctttgtcttttcagctgggtttatacctgagcccgcatttcctccaggcctcaaacactatcgagcccggacagcagtcatttgttcaggtccgtgtgtcaccgtcagtgagcgagttcttgctccagttggattcatgccatctggacctcggtccggagggggggactgtggagctgatccagggccgggccgctaagggcaattgtgtttctcttctttcaccctccccagagggagatcctagattctccttcttgctccacttctataccgttccaatccctaagacgggcacactgtcatgtaccgtcgctttgcgacccaagaccggtagccaggaccaggaggttcaccgtaccgtgtttatgcggttaaatatcattagccctgacctctctggctgtactagcaagggactggtgttacccgcggtcttgggcattacttttggggcgtttctcataggcgctcttttgacagcggctctctggtacatctatagtcacacgcggagcccatctaagcgggagcctgtggtggccgtggctgccccagcttcctctgaatcatcctccaccaaccattcgatcgggagcactcagtcgacaccatgcagcactagcagtatggcatag

SEQ ID NO: 23955 - DNA, 639 bp, synthetic construct
  misc_feature 1..639: note = Description of Artificial Sequence: Synthetic coding sequence
  source 1..639: mol_type = other DNA
atggactacctgctgatgatcttcagcctgctgttcgtggcctgccagggtgctcccgagacagcagtgttgggagctgaactgtcagccgtgggcgagaatggaggtgagaagccgacaccaagccccccatggcggctacggcgcagcaagcgttgttcttgctcttccttgatggacaaggaatgtgtgtatttttgtcacctggacattatctgggtcaatactccggaacatgtggtcccttatgggttgggctccccgaggtctaaacgggcattggagaatttgttgcctacaaaggccacagaccgcgagaacaggtgccagtgtgcgagtcagaaggacaagaagtgctggaacttctgtcaggcggggaaggaactccgagctgaagatattatggagaaagattggaataaccataagaagggtaaagactgcagcaagctgggtaagaagtgcatataccagcagcttgtcaggggacggaagattaggcgcagctcagaggagcatttgcgtcagacacggagtgagaccatgagaaattctgtaaagagtagctttcacgatcccaagctgaaggggaagccatcacgcgagcgttatgtgacccataatagggcacattggtag

SEQ ID NO: 23956 - DNA, 1329 bp, synthetic construct
  misc_feature 1..1329: note = Description of Artificial Sequence: Synthetic coding sequence
  source 1..1329: mol_type = other DNA
atgcagcccccccccagcctgtgcggccgggccctggtggccctggtgctggcctgtggactatctcggatctggggggaagagcgaggcttccccccagatcgggccacacctctgttgcagaccgccgagatcatgacaccccccaccaagacgctctggccaaaggggtcaaacgcttcgttggctaggagtctggcaccagctgaggtgccaaaaggcgaccggaccgcagggagccctccccgtacaatcagtcctccgccctgccagggcccaattgagataaaggagacctttaagtacataaatactgtggtttcttgcctggtttttgtgttgggcatcatcgggaactccaccctgctgcgcatcatctacaagaacaagtgcatgcgcaatgggccaaatatcctcatagcctcccttgctctgggtgacctcctgcacattgtcatcgacattcctattaacgtgtataagctgctcgccgaagattggcctttcggcgccgagatgtgcaagcttgtgcccttcatccagaaggcctccgtggggattaccgtcttgtcactatgtgcactatctattgacaggtaccgcgcagtcgcctcatggtcccggattaaaggcataggagtaccaaaatggactgcagtcgagatcgtgctgatatgggttgttagtgtcgtcctggcggttcccgaagcaatcggctttgatatcataacaatggactataaggggtcgtacctgcggatctgtctgcttcacccagttcaaaaaacagcattcatgcagttctacaaaacggccaaagattggtggcttttttcgttctacttctgtttgccactggctatcacagccttcttttacaccctgatgacatgtgaaatgctgcgaaagaagagtggtatgcagatcgcactcaacgatcacctgaaacagcgacgggaagtggccaaaacagtgttttgtctggttctggtgtttgccctctgctggcttcctttgcacctgagcaggatcctgaagctaactctgtacaaccagaatgaccctaaccggtgcgaactactaagctttctgctcgtgttggattacataggaatcaacatggcgagtttaaactcgtgtataaacccaatagcattgtatttggtgtctaagcgatttaagaattgctttaagtcttgtctgtgttgttggtgtcagagttttgaggaaaagcagtcactggaggagaagcagtcatgcctgaagttcaaggccaatgaccatggctacgacaacttcagatcaagcaataagtatagttcttcctag

SEQ ID NO: 23957 - DNA, 1599 bp, synthetic construct
  misc_feature 1..1599: note = Description of Artificial Sequence: Synthetic coding sequence
  source 1..1599: mol_type = other DNA
atgaacaagagcacctgcctgatggccgccgagacccccagcaagcgatggcggttgcactgcctggcattcagccaaaggtttgtaagggctggccccgcctgttccagccgtgaggcctgctcttcccccagagccggctggaatcctgccggatttcgactccccggcaggtggtctcctttcgttgccttacatctggtttgtcagattagggaagcacttaaactgagatccggccaccgcaccccatccggagctgggtcgagcatgcagcccccaccaagtttgtgtgggcgggctcttgtggcactggtcctggcgtgcggtctgtcccgcatctggggagaggaaaggggatttcccccagatcgagccactcccctcctccagacagctgagatcatgacaccaccaaccaagacgttgtggccaaagggctctaatgcatccttagcacgatctctagcccctgcagaagttcccaagggcgacaggacagccggatcaccacctcgtaccattagcccacccccttgtcagggaccaatcgagattaaggagacttttaagtatattaacacggtggtgagttgtctggttttcgtcctgggaatcatcgggaattctaccctgctccggattatttataagaataagtgcatgcgcaacggtcctaacatactgatcgcatccttagctctgggcgacctgctccacatcgtgatcgacattcctataaacgtatataagctcttggccgaagactggccatttggggccgagatgtgcaagctagttccatttatccagaaagcctcagtggggattactgtactgagcctgtgcgccctttcgattgatcgctatagggccgtggcctcttggtctagaatcaaaggaatcggagtaccaaaatggacggcagtggaaattgtccttatctgggtcgtttccgttgtgctcgccgtacctgaggctatcggcttcgatatcatcactatggattacaaggggtcttatctcagaatttgcctgttgcacccagtccagaaaactgcgtttatgcagttctacaagaccgccaaggactggtggctgttctcattctacttttgcctgccattggccataacggcgttcttttacacactgatgacatgcgaaatgctgcggaaaaagtccggtatgcagattgcattgaatgatcacctgaagcagcggcgagaggtggctaagaccgtgttttgtctggtcttagtctttgctttatgttggctgccactacacctgagtcgaatcctcaagcttactctgtacaatcagaatgatccaaatcgctgcgaactgctttctttcttgctcgtactggattatattggcattaatatggctagccttaatagctgtatcaatccaatcgcactgtacctggtgagtaagcgttttaagaattgttttaaatcctgtctgtgttgttggtgtcagtcctttgaggagaagcagagcctggaggaaaagcagtcctgtttgaaatttaaggcaaacgatcacggatacgataatttcaggagctcaaacaagtactcgtcgtcctag

SEQ ID NO: 23958 - DNA, 1311 bp, synthetic construct
  misc_feature 1..1311: note = Description of Artificial Sequence: Synthetic coding sequence
  source 1..1311: mol_type = other DNA
atgcagcccccccccagcctgtgcggccgggccctggtggccctggtgctggcatgtgggctttcacgcatctggggagaggaacgtggattccccccggaccgtgccactcccttgttgcagacggccgaaatcatgacacctcctaccaagacgttatggcctaagggcagcaacgctagcctggcccgtagcttagcacccgctgaggttccaaagggcgaccgcacggccggcagcccccccaggaccatatctccccccccatgccagggtccaatcgagattaaagagaccttcaagtacattaacacggttgtcagctgtctggtgttcgtgcttgggataatcggaaacagtaccctccttcgcattatttacaagaataaatgcatgcggaacgggcccaatattctgattgcaagcctggctctaggcgatctgctacacattgtgatagacattcctatcaacgtgtataagttactcgcggaagactggccgtttggagcggagatgtgtaagctggtgcccttcattcagaaagccagtgtaggcatcaccgtactgtctttgtgtgccctttcaattgaccgttaccgagctgtagccagttggagccggatcaaggggattggcgtgcccaagtggaccgccgtagagattgttctaatttgggtggttagtgtggtcctggccgtgcccgaggctataggtttcgatatcattactatggactacaaggggtcttatctacggatttgtctgcttcacccggtgcagaaaacagcctttatgcaattttacaaaaccgccaaggattggtggttattctctttctacttttgtctgccccttgcaataaccgcttttttttacactctgatgacatgcgagatgctgagaaagaagtctgggatgcagatcgccctaaatgatcacctcaagcagcggcgggaggtggcaaagaccgtgttttgcctggttttagtcttcgcactgtgttggctccccttgcatttgagtagaatcctgaagctgactctgtataaccaaaatgaccccaatcggtgtgagctgctttcctttctactagttctggattacatcggcattaacatggcctccctaaatagttgtattaaccccatcgccctataccttgtcagcaagagatttaagaattgttttaaagccggcccgcacgtgggaaacaagctggttatgcttttttccgtcaacatcgagtgtgatggaactgttaatcaaaatccaaccatgtggcctgaacgcaaaagtaataacaactag

SEQ ID NO: 23959 - DNA, 2787 bp, synthetic construct
  misc_feature 1..2787: note = Description of Artificial Sequence: Synthetic coding sequence
  source 1..2787: mol_type = other DNA
atggccctgcggcggctgggcgccgccctgctgctgctgcccctgcttgcagccgtggaggagacccttatggactcgacaaccgccactgctgaactaggctggatggttcatcctcctagcggatgggaagaagtatctggttatgacgaaaacatgaatacgattcgaacataccaagtctgcaacgtctttgagagcagtcagaataattggctgaggactaagttcatccgcagaaggggcgcacatcggatccacgtcgaaatgaaattcagtgtgagagactgctcttcaattccatccgtcccaggatcctgtaaggagaccttcaatctgtattactacgaggcggatttcgattccgcaaccaaaaccttccctaattggatggaaaatccctgggtcaaggtggacactatagcagccgatgagtctttctcccaggtcgacctcggcggaagggtgatgaagattaatactgaggttcggagctttgggcctgtgtcccggtcaggcttctatttagcattccaagactatggagggtgcatgtccctgatcgccgtccgtgtgttctaccggaaatgcccccgcattatccaaaacggcgccatctttcaggagactttatctggtgctgagagcacatcccttgtggctgctcgcggcagttgcatagctaacgcggaagaagtggatgtccccatcaagctttattgtaatggtgatggtgaatggctcgtacctatcggtcggtgcatgtgtaaggcggggttcgaagccgtcgagaatgggacagtgtgtcgaggatgcccatctggcaccttcaaggccaatcagggggacgaggcctgcacacactgtcctattaattcccgaactacttctgaaggcgccacgaattgtgtctgtcgcaacggatactacagggctgacttggatccactggacatgccatgcaccaccataccttccgccccccaggcagtaatttccagcgttaatgaaactagcctcatgctggagtggactcccccccgagactctggggggagggaggacctggtttacaacataatctgcaaaagttgcggctcaggacgtggagcctgtactcgatgcggagataatgtgcagtatgcacctcgtcaattaggcttgactgaaccccggatttatatcagcgatttgctcgcacatacacagtatactttcgaaatccaagcggttaacggggttaccgaccagtctcctttttctccccagtttgccagtgtcaacatcacaacaaatcaggcggccccatccgcagtgagcatcatgcatcaggtctctagaaccgtggattctatcacacttagctggtcacaaccggaccagccaaatggagtcatactggattacgaattgcaatactatgaaaaagaactgtccgaatacaatgcaacggccatcaaatcacctaccaacaccgttactgtccaaggcttgaaagccggggcaatatatgttttccaagtacgggctagaaccgttgctggatacggcaggtatagcgggaaaatgtactttcagaccatgacagaagtgaccccagggatgaagatatacatagacccgtttacttatgaggaccctaatgaagcggttcgtgaatttgccaaagagatcgatatctcctgcgtgaaaatcgagcaggtaatcggggccggcgaattcggcgaggtgtgcagtggacatcttaagctgccaggaaagagggagattttcgtagctatcaagacgttgaagtctggctacacagagaagcagagacgcgatttcctgtccgaggcaagcatcatgggtcagtttgatcaccccaatgttatccacctggagggcgtggtgaccaaatcaactccggtgatgattattacagaatttatggagaacgggagcctcgactcattcctgcggcagaacgacggccagttcactgttatccagctggtcggaatgcttcggggaattgctgcaggcatgaaatatctggcggacatgaattacgtgcatagggacctggccgctcgaaacattttggtcaattctaacctggtatgtaaggtgtcggacttcggtttgtctcgattccttgaggacgatacgtctgatccaacctatacctcggctctgggtgggaagatccccatccgatggacggcgcccgaggcaattcagtaccgaaagttcacgagtgcttctgatgtttggtcctacggcattgtgatgtgggaggtcatgtcctatggtgagcgaccctattgggatatgacaaatcaggacgtaattaatgctatagaacaagactaccgactcccacctccaatggattgcccatccgcccttcaccagttaatgctcgactgctggcagaaggatcgcaaccacaggcctaagtttggccaaatcgtcaacaccctggacaaaatgatccggaaccctaatagtcttaaggctatggccccactttcctctggaatcaacttaccacttttagaccgtacaatacccgactacacctctttcaacacagtcgacgaatggctggaggccattaagatgggccagtataaagagtcctttgctaacgctggatttacatccttcgacgtcgtatcccaaatgatgatggaggatatattgagggtgggcgtaactctggctggccaccagaaaaagatactgaattcaatccaggtgatgcgcgcgcagatgaaccagatccaatctgtggaagtctag

SEQ ID NO: 23960 - DNA, 2841 bp, synthetic construct
  misc_feature 1..2841: note = Description of Artificial Sequence: Synthetic coding sequence
  source 1..2841: mol_type = other DNA
atgtgggtgcccgtgctggccctgcccgtgtgcacctacgccgagacacttatggattctaccaccgctacggccgaattgggctggatggtacaccctccgtctggctgggaagaggtgtccggctacgatgagaatatgaataccattcgaacctatcaagtttgtaacgtatttgaatctagtcagaacaactggttacgcacaaagttcattcggcggcggggagcccacaggatccatgtggagatgaaattctccgtacgggattgctcttcaatcccttctgtccccggctcatgtaaagaaacgttcaatctgtactattacgaggccgatttcgacagcgccacaaagacattcccgaactggatggagaatccctgggtgaaagttgatactatcgccgctgatgaatctttttctcaggtggatctaggaggcagggtgatgaaaataaacacagaagtccgatccttcggacccgtaagtagaagcgggttctaccttgcattccaggactacggcggatgtatgagtttgatcgccgtcagagttttctaccggaaatgtccgcgcataatccagaacggcgccatcttccaggagacgcttagtggagcggagtcaacctcactggtagcagcccgaggatcttgcatagccaacgccgaggaggtggacgtgcccattaagttgtattgcaatggcgatggcgagtggctcgttccgataggacgatgtatgtgcaaggctgggtttgaagcagtcgagaacggtacagtttgccgcgggtgtccaagcggaaccttcaaggctaaccagggcgacgaagcgtgcacccactgcccgatcaattctcgcactacctcggagggtgcaactaattgcgtgtgtcgaaatggatactatcgcgcagacctggacccgctggacatgccctgtaccacaatccccagcgctccacaggctgtcatctctagcgtgaacgagacatcactaatgttggagtggacgcccccgcgcgactccggcggtagggaagacctggtatataacatcatatgcaagtcttgcggctctggaagaggtgcttgcaccagatgtggggataatgtccaatacgctccacgccagctggggcttactgaaccacgaatctatatctctgacctcttggctcacacgcagtataccttcgagattcaagcggtaaatggtgtcacagaccaatcacctttttctccccagttcgcttcggtgaacatcactacaaaccaggctgcccccagcgcggtcagcatcatgcaccaagtctcccgcacggtggatagcatcacactgtcttggtcacagcctgatcagccaaacggggttatcttggattacgaactacaatattacgagaagcaggagttgtctgaatataacgccacagcaattaaatcgccgaccaataccgtgaccgtgcagggattaaaagcaggagcaatctatgtttttcaggtgcgggcaagaacagtggctggatacggtcggtactctggaaaaatgtattttcagactatgacagaggcggagtatcagacttcaattcaggagaagcttcccctgattattggatccagcgcagccggtcttgttttcttgatcgccgtcgtggtgattgctattgtgtgtaacaggcgggggttcgagcgggcggattctgagtacacagataagttgcagcattacacctctgggcatatgacacctggaatgaaaatctatatagacccattcacatacgaagatcctaacgaagctgtacgggaatttgccaaagagatagatatctcttgtgttaagattgagcaggtcataggcgctggcgagttcggtgaggtgtgtagcgggcacttaaagctcccaggaaaacgagagatctttgtggctatcaagaccctgaaatctgggtatacagagaagcagagacgcgattttctgagcgaagcctcaatcatgggccagtttgaccacccaaacgtcattcacctggaaggggtggtgactaaatccacccccgtcatgatcatcaccgaatttatggagaatggttctctcgacagcttcctccgccagaacgatgggcagtttacagtgattcagttggtcggcatgttgcgggggatagcggccgggatgaagtacctcgccgacatgaactatgtgcacagagatctcgcggcccgaaacatcctcgtgaactccaaccttgtgtgcaaagtcagcgatttcggtctgagtcgatttttagaggatgacacatcagaccccacttatactagcgcactcggtggcaagatacccatccgctggacagctccggaagccattcaataccgtaagttcacctccgcatccgatgtttggtcctatggcatagtcatgtgggaggtcatgtcttacggggaaaggccttactgggatatgactaaccaggatgtgataaacgctattgaacaggactaccgactcccgcctccaatggattgtccttccgccctgcatcagctgatgctggattgctggcagaaggacaggaatcaccgccccaagttcggtcagatcgtgaacacactcgacaaaatgatccggaacccaaactccctgaaggcaatggccccactaagcagcggcattaacctgccactgctggacagaactatccctgattacacatctttcaatacagttgatgagtggctggaagccattaagatggggcagtacaaggaaagcttcgctaatgcaggattcacgtctttcgacgtggttagtcagatgatgatggagtag

SEQ ID NO: 23961 - DNA, 2961 bp, synthetic construct
  misc_feature 1..2961: note = Description of Artificial Sequence: Synthetic coding sequence
  source 1..2961: mol_type = other DNA
atggccctgcggcggctgggcgccgccctgctgctgctgcccctgctagcggctgttgaagaaacccttatggattccacgactgccaccgccgaactcggctggatggttcatccaccctctgggtgggaagaggtgagtggttatgacgagaatatgaacactatacggacatatcaggtgtgtaacgtctttgaatcttcgcagaacaactggttgcggacgaaattcatccgacgtcgaggggcacacagaatacacgtggagatgaagttctcagttcgagactgctcgagtattcccagcgtgccgggttcctgcaaagaaacctttaatctctactactacgaggctgattttgactctgcaacaaaaacctttccaaattggatggaaaacccatgggtgaaggtggatactatcgcagccgacgagtccttctctcaagtcgacctcgggggtagagtgatgaagattaatacagaagtacgtagtttcggccctgtttctaggagtggattctacctcgcttttcaggactatgggggatgcatgtcattaattgccgtccgcgtgttttataggaagtgtccccgcatcatccagaatggagcgatttttcaggagactctttcaggagctgagtctacatcactcgttgctgccagaggaagttgtatcgctaatgcggaagaggttgatgtccctattaaactctactgcaacggcgacggcgaatggttggtcccgattggcagatgcatgtgcaaggctggcttcgaggccgtggaaaatggcactgtgtgtagaggctgtccaagtggaaccttcaaagctaaccagggcgatgaggcttgtacgcattgcccaataaattcacgcactacaagtgagggcgccaccaattgcgtttgccggaacggttactaccgcgctgatctggaccctctggatatgccctgcactactatcccttcagccccacaagcagtgatttcatctgtcaatgagacgtccttaatgttggagtggacacccccccgcgattcaggaggccgcgaggacctggtctataacattatatgtaaatcttgtggaagcggacggggggcctgcaccaggtgtggagataatgtgcaatacgccccccgtcaactgggccttacagagccacggatctacatctccgacctcctcgcgcacacacagtacacattcgagatccaggcagtaaatggggtcacagatcagagtcctttctcaccacagttcgcttccgtgaatatcaccacgaaccaggctgccccgtcagctgtgtctattatgcatcaggtaagccgcaccgtggactctattaccctctcctggagtcagcctgaccagccaaacggcgtgattttggattatgaactgcagtactacgagaaggagctcagcgaatacaacgctactgctattaaatctccaacaaacaccgttaccgtgcagggactgaaggccggcgctatatatgtctttcaggtcagggcacggacagttgccgggtacggccgttattcaggcaagatgtatttccagaccatgaccgaggctgagtaccagacatccatccaggaaaaattaccattgattataggaagcagcgctgcaggactcgtctttcttatagctgttgtggtcattgccatcgtgtgcaaccgccggggctttgaacgggcagattctgaatatacagacaagctccaacattacacgtccgggcatatgacaccaggaatgaagatctacatcgaccccttcacctacgaggatcctaacgaggccgtccgggagttcgcaaaagaaattgatattagctgcgtgaaaatcgagcaggtcattggagccggtgagtttggtgaggtgtgtagcggacacctcaaacttcctggaaagcgggaaatattcgtggctatcaagacgctgaaatctgggtacaccgaaaagcaaagaagggatttccttagcgaggcatccataatgggacagtttgaccatcctaatgttattcatttagaaggggtggtaacaaaaagcacccccgttatgatcatcacggagttcatggagaatgggtcactggatagcttcctgcggcagaatgatgggcagtttacagtcatccagctggtaggcatgctgaggggcatcgccgccggaatgaaatatcttgcagacatgaattacgtccatcgagacctggcggccaggaacattctcgtcaatagcaacttggtgtgtaaggtgagcgactttggcctgtctagatttctcgaggacgatacctccgaccccacatatacatcggctctggggggtaagatacccattcggtggacggcccccgaagccatccagtatcgcaagttcaccagcgccagtgatgtgtggtcttacgggattgtgatgtgggaagtcatgagttacggcgagagaccctactgggatatgaccaatcaagatgtcataaatgctattgagcaggattatcggctgccgcctcctatggattgtccatctgccttacaccagttaatgctggattgctggcagaaggatcgaaatcatcggccgaagttcggtcagatcgtgaataccttggacaaaatgattcgtaaccctaattcactgaaggcgatggcgccccttagctccggaatcaatttgccactgctggacaggacgatccccgactacaccagttttaatactgtggacgaatggctggaagccatcaagatgggccagtacaaagaatcattcgctaacgctggatttacatctttcgacgtagtgagtcaaatgatgatggaggatattctcagggtgggggtgactctggcagggcaccagaagaagatcctcaactctattcaggtaatgcgtgctcaaatgaaccaaattcagtctgtggaggtttag

SEQ ID NO: 23962 - DNA, 2964 bp, synthetic construct
  misc_feature 1..2964: note = Description of Artificial Sequence: Synthetic coding sequence
  source 1..2964: mol_type = other DNA
atggccctgcggcggctgggcgccgccctgctgctgctgcccctgctggcggccgtggaagaaactctcatggacagcactactgcgaccgccgaattgggatggatggtgcacccaccgtccggctgggaagaagtctccggctacgacgaaaacatgaacactattcgaacctaccaggtctgtaatgtttttgagtcttctcagaataattggctcaggaccaagttcatccggagaaggggggctcacaggatccatgtggaaatgaaattttccgtgcgggattgttctagtatcccatctgtgccagggtcctgcaaggagactttcaatctctactactatgaggccgattttgattctgctaccaaaactttccctaactggatggaaaatccttgggtgaaggtggatactatcgccgcggatgagagcttttctcaagttgatcttggtggacgcgtcatgaagatcaacacagaagtgcggagctttgggcccgtttctcgttctggattctacctcgcattccaggattatgggggctgcatgagcctgatcgcagtacgcgtgttctaccgcaagtgccctcgcatcatacagaacggggctatctttcaggaaacattatcgggggctgaaagtacaagtttggttgcagcacgtggatcatgcatcgccaacgcagaggaagttgacgtaccgataaaactgtactgcaatggagacggtgagtggctcgtgccaatcggcaggtgcatgtgcaaggcaggcttcgaggccgtcgaaaacggaacggtctgtcgggggtgtccaagcggcaccttcaaagctaatcagggcgacgaagcctgcactcactgccccatcaactcaagaactacttcagagggagccacaaattgtgtgtgccgaaacggttattaccgagcagatctggatcccttggatatgccatgcacgactattccaagtgccccccaggccgtgatctcttcagtcaatgaaaccagcttgatgcttgagtggacaccacctcgggacagtggcggtcgcgaagatctcgtgtataacataatttgcaagtcgtgtggaagcggcaggggagcctgtacaagatgcggcgacaacgtgcagtacgccccgagacaactgggactcaccgaaccccgaatctacatcagcgatctattagctcacacccagtatacgtttgagatccaggccgtcaacggtgttacagaccagtcaccattttccccacagtttgcgagcgtgaacattactaccaatcaggctgcaccctccgcagtgtcaataatgcaccaggtgtcaaggaccgtggatagcattacgctgtcctggtctcagccagatcagcccaatggggtgatcctggattatgagctgcaatactacgagaaggagctctctgagtataacgctaccgctattaagtcccccactaatacggtaacagtgcagggacttaaggccggggcgatctatgtcttccaggtgcgggctaggaccgtggccggttacgggcgttacagtggcaagatgtatttccaaaccatgacagaagccgagtaccaaacatctattcaggaaaagctgccactaattatcggttcctctgcagcggggttggtctttctcatcgccgtggttgtcatagcaatagtctgtaataggagacgtgggtttgagagagccgattccgaatacacggacaaattgcagcattacacttcaggccacatgacccccggcatgaagatctatattgatccttttacatacgaagatccaaatgaagctgttagagagtttgctaaagagatcgatatatcctgcgtgaagattgagcaggtgatcggagcaggtgaatttggggaggtgtgttccggacatctgaagctgcccgggaagcgcgagatctttgtggccataaaaactttaaagagtggatataccgaaaagcaacgaagggacttcctctccgaggctagcatcatggggcagttcgatcacccaaatgttatccacttggagggggtggtcaccaagagtaccccggtgatgattattaccgagttcatggagaatgggtccttggactcttttttgcgccagaacgatggtcagtttacagtgattcagctggtggggatgctccggggcatcgcagccgggatgaagtatctcgccgatatgaactatgtacacagggacttggctgcacgaaatattctggtgaacagcaacttagtctgcaaagtgtcagacttcggactctctcgattccttgaggatgatacaagtgaccctacctatacctccgctctaggcggcaagatcccaatcaggtggaccgctccggaggcaatccaataccggaaattcacctctgcttctgacgtgtggagctatggcattgttatgtgggaagtcatgagctacggagagcgtccatactgggatatgacaaaccaggacgtcattaacgcgatcgagcaggattaccgacttccccctccaatggattgcccaagtgcccttcaccagctcatgctggattgctggcaaaaggatcgaaaccaccgccctaagttcggtcagatcgtgaacactttggacaagatgatccgcaacccaaattcactgaaagcaatggctcctctgtcatctggcattaatttgcctttactggaccggactatacccgattacacatctttcaatactgtggatgagtggcttgaggccatcaagatgggccagtataaggaaagttttgctaacgccgggttcacttctttcgacgtcgtgagccaaatgatgatggaggatattctccgggtcggggtcacacttgctggacaccaaaaaaaaatcctgaactcaattcaggtaatgcgtgcccagatgaaccaaatccagtcagtggaggtgtag

SEQ ID NO: 23963 - DNA, 3168 bp, synthetic construct
  misc_feature 1..3168: note = Description of Artificial Sequence: Synthetic coding sequence
  source 1..3168: mol_type = other DNA
atggccctgcggcggctgggcgccgccctgctgctgctgcccctgctggcggctgttgaggagactctcatggactctactacggccacagccgaactgggatggatggtgcaccctcctagcggctgggaagaagtgagcggctacgatgaaaatatgaacacgattcgtacctaccaggtctgtaacgtttttgaaagctcccagaacaactggctcagaaccaagttcattaggagaaggggagcccaccgaatccatgtcgagatgaagttttctgtacgggattgctcgagcattccctccgtgccaggttcatgcaaagagactttcaatctttactactacgaggctgacttcgattcagcaacgaaaacctttcctaattggatggaaaacccatgggttaaagtggatacgattgccgcagacgaatccttttcccaggtggacctcggcggtagggtcatgaaaataaatactgaggtgcggagcttcggaccagtgtcacgatctggcttttacttggcatttcaagattacggagggtgcatgtccctcattgctgtccgtgtcttttacaggaagtgtccaagaattatccaaaacggagcaatttttcaggaaacactctccggtgccgaaagcacctctctggtggccgcccgggggagttgtattgccaatgcggaagaggtggatgtgcctattaaactctattgcaacggagacggagagtggctcgtgccgattggcagatgcatgtgcaaagctggtttcgaggccgttgagaatggcacagtatgccgagggtgcccctctgggacctttaaggccaatcaaggcgatgaggcttgtacccattgcccaattaacagcaggacgacgtccgaaggcgccactaactgtgtttgtagaaatggatactaccgcgccgatctggaccccctcgatatgccttgcacaactattccaagcgcccctcaggcagtcataagctcagtaaatgagacttctttaatgctcgaatggactccaccccgagattctggcggaagagaggacttggtatataatataatttgcaaatcttgcgggtcgggtagaggcgcctgcaccagatgtggagacaatgtgcaatatgcccctcgacaacttggcctaaccgagcctagaatttatatctccgatctgctggctcatacacaatacacattcgaaatacaagcagtgaacggcgtcactgatcagtcccctttctcgccacaatttgccagcgtcaatataacaacgaaccaagccgccccttccgctgtttctatcatgcatcaggtgagcaggaccgtcgattctattacacttagttggtcacagccagaccagcccaatggtgtgatcttggattatgaacttcagtattatgaaaaagagttgtccgagtacaacgctacagccatcaaatcgccaactaacacggtgactgtgcagggactcaaggctggggcgatatacgtgtttcaagtaagagcgagaacagtggcggggtacggcaggtatagcggcaaaatgtacttccagacaatgactgaggccgagtaccagacttccatccaggaaaagctgcctctgatcatcgggtcgagtgctgctggcctcgtcttccttatcgccgttgtcgtgatcgctatcgtgtgcaacaggcgcggtttcgagcgcgcagattctgaatatacagacaagcttcagcattatacatcgggtcatatgaccccaggtatgaagatctacatagacccctttacgtacgaagatcccaacgaagccgtccgggagttcgccaaggagatagacatctcctgcgttaagatcgaacaagtgattggagcgggtgagtttggtgaggtatgctcagggcacctgaagcttcctggcaaaagagaaatctttgtcgctatcaagacactgaagagtggatatacagagaagcagagacgagatttcctgagcgaagctagcataatgggtcagtttgatcaccccaacgttatccatctggagggagtggtcaccaaaagcaccccagtcatgattatcactgaattcatggagaacgggtccctcgactcttttcttagacaaaatgacggccagtttaccgtaatccagctcgttgggatgttgcgtgggatcgcagcgggcatgaagtacctggccgatatgaactatgttcaccgagatcttgccgctcgcaacatcctggtgaacagtaaccttgtctgcaaggtgtctgactttgggttgtctaggtttctcgaggacgatacaagcgaccctacatatacatcagcgctggggggtaagattcctattaggtggacagcgccggaggctattcagtacaggaaatttacatcagcgtcagatgtctggagttacggtatagtgatgtgggaagttatgagctatggtgaacgaccatactgggatatgaccaaccaagacgtaattaatgcgatcgagcaagactaccggctgccaccaccaatggattgtccttctgcccttcaccagctgatgctcgactgttggcagaaagatcgcaaccatcgcccaaaattcgggcagattgtgaatactctggacaagatgatcagaaatcctaatagcttgaaagccatggccccactgagctccggcattaacttgccactactcgacaggaccatacccgattatacttccttcaatacggtagatgagtggctggaggcaatcaaaatgggtcagtataaggagagcttcgccaatgccgggtttaccagtttcgacgttgtttcacaaatgatgatggaagatattctacgcgttggagtgactctggcgggccatcagaagaaaattctgaactcaatccaggtaatgagagcccagatgaatcagattcagtctgtcgagggccaaccgcttgctcggagaccccgggcaacaggacgcaccaagcgttgccagccccgtgatgtcacaaaaaagacttgcaactctaacgacggcaaaaaaaaaggaatggggaaaaaaaagaccgaccccggcagaggtagggagatccaagggatcttcttcaaggaagatagccacaaagagagtaacgattgttcatgcggcggctag

SEQ ID NO: 23964 - DNA, 1449 bp, synthetic construct
  misc_feature 1..1449: note = Description of Artificial Sequence: Synthetic coding sequence
  source 1..1449: mol_type = other DNA
atggccctgcggcggctgggcgccgccctgctgctgctgcccctgctggccgcagtcgaagagactctgatggactccacgaccgctaccgctgaactcggatggatggtgcacccacccagcgggtgggaggaggtcagcggctatgatgagaacatgaacactataaggacatatcaggtgtgtaacgtgtttgaatcatctcaaaataattggctcagaacaaaatttatccgccgaagaggtgcccaccggatccacgtggaaatgaaattcagcgtgcgagactgcagttcaatcccttctgtccctgggagctgtaaggagacattcaacctatactattacgaggctgactttgattcagcgaccaagacgtttccaaattggatggaaaacccctgggtcaaggtcgataccatcgccgcagacgaatctttctcccaggtcgacctggggggccgcgtgatgaaaatcaatacagaggtcaggagctttggacccgtgagccgttccgggttctatcttgcgttccaagattatgggggctgtatgtctctcatcgccgtacgggtgttttatcgcaaatgtccccggataattcaaaatggggccatcttccaggagactttatcgggtgccgagtccacctcactggtcgccgccaggggcagctgcattgcaaatgccgaagaagtcgatgttcccattaaactgtactgtaacggcgacggcgagtggctggttcccataggccggtgtatgtgtaaagcgggcttcgaagcggtggagaatgggacagtctgcaggggctgccccagcggtacattcaaggctaaccagggcgacgaggcttgtacacattgccccatcaactccaggaccacctccgaaggcgcaaccaactgcgtatgtaggaatggctattatcgggccgatctggaccctttggatatgccatgtaccaccatcccgtctgccccgcaggccgtcatctctagcgtcaatgaaacctcgctgatgttggagtggacaccacccagggactctggtgggagggaggacctagtgtacaacataatctgcaaatcttgcgggtcaggaaggggagcatgtactcgatgtggtgataatgtccaatacgcaccccgtcagctgggacttacagaaccgagaatctacatttccgacttgctcgcacacacccagtacacatttgagattcaggcagtgaacggagtcacggatcagtcacctttttcaccacagtttgcctccgtgaatatcacgaccaatcaggctgccccaagcgccgtcagtattatgcatcaggtgagtcgcacagtggattccattacgctgagctggagtcagcccgaccagcctaatggggtcatcctggattatgagctccagtactacgagaaaatgaagacgcagagatcttag

SEQ ID NO: 23965 - DNA, 2964 bp, synthetic construct
  misc_feature 1..2964: note = Description of Artificial Sequence: Synthetic coding sequence
  source 1..2964: mol_type = other DNA
atggagctgcgggtgctgctgtgctgggccagcctggccgccgccctggaggaaactctccttaatacaaaactggagaccgccgatttgaagtgggtgacctttccgcaggttgatggccagtgggaagagctttcaggcctagatgaagagcagcattctgtcaggacatacgaggtgtgcgatgtccaacgcgcgcccggccaggcccattggcttagaactggatgggtgcctcggcgaggagctgtacatgtgtacgccacacttcggttcacaatgcttgagtgtctcagcttacccagggccggtcgcagctgcaaggagactttcactgtgttctactatgaaagcgacgctgataccgcaaccgcgctgacaccagcatggatggaaaacccatacatcaaagtagacactgtggccgccgaacacctgactcgtaagcgccctggcgctgaagcaactgggaaggtgaacgtgaagacattacggctgggccccttaagcaaagcgggcttttacttggcttttcaggatcagggggcgtgcatggcgctcctgtcccttcacctcttctacaaaaaatgtgcccagctgactgtcaatctgactagattccccgaaaccgtaccgagggaactggttgtccctgttgcaggttcatgtgtggtcgacgcggttcccgcccctggaccttccccatcactttactgtcgggaagatggccaatgggctgagcagcctgttaccggttgctcatgcgcccccggcttcgaagccgctgagggtaatacaaagtgtcgcgcctgtgcccaggggacatttaagcctctgagtggggaggggagctgtcagccatgccctgcaaatagccactccaatacaattggctcggcagtctgtcagtgccgcgtaggttacttccgcgccagaactgaccccagaggtgctccgtgtacaacaccgccctccgccccacgatctgtcgtgagccgcttaaatgggtcgtctctgcatctcgaatggtccgcaccgctcgaaagcggagggcgggaagacctaacctatgccttgcgttgccgggaatgccgacccggggggtcttgcgcaccttgcggcggcgacctcacctttgacccaggccctcgggacctcgttgaaccatgggtcgtagtgagggggctcaggcctgatttcacctacacatttgaagtcacggcgctgaacggcgttagctccctcgccaccgggccggtcccctttgagcctgtaaatgtcacgaccgatagggaagtgccgcctgccgtctcagatatcagagtgactcgcagtagtccctcttctctcagtcttgcctgggctgtgccccgggctcccagcggtgcggtacttgactatgaggtgaagtatcacgaaaagggtgccgagggcccctcgtcagtgcgtttccttaagactagtgagaatcgtgccgaactgaggggcctgaagcgtggggcgtcatacctggttcaggtccgagccagatctgaggcagggtacgggccgttcggccaggagcatcactcccagacacagttggacgaatccgaaggatggcgggagcagctggcgctgattgctggcaccgccgtagtcggagtagttctggtcctggtcgtgatcgtcgtcgccgtgctgtgcctacggaaacaatctaatggacgcgaggcggaatattccgataagcatggacagtacttaataggccacggaacgaaggtctacatagacccgttcacttacgaagatcccaacgaggctgtgcgtgagttcgccaaggaaatcgacgtttcttatgtgaaaattgaggaggtgattggggccggggagttcggcgaagtctgtcggggcagactgaaagcccctggcaaaaaagagtcctgtgtggctatcaaaacgcttaagggtggctacaccgaacgtcaaaggcgcgaattcctcagtgaagcctcgatcatgggacagtttgagcatccaaatatcatcaggttggagggtgtagtgacaaactccatgcccgtaatgattcttacggaatttatggagaatggggccctggactcctttctccgcctgaacgatggacagttcactgtaatccagctggttgggatgctgcgtgggattgcatccggcatgcgatatctcgctgagatgagttacgtccaccgcgatcttgctgctagaaatattctggtcaactccaaccttgtgtgtaaggtctccgattttgggctgtcacgcttcttggaggaaaattcctccgatcccacatacacatccagcttgggcggaaaaatcccaatcagatggacagctcccgaggcaattgccttcaggaaattcactagtgcaagcgatgcttggagttacggcattgtgatgtgggaggtgatgtcatttggtgaaagaccatactgggacatgtctaaccaggacgtgatcaacgccatcgaacaagattataggttacccccaccgccagactgcccgacttctcttcatcagctgatgctggactgctggcagaaagaccgcaacgcaagacccagatttccacaggtggtcagcgccttggacaaaatgatcaggaatccagcctctctcaagattgtggcaagggagaacggtggagcatcccaccccctgctggatcaaaggcagccacattactccgcttttgggagtgtgggggagtggctccgtgcgatcaagatgggccgttatgaggaatcattcgcagccgccggattcggctctttcgagctggtgagccaaatctccgctgaagatctgctgcgaatcggagtaacactagcaggacaccagaagaaaatcctggccagtgtgcagcatatgaaaagccaggccaagcccggtacccctggcggaactggcggaccggctccacaatactag

SEQ ID NO: 23966 - DNA, 2808 bp, synthetic construct
  misc_feature 1..2808: note = Description of Artificial Sequence: Synthetic coding sequence
  source 1..2808: mol_type = other DNA
atggagctgcgggtgctgctgtgctgggccagcctggccgccgccctggaggagacattattgaacaccaaactggaaaccgctgatctcaaatgggtgaccttcccccaggtagacggacagtgggaggagctttctggactggacgaagaacagcactccgtgagaacgtacgaggtgtgtgatgtgcagagggcccccgggcaagcccattggcttagaacgggttgggtgccgaggagaggagccgtgcacgtttatgccactcttcgattcactatgttggagtgcttatcactacccagggcaggaagatcttgtaaggaaacgtttacagtgttctactatgaatcagacgcagacaccgccactgctcttacccccgcgtggatggaaaacccgtacattaaggtcgacacggtcgccgcagagcacctgacgaggaaacgccctggtgcggaggccactggaaaggtgaacgtgaaaaccctacgtctcgggccgctcagcaaggctggcttttacctggccttccaggatcaaggcgcctgcatggctcttctctccctccatctgttttataagaagtgtgcccagttgaccgtcaatctaactaggttcccagaaacggtaccgagggaactcgtggttccggttgcaggttcctgcgtggttgacgccgttcccgcgcctggtccaagcccatccctgtattgtcgtgaagacggtcaatgggcagagcaacccgtgacggggtgcagttgtgctcccggctttgaagccgccgaggggaacaccaaatgtagggcatgcgcccagggcacattcaagccactgtccggagagggatcctgtcagccctgtcccgctaacagtcactcaaatacaattggcagcgccgtgtgccagtgcagggtggggtacttcagggcccgtaccgatccacggggcgccccctgtactactcccccttcagcaccccggtccgtggtgagccgtctcaatggaagttctcttcaccttgaatggtccgcacccctggaatccgggggccgggaggatttaacttatgcactgagatgtagggagtgcaggccaggaggcagttgcgctccctgtggcggcgatctgaccttcgatccaggcccgagggacctggttgaaccgtgggtggttgtccggggtctgcgacccgatttcacttacactttcgaagtgactgcactgaacggcgtgagcagcctggctactggaccagtgccatttgagccggtgaatgttactaccgatcgagaggtccctcctgccgtcagcgatatccgcgtcacgagatcatctccctcatctctgagtctggcctgggcggtacctcgggctccttctggggctgtcctggattacgaggtgaagtaccacgagaaaggcgccgaaggtccaagctccgttagattcctaaaaacaagcgaaaatagggctgagcttaggggcctcaagcgcggtgcctcttacctggtgcaggtgagagccaggtctgaggccgggtatggcccctttgggcaggagcaccattcgcagactcaacttgacgagagtgaggggtggcgagagcagctggctctgattgccggcaccgcggtcgttggagttgtgttagtcctcgtggtgattgtcgtggcggtgctctgtcttcgcaaacagtcaaatggtagagaggccgagtactccgataaacacgggcagtatttaattgggcacggcactaaagtatatatagacccattcacttacgaagaccctaatgaggccgttcgcgaattcgctaaagagatcgacgtcagttatgtgaaaattgaagaggttattggggccggcgagttcggggaagtgtgcaggggcaggctcaaggccccagggaagaaggagagctgtgttgcgataaagactctgaaagggggttacaccgagcgtcagcgtagggaattcctaagcgaggcctctatcatgggacaatttgagcatccaaacattatcagactagagggcgtcgtgacgaactctatgcccgtcatgatcctgacagaattcatggagaacggtgctctggattcattccttcgactaaacgatggccagtttactgttattcagttggttggcatgctgcgaggtatcgcatccggtatgagatacctcgctgagatgtcctatgtccaccgtgacctggccgcgcgcaacatcctcgtaaactctaacctcgtctgcaaagtgtctgacttcggactatcaagatttctggaggagaattcttctgatcccacatatactagctcattgggaggcaaaatccccattcggtggactgcccctgaggctattgctttccggaagttcacatccgcatctgatgcctggagctacggaatcgttatgtgggaggtgatgagcttcggagagcggccttactgggatatgtcaaatcaagacgtgataaacgccatcgagcaggattaccgccttcctcccccccccgactgcccaacttcgttgcatcagcttatgctggattgttggcaaaaagatcgcaacgcgcggccgaggttcccccaggttgtctctgccctggacaagatgataaggaacccggcatctcttaagatcgttgccagagaaaatgggggtgacttactccgcataggagtaacattggctggacaccagaaaaagatcctggcctcggtccagcacatgaagtctcaggcaaagcccggaacaccaggcggcacagggggcccagcaccacagtattag

SEQ ID NO: 23967 - DNA, 552 bp, synthetic construct
  misc_feature 1..552: note = Description of Artificial Sequence: Synthetic coding sequence
  source 1..552: mol_type = other DNA
atggagttcctgtgggcccccctgctgggcctgtgctgcagcctggcagcagccgatagacataccgtattctggaatagttccaatccaaaattcaggaacgaagactatacaatccacgtgcagttgaacgactacgtggacattatttgtccccattatgaggaccatagtgtggcagatgctgccatggagcagtacatcctgtatttagtggaacacgaggaataccagttgtgtcagccacagagtaaggaccaagtccggtggcagtgtaacagacctagcgcgaaacatggtcctgaaaaattgtccgaaaaatttcagcgctttaccccttttactctgggcaaagaattcaaggagggccactcttactactacatatcccacagtccgcaagcgcatgacaatccccaggagaagcgcctggctgccgacgaccctgaggtacgcgtgctccactcaatcggacattcggcagctccgcgattatttccactcgcttggacggtgctcctgctgcccctcttgctgttgcagaccccctag

SEQ ID NO: 23968 - DNA, 618 bp, synthetic construct
  misc_feature 1..618: note = Description of Artificial Sequence: Synthetic coding sequence
  source 1..618: mol_type = other DNA
atggagttcctgtgggcccccctgctgggcctgtgctgcagcctggccgcagcggatcggcatacagtgttttggaactcctctaatccaaagttccgcaacgaggattataccattcatgttcagctgaatgactatgtcgatatcatctgtcctcattacgaggaccatagcgtcgcggatgccgccatggagcagtacattctgtatctcgtagagcacgaagagtatcagctgtgccagccccagtccaaagatcaggtgcggtggcaatgtaaccgtcctagcgcgaagcatggccctgagaagctttccgaaaaattccagcggtttactccctttaccctaggaaaagaattcaaagaggggcactcttattactatatcagtaaacctatccatcagcacgaggatagatgcctgcgactgaaagtcacagtctcgggaaaaattacacatagccctcaggcccacgataatccccaggagaagaggctcgccgccgacgatcctgaggttcgcgtgctccattctatcggacattccgctgcccctaggctgtttccattagcttggacagtgcttctgttgcccctgctgctgcttcagacaccgtag

SEQ ID NO: 23969 - DNA, 1002 bp, synthetic construct
  misc_feature 1..1002: note = Description of Artificial Sequence: Synthetic coding sequence
  source 1..1002: mol_type = other DNA
atggccgtgcggcgggacagcgtgtggaagtactgctggggcgtgctgatggttctttgtcgaacggccatctctaaatctattgtgctcgaaccaatctactggaattcctccaactccaagttcctgccgggccaaggcctcgtgctgtatccccaaattggtgataaacttgacatcatctgtcctaaggttgactcaaagacagtgggtcagtacgaatactataaggtttatatggtggacaaagaccaggccgacaggtgtacaataaagaaagaaaatactcctctgctgaattgtgctaaacccgatcaggacatcaagtttacaataaagtttcaggagtttagcccaaacctgtggggcctggaatttcagaagaacaaggactattatattattagcacatcgaacggatctctcgagggcttggacaaccaggaggggggtgtctgtcagacacgggctatgaagattcttatgaaggtgggtcaggacgcgtctagtgcagggtccacccggaataaagaccctacccggcgacctgagctggaagcagggactaatggtaggtcctctaccacttctccttttgttaaaccgaacccagggtcttccacagatggtaacagcgctggtcactcaggtaataatattcttggatctgaagtggccctgttcgctggcattgcttcaggctgtatcatctttatcgtaattatcattaccctcgtggttttgctgctgaagtataggcgtaggcatagaaagcatagcccccagcacactactactctgtcattgagcaccctggctacacccaagcgtagcgggaataataatggaagcgaaccctccgacatcattattcccttgcgcaccgccgattccgttttttgtccccactacgagaaagtgtccggcgattacggccaccccgtctacatcgtgcaggagatgcccccgcagagtcctgccaacatatactacaaggtctag

SEQ ID NO: 23970 - DNA, 3624 bp, synthetic construct
  misc_feature 1..3624: note = Description of Artificial Sequence: Synthetic coding sequence
  source 1..3624: mol_type = other DNA
atgctgctgaccctgatcatcctgctgcccgtggtgagcaagttcagtttcgtgagtctcagtgcccctcagcactggagctgtcctgaaggaacacttgccggtaacggaaattccacgtgcgtaggccccgcccccttcctcatcttcagtcatggaaactcgatattccgcatcgacaccgagggaaccaattacgagcaactggttgtggacgccggggtttcagtaataatggactttcactataatgagaagcgaatctactgggttgatctggagaggcagctcttacagagagtattccttaatggctcacgccaggagagagtgtgcaatatcgagaagaatgtaagcggaatggcgatcaattggattaacgaggaagtcatctggtcaaaccagcaggagggcattataacagtgacagatatgaaggggaacaattcacatatcctgctgagcgccctcaaatatcctgccaatgtcgccgttgatccagttgaacggttcatcttctggtcctctgaagtggccggttccctgtatcgcgccgaccttgatggtgtcggcgtgaaggcgctgctggagacttctgagaagattaccgccgtgtcgctagacgtcttggacaagcgcttattttggatccagtacaatagagaagggagtaacagcctcatctgtagttgtgattacgatggtggatccgtccatatttctaagcatccaacgcagcacaacctctttgcaatgtcactctttggggaccggattttttatagtacgtggaagatgaaaacaatttggatagctaacaagcacactggtaaggacatggtccggatcaacctgcacagctcctttgtgccactgggggaactgaaggtggtgcatcccttagcccagcctaaagcagaggacgacacctgggagcctgaacagaaactgtgtaagctaagaaaagggaactgcagctccaccgtttgtggccaggacctgcagagtcacctgtgcatgtgtgccgaaggctatgctctgtcaagggataggaaatactgtgaggatgtgaatgaatgcgccttctggaatcacggatgcacgctgggctgcaaaaacacacccggaagctactattgcacctgcccggtgggattcgtgctgctgccagacggaaagagatgccatcagctcgtgtcatgcccccgcaatgtctcagaatgttctcacgattgcgtgctgacatctgagggtccgttgtgcttttgcccagaaggctccgttctggagcgcgacggaaagacttgcagtggatgcagctcccctgacaacggcggctgttcccagctttgcgtgcctctgtcgccagtctcatgggagtgcgattgctttccaggatacgaccttcaactggatgagaaaagttgtgctgccagcggaccgcagcccttcctgctctttgcaaactctcaggatatccgccatatgcactttgacggtactgactatgggacactgctgtctcagcagatggggatggtctatgcactcgaccatgacccagtggagaacaaaatctattttgcccatacggctctcaagtggatcgaaagagcaaatatggatggctcacaacgagagaggctgatcgaggaaggggtggacgtacccgagggactagccgttgattggatcggccgtagattttattggacagatcgcgggaagtcactgatcggccgaagcgatctgaatgggaaacgttccaaaatcatcactaaagagaacatctcccagcctcgtggcatagcagtgcatcccatggccaagaggctgttttggacggacaccggcataaacccgcgcattgaaagttcctcactgcagggcctaggtcggctggtaatcgcaagttccgatctaatttggcctagtggcataacaatagactttctgacagataagctctattggtgtgatgctaagcagagcgtaatagagatggctaatctggatggcagcaagaggcgacgccttacccagaatgacgtggggcatccgttcgccgttgccgtgttcgaggattacgtctggttttctgactgggcaatgccctctgtgatgcgggtgaacaagcgaacggggaaagatcgagtgcgtctgcaggggtcaatgctcaaaccgtcatcactggtcgtcgttcacccacttgccaagcctggcgctgatccttgcctgtatcagaatggcggttgtgagcatatctgtaagaagcgccttggaaccgcctggtgcagctgcagagaggggttcatgaaggcttctgacggcaaaacctgcctcgccctcgatggtcaccagctgctagctgggggagaggtggacctgaagaaccaggttacgccattagacatcctgagcaaaacccgggtgtcagaagacaacataaccgagagccaacacatgcttgtagccgagattatggtttctgatcaggatgattgtgcacctgtgggatgcagcatgtatgcacgatgtatcagcgaaggtgaagacgcaacctgccagtgcctgaaggggtttgccggcgacggaaagttgtgttccgacatcgacgaatgcgagatgggcgttcccgtttgcccccccgcttccagtaagtgtattaataccgaagggggttacgtctgccggtgctctgaaggataccaaggggatggaatccattgcctggacatcgacgaatgtcagcttggtgaacactcatgcggcgagaatgcttcctgtacgaataccgaaggcggctacacctgcatgtgtgccggacgcttgagtgagcccggtcttatctgcccggacagtacaccccctccacacctgcgggaagacgatcatcactactcggttagaaactctgacagcgaatgccccttgtcacacgatggctattgccttcatgacggcgtttgcatgtatatcgaagcgctagacaaatacgcctgcaactgtgtggtaggatacattggcgagcgatgccagtaccgagacctcaagtggtgggaactcagacacgcgggccacggacagcagcaaaaggtgattgtggtagctgtgtgcgtggttgtcttggtcatgcttctgcttctcagtctatggggtgcccactactaccggacccagaaactcctatccaagaaccccaaaaatccctatgaggaatcatctcgggatgtgcggagcaggcggccggcagacaccgaagacggaatgagctcctgtccccagccttggtttgtggtgatcaaagaacatcaggatctgaagaatggcggccaacccgtggccggggaggacggacaggctgccgatggatcgatgcagcctacaagctggcggcaagaaccacagttgtgtggcatgggtaccgagcaaggctgctggatacctgtctcctctgacaagggcagttgcccgcaggttatggagagatccttccacatgccctcctacgggacgcagaccctggaaggcggagttgagaagccccacagcctgttgtcagccaatcctctgtggcagcagagggccctggatccaccacatcagatggaactaactcagtag

SEQ ID NO: 23971 - DNA, 3501 bp, synthetic construct
  misc_feature 1..3501: note = Description of Artificial Sequence: Synthetic coding sequence
  source 1..3501: mol_type = other DNA
atgctgctgaccctgatcatcctgctgcccgtggtgagcaagttctcattcgtatctctgagcgccccccagcactggtcatgccccgaagggaccctagcaggaaacggcaacagcacctgcgttggacctgccccattcctgatttttagccatggtaacagcatcttccgcatcgacacagaggggaccaactacgagcagcttgttgtcgatgccggtgtgagcgtcatcatggacttccactataacgagaagcggatatattgggtcgaccttgaacgccagttgctgcaacgggtgttcttaaacggaagtcgtcaggaacgcgtgtgcaatatcgagaagaatgtaagtggcatggccatcaattggatcaatgaagaagtgatctggtcaaatcaacaggagggcatcataacagtgacagacatgaagggtaataatagccatatattgctttcagccctcaaatatccagcaaacgtcgctgtcgatcctgtagaacgatttatcttctggagttcagaagttgccgggtctctgtatagagccgacttagacggcgtcggggtgaaggctctcctggagacatctgaaaagatcactgccgtgtctttggacgtgctggataaacgtttgttttggatccagtataacagagaggggtcaaacagtctgatttgctcctgcgactatgatgggggatctgttcacatctcgaaacatcctacccagcacaacctgttcgctatgagcctgtttggtgaccgaatcttctactctacgtggaaaatgaagaccatctggatcgcaaacaaacacaccggcaaggatatggtgcgcattaaccttcattccagttttgttccactgggtgaactcaaggtcgttcacccattagcccaaccaaaagctgaggacgatacatgggagccagagcagaagctctgcaagctgcggaagggaaactgcagctccactgtttgtgggcaagacctgcagtcacacctgtgtatgtgcgcagagggctatgcgctgtcccgagatcgcaaatactgtgaagacgttaacgaatgtgcgttctggaaccatggatgtactttgggctgtaaaaacaccccgggttcttactattgtacctgtccagtagggttcgttctgctgccagatggcaagcggtgtcaccagcttgtgagctgtcctcggaacgtgtccgagtgctcacatgactgcgtgcttacttccgagggtccattatgtttttgcccagaggggtcagtgcttgagagggacggaaaaacatgttctggatgtagcagccctgataatggggggtgctcccaattgtgcgtgcccctgtctccagttagctgggaatgtgactgttttcccggctatgacctacaactggatgaaaagagctgcgctgcctctggacctcagccctttctgttgtttgctaatagccaggacattcgccacatgcactttgacggcaccgattatggcactcttttatcacagcagatgggaatggtctacgcgttggatcatgaccccgtcgagaacaagatctactttgcacatactgcgctgaaatggattgagcgcgctaacatggatggaagtcaacgagagcgcctcatcgaggaaggagtagacgtgcccgaaggccttgcagtcgactggataggccgccggttttactggactgatcgaggaaagagtctgatcggcaggtctgacttaaatggcaaaaggtccaagatcatcacaaaggagaatatctcgcagcctcggggtattgctgtacaccctatggcgaaacgtctcttctggacagacacaggcataaacccgagaatcgagtcatccagcctgcagggcttagggcgactggttattgcttcctctgatctgatctggccaagcgggattactatcgactttctcacagataagctgtactggtgtgatgcaaagcagagcgtcattgagatggcaaatctcgacgggtccaagcggcggcgcctcacccagaacgacgttgggcacccctttgccgtcgccgttttcgaggactatgtctggttctccgattgggctatgccatccgtgatgcgggtcaacaaacgtacaggaaaagatcgggttcgcctgcagggtagcatgctgaagccctcaagcctcgtggttgtgcatccactggcaaagcccggggctgacccctgtttatatcaaaacggaggctgcgaacacatatgcaaaaagcggttgggcacagcttggtgtagctgccgggaggggttcatgaaagcctccgacgggaagacttgtttggcactagacggtcaccagctgctcgccggcggagaggtggacctcaagaatcaggtcacaccactagacatcttatctaagaccagagtcagcgaagataacatcaccgagagtcagcatatgctcgtggccgagatcatggtaagcgatcaggacgattgcgccccagttgggtgctctatgtatgcacgctgtatcagcgagggagaggacgctacctgccagtgtctcaaaggcttcgccggggatgggaaactgtgttcagacatcgatgaatgtgagatgggtgtgcccgtgtgccctcccgcttctagtaagtgtataaacactgaggggggttacgtgtgtcgatgctccgaagggtaccaaggagatggcatacattgcttagattccacacctccacctcatctgcgcgaagacgaccaccattactcagtgcgtaatagcgactcagaatgtccactcagtcacgatgggtattgtcttcatgatggcgtgtgtatgtatatcgaagctctcgacaaatacgcgtgtaattgtgtggtgggctacattggggagcgttgccaataccgggacctcaaatggtgggagttaagacacgccggccacggtcagcagcagaaggtgatagtggtcgctgtgtgcgtcgttgtgctagtgatgctcttacttctttctttgtggggcgcgcattattataggacgcagaagctcctctccaagaaccctaagaacccctatgaggagtcctctagggatgtgcggtccaggaggccagcggatacagaggacgggatgagttcctgcccccaaccatggtttgttgtgattaaagagcaccaagacctcaagaatggagggcagccagtggcaggcgaagacgggcaggcggccgacggtagtatgcagcccacgtcctggcgacaggagcctcagctgtgcgggatgggtacagaacaaggctgctggatccccgtgtcttctgacaaaggctcctgcccacaggtcatggaacggagttttcacatgcccagctatgggacacagacactggaggggggagtcgagaaaccacacagccttctcagcgcaaatccactgtggcaacagcgcgccctggatccccctcatcagatggagctcacacaatag

SEQ ID NO: 23972 - DNA, 3498 bp, synthetic construct
  misc_feature 1..3498: note = Description of Artificial Sequence: Synthetic coding sequence
  source 1..3498: mol_type = other DNA
atgctgctgaccctgatcatcctgctgcccgtggtgagcaagttctctttcgtgagcttgtctgcgccacagcactggagctgccccgaggggacgttggcagggaacggtaattctacctgcgtgggacctgcaccctttttgattttctctcacggcaacagtattttcaggatcgacactgaaggcaccaactatgagcaacttgtagtcgacgcaggcgtctcagtgatcatggattttcactacaatgagaaacgcatttactgggtggacctcgaacggcagctcctgcaaagagtgttcctcaatggttcgcgacaggagagagtgtgcaacatcgagaagaatgtcagcggaatggcaatcaattggataaatgaggaagtgatctggtctaaccagcaggagggcataataacagtaacagatatgaaaggcaataactcccacatccttctctcagctctgaaataccccgcaaatgttgctgtagacccggtggaacgcttcatcttttggtctagcgaagtggccggttccctatacagagctgatctcgatggtgtgggcgtgaaagccctgttagaaacctcagaaaagattaccgccgtgtccctggacgttttggacaagcgactgttctggatacagtataatagagaaggttccaactccctcatttgctcctgtgactacgatggtggttccgtccacattagcaaacaccctacccagcacaatctgttcgcaatgtctctgtttggtgaccgtattttctacagtacatggaagatgaagaccatctggatcgctaataagcacacagggaaagacatggtgcgtattaacctgcacagcagttttgtcccgctgggagaactgaaggtcgtgcatcccttggcacagccaaaggcagaagacgacacctgggagcccgatgtcaacgagtgcgccttctggaaccacggttgcaccttgggatgcaagaatactccagggagctactactgcacgtgtccagtgggatttgttctgctgcccgacggcaaacgatgccaccaactcgtgagctgccccaggaacgtttcggagtgtagccacgattgtgtgttgacatctgaaggtcctctgtgcttttgtcccgaaggctctgtgcttgaaagagatggtaaaacttgctctgggtgctccagtccagataacgggggctgctcacaattgtgtgtgccactttccccagtaagctgggaatgcgattgcttccccggctacgaccttcagttggatgaaaaaagttgcgccgcaagtggaccccagccttttctgttattcgctaattcccaggatatcagacatatgcattttgatggaacagattacggtacactgttgtctcagcagatgggaatggtctatgcacttgaccacgaccccgtcgagaataagatctacttcgctcatacagcactgaagtggatcgagcgtgcaaacatggatggcagccagagagagcgattgatcgaagagggagttgatgtgcctgaaggcctggcagtggactggatcggtaggaggttttattggacggatcggggaaagtccctcattggcagatcagatttgaacggcaagcgctctaaaataatcaccaaagagaacattagccagccgcggggaatcgcagtgcaccccatggccaagcggctgttctggacagatacaggtattaatccaagaatcgaaagcagcagtttgcagggcttaggtagactggtgattgcctcctctgatctgatctggcctagcggcattacaatcgatttcctcacagataaactatattggtgcgacgccaaacaatcagtaatagaaatggctaatctggacgggtcaaagaggcgtcgactgacccagaatgacgtgggccacccattcgcggtggcggtgtttgaagactacgtgtggttttctgactgggcgatgccttctgtgatgagggtcaacaagcgcaccggaaaggatcgcgtgaggctccagggctccatgttgaaaccgagctccctggtggttgtgcatcctctcgcaaagcctggggccgatccctgtctttaccagaacggaggctgcgagcacatttgcaagaagcggttgggaacagcatggtgtagttgtagagaggggtttatgaaggccagcgatggaaagacgtgcttggccttggatggacatcagctcctggctggaggagaagtagacctgaaaaaccaggtaacacctctggacatcctttcgaagacacgcgtctccgaagacaatataacagagtcccagcacatgctcgttgccgagatcatggtgtccgatcaggatgattgcgcccccgtgggatgttccatgtatgcccggtgcattagtgaaggagaggacgccacttgccagtgtctgaagggattcgcaggtgacggaaaactgtgttcagatattgacgagtgcgaaatgggagtccctgtttgcccgccggcgagctcaaagtgcattaacactgaaggggggtatgtctgcaggtgcagcgagggttaccaaggcgatggaatccattgtttagacatcgatgagtgccagctcggcgagcactcttgcggcgagaatgcatcttgtactaatactgagggagggtatacctgcatgtgcgccgggcggctgagtgagcctggcttaatatgccccgatagcacccctccgccccaccttcgggaagatgatcaccactattcagtgcgcaatagcgattctgagtgtccactcagccatgacggatactgcctgcatgacggggtctgcatgtacatagaggccttggataagtacgcttgtaattgcgtggttggttacattggcgaaaggtgtcagtatcgcgatcttaagtggtgggagctccggcacgcgggccacggccaacagcaaaaagtgatcgtggtcgccgtgtgtgtcgtcgtactggtgatgttgctgctgctgtcattgtggggtgcacactattatcgcacgcaaaagttgctgagtaagaacccgaagaatccatatgaagaatcaagcagagacgtccgaagtaggcgcccagcagatactgaggacgggatgagcagctgtcctcaaccttggttcgtggtgatcaaggagcatcaggacctaaagaatggcgggcagcccgtggccggagaggacggccaagcggccgatggtagcatgcagccaaccagttggcgacaggagccgcagctgtgtggaatggggaccgaacaggggtgttggattcctgtttcttccgataaggggagctgccctcaggtgatggaacgctcttttcacatgccaagctacggaacacagaccctggagggaggcgtggaaaaaccccacagcctcctgagcgccaatccactctggcagcagcgcgcgttagacccgccccatcagatggagctgacccagtag

SEQ ID NO: 23973 - DNA, 3633 bp, synthetic construct
  misc_feature 1..3633: note = Description of Artificial Sequence: Synthetic coding sequence
  source 1..3633: mol_type = other DNA
atgcggcccagcggcaccgccggcgccgccctgctggccctgctggccgctctctgccccgcatctcgggccctcgaggagaaaaaggtttgccaggggactagtaataagttgacccagctaggaactttcgaggaccactttctctcactccaacgcatgtttaataactgtgaagttgttctgggtaatctcgagatcacatatgttcaacgcaactacgacctctcctttctaaaaacaatccaggaggtcgccgggtacgtcctgatcgcattgaacacggtggagcggatccctttggaaaatctgcagatcatccgcggcaacatgtactacgaaaattcctatgctctggccgtcctaagcaactacgatgccaacaagacgggattgaaagagctgccaatgaggaacctgcaggagatcctccacggagccgtccgattctcgaacaatccagccctatgcaacgttgagtccatccaatggagggatattgtctcatctgacttcctgtctaatatgagtatggactttcaaaatcatctaggatcatgtcagaaatgtgatcccagttgccctaatggaagctgttggggcgccggcgaggaaaactgccagaagcttaccaagattatttgtgctcagcagtgcagtggccgctgtagaggcaaatccccgtcagactgttgccacaaccagtgtgctgctgggtgtacaggaccccgagagagtgactgtctggtctgccggaagtttagagacgaggctacatgtaaggacacttgtccaccactgatgttatacaaccctaccacatatcaaatggatgtcaacccggagggcaagtacagctttggagccacatgtgtgaagaaatgccctcggaattatgtggtcacggatcatgggtcctgtgtgagagcctgcggtgctgatagttatgagatggaagaggatggtgtgcggaaatgtaagaagtgtgaaggtccttgccgcaaggtctgcaacggcatcggaataggggaattcaaggatagtctaagtatcaatgccacaaatataaaacactttaagaactgcacaagcatttcaggagacctgcatattctgccagtcgcttttcggggggatagtttcacacatacaccccccctggatccccaggagcttgacattctgaaaaccgtgaaggagattaccggatttctgcttatacaggcttggcccgagaaccgaacagatttgcatgcctttgagaatttggaaatcatcagagggcgaaccaaacagcatggacagttcagcctggcagtggtttcactgaatataaccagtctgggactgaggtcacttaaagagatatcagacggtgacgtgataattagcggcaacaaaaacctgtgttacgcaaatacaattaactggaaaaagctattcggaactagcgggcagaaaactaaaattatttccaatcgcggagagaacagttgcaaggccacagggcaagtgtgtcacgccctgtgcagcccggagggctgttggggtccagaaccaagagattgtgtgtcgtgtcgcaacgtgtcgaggggacgcgagtgtgtggacaagtgcaacctgctggaaggcgagccccgggagttcgttgagaattcagagtgcatacagtgccatcccgagtgcctgcctcaagctatgaatatcacttgcaccggccgcggcccagataactgcatccagtgcgctcattatatcgatggcccccactgtgtcaagacatgccccgccggcgtcatgggtgaaaacaatactctggtgtggaagtatgctgacgccggtcacgtgtgtcacctgtgtcaccctaactgtacctacggttgtaccggtcccggattagaaggttgccccactaacggccccaagatcccctctattgctacaggaatggtgggtgcgctgctccttctgctggtggtagcacttggtatcgggctgtttatgaggcggcggcacatcgtgagaaaacggactctccggcggcttctccaagagcgtgagctggtggagcccctgaccccctctggcgaggctcctaaccaagccctcctacggatactgaaggagaccgaatttaaaaagattaaagtgttaggatccggggccttcggcaccgtgtacaagggcctctggattcccgagggcgagaaggtgaagatacctgtggccatcaaggaactgcgggaggctacatccccaaaagccaataaagagatcctggacgaagcatacgtaatggccagtgtcgacaatccccatgtttgcagattgctgggcatatgcctcacctcaacagtacagttgatcacacaactgatgccatttgggtgtctcttagactatgtgagggagcacaaagacaacatcgggagtcagtatctcctaaactggtgcgtgcagattgcaaaagggatgaattaccttgaggatagaaggctggttcatcgtgatctagcagcgaggaacgtgttagtgaagactccccagcacgtgaagattacagattttggcctggcaaaactcctcggagccgaggaaaaggagtaccatgccgaggggggaaaggtccctataaaatggatggctctggaatcaatcctgcaccgaatctacacccatcagagtgacgtgtggtcgtatggagtcaccgtctgggaactcatgacattcggctctaaaccttatgatgggatcccggcctccgagatttcatccatcttggaaaagggtgagcggctcccccagccccccatctgcaccatcgatgtgtatatgattatggtcaaatgctggatgatcgacgctgattcgcgcccaaagtttcgcgaattgatcattgagttcagcaagatggccagagatcctcaacggtacctcgtcatacagggggatgagcgcatgcacctgccttccccgaccgactcgaatttttacagagctctgatggacgaggaggatatggacgacgttgtggatgcagacgagtatctgattccacagcagggctttttcagttcaccttccacatcacgtacccccttgctctcatctctgagcgccacttctaacaactccaccgtggcatgtatcgatcgtaatgggttgcaaagctgcccaattaaggaggacagtttcttgcagcggtattcttccgacccaaccggtgctctaacagaagactctatcgacgacactttcctgcccgtccccgaatacatcaaccagagtgttccaaaaaggccagcaggcagtgtgcagaatcctgtctaccataatcagccactgaaccctgccccatcccgagacccccactaccaagatccccactctactgccgtgggaaacccagagtatttgaacaccgtgcagccgacctgtgttaatagcactttcgactcaccggctcactgggcccagaaggggtcgcatcaaatttcactggataacccagactatcaacaggacttcttccctaaggaggcaaaacccaacggaatattcaaaggaagcaccgccgaaaatgccgagtaccttagagtggccccccagagttcagaatttatcggtgcctag

SEQ ID NO: 23974 - DNA, 1887 bp, synthetic construct
  misc_feature 1..1887: note = Description of Artificial Sequence: Synthetic coding sequence
  source 1..1887: mol_type = other DNA
atgcggcccagcggcaccgccggcgccgccctgctggccctgctggcagcattatgcccagccagcagagcgctggaggaaaagaaggtatgtcagggtaccagtaataaactgacacagcttggaaccttcgaggatcactttctgtccttgcagcgcatgtttaataactgcgaagtagtgctcggcaacctggaaatcacttatgtgcagaggaactacgatcttagcttcctgaaaacgatccaggaggtggccgggtatgtgctgatcgccctgaacacagtagagcggatcccgctggaaaatttacagatcatacgggggaacatgtactacgaaaactcttacgccctggcagtgctgagcaattatgatgccaacaagactggcctgaaggaattgcccatgagaaatctgcaggagatcctgcacggcgccgtcagattctccaacaatcccgccttatgtaatgtcgagagtatccagtggcgcgatattgtctcttccgatttcctcagcaatatgtccatggactttcagaaccatctcggctcctgccagaagtgcgacccgtcatgccctaatggaagttgctggggcgctggagaggaaaattgccagaagttaactaaaattatctgtgctcaacagtgtagtgggaggtgccgggggaaaagtccgagcgattgttgtcacaaccagtgcgcagccgggtgtacgggccctcgtgaaagcgactgtctggtgtgtagaaagttccgagatgaggctacctgtaaagatacttgtcctccattgatgctgtacaacccgaccacctaccagatggacgtgaatcccgagggcaaatactcttttggagcaacctgcgtgaaaaaatgtcctcgtaattatgtggtgacggaccacggatcttgcgtccgggcctgtggcgcagattcctacgagatggaggaggacggcgtaagaaagtgcaagaagtgcgagggaccatgtagaaaagtatgcaatgggattggtatcggcgagtttaaagattctttgtctattaatgccaccaatattaaacacttcaagaactgcacctccattagcggagacctccacatactccctgtggccttcaggggcgactctttcactcacaccccacccctcgacccacaagaactcgatatattgaagaccgtgaaagagataaccgggtttctgctgatccaggcatggcctgagaatcgcactgatttgcatgcttttgagaatctcgaaattatcagaggacgtacgaagcagcacggccaattcagcctggcagtggtttcactaaacattactagcttaggcctcagaagtctgaaggagatctcggatggtgatgttattatttccggcaacaaaaacctatgttacgccaatacaatcaactggaagaaattgtttgggacatctgggcagaaaaccaaaattatatccaacagaggcgagaattcttgcaaagctacagggcaggtgtgccacgctctgtgttcccctgagggctgttggggccctgaaccacgcgactgcgtcagttgcaggaacgtgtccagggggcgtgagtgtgttgataaatgcaatttgttggaaggtgaaccccgcgagtttgtggaaaactcagagtgcattcagtgtcatcccgagtgtctgccgcaagccatgaatatcacctgcaccggccgaggccccgacaactgcattcagtgcgcccactacattgacgggcctcattgcgtcaagacgtgtcccgcaggcgttatgggcgaaaacaacaccctcgtgtggaaatacgccgatgcagggcacgtgtgtcatctgtgtcatccaaattgcacgtacggcagctag

SEQ ID NO: 23975 - DNA, 2118 bp, synthetic construct
  misc_feature 1..2118: note = Description of Artificial Sequence: Synthetic coding sequence
  source 1..2118: mol_type = other DNA
atgcggcccagcggcaccgccggcgccgccctgctggccctgctggcagctctgtgtccagcctcacgcgccctggaagaaaaaaaggtgtgccaaggtacatccaacaaactgactcagttaggaacctttgaggaccattttctgagcctgcagcgcatgtttaataactgtgaggtcgtgctgggcaatcttgagatcacctatgtccagcgcaactatgacttgagtttccttaagacgatacaggaggttgccggttacgtcctgatcgctctcaacactgtcgaacggattcccctggaaaatttgcagatcattcgcggcaatatgtactacgaaaatagctacgctcttgctgtgctgagcaactatgacgccaacaagactggactgaaggagctgccaatgagaaatctgcaagaaatcttgcatggagccgttaggttctctaacaaccctgccctttgtaatgtagagtctatccaatggcgggacatcgtatctagcgattttttgtccaatatgagcatggactttcagaaccacctcggttcctgccagaaatgtgacccttcatgtcccaacggatcttgctggggggccggggaggaaaactgtcagaaactaaccaagataatctgtgcccaacagtgcagcggccgatgtaggggaaagtcgccttcagactgttgccacaaccagtgtgccgccggatgtacgggccccagagagtccgactgcctcgtctgcaggaagtttagggatgaagctacttgcaaagacacatgtccacctctgatgctgtataatccgactacctaccagatggacgttaatccagagggcaagtacagcttcggagccacctgcgtgaagaagtgtcctaggaattatgtggtgaccgaccatggttcctgtgtgagggcctgcggcgctgattcctatgaaatggaagaagacggtgtcaggaaatgtaagaagtgcgagggtccttgcaggaaggtatgtaacgggatcgggataggtgaattcaaagattccctttccattaatgccacaaatataaagcacttcaaaaattgtacttcaatttccggggacttacacatcctgcccgtcgccttccgcggggattcctttactcacaccccgcctctggatccacaggaactggacattttgaaaactgtgaaggaaatcactggattcctcttaattcaggcttggcctgaaaaccgcacagatttgcatgcctttgaaaacctggaaatcatcagggggcgcacgaaacagcacggccagttctcccttgctgtcgtatcgttaaacattaccagtctgggactacgcagcttgaaggaaatctctgacggcgacgtgatcatctcagggaataaaaatctgtgctacgctaacacaattaattggaagaagcttttcggaacaagcggtcagaaaacaaaaattataagcaatcgcggtgaaaattcatgtaaagccaccggacaggtctgccacgccctctgctcgcccgagggctgctggggccccgaaccccgggattgtgtctcctgcagaaacgtttcacgaggtcgtgagtgcgtcgacaagtgcaatcttttagaaggggaaccacgagaattcgttgagaacagtgagtgtatccagtgccaccccgaatgcctcccccaggccatgaatattacctgcacgggccgcggcccagataattgtattcaatgcgcccactacatcgacggtccacattgcgtaaagacctgtccagccggtgtgatgggcgaaaataatactctcgtgtggaagtatgctgacgccgggcatgtatgtcatctgtgtcatccaaactgtacttatggccctggcaatgagagcctcaaggctatgcttttctgcctcttcaagctttcctcttgcaatcagagcaatgatgggtcagtgagccaccagtcagggtctccagccgctcaggagtcgtgtctaggctggatcccatctctgcttccaagtgaattccagctggggtggggaggctgctctcatctgcacgcctggccctccgcctcagtgattattaccgccagctcatgccactag

SEQ ID NO: 23976 - DNA, 3243 bp, synthetic construct
  misc_feature 1..3243: note = Description of Artificial Sequence: Synthetic coding sequence
  source 1..3243: mol_type = other DNA
aaccggaccgagggcgccgcccacgagaagttcaccggcaaccccgcctggaggcgagccgtacagcaacagccgtgtccggttgtggaaagcatacagtggagagacattgtttccagcgacttcttatcaaacatgtccatggacttccagaaccatctgggcagctgccaaaagtgtgacccctcttgtccgaatggaagctgctggggggccggagaagaaaactgccagaaactgactaaaatcatctgtgcacagcaatgttccggaagatgcagaggcaaatctccgtctgactgttgccataatcaatgcgcagccggctgtacaggtcctcgcgaatcggattgtttggtttgtagaaagttcagggatgaagcaacgtgcaaggatacgtgtccaccacttatgctgtacaaccctacaacgtaccagatggatgtaaatcccgagggtaagtacagcttcggagccacttgtgtgaaaaagtgtccacggaactacgtggtgactgaccatggttcttgcgttagagcctgcggtgccgactcctatgaaatggaagaggacggcgtcaggaagtgtaaaaagtgtgagggcccatgtaggaaggtgtgcaacggtatcggtatcggtgaattcaaagattcactaagcattaacgcaaccaatatcaaacactttaagaattgcactagcatctctggcgatttacacatacttcccgttgcctttcgcggagacagcttcacacatactccccccttggacccacaagagctcgacatcctgaagaccgtgaaagaaattacagggtttctcctgatccaggcctggcccgagaacaggaccgatcttcatgcctttgagaacctcgaaatcattcgggggcggacaaaacaacacggacagttctccttagccgtggtgagtctgaatataacgtctcttggcctcaggagtctgaaggagattagtgacggggacgtcatcatcagcggtaacaagaacttatgttacgcgaatacaatcaattggaagaagctgttcgggactagcgggcagaagaccaaaattattagtaatcggggagagaacagctgtaaggccaccggtcaggtttgccacgccctgtgtagccctgagggctgctggggccccgagcctcgggactgcgtcagctgtcgaaacgtttcacgcggcagagaatgcgtagataaatgcaacctgttagagggcgaaccgagagagttcgtggagaactccgaatgcatacagtgccaccccgaatgcctcccacaagccatgaatattacatgcaccggacggggaccagacaactgtattcagtgcgctcattacattgatggccctcactgcgtcaagacctgtccagccggagtcatgggtgagaacaatactctggtgtggaaatatgcggacgccggtcacgtgtgtcatctgtgtcaccccaactgcacctatggctgcactgggccggggttggaagggtgtcccaccaacgggccaaagattccttcgatcgctacagggatggtgggcgccttactactgctcctcgtcgtcgcattaggaatcggactttttatgcggagacgtcacatagtgagaaagcggacgcttaggagacttctgcaggagcgcgagctcgtagaaccactgacgccaagtggcgaagcccccaaccaagcgctacttcggatcttgaaagagaccgagttcaagaaaattaaggtcctgggatccggggcctttgggaccgtgtacaagggactgtggatccctgaaggtgagaaagtgaaaatacccgtggcgatcaaggaacttagagaggccacttcacccaaagcaaacaaagagatactggatgaagcttatgtcatggcttcagtggacaacccacatgtgtgccggttgctcggaatctgtctcacgagtaccgtccaactcataacacagcttatgcccttcggatgcctgctcgactacgttcgcgagcacaaggacaacatcggaagccaatacctgctgaactggtgtgtgcagatcgccaaagggatgaactacctggaggacagaagactggtgcacagagacctggctgcccggaacgtcctggtgaaaactccgcagcacgtgaaaatcaccgattttgggctcgccaagcttttgggagcagaggagaaggagtaccacgccgagggaggcaaagtgcccatcaaatggatggcattggaatcaatccttcacagaatttatactcatcagagcgacgtgtggtcttatggggttaccgtttgggaactcatgaccttcgggagtaagccttacgatggtatcccagccagtgaaataagctcaatcctagagaagggtgaacggcttccccagcctcccatttgtaccatagatgtctacatgatcatggttaagtgctggatgatcgatgctgacagcaggcctaaattccgtgaactaatcattgagtttagcaagatggctagggaccctcagaggtatctggtgattcagggggatgaaagaatgcatcttccctcacctacagatagtaatttttacagagccttgatggacgaagaagacatggacgacgtggtagatgctgacgaatacctgatcccgcagcagggcttcttctcttctccatccacctctcgcacccctctactgagctccctgtccgccacctcaaacaacagcaccgtggcctgcattgatcggaacggcctccagagctgcccaatcaaggaggacagctttttacagagatactctagcgaccctactggggctttgaccgaggactccatcgatgataccttccttcccgttcccgaatacatcaaccagtcagtgccaaagagaccagcaggcagtgtccagaaccccgtgtaccacaaccagcccctcaatcctgcgccgagtcgcgacccacactaccaggaccctcattctactgcggtggggaaccccgagtacctgaacacagtgcaacccacatgtgttaactctaccttcgacagccccgcccattgggcccaaaagggtagtcatcagattagcctcgacaatcctgactaccagcaagatttcttccctaaggaagccaaaccaaacggaatattcaagggaagtacagcggaaaacgcagaatatttgcgagttgcccctcagtcaagcgaatttattggggcatag

SEQ ID NO: 23977 - DNA, 1218 bp, synthetic construct
  misc_feature 1..1218: note = Description of Artificial Sequence: Synthetic coding sequence
  source 1..1218: mol_type = other DNA
atgcggcccagcggcaccgccggcgccgccctgctggccctgctggcagccctgtgtcctgccagccgcgcactagaggagaaaaaggtctgccaaggtacatcaaataaactcacgcagctgggcacctttgaggaccattttttgagcctgcagcgcatgtttaacaattgcgaagttgtgctggggaatcttgagattacctatgttcagcggaactacgatctgtccttccttaaaacgatccaggaagtggctggctatgtgcttattgctctgaataccgtggaacggatcccactggagaatcttcagataattaggggcaacatgtactacgaaaatagctatgcactggccgttttgtcaaattacgacgccaataaaaccggcctgaaggagcttccaatgaggaacttgcaagaaatcttgcatggagccgtgcgcttctctaataaccccgctctatgcaacgtcgagagtatacagtggagggacattgtgagctctgactttctgagtaacatgagtatggattttcagaaccatctgggtagctgtcaaaaatgcgatccttcgtgtccaaatgggagctgctggggagcgggagaagagaactgccagaaactgacaaagattatctgtgcccagcagtgctccggaaggtgcaggggtaaatctccttctgattgttgtcacaatcagtgtgccgccggatgcaccggcccacgcgagagcgactgcttggtctgccgaaagtttcgcgatgaggccacatgtaaagacacctgccccccacttatgctgtacaatcccacaacctaccagatggacgtcaaccctgagggtaagtattctttcggagcgacctgtgtgaaaaaatgtccgagaaattatgtggtaactgatcatggatcatgtgtgcgcgcttgtggggcagactcatacgagatggaagaagacggggtgcgcaaatgtaagaaatgtgaaggcccttgtcggaaagtttgtaatggaataggaataggagaatttaaagacagcttgagcataaacgcaactaacatcaagcattttaaaaactgcacctctattagtggcgacctacatatcctaccggtggctttcaggggggacagcttcacccacaccccacctctcgacccacaggaactcgatatccttaaaactgtcaaagagattaccgggctgtcctag

SEQ ID NO: 23978 - DNA, 1974 bp, synthetic construct
  misc_feature 1..1974: note = Description of Artificial Sequence: Synthetic coding sequence
  source 1..1974: mol_type = other DNA
atgcggcccagcggcaccgccggcgccgccctgctggccctgctggccgccctgtgcccagctagtagagcgctagaggaaaagaaagtgtgccagggtacctcaaataagctgacacaacttggcacattcgaggaccactttctgtctctccagcgtatgttcaacaattgtgaagtagtattaggcaaccttgagatcacatacgtgcagcgaaattatgatctgagcttcttaaaaaccatccaggaagtggctggctacgtgctcatagctctgaacaccgtagaaagaatacccttggagaatcttcagataatacgagggaacatgtactatgaaaactcatatgcgctcgcggtactgtccaactatgacgcaaataaaaccgggctcaaagaactgcccatgcggaatctccaagagatcctgcacggagcggtgaggttctctaacaacccggctctgtgcaacgtcgagagtatccagtggcgtgacattgtgtctagtgacttcctatctaacatgtcaatggactttcagaaccatctgggctcatgccaaaaatgtgaccctagctgccctaacggaagttgttggggcgcaggagaggagaattgccaaaaattgaccaagatcatctgtgctcaacagtgcagtggccggtgccgggggaagtcccccagcgactgttgtcataaccagtgcgccgcggggtgcaccggaccacgggagtcggactgcctggtgtgccgaaagttccgcgacgaagccacttgcaaggacacttgcccacccttgatgctttacaacccgaccacataccagatggacgttaacccagaagggaagtacagcttcggagcaacatgtgtgaagaagtgtcctagaaattacgtggttactgaccacggttcatgcgtcagagcatgtggagcagactcatacgagatggaggaggacggagtgcgcaaatgcaaaaaatgtgagggtccatgtcggaaggtttgcaatgggattggcatcggggaattcaaggactcactgagcattaatgccactaacatcaaacactttaagaattgtacaagcatctctggtgacctgcacatactgcccgtggcattcaggggcgattcctttacacatacgccccccctcgaccctcaagagcttgacatcttaaagaccgtcaaggagataacgggattcctgctgattcaggcgtggccggagaaccgcactgacctccacgcctttgagaatttggagataatccgcggacgcaccaagcaacatggccaattcagtctagctgtggtgtcattaaatataacgagcctgggacttcgctctctgaaggagatcagcgatggtgatgttattatctccggtaataaaaatctctgctacgctaatactattaattggaaaaagttgttcggcacttccggtcagaagacaaagatcatttccaatagaggagaaaactcctgtaaggcaacaggacaggtctgtcacgccctgtgcagcccagaaggatgttgggggcccgagcctcgtgattgtgtgagctgtagaaatgtctccagggggagggagtgtgtcgacaagtgtaatctcttggaaggcgaacctcgagagtttgtagaaaacagcgagtgcattcagtgtcacccagagtgtctgcctcaagctatgaatattacttgcaccggtcggggaccagacaattgcatccaatgtgctcattatatcgacggccctcactgtgtcaaaacctgtcccgccggtgtgatgggcgagaacaatacactcgtttggaagtacgccgacgctggtcatgtgtgccacctctgccaccctaattgcacctacgggtgcacgggtcccggtctcgagggatgccctacaaacggcagctacatagtgagccacttcccccgatcattctataagatgagtgtgcactag

SEQ ID NO: 23979 - DNA, 3474 bp, synthetic construct
  misc_feature 1..3474: note = Description of Artificial Sequence: Synthetic coding sequence
  source 1..3474: mol_type = other DNA
atgttcaacaactgcgaggtggtgctgggcaacctggagatcacctacgttcagcgcaactacgatctgtccttcctgaagactatccaggaggtagccggctacgtcctgatcgccctcaacacagtggaaaggatcccattagaaaaccttcagatcattaggggcaatatgtattatgaaaactcctacgctcttgcagttctgtctaattacgatgccaataaaacaggcctgaaggagttgcccatgcgaaatctccaggagattctacacggcgcagtgaggttttctaataatcccgcactctgcaacgtcgagagcatccagtggcgcgatatcgtatcaagtgactttctctctaacatgagcatggatttccagaatcatctggggtcatgccagaagtgcgacccctcctgccccaatggaagctgttggggggccggcgaggagaattgccagaagttaacaaagatcatctgcgctcagcagtgctccggcaggtgccgggggaagtcaccaagtgactgttgccataatcagtgtgctgctggttgcaccggacccagagagtctgattgtctagtgtgcagaaagttcagggatgaagctacatgcaaggacacatgccccccccttatgctttacaaccctaccacatatcagatggatgtcaacccagaagggaaatattccttcggggccacgtgtgtcaaaaagtgtcccaggaattatgtggtgaccgaccacggatcttgcgttcgggcttgcggagcagactcctatgaaatggaagaggatggagttcggaaatgtaaaaagtgcgaaggtccgtgcagaaaggtgtgcaacgggattggcatcggggaattcaaagactcattgagcatcaatgcgacaaacattaagcacttcaagaactgcacaagtatctctggagatctgcacatccttcctgtcgcgttcagaggcgatagctttactcacactccgccactcgatccacaggaacttgacatattgaaaaccgtgaaggaaattactgggttcctgctgatccaggcatggcccgagaatcgaaccgatctgcatgcttttgaaaaccttgaaattattcgaggtcgtaccaagcagcacgggcagttttctctggcggtggtgtccttgaatattacaagcctcggattaagaagcctcaaggaaatcagcgacggggacgtcatcatctctggcaataaaaatctgtgttacgccaatacgatcaattggaagaagctctttggcacaagtggacagaagactaaaatcatttctaaccggggggaaaacagctgcaaagccaccggtcaggtttgtcacgctctttgctcacctgaaggctgctgggggcccgagccacgcgattgcgtctcttgccgcaacgttagccggggtagggagtgcgtggataaatgcaaccttctggaaggagaaccaagggaattcgtggagaattcagaatgcattcaatgccatcctgagtgcctccctcaggccatgaacatcacctgcacgggcaggggccctgacaattgcatccagtgcgcacactacattgacggaccgcactgtgtcaagacatgtcctgccggtgtgatgggtgagaataatacactggtgtggaagtacgctgatgccggtcatgtgtgccacctgtgccatcctaattgcacatatggctgtaccggcccaggtctggaggggtgccctactaatggtcccaagatcccaagcatcgctaccggaatggtcggggctctcttgctgctcctggttgttgcacttggaatcggactgtttatgagaagacggcacattgtgaggaagagaacactccgccgtttactgcaggaacgcgagctggtggagcccttgaccccttctggcgaggcccccaaccaggctctgctccggattttgaaggagaccgagttcaagaaaataaaagtcctcggtagcggggcttttggcaccgtgtataagggcctatggataccggaaggggagaaggttaagatacccgtggccatcaaagaactgagagaggccaccagcccaaaagccaataaagagattctggacgaggcttacgtgatggcctcagtggacaatccccacgtgtgtaggttgcttgggatatgtctcactagtacagtgcagttgatcactcaattgatgccattcggatgcctgctggattacgtgagggagcataaagacaacatcggtagccagtatctcctgaactggtgcgtgcagattgcaaagggaatgaactaccttgaggacagaaggctcgtgcacagagatcttgccgcgcgcaatgtgctggtgaaaaccccgcagcacgttaagatcacagatttcggactcgccaaactgctgggggctgaagaaaaagaataccatgcggagggtggaaaagtacccattaagtggatggcattagagtctatccttcatcgcatttacacccatcagtcagatgtctggtcgtacggcgttactgtgtgggaactcatgacttttgggtctaaaccttatgatggcatccccgcttccgaaatcagtagtatactggagaaaggagagagattgccacagccccctatctgcacgatcgatgtttatatgatcatggtcaagtgctggatgatagatgccgattcccggcccaaattccgagagctcatcatagaattctcaaagatggcccgagatccacagaggtatctggtcatccaaggcgatgagcgcatgcaccttccaagtcctaccgattctaacttttatagagcacttatggatgaggaggacatggatgacgtggtagacgccgacgaatacctgattcctcagcagggtttcttttcttccccctccacctcccgaactccactgcttagcagcctcagtgcaacctctaacaattctaccgtcgcatgtatcgaccggaatggcttgcaatcctgccctatcaaggaggattcctttctccaacgttactccagcgaccctacaggggctctgacagaggacagcatcgatgataccttcttgcctgtccctgaatatattaatcagtctgtgcctaaacggcccgcggggtcagtccagaaccccgtctatcacaaccagcccctcaatccagcgccttcccgggatccccactatcaagatcctcactccacggcagtggggaaccctgagtacttgaataccgtgcagccaacctgtgtcaatagcacttttgattcccccgcccactgggcacagaagggctcgcaccagatcagtctggacaatcccgactaccagcaggacttctttccgaaggaggccaagcccaatggcatattcaaaggtagcacagccgagaatgccgagtatctcagggtggctcctcagtcttccgaatttattggcgcttag

SEQ ID NO: 23980 - DNA, 3276 bp, synthetic construct
  misc_feature 1..3276: note = Description of Artificial Sequence: Synthetic coding sequence
  source 1..3276: mol_type = other DNA
atgcggcccagcggcaccgccggcgccgccctgctggccctgctggcagctttgtgccccgcaagcagagcgttggaggagaaaaaggtgtgccagggaactagtaacaaactgactcagctgggcactttcgaggatcactttctctccctgcaaaggatgtttaataactgtgaagtggtgttgggaaacctggagatcacctacgtgcaaagaaactatgatctgagctttctcaaaactatccaggaggtggccgggtacgtactgatcgcccttaataccgtcgaacgaattcccctcgagaatctacagataatcaggggcaatatgtattacgagaatagttacgctctggctgtgctctccaattatgacgcaaataaaactggtttaaaagagttaccaatgcggaacctccagggccagaaatgtgatccgtcttgcccaaatggtagttgctggggagcaggcgaggagaactgtcagaaacttacgaaaatcatttgtgcccaacagtgttcgggcagatgcaggggaaagagcccaagcgattgctgccacaaccagtgtgccgcaggatgcacgggtccaagagagagtgattgtctcgtgtgccgcaagtttcgtgatgaggctacctgtaaagacacatgcccaccacttatgctttataatccaacaacgtaccaaatggacgtgaacccggagggcaagtattctttcggcgctacatgtgtcaaaaagtgccccagaaactatgtagtaacagaccacgggtcatgcgtgcgtgcttgcggggcggactcatatgaaatggaggaagacggggtgcgcaagtgtaaaaagtgcgaaggtccctgccggaaggtgtgtaacggaatcggtatcggcgagtttaaagactctttgagcataaacgctaccaacattaagcattttaaaaattgtacctctatctcaggggatcttcatattctgccagttgccttcagaggagactcgttcacgcatacaccacctttggatccccaagagctggacattctgaaaacagtcaaagagattactggatttttgctgatacaggcctggcccgagaacagaacagatcttcatgcgtttgaaaacttagagattatacgcggaagaaccaagcagcatgggcagttcagtctggccgtcgtgtctctgaacattacgtctctgggcctccggtccctcaaggaaatcagtgacggggacgtcatcatttcaggtaataagaacctgtgctacgctaatactatcaactggaagaaattgttcggcacgtccggacagaagactaaaatcatcagcaaccgcggcgagaattcctgtaaggccactggtcaagtgtgtcacgctttatgttctcccgaaggatgctggggaccagagccaagggattgtgtgagctgcaggaatgtttctcgcggcagggaatgtgtcgacaagtgtaatctgctggagggcgaacctagggaattcgtagagaattccgagtgcattcagtgtcaccctgagtgtctccctcaggctatgaacataacgtgtaccgggcgaggacccgacaactgcattcagtgcgcacactacattgacggaccacactgcgtgaagacgtgtcccgctggggttatgggcgaaaacaatacgctggtatggaagtatgccgatgccggccacgtgtgccacctgtgtcacccaaattgcacgtatgggtgtactggtcctgggctggaaggatgtccaaccaatggccccaagatcccaagcatagcaacggggatggtgggagccctcttattactgctcgtcgtggctctcgggatcggtctttttatgcgccgcagacatatagtgcgaaagagaacattgcggaggctgctacaagagcgggagctagtcgaacctcttaccccctcaggtgaggcaccgaaccaggctctgctaagaattcttaaagagacagagtttaaaaaaataaaggtgctggggagcggtgcattcggaacagtttacaagggcctgtggattcccgagggtgaaaaggttaaaattcccgtcgcgatcaaggaactgcgcgaggcaacttctcctaaagccaataaagaaatcctcgacgaggcctacgtcatggcaagcgtggacaatccacatgtgtgtaggttgctgggtatatgcctaacctccaccgtccaactgattacacagcttatgcccttcggttgcttgctggattatgtgagagagcacaaggacaatattggtagccagtacctcctgaattggtgcgttcagatagccaaagggatgaattacctggaggaccggcgactggtgcatagagacctggcagcccgaaatgtactcgtaaagactccccagcatgtcaagattaccgacttcggattggccaaactgctgggggctgaggaaaaggagtatcatgctgaaggagggaaagttccaattaaatggatggccctggaatcgattctccacaggatctatacacatcagtcagatgtgtggtcctatggcgtgaccgtctgggaactcatgacattcggaagcaagccctacgacggcatcccagcttccgaaatctctagtatccttgagaagggagaaaggttgccacagccccccatctgtaccatcgatgtgtatatgatcatggtgaagtgttggatgattgatgcagattcccggcccaaattcagagaactaataattgagttttccaagatggcgagagatccacaaagatatctcgtaatccagggagacgagaggatgcaccttccctcaccaacggattcgaatttttatagagcactgatggacgaagaggatatggacgatgtcgtcgacgcggacgagtatttaatcccacaacaggggttcttctcctccccatcaaccagcagaaccccgctcctatccagcctgtccgccacatccaacaactctactgtagcatgcatcgacaggaacgggctgcaaagctgccctattaaagaagattcattcttgcagcggtacagctccgaccccacaggcgcactgaccgaagattctattgatgacacatttttaccggtcccaggagaatggttggtgtggaaacaaagctgcagctctacctccagcacacacagtgctgccgcatcgctccagtgtccatcccaggtcctgcctcctgcttctccagaaggggagacagtggcggacctgcaaactcagtag

SEQ ID NO: 23981 - DNA, 1395 bp, synthetic construct
  misc_feature 1..1395: note = Description of Artificial Sequence: Synthetic coding sequence
  source 1..1395: mol_type = other DNA
atgagcagcctgaccaagatcatctgcgcccagcagtgcagcggcagatgcagggggaagagccccagtgattgttgccacaatcaatgcgctgccggttgcactgggcctcgcgagagtgattgtctcgtctgtcgcaaattccgcgacgaagctacctgcaaagacacttgcccgcctctaatgttatataacccaacgacttaccaaatggacgtcaacccagaagggaaatacagcttcggggccacatgtgtgaagaagtgcccccggaactacgtggtgaccgaccacggatcatgtgtgagagcatgtggggcagactcttacgaaatggaggaggacggagttagaaagtgcaagaagtgcgagggaccttgcaggaaggtgtgtaacggcatcggcatcggcgagtttaaggactccttgtcaattaatgcaacgaatattaagcatttcaaaaactgcacttccatctcaggagacctgcacatcttgcctgttgccttccgaggcgacagtttcactcacacaccacctctggacccccaggagctcgatatccttaagacagtcaaagaaatcacaggtttccttttaatacaggcatggcctgaaaatcgcactgatttacacgcgttcgagaatttggagatcattcgcggccggacaaagcagcatggacagttcagtttagcagtggtgagcctcaacataacgagcttaggcctgcgtagcctgaaagaaatcagcgacggcgatgtaatcatttctgggaataaaaacctgtgttatgccaataccattaactggaaaaagttattcgggacgtccgggcagaaaacaaagattatatctaatcgtggcgaaaactcttgtaaagccactggacaggtgtgccacgcattgtgcagtcctgaaggttgttgggggcctgaaccaagggactgcgttagctgcaggaatgtatctcgaggcagagagtgcgttgataagtgcaatctgttggaaggtgaaccacgcgaatttgtagaaaacagcgagtgtattcagtgccacccagagtgtttgccgcaagccatgaacatcacatgtaccggccgagggcctgataattgcattcaatgtgcacactatattgatggtccacactgtgttaagacctgcccggccggggtcatgggtgaaaacaacacattagtatggaagtacgccgacgccgggcatgtgtgtcatctgtgtcacccaaactgcacgtacgggtgtacaggacccggactggagggctgcccaactaacggtccgaaaatcccctccattgctaccgggatggtgggggccctgctcctactcctggtcgtggcgctcgggatcgggctatttatgcgtaggtag

SEQ ID NO: 23982 - DNA, 843 bp, synthetic construct
  misc_feature 1..843: note = Description of Artificial Sequence: Synthetic coding sequence
  source 1..843: mol_type = other DNA
atgcccgccgacatcatggagaagaacagcagcagccccgtggccgctacccccgctagtgtgaacacaacacccgacaagcccaaaactgcatccgagcatcgtaagtcctcaaagcccataatggagaagagacgacgggcacgtataaacgagtcactctcccagctgaagacacttattctggatgcattgaaaaaggattccagtaggcatagcaagcttgaaaaggcagatatcctagaaatgaccgttaagcacctgagaaaccttcaacgtgcacaaatgacagctgccctctctacagatcctagcgtcctgggcaagtatagggcagggttcagcgagtgtatgaatgaggtgactcgtttcctgtccacatgtgagggtgtgaacacagaagtgaggactcgcctgctcggccacctggccaattgcatgactcagataaatgcgatgacctatcctgggcagccacaccccgctctgcaggccccccctcctccccctccaggacccggcgggccccaacatgcaccatttgcccctccccctcccctcgtccccattcccgggggcgcagctccacccccaggcggtgcaccatgcaagttgggctctcaggccggagaggcggccaaagttttcggtggatttcaggtcgttcccgcgccagacggccaatttgcttttttgattccgaatggcgcctttgcacactctggacccgtgattcccgtgtacactagcaacagcggaactagtgtaggacctaatgcagtcagcccttccagcggtccttccctaacagcggattcaatgtggcgtccctggaggaactag

SEQ ID NO: 23983 - DNA, 57 bp, synthetic construct
  misc_feature 1..57: note = Description of Artificial Sequence: Synthetic coding sequence
  source 1..57: mol_type = other DNA
atggccgagaacagcgtgctgaccagcaccaccggccggaccagcctggccgactag

SEQ ID NO: 23984 - DNA, 2745 bp, synthetic construct
  misc_feature 1..2745: note = Description of Artificial Sequence: Synthetic coding sequence
  source 1..2745: mol_type = other DNA
atggccgagaacagcgtgctgaccagcaccaccggccggaccagcttggccgactcctccatcttcgactccaaagtgacggagatttccaaagagaatctgcttatcggatccacaagttacgtcgaagaggaaatgcctcagatcgagacaagagtcattttggtgcaggaggctggcaagcaagaggaactcattaaagccctgaagactatcaagatcatggaagtgccagttatcaagatcaaggagagttgtcccgggaaaagcgacgagaagctgatcaagtctgttattaatatggacattaaggtaggcttcgtaaaaatggagtctgtggaagagttcgagggcctagattcccctgagttcgaaaatgtttttgtggtaaccgattttcaagatagtgtctttaacgacttatataaagctgactgcagagtcataggccctcctgtggtgctaaactgctcccaaaaaggcgaaccattaccctttagctgtaggccgttgtattgtaccagtatgatgaacctagtgttatgctttactggattccgaaaaaaggaggagctggtcagactcgttaccttggtgcaccatatgggcggcgtgattagaaaagacttcaattcaaaggtcacgcacttagtcgccaactgcacccaaggcgaaaaattcagagtcgccgtgagcctcggcacaccaattatgaaacccgagtggatatacaaggcctgggagcgccgcaatgaacaggatttttatgccgcagtcgacgatttccgcaacgagttcaaggtccccccattccaggactgtatattgagcttcctcggtttctccgacgaagagaagacaaacatggaagagatgacagagatgcaaggcgggaagtacctaccactgggagacgagagatgcacccacctggtcgtggaggagaatatagtgaaagatttgccttttgaaccgtcaaagaaactctatgtggtgaagcaggaatggttctggggtagcatccagatggacgccagagcaggggagacgatgtatctatacgagaaggccaacacacctgaactgaagaaatccgtatccatgctatcccttaatactccgaactctaatcgcaagcggcgccggctaaaagaaacactcgcgcagttgtcaagggagaccgacgtaagcccttttccaccccgcaaaagaccatccgcagaacattcactatcaattgggtcactcctggacattagtaatacccctgaatctagcattaactacggtgataccccaaaatcttgcacgaaatcgtccaagagctccactcctgtgcctagcaaacaatccgccaggtggcaggtggccaaagaactgtaccagacagaatcaaattacgtgaacattctggccaccataattcaactcttccaggtacctttagaggaggagggccagagaggaggccctattttggctcctgaagaaatcaagacaatatttggctcgattccggatattttcgacgtccatactaaaatcaaagacgatctggaagacctaatcgtgaattgggacgagagtaagtcgattggagatatctttctgaaatatagtaaagaccttgtgaaaacatatccacctttcgtgaattttttcgagatgtctaaggagaccataatcaagtgtgaaaagcagaagccacgctttcacgccttcctgaagatcaatcaagccaagccagagtgtggtcggcagtccttggtcgaattgctgattaggccagtccagcgcctgcctagtgtggcactgctgctcaatgatctgaagaaacacaccgcggatgagaacccggacaagtccacactggaaaaagccatcggcagcctcaaagaggtgatgacgcacattaatgaggataagcgaaagacagaagcacaaaagcagatcttcgatgtcgtctatgaggtggatggctgtccagctaatttgttgagtagtcataggagccttgttcagcgtgtggagactatttcactcggggaacatccctgtgataggggggaacaggtgacccttttcttattcaatgattgcttggagatcgctcgcaagcgccataaggtgattggcacttttaggtcccctcacggacagacccgtcctccagcctccctgaagcacatccacctgatgcctttgtcacagataaagaaagttctggacattcgcgagacggaggactgccataatgcctttgcccttctcgtgaggcctcctaccgagcaggctaatgtgcttctaagttttcagatgacatccgacgaacttcccaaagagaactggctgaaaatgctgtgtcggcacgtggctaacacaatctgtaaggccgatgccgaaaatctaatctacaccgcggacccggaaagctttgaggtgaatacgaaggatatggattccactctttccagggccagccgcgccatcaaaaagacatcaaagaaggtcacccgggcttttagcttctccaagactcccaagagagctctgcggagggctctgatgacgtctcatgggagcgttgaagggcgatcccccagctcaaatgacaagcacgtgatgtcgcgcctcagctccacttcatccttggcagggattccctcgcctagtctcgtctctctcccaagcttttttgagagaaggagccatactctgagtagatcaaccactcatctgatctag

SEQ ID NO: 23985 - DNA, 480 bp, synthetic construct
  misc_feature 1..480: note = Description of Artificial Sequence: Synthetic coding sequence
  source 1..480: mol_type = other DNA
atggccgagaacagcgtgctgaccagcaccaccggccggaccagcctggcggactcctccatttttgatagtaaagttactgaaataagtaaagagaacctgctgattgggtcaacctcctatgtcgaggaagagatgcctcagatcgagacccgggtcattttagttcaggaagcaggaaaacaggaagagctgatcaaggcattaaaggacatcaaagtcggcttcgttaaaatggaaagcgtagaagagtttgaaggattagactcgcccgagtttgagaacgttttcgtggtaacggacttccaggatagcgtttttaatgacctctacaaagcggactgcagagtgataggccctcccgtcgtgctgaattgcagtcaaaagggggagcccctaccttttagctgccggcccttgtactgtacctccatgatgaacctggtgctgtgcttcacagggtttagaaagaaagaatag

SEQ ID NO: 23986 - DNA, 2649 bp, synthetic construct
  misc_feature 1..2649: note = Description of Artificial Sequence: Synthetic coding sequence
  source 1..2649: mol_type = other DNA
atggccgagaacagcgtgctgaccagcaccaccggccggaccagcctcgcggatagcagcatctttgactccaaggtaaccgagatctcaaaggagaaccttctgataggcagtacaagttacgtggaagaaatgccacagatcgaaacaagggtaatcttagtgcaggaggcgggaaagcaggaggagctcattaaagctctgaaggatatcaaggtgggcttcgtcaaaatggaatctgtagaggaatttgaagggctggacagccctgagttcgagaatgtgttcgtggtgaccgatttccaggattctgtgttcaatgatctctacaaggctgactgccgggtgattggtcccccagtggtcctgaattgtagccagaaaggggagcctttacccttctcatgtagaccactgtattgcacaagtatgatgaacctggtactctgcttcacgggcttccgaaaaaaggaggagttagttaggcttgtaaccctcgtacaccacatgggcggagtgatccgaaaggactttaactccaaagtgacccacctggtggcgaactgcacccagggagagaaattccgagtggccgtgagcctcggtacccctattatgaaaccagagtggatatacaaggcgtgggaacggcgcaatgagcaagacttctacgcggcagtcgatgattttcgcaatgagtttaaagtaccgcccttccaggactgtatcctgtcatttcttggtttcagcgacgaggagaagaccaacatggaggaaatgaccgagatgcagggggggaagtatctccctttgggggacgagcgctgtacgcacttagtggtggaagaaaatattgtcaaagacctgcctttcgagccaagtaaaaagctatacgtcgtcaaacaagagtggttctgggggagcattcaaatggatgcccgggccggcgagacaatgtacctgtacgagaaggcgaacactccagagctgaagaagtctgtatcaatgctgagtctgaacacaccaaactccaataggaaacgccgccgactgaaggaaactctagcccagctgtcacgcgagaccgacgtaagccccttccctccgcgcaagcgcccatccgcagagcattctctctccattggttcactgctggacatctccaacacgccggaaagttctatcaattacggagatacaccgaaaagttgtaccaaatcaagtaagagcagtaccccagtccccagcaagcaatccgcgcgctggcaggtggccaaggaactgtaccagaccgagtctaactacgtcaatatcctcgccacgattatccagctattccaagttccgctagaagaggagggccagcgggggggccccatattggcccctgaggagatcaagaccattttcggctcaatccctgacatcttcgatgtgcacactaagattaaagacgaccttgaggatctcatcgtgaactgggacgagagtaagagcatcggcgacatattcttaaagtactcaaaggatctcgtcaagacatacccccctttcgtgaatttttttgaaatgtcaaaagagacgattattaagtgtgagaaacaaaagccgaggttccacgcgttcctgaaaattaaccaggccaagccagagtgcggacgccagtctctggtggaactattgattagacctgtgcaaagactgcccagcgtggccctattgctgaacgatttgaaaaaacacacagccgatgagaaccctgacaagagcaccttagaaaaagccataggctccttaaaggaagtgatgacccacataaatgaggataagcgcaagactgaagcccagaaacagatctttgatgttgtgtacgaggtcgatggctgtcctgcgaacctattgtcttcccacagaagcctggttcagagggtggagactatctccttgggggaacacccttgtgatcggggagaacaagtgaccctgtttctgttcaatgactgcttggagattgctcgtaagcgacacaaggtgataggaacctttcgcagccctcatggccagacacggccaccggctagtctaaagcatatccacctcatgccactgtctcagattaagaaagtcctggatattagagagactgaagactgtcataacgcattcgccctgttagttcgtcctcccactgagcaagccaatgtcttactgtcgtttcagatgacttcagatgaactgccaaaggagaattggctgaagatgctttgcaggcatgtcgcaaataccatttgcaaggcggacgccgaaaacctgatttatactgctgatccagagtctttcgaggtcaatactaaagacatggacagtacactgagtagagcaagccgcgctattaagaagacctcaaagaaagtaactcgggctttttccttttcgaagacccctaagagagcccttcggcgggccctcatgacctcacacgggtctgtcgaggggagaagcccttcctccaatgataagcacgtgatgagtcggctgagttccacatcatctctggcaggcatccctagcccgagcctggtgagcctgccgagcttcttcgagcggagatcacacactctgtctaggagcaccactcacctcatttag

SEQ ID NO: 23987 - DNA, 321 bp, synthetic construct
  misc_feature 1..321: note = Description of Artificial Sequence: Synthetic coding sequence
  source 1..321: mol_type = other DNA
atggccgagaacagcgtgctgaccagcaccaccggccggaccagcttggcagattcgagtattttcgattctaaagtaacagagataagcaaggaaaacctcttgattggaagtacaagttatgtggaagaggagatgccacagatcgaaacccgggtgattcttgtacaggaagccgggaaacaagaggaacttatcaaggcccttaaagacatcaaggtaggtttcgtcaagatggagagcgttgaagagttcgaggggctcgatagccctgaatttgagaacgtattcgtggttaccgactttcaggacagtgtatag

SEQ ID NO: 23988 - DNA, 2784 bp, synthetic construct
  misc_feature 1..2784: note = Description of Artificial Sequence: Synthetic coding sequence
  source 1..2784: mol_type = other DNA
atggccgagaacagcgtgctgaccagcaccaccggccggaccagcctggccgactccagcatttttgactctaaagtcaccgaaatctccaaagaaaatctcttgatcggcagtacgtcatatgtggaagaggagatgccccaaatcgaaacccgagtcatcctcgtccaggaagcagggaagcaagaggagttgattaaagccctgaaggatattaaagttggattcgtgaaaatggaatctgtggaagagttcgagggactggattcccctgaattcgaaaatgtgttcgtggtgacagacttccaagactctgttttcaacgatctgtacaaggccgattgcagagtgatcggtcccccagtcgttcttaactgcagccagaaaggcgagcccttgccattttcctgcagaccattgtattgtacgtccatgatgaatctggtcctgtgtttcactggttttcggaagaaagaggaacttgtgcgactggtcacactggtgcatcacatgggcggcgtaatacggaaagatttcaactctaaggtcacccatctggtcgcgaactgcacccagggcgaaaagttcagagtggcagtgtctctggggacccccatcatgaaacctgagtggatttataaagcttgggagaggcggaatgaacaggacttctacgccgccgtcgacgacttccgaaatgagtttaaagtgcctccatttcaggactgtattctcagtttcctcggcttcagcgatgaagaaaaaaccaatatggaggaaatgaccgagatgcagggaggaaaatatctgcccctcggcgacgaaagatgtacacacctcgtggttgaggaaaacattgtaaaggatcttccgttcgagcccagtaagaagctttacgttgtgaaacaggagtggttctggggatctattcaaatggatgctcgcgctggcgagacaatgtatctctacgagaaggccaacacacctgagctgaagaagtcagtgtccatgctcagcctgaatacacctaattccaatagaaagcgacgcaggcttaaggaaaccttggcccagctcagccgcgaaacagacgtctcgcccttcccaccaagaaaacgcccttcggcagagcatagcctgtctatcggatcactcctggacatcagcaacactcccgagtctagtattaactacggcgacacccctaaaagttgcacgaagagttcaaagagcagtactccagtcccttctaagcagagcgctcggtggcaagtcgccaaggaactgtatcagacagagtccaattatgtaaacatcctggcgaccattatccagttgttccaagtgccccttgaggaagaaggccagagaggcggaccaatcttggctccagaggagattaagactatctttgggagcataccagacatttttgatgtccacaccaagatcaaggacgacctggaggacctgattgtgaattgggacgaatccaaaagtatcggagacattttcctcaagtattctaaagacctggtgaaaacgtaccccccatttgtcaacttttttgaaatgtctaaggaaaccattatcaaatgcgagaaacaaaagcccagattccatgccttcctgaaaattaatcaggccaagccggaatgcggacgccagtctctggtggagctcctgatcaggcccgtgcagcgtctgccttctgtagccctgttgttgaatgatctgaagaagcacaccgcggatgaaaaccccgacaagtctaccctggagaaagctattggaagtttaaaagaggtcatgacacatatcaatgaggataaaagaaagactgaggctcaaaagcaaatattcgacgttgtctacgaagtcgacggttgtccagcgaaccttctaagcagtcatcgatcattggtccagcgggtggagacaatctctttaggcgagcatccctgtgaccgcggggagcaggttactctgttcctgttcaatgattgccttgagatcgctaggaagaggcataaggtaataggcacattcaggtcccctcatggccagactaggccgccagcctccctgaagcacatccacttaatgcctctgtcacagatcaaaaaagtgctagacattagggaaacagaggactgtcataatgcttttgccctcctggtcaggccccccacggaacaggccaatgtgctactgtcattccagatgacctcagatgagctccctaaggagaactggctcaaaatgctatgtagacatgtggcaaacacaatctgcaaagcggatgctgaaaatctgatttatactgctgacccggagtcctttgaggtgaacactaaggacatggatagcactctgtcaagggcctcccgcgccattaagaaaacatcaaagaaggtgaccagagccttttcgtttagcaaaactcccaagcgcgccctgcggagggccctgatgacctcccatggcagcgttgaaggccgcagcccctccagtaacgataagcatgtgatgtctaggctctcgagcacttcttctctcgccattacccattccgtgtcaacctcaaatgtgattggcttcacaaaacatgtttacgtgcagagactgaattccactggcggacggagtcagtattcctggttccagtccgtgcggcacagcgctttccgcgcatcgttctctgaaatcttggagggcaatactgattttagcaacttcaagaaagttttgtccaagtcgagcttgacctttgttaagaactag

SEQ ID NO: 23989 - DNA, 2652 bp, synthetic construct
  misc_feature 1..2652: note = Description of Artificial Sequence: Synthetic coding sequence
  source 1..2652: mol_type = other DNA
atggccgagaacagcgtgctgaccagcaccaccggccggaccagccttgcggactcctcaatcttcgacagcaaagtaactgagattagtaaagaaaacttacttatcggaagtacgtcctacgtggaagaagagatgcctcagattgagacgagagtgattctggtccaagaagcaggcaagcaggaggaactgatcaaggccctgaaagacatcaaggtgggatttgtgaagatggagtcagtcgaggagttcgaaggtcttgactcacctgagtttgagaacgtgtttgtcgtaactgatttccaagattccgtgttcaacgacctgtataaagcggattgccgggtaatcggaccaccggtggtgttaaactgctcccagaagggtgaacctcttccattttcatgtcggcccctgtactgcacctctatgatgaatctagtgctatgcttcactgggttccgtaagaaggaggaactggtccgtctggtcacactcgtgcatcacatgggtggggtcattcggaaggattttaatagcaaagtcacacacttggttgcaaattgcacccaaggagaaaaatttagagtagccgtctccctcggtaccccgattatgaagccagaatggatctacaaggcatgggaaagaagaaatgaacaagatttctacgctgcagtcgacgacttccgaaacgagttcaaggtgcccccattccaggactgcatactctctttcctcggcttttcagatgaagaaaagaccaatatggaggagatgacagagatgcagggcggaaagtaccttcccctcggagacgagcgatgcacccacctggtggtggaggaaaacatagtcaaagacctgccctttgagcctagcaagaagctgtacgtggttaagcaagagtggttttggggtagtattcagatggatgcccgagccggggaaaccatgtacctgtacgagaaagccaacacccctgagctcaaaaagtcagtcagcatgctgtcgctgaacacccctaattccaataggaagagaagacgcctgaaagagactctagcccagctgtcgcgagagactgacgttagcccgttccctccaaggaagcggcccagcgccgaacactcattatctataggaagtttgttggacatttctaacacacctgagtcctccatcaactacggagacacaccaaaatcctgtacgaagagctccaagagcagtacccctgtcccctccaaacagtctgccaggtggcaggtggcaaaggagttatatcaaaccgagtccaattacgtcaacatcctggcaaccatcatccaattattccaggtgcccctggaggaggagggtcagcgcgggggccccattttagcacccgaggaaattaagaccattttcggaagcatcccagatatcttcgatgttcacactaaaatcaaggatgacctggaggatctgattgttaactgggatgaatctaagtcaattggtgatattttcctgaagtacagcaaggatctcgtaaagacgtatccccctttcgtgaattttttcgagatgtccaaagaaacgattataaagtgtgagaaacagaaacctcggtttcatgcattcctgaagatcaaccaggcaaagcccgagtgtggcaggcagagcctcgtcgagctccttatccggccggtgcagcgtctgcccagcgtcgccctgttactgaacgatctcaaaaagcacacagccgatgagaatcccgataaatctacattggagaaggcaatcggcagtctcaaagaggttatgactcacataaacgaagacaaacgcaagaccgaagcacagaagcaaatcttcgacgtcgtgtacgaggtggatggatgtcctgctaatctgttgtcaagccacaggagtttggtgcaacgagtggaaactatctcccttggtgaacacccctgtgatcggggcgaacaagtaacactattcctgttcaacgattgtctcgagatagcgcggaaacggcacaaggtgatcgggacttttagatcacctcatgggcagacgagacccccagcaagtctcaaacacatacacctgatgccactgtcacaaatcaaaaaagtactagacattagagaaacagaggactgtcacaatgcctttgccctcttggtgcgtccccctacagaacaagctaatgtactactgtcctttcagatgacttctgatgaacttccgaaggaaaattggctcaaaatgttatgtcgacacgttgccaacactatatgcaaggcggacgcggaaaatctgatatacacagccgaccccgagagcttcgaagtcaacacgaaggatatggactcgaccctgtcaagggcgtctcgcgctatcaagaagacatctaagaaggtcaccagggcgttctctttcagcaagactcccaaaagagcattgcgcagggccctgatgacctctcatggttcggtagaagggcgatcccccagctccaatgacaaacatgtgatgtcgaggttgtcaagtacaagcagcttggccgggattccttccccctctctggtgtctctcccaagcttcttcgaacggagatcacacaccctgtcacgtagcaccacccacctgatctag

SEQ ID NO: 23990 - DNA, 2745 bp, synthetic construct
  misc_feature 1..2745: note = Description of Artificial Sequence: Synthetic coding sequence
  source 1..2745: mol_type = other DNA
atggccgagaacagcgtgctgaccagcaccaccggccggaccagcctggcagactcaagcatctttgattccaaggttaccgagatttcgaaagaaaatctgctgatcggtagcacatcttatgtggaagaggagatgcctcaaatcgaaactcgggttattctggtgcaagaagcgggcaagcaagaagagctgataaaggctcttaagacaattaaaattatggaagttccggtgattaagatcaaggagtcatgtcccggtaagtcagatgagaagctgataaaatccgtgatcaacatggacatcaaggtcgggtttgtgaaaatggagtcggtggaggaatttgagggactggattccccggagtttgagaatgtgttcgtcgttaccgactttcaggactccgtgtttaatgacctttacaaagcagattgccgggtgattgggccacctgtcgtcctcaactgctcacagaaaggagaacccctgccattcagctgcaggccactttattgcaccagtatgatgaatctggtgctgtgttttacgggcttcagaaaaaaggaggaactagtgcggcttgtgacactggtgcaccatatgggcggcgtcatcagaaaggacttcaactcaaaagtaacccatctggtagccaactgtactcagggtgaaaagttccgcgtcgctgtttcccttggcacacccattatgaagcctgaatggatatataaagcctgggagagacggaatgaacaggacttttacgcagccgtggacgatttcaggaacgaatttaaggtgccacccttccaggattgtatactctcattcctgggcttctcagatgaggagaaaaccaacatggaagaaatgaccgaaatgcagggaggcaagtacttgcctctgggagatgagcggtgcactcatttggttgtggaagaaaatatagtgaaggatcttcccttcgagccttctaaaaaattgtacgtagtcaaacaggagtggttctggggaagcatccagatggatgctagggccggggagaccatgtacctgtacgaaaaggctaacacccccgaattaaaaaagtccgtgtcaatgctgtccctgaacacacctaattcaaatcgtaaacgcagacgactgaaagagacactggcccagctgtcaagagaaaccgatgtcagcccctttccccctagaaagcgaccttccgccgaacactccctgtccatcgggtctttgctggatattagcaacaccccggagagttctattaactacggcgatacacctaagtcctgtacaaaatcctcaaagtcgtccacccctgtgccgagtaagcagtccgctcggtggcaggtggcaaaggagctgtatcagaccgaatccaattacgtcaacatcctggcaactataatacaactgtttcaggtaccactggaagaggagggtcagagaggcggccccatcctagctccagaggaaatcaagacaatatttgggtctatcccagatatcttcgatgtgcatacaaagataaaagatgatctagaggatctgatagtcaactgggacgagtccaaatccatcggtgacatattcttaaaatatagtaaagatctcgttaaaacgtacccaccctttgttaattttttcgagatgtctaaagagaccatcataaagtgcgagaagcagaagcctagatttcatgcttttctcaagatcaatcaggctaaaccagaatgcggaaggcagtcgctggtcgagctgctaattcggcccgtgcagcggcttccttctgttgccctgttgctgaatgatctcaaaaagcacactgctgacgagaacccagacaagagtacgctggaaaaggccattggcagtctcaaagaggtgatgacgcatataaatgaagataaacgcaagactgaggcccagaaacagattttcgacgttgtttacgaggtggatggatgcccagccaatctgctgagttcacacagaagcttagtccagagggttgaaacaatctcactaggcgaacatccttgcgaccgaggtgagcaagttactctgtttctgtttaacgactgtctcgaaatagcgcggaaacgccataaggtgatcggaaccttccgttcccctcacggccaaaccagaccaccagcgtctctcaaacacatacatctcatgcccctgagccagataaagaaagtgctcgacatacgggaaaccgaagactgtcacaatgcattcgctttactggtgagacctcctactgaacaggcaaatgttctccttagcttccaaatgacatcggacgaattaccgaaagagaactggctaaagatgttatgtagacatgtcgcaaatactatatgtaaagctgacgcagaaaatctgatctacacggctgatcctgaaagcttcgaagtgaacaccaaagacatggattcaaccctctctcgagctagccgggccatcaaaaagacgtccaagaaagtgactcgtgccttctccttcagtaaaactcccaaaagggccctgcgcagagcactcatgacttctcatggatccgtggaaggccgaagtccctcttcaaacgataagcatgttatgagcagactttcctctaccagttctctggcaggaattccaagcccatcactggtgtctctgcctagcttttttgaacggcggtcgcacacactgtccagaagcactacacacctgatttag

SEQ ID NO: 23991 - DNA, 1389 bp, synthetic construct
  misc_feature 1..1389: note = Description of Artificial Sequence: Synthetic coding sequence
  source 1..1389: mol_type = other DNA
atgagcatcgccggcgtggccgcccaggagatccgggtgcccctgaaaacggggtttttgcataacggcagagctatgggaaacatgaggaaaacctactggtcatctcggtcagagttcaaaaacaatttcttgaacattgatcccatcacgatggcctacagcttgaacagctccgctcaagagcgtctgatcccattgggccacgcatcgaagtccgctccgatgaacggacattgtttcgcagaaaatggaccctctcagaagtcctctctaccgccccttttgataccccctagcgaaaacttggggccacacgaggaggatcaggtagtgtgcggattcaaaaagctcaccgtgaacggagtttgtgcgtcaaccccgccgctgacccccataaagaattcacccagtctgttcccctgtgctcctttgtgcgaacgaggcagcagacctttgcccccactgcccatctccgaagcattgtcgctggacgacaccgactgcgaggtggagtttctcacatccagtgataccgactttcttcttgaagatagtaccttatcagactttaaatatgacgtgccggggcggcgcagctttaggggatgcggccagatcaattatgcctattttgatacccccgccgtgagtgctgcggacctttcctatgtctccgaccagaacggaggagtgcctgatccaaacccaccaccaccccaaactcaccgtaggctccgccgctcccattctggccctgcaggcagtttcaataaaccggctattcgtataagcaactgctgtatccaccgcgcttcgcctaattcagatgaggacaaacctgaagtgccccctagagtaccaatccctcctcggcccgtgaaaccagactaccgtagatggtcagctgaggtcactagttctacatacagtgacgaggaccgccccccaaaggtgcctcctagagaacctctctcccctagcaactctcgcacccctagccctaaatcccttccctcatatttgaatggggtaatgcctcctactcagtcttttgcaccagatccaaagtacgtgtcctccaaggccctgcagagacaaaactcggagggttctgcttctaaggtaccttgcatcctgccaataatcgagaacggcaagaaggtctcatcaacccattactacctcctgccagagcggccaccctatctggataagtatgagaagttctttagagaggccgaggaaacaaatgggggcgcgcaaatacagcctctccccgctgattgcggaatctcctctgcaacagaaaaacccgactccaaaaccaagatggacttggggggccacgtaaagcgcaaacatctcagctacgtggtcagcccatag

SEQ ID NO: 23992 - DNA, 1713 bp, synthetic construct
  misc_feature 1..1713: note = Description of Artificial Sequence: Synthetic coding sequence
  source 1..1713: mol_type = other DNA
atggccctgaagaagagcagccccagcctggacagcggcgacagcgatagcgaggagctgccgactttcgccttcttgaaaaaggaaccaagtagcacaaaacgaagacagcctgaacgagaagagaagatagtcgttgtggatattagtgactgtgaggcttcctgtcctcccgcacctgagttgttctctcccccagttccagaaattgccgagactgtgactcagacccagcccgtgcgccttcttagctccgaatctgaagacgaggaggaatttatcccactcgcacaacgcctgacctgtaagtttctcacccacaagcaactgtcaccggaggatagctctagtcccgtgaaaagtgtgttggaccatcagaacaatgagggcgccagctgcgattggaaaaagccctttccaaagatccccgaagtccccctccacgatacccccgagagatctgccgcagacaacaaggacctgatcctcgacccttgttgccagctgccggcctacttgtcaacctgtcccggccagagctccagcctggcggtgaccaaaactaatagcgatatcttgcccccacagaaaaagaccaagccatcacagaaagtgcaggggagaggatcccacgggtgccgacagcaacggcaggccagacagaaagaaagtacactccgaaggcaggaaaggaagaacgctgcactggtgacacgaatgaaagctcagcgtccagaggagtgcttaaagcacataatcgtggtcctggatcccgtgttgctgcagatggagggtggggggcagttactgggtgcacttcagacgatggagtgcagatgcgttatcgaggcccaggctgtcccctgcagtgttacttggcgacgccgtgcgggaccaagtgaagatcgagaagattgggttgaagagccaaccgtgttggtgttgctaagggctgaggcattcgtaagtatgattgacaacgggaaacagggttcactggacagcaccatgaaaggcaaggagaccctccaggggttcgtcaccgatattaccgcaaaaacggccggtaaagctcttagtctggtcattgttgaccaagagaaatgtttttcagcccagaatccccccagacgaggcaagcagggtgccaataaacagactaaaaaacagcaacaacgccaacccgaggccagcatcgggagcatggtgagcagggtagatgcagaggaggctctcgtagatctgcagctgcacacggaagctcaggcccaaatagtgcagtcttggaaggagcttgccgactttacttgcgcatttacaaaagcagtggcagaggcaccctttaaaaaactccgcgacgagaccaccttcagcttttgccttgagtccgactgggccggaggagtgaaggtcgatctagcaggacgcggtctggctctggtctggcggaggcaaatccagcagttaaacagagtgagccttgaaatggcttctgcagtggtgaacgcctatccctctcctcagctactggtgcaggcttatcagcagtgctttagcgataaggagcgccagaatctgttagccgatatccaggtcagaaggggagagggcgtcactagcacgtcccgccgcattggccccgagctgagcagacgcatctacctgcagatgaccactttgcagccccatctgtctctggacagcgccgactag

SEQ ID NO: 23993 - DNA, 1752 bp, synthetic construct
  misc_feature 1..1752: note = Description of Artificial Sequence: Synthetic coding sequence
  source 1..1752: mol_type = other DNA
atggccctgaagaagagcagccccagcctggacagcggcgacagcgactccgaggagttgcctacatttgcattcttgaagaaagaaccctcctcaacgaagcggcgccaacctgagcgcgaagagaaaatcgtggtcgtggacatctcagactgcgaggcatcctgccctcccgcgccagaacttttttctcctcccgtgcctgagatcgcagaaacggtcacccaaacacaaccagttcgactgttgtcttcagagtcagaagacgaggaggagttcattccgctggctcaacggctcacctgcaaattcctgacacataaacagctatctccggaagactcaagctctcccgtgaagagtgttttagaccatcagaacaacgaaggagcatcttgtgactggaaaaaacccttccccaaaatccctgaggtgccacttcatgatacaccagagcgatcagccgccgataacaaggatctgatactcgatccttgttgccagctgccagcttatcttagtacttgtcccggacaatctagcagcctggcagtaacgaaaaccaatagcgacatcctgccacctcaaaagaagaccaaaccttcacagaaggttcagggaagagggtctcatgggtgtaggcagcaaagacaagctcgccaaaaagagagtaccctcaggcggcaggagcgaaagaacgccgcactagtaaccaggatgaaagcccagcggcctgaggaatgtctcaagcacatcattgttgttctggatcctgtcctactgcaaatggagggcggagggcagctcttgggagccctccagaccatggagtgtcggtgcgtaattgaggcccaggccgtgccttgctctgtcacctggaggaggagggctggtccctcagaggacagagaagattgggtggaggagcccacagtgctcgttctgctacgagccgaagccttcgtaagtatgattgataacggcaaacagggttccctggattctactatgaagggtaaagaaactcttcagggcttcgtgaccgatatcacagctaaaactgccgggaaggccctctccttagtaattgtcgatcaggagaagtgcttctcactcgagttgcttttcttcgattttcttccctgtacttcggctcagaaccctcccagacgcgggaagcagggggcaaataaacagactaaaaagcagcagcagaggcagcctgaggcctcaatcggctccatggtctccagggtggacgctgaagaggcattggtggatctccaactacatacagaggcacaagcccaaattgtgcagtcttggaaggagctagccgatttcacctgcgcttttacaaaggctgttgctgaggcccctttcaaaaagctccgagatgaaaccacgttttctttttgtcttgagagcgattgggctgggggtgttaaggtggaccttgccgggagaggcctggccctagtctggagaaggcagattcagcagctcaatcgggtcagcttagagatggcatccgcggtcgtgaacgcctaccccagcccacagctgctggtgcaagcctatcagcagtgtttctccgacaaagagagacaaaatcttttagccgatatacaggtgcgcagaggggagggcgtaaccagcaccagcaggcggattggaccagaattatcgaggagaatctacttgcaaatgaccactctgcaacctcacctcagcctagactctgccgactag

SEQ ID NO: 23994 - DNA, 1752 bp, synthetic construct
  misc_feature 1..1752: note = Description of Artificial Sequence: Synthetic coding sequence
  source 1..1752: mol_type = other DNA
atggccctgaagaagagcagccccagcctggacagcggcgacagcgactccgaagagcttccaacattcgccttcctcaagaaggagccgtctagtactaaacgacgccagccagagcgagaggagaaaatcgtagttgtggacatttccgattgtgaagccagctgcccaccagcccctgagctgttcagtcccccagtgcctgagattgctgaaactgttactcagacacagcccgttaggctcttgagctctgagtccgaagacgaagaagaatttatacctctcgcccagagattgacctgcaagtttctgactcataaacagctgtcgcccgaagacagctcatctccagtgaagtctgtgctggaccatcagaacaatgaaggggcctcctgtgactggaagaagcccttcccaaaaattcccgaggtgcctctgcacgatactccggaaaggagtgccgctgacaataaagacctgatccttgatccatgttgccagctgcccgcatatttgtctacgtgtccaggccagtcctcaagcctagctgtgacaaaaaccaatagcgatatcctgcctccccagaaaaaaactaaaccatctcagaaggtgcagggacggggcagtcatgggtgtaggcagcagcgccaggccagacagaaggagtctaccttgaggaggcaggaacgcaagaacgcggctctggtcacgcggatgaaagctcaacgtccagaggagtgtttaaagcacataatcgtggtgctcgatcccgttctgcttcagatggaggggggagggcagttactaggtgccctccagaccatggagtgtcggtgtgtcatcgaagctcaggcagttccttgctctgtaacatggaggcgtcgagctggaccatctgaagaccgcgaggactgggtggaggagcccactgtcttagttctgctgcgcgcagaggcatttgtgagtatgattgataatgggaagcaaggcagtctggactccactatgaaaggtaaggagacactccaagggtttgttacagacattaccgctaaaaccgccggtaaggccctgtccctggtgattgtcgaccaggagaaatgtttttccctcgagctcctattttttgattttctcccttgtacttccgcccaaaatcccccccggagaggcaagcagggcgctaataagcaaactaagaagcagcagcagcggcagcctgaggcctccatcggctccatggtcagccgcgtcgatgccgaagaggctctggtggacctgcagcttcacaccgaggcccaggcccagattgtgcagtcttggaaagagttggccgatttcacgtgcgcttttactaaagccgttgccgaagccccttttaaaaaactgcgggacgaaactacattttccttttgcctggagtctgactgggcgggaggagttaaggtggacctcgcggggcgtggcctggccctcgtatggcggagacaaatccagcagctcaacagagtgtcactcgaaatggcttctgcagtagttaacgcatatccctcgccacagctgctggtacaggcttaccagcaatgcttctcagacaaggaacgccagaatttactggctgatatccaggtcaggcgaggcgagggcgtgacctccacatctcggcggatcggcccagagctatctcggcgaatctacctgcagatgactactttgcagccccatctgtccttggatagcgctgattag

SEQ ID NO: 23995 - DNA, 684 bp, synthetic construct
  misc_feature 1..684: note = Description of Artificial Sequence: Synthetic coding sequence
  source 1..684: mol_type = other DNA
atggccgacctgctgggcagcatcctgagcagcatggagaagcccccttcgttgggggatcaggagacacgcagaaaggcgcgcgagcaagcagctcggcttaagaagctgcaggaacaagaaaaacagcagaaagttgagttccgcaaaagaatggagaaggaagtgagcgatttcatccaggactccggccaaatcaaaaaaaaattccagcccatgaataaaatagagagatcaattttacacgacgtggtcgaggttgccggtcttaccagctttagttttggagaggacgatgattgtcggtacgtgatgatatttaaaaaggagttcgcaccaagcgacgaggagctcgactcctacagacggggcgaagagtgggacccgcagaaggcagaggagaagcgcaaactgaaggagttggcccagcgtcaggaagaggaggcagcccagcagggccccgtcgtagtgtcccccgcttcggactataaggacaaatattctcacttgatcgggaaaggagctgctaaggacgctgcccatatgctgcaggcaaacaaaacgtacggctgcgtaccagtcgctaataagagggataccaggtccatagaggaggccatgaatgaaatccgagcaaaaaagcgcctgcgacagtcaggggaggagctgcctcccacctcatag

SEQ ID NO: 23996 - DNA, 1788 bp, synthetic construct
  misc_feature 1..1788: note = Description of Artificial Sequence: Synthetic coding sequence
  source 1..1788: mol_type = other DNA
atgaccatgaccctgcacaccaaggccagcggcatggccctgctgcaccagatccagggcaatgagcttgagccactgaacagaccccagctgaagatcccactggaacgccccctcggagaggtgtacttagacagttcaaaaccagctgtgtacaattacccggaaggggcggcatacgaatttaacgcagccgcagccgcaaacgcccaagtctacggccaaactgggttaccatatggaccaggctccgaggccgctgccttcggctcaaacggcctggggggattccctcctctcaattcggtctctcctagcccgctgatgttgctgcaccctcctccacagctcagccccttcttgcaaccgcacggacaacaggtgccctactatctagagaatgagccctccggctacaccgtgcgggaggccggcccccccgctttttacagacccaacagcgacaaccggcgacagggaggcagggagagattggcctcaactaatgacaaggggagcatggccatggaatccgctaaggaaacaagatattgcgcagtgtgtaatgattacgcttcgggctatcactatggcgtatggtcctgcgaaggatgcaaagccttcttcaaaaggagtattcagggccacaacgattacatgtgccccgctacgaatcaatgcactatcgataaaaaccggcggaaaagttgccaggcctgtaggctccggaaatgttacgaagtagggatgatgaaggggggcatcaggaaggacaggagaggtggaagaatgctgaagcacaaaaggcagagggacgatggggagggccgcggcgaggtggggagtgcgggcgacatgcgggcggctaacctgtggcctagccctttgatgatcaaacgttcaaagaagaattccctcgctctctccctcacagctgaccagatggtctcggctcttctggacgccgaaccccctatcctttacagcgaatatgaccccaccaggccattctccgaggcgtccatgatgggactgcttactaacttggctgaccgggagctggtgcatatgatcaactgggctaagagagtccccgggttcgttgacctcacactgcacgatcaagtacatctgctggaatgcgcatggctggaaattttaatgatagggttagtgtggcggtctatggagcatcccggcaagcttctgttcgcacctaatctcttgctggatcgaaatcaaggaaagtgcgtggaggggatggtcgagatttttgatatgctgctggcgacctctagtaggttcaggatgatgaatcttcagggcgaagaatttgtatgtctcaagtctatcattcttctgaacagcggggtgtatacattcctgtcttccactttgaagtctctcgaagagaaagaccatattcacagggtgctagacaagatcacggacacattgatacatctcatggccaaggctggtctgacccttcagcagcagcatcagcggttagctcaattactgctgattttgagccacatcaggcatatgtccaataaaggaatggaacacttatattcaatgaagtgtaagaatgtagtacctttgtacgaccttctgctcgaaatgctggacgctcatagactgcatgcccccacgtctcgaggcggggcttccgtcgaagagaccgaccagtcacatctcgccacagccgggtctacgtcctctcattcgttacagaagtattacattacgggggaagccgagggctttcccgcgacggtttag

SEQ ID NO: 23997 - DNA, 549 bp, synthetic construct
  misc_feature 1..549: note = Description of Artificial Sequence: Synthetic coding sequence
  source 1..549: mol_type = other DNA
atggagagcgccaaggagacccggtactgcgccgtgtgcaacgactacgcttctggataccactacggtgtctggagttgtgaaggatgcaaggccttcttcaagaggtcaattcaaggacataacgactatatgtgccctgccactaatcagtgtacaatcgacaaaaatcggagaaaatcttgccaagcgtgtcgcttaagaaaatgctacgaagtgggaatgatgaaaggaggtattcgcaaggatagacggggggggaggatgttaaagcataaactgctgttgatcctgtcgcacatccggcacatgtccaataaaggtatggagcacctctacagcatgaagtgcaaaaacgtggtccctctctacgacctgctcctcgagatgcttgacgcccacaggttgcacgcccctacatcccgcgggggcgcctctgtggaagagacggatcaatcccatcttgcaaccgcaggttcaacaagcagccattctcttcagaagtactacataactggagaggcggaggggttcccggcaaccgtgtag

SEQ ID NO: 23998 - DNA, 255 bp, synthetic construct
  misc_feature 1..255: note = Description of Artificial Sequence: Synthetic coding sequence
  source 1..255: mol_type = other DNA
atgaccatgaccctgcacaccaaggccagcggcatggccctgctgcatcagattcaaggaaatgagttagagccactgaaccggcctcagctgaagataccgctggagcgccccctgggggaagtttatctggatagctctaagccagccgtttacaattatccagaaggagccgcctacgagttcaatgctgctgcagcagccaacgcccaagtgtatggacagacaggcctgccttacggccccggctcctag

SEQ ID NO: 23999 - DNA, 1005 bp, synthetic construct
  misc_feature 1..1005: note = Description of Artificial Sequence: Synthetic coding sequence
  source 1..1005: mol_type = other DNA
atgaccatgaccctgcacaccaaggccagcggcatggccctgctgcatcagatccaggggaatgagctagagccccttaatcggccccagctgaaaatacctctcgaaaggccactgggcgaggtgtacctggattcatcaaagcccgccgtgtacaattaccctgaaggagcagcgtatgaatttaacgctgccgcagccgccaatgcccaagtgtatggccaaaccgggttgccttacgggcccggatccgaagcagctgcctttggctcaaacggtctcggtggctttcctccattaaacagcgtctctccaagtccattgatgcttctccacccgcctccccaactcagtccatttctgcaaccccacggccagcaggtgccatattatctggaaaacgagccctcgggctacaccgtccgcgaggcaggacccccggcattctacagaaatcaaggcaaatgcgtggagggaatggtggagatcttcgatatgctgctggctacttcaagcaggtttcggatgatgaacctccagggcgaggagttcgtctgtctaaagtctatcatcctactcaactcgggagtgtataccttcctttcaagtacgcttaagtcacttgaagaaaaggaccatatccaccgcgttttggataaaatcacggacactctgatccacctgatggccaaagcaggacttacactacaacagcaacatcaacgactagcccagttattgctgattctatcccacatccgccacatgtccaataagggcatggagcacctatactctatgaaatgcaagaatgtagtaccattatacgatctattactggaaatgctcgatgctcacaggctgcacgccccgacttcaagggggggtgcctcagttgaagagacagatcagtcgcacctagccacagccggtagcacctctagccacagcctgcagaagtactacataaccggtgaggccgaagggtttccagctacagtgtag

SEQ ID NO: 24000 - DNA, 324 bp, synthetic construct
  misc_feature 1..324: note = Description of Artificial Sequence: Synthetic coding sequence
  source 1..324: mol_type = other DNA
cacaacgactacatgtgccccgccaccaaccagtgcaccatcgacaaaaacagacggaagtcctgccaggcgtgtagactccggaagtgctacgaggtgggtatgatgaaaggcggttttgtcgacctaactctccacgatcaggtacatctgttggagtgtgcgtggttggaaattctgatgatcggccttgtgtggagaagtatggagcaccctgggaagcttctcttcgccccgaatcttctcctggatagaaaccaaggtaaatgcgtagaaggtatggtggagattttcgatatgctgcttgctacttcatcacgctag

SEQ ID NO: 24001 - DNA, 1167 bp, synthetic construct
  misc_feature 1..1167: note = Description of Artificial Sequence: Synthetic coding sequence
  source 1..1167: mol_type = other DNA
tgactgaagatcatcagctgccagcccagcgacaagcccgtgccccccggcgagaacgctcccgagtggcgagctgggcaacccgggtctgctcctcgctcccattgtggccgcagtgccgcaggccccgggcatcgccgccctctatgcgacttcaatggcgagggccccaactctgataacagacggcagggggggagggagagactggcgtcgactaacgataagggttccatggccatggagagcgcaaaggagacgcggtactgcgcggtttgtaacgattacgcatccggataccattatggcgtttggagttgtgaaggctgcaaggctttctttaagaggagtattcagggacacaacgactacatgtgtcccgctaccaatcagtgcactattgacaagaaccgccgcaagtcctgtcaggcatgccgcctcaggaaatgctacgaagtcgggatgatgaagggaggtattcggaaagaccgcagaggaggacgcatgctcaaacacaaacgccagcgtgacgacggagagggccggggagaagtgggctcggccggagatatgagggcagccaatctgtggccatcgcccctaatgattaaacggtctaaaaaaaactctctggctttgtctttgaccgccgaccagatggtgagcgctcttctggacgcagagcctccaattctctatagtgaatatgaccctacacgaccattctctgaggcgtccatgatgggcttacttaccaatttagcggaccgtgaattagttcacatgataaattgggccaagagagttccggggttcgtggatctgacccttcacgatcaggtgcacctgttggagtgcgcctggctggagatcctgatgatagggcttgtgtggcgaagcatggaacacccaggcaagcttctgttcgcgcctaatctcctgctcgatcgcaaccaggggaaatgtgtggaaggcatggtggagatctttgatatgctgcttgccacgtcatcccgatttaggatgatgaatttgcagggcgaggaattcgtgtgtctgaagagtataattctgctgaatagcggaatctcccacgtcgaggctaagaaaaggatcttgaatctgcatcctaaaatctttggtaataagtggttcccacgggtgtag

SEQ ID NO: 24002 - DNA, 813 bp, synthetic construct
  misc_feature 1..813: note = Description of Artificial Sequence: Synthetic coding sequence
  source 1..813: mol_type = other DNA
atgtgccccgccaccaaccagtgcaccatcgacaagaaccggcggaagagttgtcaggcatgcagattgaggaagtgttacgaggtaggtatgatgaagggcggcatcaggaaggacagaagagggggacgaatgcttaagcacaagcggcagagggatgacggagagggccgaggggaagtcggttcagctggggacatgcgcgctgccaatttatggcctagcccattgatgatcaagcggtcaaagaagaatagcttagctcttagcctcactgccgaccagatggtcagcgcactcctggacgccgagccaccaattctatactctgaatacgaccccactcgcccattttctgaagcaagcatgatgggtctgttaacaaatctggcggatcgggaactggtgcacatgatcaattgggctaaaagagttccaggtttcgtggacctcactcttcatgaccaggtgcacttgctcgagtgtgcctggttagagatactcatgatagggctcgtgtggcgttccatggagcatcccggtaagcttctattcgctcccaatctgctactggatagcaataaggggatggagcacctctacagcatgaagtgtaaaaatgtcgtaccgttgtatgacttgctgttagaaatgctggatgcgcatagactgcatgctcccacatcccgaggtggagcttcggtcgaggagacggaccagtctcacctcgctacagccggatccactagcagtcattctctccagaagtactatattacaggggaagcagagggattcccggcaactgtttag

SEQ ID NO: 24003 - DNA, 1572 bp, synthetic construct
  misc_feature 1..1572: note = Description of Artificial Sequence: Synthetic coding sequence
  source 1..1572: mol_type = other DNA
atgaccatgaccctgcacaccaaggccagcggcatggccctgctgcaccagatacagggaaacgaactggagcctcccccactgaactcagtctcaccatctcccctgatgcttctacatcccccaccacaactgtcccccttccttcagcctcacggtcagcaagtgccatactacctcgaaaatgagccgtctggatacactgtgcgggaagccggtccgccagccttctatcgccctaactctgataatagacgccagggcggcagggagcggctggccagtacaaatgataaggggagtatggcaatggagtcggctaaagaaacacgttactgtgctgtttgcaatgactatgcctccggatatcactatggcgtgtggagctgtgagggttgcaaagccttcttcaaaaggtccattcagggccataatgactatatgtgtccagccactaaccagtgcacaatagacaaaaacaggaggaagagttgccaggcatgcaggttgcggaagtgctacgaagtcggaatgatgaaaggtggaatcaggaaagaccggagaggcggaagaatgttgaaacataagcggcaacgagatgacggcgagggacgcggcgaggtgggctcggcaggagacatgcgggccgccaacttgtggccgagtcccctaatgattaaacggtcaaagaagaatagcctcgccctgtctttgaccgcagaccagatggtaagtgcactgctagacgctgaaccacccattctctattcggaatacgaccctaccaggcctttcagcgaagccagcatgatgggattgctcaccaatttggcggatagagagctggtgcatatgatcaattgggcgaagagagtgccgggatttgtagatctgacactgcacgaccaagtgcacctcttggagtgtgcatggttagaaattctgatgataggcctggtgtggagatctatggagcacccgggtaaactcttgtttgctcctaatctcctgctggaccgaaaccaaggcaagtgtgtggagggcatggtggaaatatttgatatgctgcttgccactagttctaggtttagaatgatgaacctccagggcgaggaattcgtttgtctcaagtcaattatcctgctcaattcaggcgtctacacctttttatctagtacattaaaatccttggaagaaaaggaccatattcatcgcgttctggacaagatcaccgacaccctgattcacctgatggccaaggcaggcctgacactccagcagcagcaccagcgtctggcccaacttctactgatcctctcgcacattaggcacatgtccaacaagggaatggaacacctctattcgatgaaatgtaagaatgtggtgcccctctacgatctgctgctcgaaatgctggatgcgcaccgcctgcatgccccaacctcacggggcggggcgagcgttgaggagaccgatcagtcccatctggcaaccgctggatccacttcctctcacagcttgcaaaaatactatatcaccggggaagcagaaggatttccagctaccgtttag

SEQ ID NO: 24004 - DNA, 1788 bp, synthetic construct
  misc_feature 1..1788: note = Description of Artificial Sequence: Synthetic coding sequence
  source 1..1788: mol_type = other DNA
atgaccatgaccctgcacaccaaggccagcggcatggccctgctgcaccaaatccagggcaacgaattggagcctctgaatcggccccagctgaaaatccccctggagcgtccactcggggaggtctacctcgactcttccaaaccggctgtatataactacccagagggagcagcttacgagttcaacgcagcagccgccgccaatgcccaggtctacggtcaaaccggtttgccttacggccctggtagtgaggctgctgcgtttggaagtaatgggttgggcggctttccgccacttaacagcgtgagtcctagtccactcatgttgctgcatcctcccccccagttgtctccgtttctgcagccgcacggccagcaggtgccatactacctggagaacgaaccttctggttacaccgtaagagaggctggcccgccagcattctaccgacctaacagcgataatcgccggcagggtgggcgagagaggctggcttccacaaacgacaaaggctcgatggccatggagagtgccaaagaaacacggtactgtgcggtctgtaacgattatgctagtgggtatcactacggagtctggagttgcgaaggttgtaaggcctttttcaaacggagcatacaggggcacaatgactatatgtgccccgccaccaatcagtgtactatcgataagaaccgcagaaaatcctgccaggcctgtcgcctgcgcaagtgctatgaggttggaatgatgaaagggggcatacgcaaggacagaaggggggggcggatgctgaagcacaaaaggcagcgcgacgacggtgaaggcaggggagaggttggctctgccggtgacatgcgggccgcaaatctgtggccttctccactgatgataaaacgttctaaaaagaactcactggcgttgagcctgacagctgatcagatggttagcgctttgctggacgctgagcctcctatactgtattcggagtatgatccgaccagaccattctctgaggcgagcatgatggggctcttgaccaatttggccgaccgggagttagtacatatgattaattgggccaagcgcgtgcctgggttcgttgacctaacgttgcacgaccaggtccacctgctggaatgtgcatggctggagatcctgatgattggactggtgtggaggagcatggaacaccccggtaagttactcttcgctcctaacctgctactggataggaaccagggcaagtgtgtggaggggatggtggagatctttgacatgctcctcgcaacgagttcacgatttaggatgatgaatctccagggcgaggagttcgtctgcttaaaaagcatcatcctgttgaattccggcgtctacacattcctgagctcaaccctgaagtcactcgaagagaaggaccacatacacagggtgctggacaaaatcaccgatacactgatacacctcatggcaaaggccggactgactctgcagcagcagcaccagcggctggcccaactgctgctgatcctgtcacacatcagacacatgtcaaacaagggaatggagcacctgtactctatgaaatgcaaaaatgtggtccctttgtatgatctcttactggagatgctggatgcccacaggctccacgctcctacaagccgggggggcgccagcgtcgaggaaaccgatcaatctcatttagccacagccggttccaccagcagccacagcctccagaagtactacatcacaggtgaggcagaaggcttccccgctactgtttag

SEQ ID NO: 24005 - DNA, 1788 bp, synthetic construct
  misc_feature 1..1788: note = Description of Artificial Sequence: Synthetic coding sequence
  source 1..1788: mol_type = other DNA
atgaccatgaccctgcacaccaaggccagcggcatggccctgctgcaccagatccaaggtaacgaattagagccgctcaaccggccccagctaaagattcctcttgagagacctttgggggaagtgtatctcgacagcagcaagcccgcggtgtacaattaccctgaaggggcagcatatgaatttaacgccgctgccgcagctaatgcccaggtttatgggcagactggactcccatacgggcctggctctgaggctgcagcctttggaagtaatggtctggggggattccccccactgaacagtgtcagcccttcaccactgatgctcctgcatcccccaccccaactttctcccttcctccagccacacggtcaacaggtaccctactatctggagaacgagccatcggggtatacggtgagagaggctggtcctcccgcattttaccgccctaacagcgataatcggcgacagggcggtcgggagcggctggccagcacgaacgataagggttccatggctatggaatccgccaaggaaacacggtactgcgccgtgtgcaacgattacgctagcgggtatcactatggtgtctggtcctgtgagggttgcaaggcattttttaagaggtctatccagggccataacgattatatgtgcccagctactaatcaatgcactatagataagaatcggcgaaaatcatgtcaggcttgccggcttcggaaatgctatgaggtggggatgatgaaaggaggcatcagaaaggacagacgaggcgggcgcatgctcaaacataaaaggcagcgggacgacggcgagggtaggggcgaagtgggatcagctggagatatgagagctgcgaacctgtggccgtcaccccttatgatcaagaggtcaaaaaaaaatagccttgccctcagtcttacggccgatcagatggtcagtgccctactcgacgctgaacccccgattttatatagtgagtacgatcctactagacctttctccgaggcatcaatgatgggactgctgaccaatctggcagatcgggagctggtacacatgatcaactgggctaagagagttcctggcttcgtggacctgacacttcacgaccaggttcatctcctcgagtgtgcatggttagagatcctcatgatcggacttgtctggcggagcatggagcacccaggcaagttactgttcgcgccaaatttgctccttgacaggaatcaagggaaatgcgttgagggcatggtcgaaatctttgatatgcttctggccacttcaagtcggtttaggatgatgaacctccagggcgaggagtttgtttgccttaaatctattatcctcctgaactctggagtatacacatttctgtccagtaccctgaagtccctcgaagaaaaagatcacatccaccgggtgctcgataaaattacagacaccctcattcatctgatggccaaggcagggctgaccttgcaacagcaacaccaaagattggctcaactcttactcattctttctcatattagacatatgtcaaataagggcatggaacatctctacagtatgaaatgtaagaacgttgtgcccctctatgacctcttgctcgagatgctggatgcgcaccgattacatgcgccgacatcaagaggaggagcttccgtagaagagactgatcaatcccacctggctacagctgggagtaccagttcccattctttgcagaagtactacataaccggagaggctgagggcttccccgctactgtgtag

SEQ ID NO: 24006 - DNA, 348 bp, synthetic construct
  misc_feature 1..348: note = Description of Artificial Sequence: Synthetic coding sequence
  source 1..348: mol_type = other DNA
atgaccatgaccctgcacaccaaggccagcggcatggccctgctgcaccagatccaggggaacgagctggagcccctaaaccgtccgcagcttaaaatccctttggaaaggcctctaggtgaggtctacctggattcttctaaaccagccgtgtacaattacccagaaggagctgcttacgaatttaacgccgccgctgccgccaacgcacaggtatacggacagaccgggctgccctatgggcctggttcagaagcagcagccttcggaagcaatggtctgggcggcttcccccctctgaacagtgtgtcacctagcccattgatgctactacaccctccaccttag

SEQ ID NO: 24007 - DNA, 1452 bp, synthetic construct
  misc_feature 1..1452: note = Description of Artificial Sequence: Synthetic coding sequence
  source 1..1452: mol_type = other DNA
atgaccatgaccctgcacaccaaggccagcggcatggccctgctgcatcaaatccagggcaacgagctggaaccactcaaccggccacaactgaaaatccccctagaaagaccactgggagaggtctatctggattcttctaagccggctgtgtataactatcccgagggggcggcctatgagttcaatgctgctgccgctgccaatgcccaggtctatgggcaaacgggactaccatatggccccgggtccgaagcagccgctttcggatccaatgggcttgggggtttccctcctttgaacagtgtgagtccttcgccccttatgctcctccatccaccaccacaactgtcgcctttcttgcaacctcatggccaacaggttccatattatcttgagaacgagccgagcggctacacagtccgggaagccggcccccccgccttttaccgtccaaattcagacaaccggcggcagggaggcagagaacggctggcttcaaccaacgacaagggatctatggccatggagtcagcaaaggagacgagatactgcgctgtgtgtaatgactatgccagcgggtaccactatggggtgtggtcttgtgagggctgtaaggctttctttaaacgttccatccaggggcacaatgactacatgtgtcccgccacaaaccaatgcacaatcgacaagaatagaagaaagtcatgtcaggcttgtagattacgcaagtgctacgaagtgggtatgatgaagggcggctttgtggacctgacactccacgatcaggtccatctgctggaatgtgcttggctggaaattttgatgatcggactggtctggagaagcatggaacaccctgggaagttactgtttgcccctaacctccttttagatcggaaccagggaaagtgcgtggagggaatggtggagatttttgatatgctcctcgctacttcttctcgattccggatgatgaacttgcagggagaagaattcgtgtgcttgaaatctataatcttgctcaattctggagtgtacacctttcttagctcaacactaaaatcactcgaagaaaaagaccacattcaccgcgtccttgacaagatcactgatacactaattcatctcatggccaaagccggtctgactctgcagcagcagcatcagcgcctggctcagctgctgttgattctgtcccatatcaggcatatgagtaataagggcatggagcacctatacagtatgaaatgtaagaatgtagtgcctctctacgatcttcttcttgagatgctcgacgcacataggcttcatgcccccacatctagaggtggcgcttccgtggaagaaactgaccagtctcatttagctactgccggatctactagtagtcactcactccagaaatattacattaccggagaagctgaaggctttcctgctaccgtgtag

SEQ ID NO: 24008 - DNA, 933 bp, synthetic construct
  misc_feature 1..933: note = Description of Artificial Sequence: Synthetic coding sequence
  source 1..933: mol_type = other DNA
atggccatggagagcgccaaggagacccggtactgcgccgtgtgcaacgattacgcttctgggtatcactacggtgtgtggagctgtgaaggctgtaaggccttcttcaagcgttccatccaggggcacaacgattatatgtgcccagctacaaaccagtgtactattgataagaatcggaggaaaagttgccaggcctgccggctgaggaagtgttacgaggttggaatgatgaagggaggcattcgcaaagataggcgaggcggaaggatgctgaaacataaaagacagagagacgacggcgaaggacggggagaggtcggttcagccggagatatgcgtgccgctaacctgtggccttcacctctcatgattaaaagatcaaagaaaaatagcctcgctctgagcctcacagctgatcagatggtctccgccctgctggacgctgagccgccaattctctactccgaatatgaccccacacggccattttcagaagcctccatgatgggcctactgactaatctggccgatcgagaactggtgcacatgatcaattgggccaaaagagtcccagggttcgtcgacctgacgctccacgatcaagtgcacttgctggaatgcgcatggttggagatcctgatgatcggcctggtgtggagatcgatggaacatccagggaagcttctctttgcacccaatctgctcctggatcggaatcagggcaaatgtgtggagggcatggttgagattttcgatatgctgctcgccaccagtagtagattccgcatgatgaatctgcagggtgaagagttcgtctgtttaaagagcattatcctcttaaacagcgggatctctcatgttgaagccaagaagcgtattttgaacctgcaccctaaaattttcgggaataaatggtttccccgagtctag

SEQ ID NO: 24009 - DNA, 1320 bp, synthetic construct
  misc_feature 1..1320: note = Description of Artificial Sequence: Synthetic coding sequence
  source 1..1320: mol_type = other DNA
atggacatcaagaacagccccagcagcctgaacagccccagcagctacaattgttcccagagcatcctgccccttgaacacggatcaatttacatcccgtccagctacgtggatagtcaccatgagtatcctgccatgacattttatagtccagcagtcatgaactatagcatcccgtctaatgttaccaacctggagggtggaccgggccgtcagaccacctcccctaatgtgctgtggccaaccccaggacacctgagtcccctcgtggtgcatcgtcaactttcccacctctacgcggagccccagaaatctccgtggtgtgaggctagatctctggaacataccttgccggttaaccgggaaactctgaagcggaaagtgtctggaaataggtgcgctagccctgttaccggcccagggagcaagcgcgatgcccatttttgcgccgtatgctctgattacgcatctggctaccactacggggtctggagctgcgagggttgcaaagccttcttcaagcgatccattcagggacacaacgattatatttgccctgcaactaatcaatgcaccatcgataagaataggaggaaaagttgtcaagcatgtcgattgcgtaagtgctatgaggtgggcatggtcaagtgcgggtcacgtagagagcgctgtggctaccggctcgtacgccgccaaagaagtgccgacgagcagttacattgtgctggcaaagcaaagcgaagtggagggcatgccccacgggtccgcgaactcctgctcgacgccctgagccctgagcagctagtgttgacacttctggaggccgagccaccccacgtcctgatcagcagaccttcagcaccctttacagaagcttcaatgatgatgtccctcaccaagctagccgacaaagaactcgtgcatatgatcagctgggccaagaagatacccgggatgtacccacttgtgaccgccacccaggatgcagacagcagtagaaagctggcccatctgctcaacgccgtcacggacgccctggtgtgggtgatagctaaatcaggcatatcgtcccagcaacagtcaatgcggcttgctaacctgctgatgctgctgagccatgtaaggcacgcctctaacaaagggatggagcatctgctcaatatgaagtgtaagaatgtggtgccagtgtacgacctgctcttagaaatgctcaacgcacatgttctaagaggatgcaaaagttctattactggttctgagtgcagccccgcagaggattccaagtctaaagaaggctcacagaatccacaatcacagtag

SEQ ID NO: 24010 - DNA, 1593 bp, synthetic construct
  misc_feature 1..1593: note = Description of Artificial Sequence: Synthetic coding sequence
  source 1..1593: mol_type = other DNA
atggacatcaagaacagccccagcagcctgaacagccccagcagctacaattgctcccaatccattctaccactcgagcacggatccatttatatcccttcttcctatgttgactcacaccatgagtacccagccatgacattttattccccagccgtaatgaattactctatcccctctaatgttacaaacttggagggagggcccggaaggcagacaactagccctaatgttctttggccgactcccggtcatctaagtcctctagtggtgcataggcaactgtcccatttgtatgccgaaccacagaaaagtccgtggtgtgaggcgcgcagcctggagcataccctgccagtgaatagggagacactgaagagaaaggtgtccgggaatcgctgcgccagtcccgtgaccggccccggcagtaaacgcgacgctcatttttgtgctgtctgttctgactacgcctctggttatcattatggagtgtggagctgtgaagggtgcaaagccttttttaagcgttccatccaagggcacaacgactacatttgtcctgctaccaatcaatgcaccattgataagaatcggcgcaagagctgccaagcatgtaggctgaggaagtgttatgaggtgggaatggttaagtgtgggtccaggcgggagagatgcgggtatcggcttgtgagaagacagcgatctgcggacgaacagctacactgtgcaggcaaggccaagcgctccggcgggcatgccccacgggtgagagagttgcttcttgatgcgctgagtcccgagcagcttgtgttgactttgctcgaagcggagcccccccatgtcctgatctctagacctagcgcaccctttacagaggcgtccatgatgatgagccttaccaaattggccgacaaggagctggtacacatgattagttgggccaagaaaatcccaggattcgtggaactgtctctgtttgaccaggtgcgcctcctggaaagttgctggatggaggtgctcatgatgggactcatgtggcggtctatcgaccatccgggcaagcttatctttgctcccgacctggtcctggatagggatgaaggtaaatgtgtggagggtatcctcgagatttttgacatgctcttggcaacgacctcccggttccgggagctgaagctgcagcataaggagtatctgtgcgtgaaggctatgatcctgttgaactcctctatgtaccctttggtcacagccacccaggacgcggattcaagcagaaagctcgctcacctgctgaacgccgttaccgatgctttggtttgggtgatcgctaagagcggtatcagttctcaacagcaatcgatgcggttagcgaacttattaatgttactctctcatgttaggcacgcatcaaacaaaggcatggaacatttgctcaacatgaagtgtaaaaacgtagtccctgtgtacgatctgctgctggaaatgctgaatgctcatgttctgcggggctgtaaaagctctattacgggaagtgagtgcagtccagcagaggactcaaaatctaaggagggctctcagaaccctcagagccaatag

SEQ ID NO: 24011 - DNA, 1488 bp, synthetic construct
  misc_feature 1..1488: note = Description of Artificial Sequence: Synthetic coding sequence
  source 1..1488: mol_type = other DNA
atggacatcaagaacagccccagcagcctgaacagccccagcagctacaactgttcgcagagtatcttaccgctggagcacggcagcatctatattccctccagttatgtggacagccaccacgagtatcctgccatgactttctacagccctgctgtaatgaattacagcatcccgagtaatgtgacgaaccttgagggcggtccaggcaggcagacgactagtcctaatgtgctgtggcctactcccggacatctgagcccgctagtggttcacagacaattaagccatctctatgcagagccccaaaagtcaccctggtgtgaagctcgctctctggagcatactttaccagtcaacagggagaccctcaagcgcaaggtgtcaggcaatcggtgtgctagcccggtcacggggcccggatccaagagggatgcccatttctgcgcagtatgttccgattatgcatccggctaccactatggcgtgtggtcctgtgagggttgcaaagcattctttaaaagaagcatccagggtcataatgactacatctgcccggcaaccaatcaatgcaccatagacaagaatagacgaaagagttgccaggcatgtagattgcgcaaatgctacgaggtaggaatggtgaagtgtggcagtcgtcgggagcgttgtggctatagattggtgaggcggcagcgaagcgccgacgaacagctgcactgcgccggaaaggccaaaaggagcggcgggcacgcaccgagggtgcgcgaactgcttttggatgcactgtctccagagcagcttgtgctgactctgctcgaggccgaacccccccacgtcctgattagccgcccaagcgccccatttaccgaggcctccatgatgatgtctttaacaaagctcgccgataaagaactggtccatatgattagctgggcaaaaaaaatcccaggtttcgtggagttgagcttgttcgaccaagtgcgcttactcgagagctgttggatggaggtgctgatgatgggattaatgtggcggtccatcgatcatcccggaaaactgatctttgctcctgatcttgtactcgatcgagacgagggtaagtgtgtagaagggatcttggaaatcttcgacatgttactcgcgacgacttccagattcagggagctaaagctgcaacacaaggaatacctgtgcgtaaaggctatgatcttgcttaacagcagcatgtaccctcttgtcaccgctacacaggacgcggactcctctcgcaagctggcccaccttctcaacgcagtgacagacgccctcgtatgggttatcgccaagtccggcatttcttcacagcagcagtcgatgcgcctggctaacctgctcatgttgttgtcccacgtacgccacgcaagagcagagaaggcctctcaaaccctgaccagctttgggatgaagatggaaaccttgctgcccgaagctacgatggagcagtag

SEQ ID NO: 24012 - DNA, 1446 bp, synthetic construct
  misc_feature 1..1446: note = Description of Artificial Sequence: Synthetic coding sequence
  source 1..1446: mol_type = other DNA
atggacatcaagaacagccccagcagcctgaacagccccagcagctacaattgttcccaatctatcctgccgctcgaacacggttcaatatacattccatcgagctacgttgattcgcaccacgaatatccagccatgacgttttattcacccgctgtcatgaactattcaatccccagtaacgtgacaaatctagaagggggtcctgggcgccagacgacttctccaaacgtgctgtggcctacacctggtcatctctcccctcttgtggtgcaccggcagctgtcccacttgtacgcggaaccacagaaaagcccttggtgcgaggccagaagcttggagcacacactgcccgtcaaccgggagacactgaaaagaaaagtctccggtaaccggtgcgcatctccagttaccgggccaggcagtaagagggacgctcatttctgcgccgtgtgttcggactatgcaagcggatatcattacggtgtgtggtcttgtgagggttgcaaggccttcttcaagcggagtatccagggtcataatgattatatctgtcctgccaccaatcagtgcacgatcgataagaatcgaagaaaaagctgccaagcatgcaggctgaggaagtgttatgaagtcggcatggtgaagtgcggctctcggagggagagatgcggatatcgccttgtcagaaggcagcgctctgccgatgaacagctgcactgtgctgggaaagccaagagatcaggaggccatgccccgcgggtcagagagttactcttagatgccctgtctcccgagcagcttgttctgactctcctggaggcggaacctcctcacgtacttatctccagacctagtgcacccttcacagaggcgtccatgatgatgtctctcaccaagctggcagataaagaactcgtgcacatgatctcttgggctaaaaagattcccggcttcgtggaactttcactgttcgaccaggtaaggctcttagagagctgctggatggaggtgctgatgatgggcttaatgtggagatccatagaccaccccggaaaactgatatttgctcccgaccttgtgctggatcgcgatgaaggcaaatgcgttgaaggcatccttgagatctttgatatgttactggcaaccacatctcgtttccgtgaattaaaattgcagcacaaggaatatttgtgcgtgaaagccatgattctccttaattcttctatgtaccctcttgttaccgcaacacaggatgcggacagttcccgcaagttagcgcacctgctcaatgctgttacagacgctcttgtttgggtcatcgcaaagtccggaatttcctctcagcagcagtctatgaggctggcaaacttgctgatgcttctgagccacgtgaggcatgccagatggggggaaaagcaattcatccatctgaaactgagttag

SEQ ID NO: 24013 - DNA, 1488 bp, synthetic construct
  misc_feature 1..1488: note = Description of Artificial Sequence: Synthetic coding sequence
  source 1..1488: mol_type = other DNA
atggacatcaagaacagccccagcagcctgaacagccccagcagctataattgttctcagtcgattctccccctcgagcacggctccatctacattccttccagctacgtggacagccatcacgaatacccagccatgactttttacagtccagctgtgatgaattatagcattcccagtaacgtgacaaatcttgagggcgggccaggtcgtcagacaacctcccccaatgtcttatggcccacaccaggtcacctttcacccctggtcgttcatcggcagttgagtcatctgtatgccgagcctcagaagtccccgtggtgcgaggctagatcgctggagcatacactcccggtgaacagagagaccctgaagcgcaaggtatccggcaatcgatgcgccagtcctgtgaccggaccaggatctaagagagacgcccacttttgtgccgtgtgtagtgactacgcctctggctatcattacggagtgtggtcctgtgaaggctgtaaggctttctttaaaagatctatccaggggcataatgattatatttgtcctgcaaccaatcagtgtaccatcgataaaaatcggcgcaaatcctgccaagcttgtaggctccgaaaatgctacgaggtcggaatggtcaagtgcggcagtcgcagggagagatgtgggtacaggctggtccgccggcagaggtctgctgatgaacagctgcattgtgccgggaaggccaagcggagtgggggccacgcaccacgagtccgggaacttctcctcgacgcactgtcccctgaacagctagttctgaccttgttagaggctgagcctcctcacgtgctcatttccagaccaagcgccccctttacagaggcttcaatgatgatgagcctgacgaaactggccgataaggagctcgtgcatatgatctcctgggccaaaaagatccccggtttcgttgaactgagcctgtttgaccaggtgcgactattggaatcttgttggatggaggtgctaatgatgggcctcatgtggcggtcaatcgaccacccgggaaaactcatcttcgcccctgacctggtgctggaccgagacgaaggtaagtgtgtggaagggattctggagatctttgacatgctgcttgctacaacctcccgctttcgggaacttaagttgcagcacaaggagtatctgtgcgtgaaggctatgatcctccttaatagtagtatgtaccctttagtgactgccactcaagatgctgacagttcgcgaaagctggctcacttgctgaacgctgtgacagacgccctggtctgggtgatcgccaagtctggcatcagcagccagcagcagagtatgagattagcgaaccttttgatgctgttgagtcatgtccgtcatgccagggcagagaaagcaagtcagacactgacctcattcggcatgaagatggaaacactgttaccagaagctaccatggagcagtag

SEQ ID NO: 24014 - DNA, 1542 bp, synthetic construct
  misc_feature 1..1542: note = Description of Artificial Sequence: Synthetic coding sequence
  source 1..1542: mol_type = other DNA
atggacatcaagaacagccccagcagcctgaacagccccagcagctacaactgttcacagtccatcctcccactcgagcacggcagcatctacatacccagcagttacgttgactcccaccatgagtatcctgctatgaccttctactcacccgcagttatgaattattccatcccctcaaatgtgaccaatcttgaaggcggccccggcagacagaccacatcccccaacgtgctgtggcctactcccggacacctgtctcccttggtggtccaccgacagctatcgcacctctatgccgagccccagaaatctccttggtgcgaggcacggtcacttgaacacactctaccggttaatagagagaccctgaagcggaaggtctctgggaatcggtgcgcttctccagtaacaggcccgggaagcaaacgggatgctcatttctgcgccgtgtgcagtgattacgcatccgggtatcactacggggtgtggagttgtgagggatgtaaagccttcttcaaaaggagcattcagggacataacgactatatttgccctgctacaaatcaatgcacgattgataagaaccgcaggaagtcatgtcaagcctgtcggctgcggaagtgctacgaggtcgggatggtgaaatgtggcagtagacgggagcgatgtggatacaggctcgtccgcagacaacgatccgccgatgagcagctgcactgcgcagggaaagcgaaacggagtggaggacacgcgccccgggtgagggagttactcttagatgctctatcacccgaacagctggtcttgactctgttagaggcagaacccccgcacgtcctgatcagtaggcctagcgcaccatttacagaagctagtatgatgatgtccctaaccaaattggctgataaagaactagtacatatgatctcctgggcgaaaaagatccctggcttcgtggagttaagcttgttcgaccaagtgcggctgcttgagtcttgttggatggaagtgctgatgatgggcctgatgtggagatcgattgaccatccggggaagctaatctttgccccggacttggtgttagatcgggacgaagggaagtgtgtggaggggatactggaaatattcgacatgctcctggctactacctctcgctttcgggaattgaagctacagcataaggaatatctgtgcgtcaaggctatgatattactaaacagctctatgtatcccctggtgaccgcgacccaggacgccgactccagtcggaagctggcacatttgttgaatgcagtaaccgacgcactggtgtgggttatcgccaagtccggaataagctcccaacagcagtccatgcgcctggcgaacctgttaatgctcctttcccatgttaggcacgcgagttccctcagcctctcttggagattgtttatgctcagggaagccagctgtcacggcgttaggcagacacctgggggagcccatgtttcagtgtcgcgaagcagaagttttgaggcctgccagcaaccaagagaatag

SEQ ID NO: 24015 - DNA, 1488 bp, synthetic construct
  misc_feature 1..1488: note = Description of Artificial Sequence: Synthetic coding sequence
  source 1..1488: mol_type = other DNA
atggacatcaagaacagccccagcagcctgaacagccccagcagctataattgcagtcagtctatcctgccacttgagcacgggtcaatatatatacccagttcgtacgtggactctcaccacgaatacccggcgatgacattttactccccagctgtcatgaattattcaatacctagtaatgtgactaacctcgagggtggccccggaagacagacaacttctccaaacgttttatggccaacgccggggcatttatcacccctagtggtgcatagacagctgtctcatctgtatgccgaacctcagaaatcaccttggtgcgaagctcggagcctagagcatactttgcccgtgaaccgagagacgctaaagaggaaggtgtccggaaacaggtgcgcctcccccgttaccggtccgggctcaaagcgagacgcacacttttgtgccgtgtgctccgactatgcttcaggataccactacggtgtgtggtcctgcgaagggtgcaaagctttcttcaagagatcaattcagggccacaatgactacatctgccccgccaccaatcagtgcacgatcgacaaaaatcggcgaaaatcatgccaggcatgcaggctacgcaagtgctacgaggtcggcatggttaaatgcggtagtcggagagagcggtgcggttatcggctggtcaggcggcaaagatcagcggacgaacagctccactgcgctggtaaggccaaaaggtctggcggacacgctcccagggttcgtgagctcctcctcgatgctttgagccctgaacaactggtgctcacactcctcgaagccgagccaccgcatgttctgatttcccgtcccagcgccccattcactgaagcttctatgatgatgagtcttactaaactggccgataaagaactggtacacatgatatcttgggccaagaagattccgggctttgtggagttgtccctcttcgatcaggtgcgattactcgagagttgctggatggaagtcctgatgatggggcttatgtggcgatccatcgatcacccaggtaaacttattttcgcgccggacctcgtgctggaccgtgatgagggcaaatgcgtggaagggatcctggagatttttgacatgctgctggccaccaccagcagatttcgggaactcaagttgcagcacaaagagtatttgtgcgtgaaggccatgatattattaaattccagcatgtaccccctggtgaccgccacgcaggatgctgacagcagccggaagctggcacatctgttgaatgctgttaccgacgctctcgtgtgggtgatcgccaagtcgggtatatcgtcacagcagcagtccatgcgcttggccaatttgctgatgctcttgagccacgtaaggcatgctagggcggagaaagcctcacagacattaacaagctttggaatgaagatggagaccctcttgcctgaggctacaatggagcaatag

SEQ ID NO: 24016 - DNA, 1419 bp, synthetic construct
  misc_feature 1..1419: note = Description of Artificial Sequence: Synthetic coding sequence
  source 1..1419: mol_type = other DNA
atggacatcaagaacagccccagcagcctgaacagccccagcagctataattgtagccaatcgatcctgccattggaacacggaagtatatatatcccctcctcatatgtcgacagccatcacgagtatccagctatgacattctattctcccgccgtgatgaattattccattccctccaatgtaactaaccttgaggggggccccggtcgacagacgacaagtccaaacgtgctgtggccaacaccagggcacttatctcctctagtggtacaccggcagctttcccacctttatgctgagcctcaaaaaagcccttggtgcgaagccagatcacttgaacatacgctgcctgtcaaccgtgagaccttaaagaggaaagtatcggggaatcgttgcgcctcgcccgttacggggcccggatctaagcgggatgcccatttttgcgccgtgtgttctgattatgcttctggataccactacggagtgtggtcctgtgagggatgtaaagccttctttaagcgttctatccagggccataacgactatatctgcccagccaccaaccagtgcacgattgacaagaataggcggaaatcgtgccaggcctgtcgcctcagaaagtgctacgaagtgggtatggtaaagtgcggaagtaggcgcgagaggtgtggatatcgtctggtgcggcgtcagagaagcgcggacgagcagctgcattgcgcaggcaaagctaagcgatcaggtggacatgctccgagggtcagagagttgctgctagacgcattgtcgccagagcagttggtccttaccctcctggaggcagaaccaccccacgtattgattagccgcccatctgctccttttacagaggcttcgatgatgatgtcactgacgaaactggcagacaaagaacttgtgcatatgatctcctgggccaagaaaatccctggattcgtagagctctctctattcgaccaggttagattattagagtcctgctggatggaggtgcttatgatgggcttaatgtggcgttctattgatcacccagggaagctgatctttgctcccgacttagtgctggatagagatgagggaaagtgcgtcgaggggattctggaaattttcgacatgctgcttgctactacgagtcggttccgtgagctcaaactacagcataaagagtacctctgcgtgaaagcaatgatacttctgaacagcagcatgtatccgctcgtcacagctacccaggacgctgacagctcccggaaactcgcacacctgttgaacgcagtgactgatgccctggtttgggttatagccaaatctggtatatcttcccagcaacagtcgatgcgtctggccaacctgctgatgcttctgagccacgtcaggcacgcccggtatgctccctag

SEQ ID NO: 24017 - DNA, 1446 bp, synthetic construct
  misc_feature 1..1446: note = Description of Artificial Sequence: Synthetic coding sequence
  source 1..1446: mol_type = other DNA
atggacatcaagaacagccccagcagcctgaacagccccagcagctacaactgttcccagagcatcttgcccttggagcatggcagcatttacattccttccagttacgtagatagtcatcacgagtatcctgccatgacattttactcccctgcggtgatgaactactccattccaagcaatgttactaatctggagggcggccccggccgccagactacgtcacccaatgttctgtggcccacaccaggacatctctccccacttgttgtccaccgccagttaagccacttatatgcagaaccccagaagtctccttggtgtgaggctcgatcactggagcataccctgccagtgaatcgggagactctgaagcggaaagtttcaggcaataggtgtgcgtcgccagtgaccggcccaggcagcaaacgtgacgcccacttttgtgctgtgtgctccgactacgcaagcggatatcattatggagtgtggtcttgtgaaggctgtaaagcattttttaagcgctccatccaaggccataatgattacatatgtcctgcaacaaaccagtgcacaatagataaaaatcgtaggaaatcttgtcaagcctgccgcttgagaaaatgttatgaggtggggatggttaagtgtggatctcgtagagaacgctgcggatatcgactggtgcgacggcagcgcagtgctgatgagcagctgcactgcgctgggaaggcaaagaggagcggtggacatgccccgagggtgcgagagctgttgctggatgcgctgtctccagaacagctggtgttaaccctcctcgaagccgagcctcctcacgtcttgataagtcggcctagcgcacccttcacagaagcatccatgatgatgtcactgacaaaattggccgacaaggagttggtgcacatgattagctgggcaaagaaaattcccggatttgtcgagttgtctctcttcgatcaagtgagacttctcgaaagttgttggatggaagtacttatgatgggactcatgtggcgtagtattgatcaccccggaaaattgatttttgcccctgatctggtgctggacagagacgaagggaaatgcgttgaaggaatcctagaaatttttgatatgttactcgcgacaacatctcggtttcgggaactcaagcttcagcacaaggaatatctgtgcgttaaggcaatgattttgctgaacagtagcatgtacccccttgtgacggccactcaggacgcagacagttcccgaaagttagcacacttgctgaatgctgtgacagacgccttggtctgggttattgcaaaatctggcataagttctcaacagcagtccatgagactcgcgaacctactcatgctcctttcccacgttaggcacgcgaggtggggcgagaaacaattcatccacttgaagctgagctag

SEQ ID NO: 24018 - DNA, 1380 bp, synthetic construct
  misc_feature 1..1380: note = Description of Artificial Sequence: Synthetic coding sequence
  source 1..1380: mol_type = other DNA
atggacggcttctacgaccagcaggtgccctacatggtgaccaactcccagaggggcagaaactgcaacgagaaacctacgaacgtccgcaaaagaaaattcatcaacagagatttagcccatgactccgaagaactgttccaggacctgagtcagctccaggagacatggctggctgaggtcgctttccacggcttgcctttaaagataaaaaaggagccccattccccatgcagcgaaatttcgagcgcgtgtagccaagaacaaccattcaaattttcttacggagagaaatgtctgtacaatgtgtctgcgtacgatcagaaaccacaggtcggtatgcgtccaagcaaccctcctactcctagcagcacacctgtatctccgctacatcacgcttcccccaacagcacacatactcccaaacctgatcgggccttccccgcgcacctaccaccgagtcagagtattcctgactcatcttatccaatggatcacagatttcgccggcagctgtccgagccatgtaactcctttccaccactgcctacgatgcccagggagggcaggcctatgtatcagagacaaatgtccgagccaaacatccccttccctccacaagggtttaagcaggaataccacgaccctgtatacgagcacaacacaatggtgggaagcgcagcttctcagtccttcccaccccctctgatgataaaacaagaaccccgggactttgcctatgacagcgaggtgcctagctgccattccatctacatgcggcaggaaggcttccttgcccatccttcgcggaccgaagggtgcatgttcgagaaaggcccacggcagttctatgacgatacctgcgtagtgcctgagaagtttgacggcgacattaagcaggaacccggaatgtaccgcgaagggcccacttatcagcgtagaggctctctgcagctctggcaattccttgtggccttattagacgatccgagcaacagtcatttcattgcatggaccgggagaggcatggaattcaagctgatcgagcccgaggaggttgcaagaagatggggcatccagaaaaacaggcccgccatgaattacgacaagctgagtcggtctctcagatattattatgagaagggcatcatgcagaaggtcgccggggagcgatatgtgtacaaattcgtttgcgaccctgaggccctcttctcaatggcattccccgacaaccagcgccctctgcttaagacagatatggaacgccacataaacgaagaagacactgtgcctctgtctcacttcgacgagtccatggcgtatatgccggagggcgggtgttgtaatccccacccttataatgagggttacgtttattag

SEQ ID NO: 24019 - DNA, 1380 bp, synthetic construct
  misc_feature 1..1380: note = Description of Artificial Sequence: Synthetic coding sequence
  source 1..1380: mol_type = other DNA
atggacggcttctacgaccagcaggtgccctacatggtgaccaacagccagcgggggcgcaactgcaatgagaaacccaccaatgtgagaaaaaggaagtttattaaccgcgatttggctcatgatagcgaggaactttttcaagatctgagtcaactccaggagacttggctggctgaggtggcctttcacggactgccactcaagataaagaaggagccgcactcaccatgctcagaaataagcagcgcatgttcgcaggagcagccttttaagttttcttacggagaaaagtgcttgtacaatgtgtccgcttatgaccaaaagccacaagtgggcatgcgaccaagcaacccccctactccttccagtacccccgttagcccactgcatcacgctagccctaatagtacccacacacctaagccggacagagcttttcctgcccacctaccaccgtcacaaagtataccggacagctcatatcctatggatcatcgctttcggcggcagctgtcagagccctgtaactcattccctccgctgcccacaatgccccgggaaggacgcccaatgtaccaacgtcagatgagtgaacccaacatccctttccccccacagggatttaaacaggagtaccatgatcctgtctacgagcacaataccatggtgggctcagcagcttcacagtcctttcctccccccctgatgatcaagcaagagcctagagattttgcctacgatagtgaggtccctagttgccactctatctatatgagacaggagggcttccttgcccatccctcccggacagaaggatgcatgttcgagaaggggccgaggcagttctacgacgatacatgcgtggtgcctgagaagttcgacggcgatatcaagcaggaacccggcatgtatcgggaaggtccaacgtatcagcggcggggaagtctgcagttgtggcagttcctcgtagcgttattagacgacccctctaattcacacttcatcgcgtggacgggtagaggcatggaattcaaactgattgagcctgaggaggtggctcgacgttgggggattcaaaagaatcgcccggcgatgaactacgacaagctttcacggtcactgaggtactactacgagaagggcattatgcaaaaagtggccggtgagcgatatgtgtacaaatttgtgtgcgatcctgaagccctgttttctatggcctttcctgataaccagcgccctctgctgaagactgacatggaacgccacataaacgaggaagataccgtccccctatcccacttcgatgagagcatggcttatatgcctgagggtggatgctgtaatccacacccatataacgagggctacgtgtactag

SEQ ID NO: 24020 - DNA, 1125 bp, synthetic construct
  misc_feature 1..1125: note = Description of Artificial Sequence: Synthetic coding sequence
  source 1..1125: mol_type = other DNA
atgctgcaggacctgagcgccagcgtgttcttccccccctgcagccaacatcgaacgttggcccaagttccagataacgacgaacagtttgtccccgattatcaggctgaaagtctcgcctttcacggactgcccctaaaaatcaagaaggaaccgcattcaccatgcagtgaaatctcttccgcctgctcacaagagcaaccttttaaatttagctacggggagaagtgcctctacaacgtacgatttcggcggcagctaagtgagccatgcaacagcttccctccactccccacaatgcctcgagagggccggcctatgtatcagagacaaatgagtgaacctaacataccgtttccgccacagggcttcaagcaagagtaccacgatcctgtttacgagcacaatactatggtaggatccgccgccagccagagttttccgccaccgttgatgattaagcaggagccacgcgatttcgcttacgattcagaagtcccatcgtgccattctatatacatgaggcaggagggttttctagctcacccctcccgcactgaaggctgcatgtttgaaaagggcccacgccaattctatgacgatacatgtgtggtccccgagaagttcgacggtgatataaagcaggaaccaggaatgtaccgggagggtcctacctaccagagacgtggttccctccagctgtggcagttcttggtggccctgctcgacgatccctccaactcccattttattgcatggaccggccggggaatggagttcaagcttatcgaaccggaggaggttgcgcgcagatgggggattcaaaagaatcgacccgccatgaattatgacaagctgtcccggtcactgcgatactactacgagaaagggattatgcagaaagtagccggagagcgttatgtctacaaatttgtttgcgacccagaagcgctgttcagcatggctttcccagataatcagcgacctctgctgaagacagatatggaacgacatataaatgaggaggatactgttcccctaagtcattttgacgaatcaatggcgtacatgcccgaggggggctgttgcaatccccacccttataacgaggggtacgtgtactag

SEQ ID NO: 24021 - DNA, 1380 bp, synthetic construct
  misc_feature 1..1380: note = Description of Artificial Sequence: Synthetic coding sequence
  source 1..1380: mol_type = other DNA
atggacggcttctacgaccagcaggtgccctacatggtgaccaactcccagcgaggccggaactgtaacgagaagcccacaaacgttcgcaagcgaaaatttatcaatcgggacttggctcacgattctgaggagctgtttcaggacctcagccaactgcaggagacttggttagctgaagtcgcttttcatggtcttccattaaaaatcaaaaaggaacctcactcgccatgctccgagattagcagcgcctgttctcaggaacagccattcaagttctcctacggcgaaaaatgtttatataacgttagtgcttatgatcagaagcctcaagtgggaatgaggcctagtaaccctcccacgccatcctctacaccagtgagtcccttgcatcatgctagcccaaactccacgcacactcctaaaccagacagggcatttccggcccacttacccccgtcgcagtcgatccctgactccagttatcccatggaccatcgatttagacgtcagttatccgaaccctgcaattctttccctcctctccctactatgccccgcgagggtagacccatgtatcagagacagatgtctgaaccgaacattcctttccctccccaagggtttaagcaagagtatcacgaccctgtgtacgagcacaacacaatggtaggctctgccgcctcgcagtcgttccctccacctctgatgatcaaacaggagccgcgcgattttgcttacgactctgaggtacccagctgtcactcgatatacatgcggcaggaagggtttctcgctcatccatcaagaacggaaggctgtatgtttgagaaaggccctcgacagttctacgatgacacatgtgtcgtgccggaaaagttcgatggggacattaagcaggagcctgggatgtaccgggaagggcctacctaccagcgcagagggagtctccagttatggcaattcctggttgcactccttgatgatcctagcaactcccatttcattgcttggaccggcagagggatggagtttaagctgatagaaccagaggaggtggcccgcaggtggggcattcagaagaaccgtcccgccatgaattatgataaactgtcccgttcactccggtactactacgagaaagggatcatgcagaaagtggccggagagcgctacgtgtacaaatttgtgtgtgaccccgaagccctattcagcatggcttttcctgataatcagaggccactcctcaaaaccgatatggaacgccacataaatgaggaggacactgtccctttgtctcacttcgatgaaagcatggcctacatgcccgaaggtggatgctgcaatcctcacccgtataatgagggatacgtttattag

SEQ ID NO: 24022 - DNA, 1434 bp, synthetic construct
  misc_feature 1..1434: note = Description of Artificial Sequence: Synthetic coding sequence
  source 1..1434: mol_type = other DNA
atggacggcttctacgaccagcaggtgccctacatggtgaccaacagtcaacggggccgcaattgtaacgaaaagcctaccaacgtgaggaaaaggaagtttatcaatagagatctggcccatgactcagaggagctatttcaggatcttagccagttgcaagaaacttggttggccgaggctcaggtcccggacaatgatgaacagttcgtgcccgactatcaggcagaatccctcgccttccacggcctccctctcaagattaaaaaagaacctcatagcccctgttcagaaatctctagtgcctgtagccaggagcagcctttcaaatttagttacggcgagaaatgcttatacaacgtatcagcgtatgatcaaaaaccacaggtagggatgcggcctagcaacccaccaacccccagcagcacaccagtctcaccactgcatcacgcgtccccaaattcaactcatacacctaaacccgatcgggcgttcccagcacatttaccaccttcccagagcatccccgactcatcctatcccatggaccacaggtttcggcggcagctcagcgagccgtgtaatagttttccaccgctacccaccatgcccagagaaggtaggccaatgtaccagaggcagatgagcgaacctaatattccttttccaccacaggggttcaaacaggaatatcacgacccagtttatgagcataataccatggttgggagtgccgcgtctcagtctttcccaccccctcttatgatcaagcaggaaccacgtgacttcgcctacgattctgaagtgccatcctgtcattcaatttacatgagacaggaaggctttttagcccatccctcccggacggaaggctgtatgttcgaaaaagggccaagacaattttatgacgatacttgcgtcgttccggagaagttcgacggggacatcaagcaagagcccggcatgtaccgtgaaggtccaacataccagcgccgaggaagcctgcaattgtggcagtttctggtggcactcctcgacgatccgagcaatagccactttatcgcctggacaggacgtggcatggagtttaagcttattgagccggaagaagtggccaggaggtggggcattcaaaagaatcggcccgccatgaactatgataaactgtctcgatctctccgatactactacgagaaaggaatcatgcagaaagtggcgggcgaaaggtatgtctataaattcgtttgtgaccccgaggcactgtttagtatggcctttccagataaccagcgcccactcttaaaaacagatatggaacggcatatcaacgaagaagatactgtgcctctttctcatttcgacgaatctatggcctacatgcccgaaggaggttgttgtaacccacatccatataacgaaggatacgtctactag

SEQ ID NO: 24023 - DNA, 1260 bp, synthetic construct
  misc_feature 1..1260: note = Description of Artificial Sequence: Synthetic coding sequence
  source 1..1260: mol_type = other DNA
atgctgcaggacctgagcgccagcgtgttcttccccccctgcagccaacatcggacgctggtagcctttcacggacttcctctgaagattaaaaaagaaccacactcgccttgctccgaaatctcttcagcctgttctcaggagcagccgttcaaattctcctatggagaaaagtgtctgtacaatgttagcgcatatgaccagaagccccaggtcggcatgagaccttccaatcctccaacaccgtcatcaacacccgtgtccccactccatcatgcatcccccaatagcacccacactcctaagccggatagagcttttccggcacatctgccaccgtcccagtcgattcctgattctagctatcccatggaccacagattccgaagacagctgagcgagccatgcaactcttttccacctttacccactatgccgcgagaaggtcggcccatgtatcagcgccagatgagtgaacccaacatcccctttccaccacaagggtttaagcaagagtatcatgacccagtatatgaacacaacacaatggtgggtagcgctgcatcacagtccttccctcctcctctcatgattaagcaagagcctagagatttcgcttatgatagtgaagtgccctcctgtcattccatttacatgaggcaggagggcttcctggctcatccttcacgcaccgagggatgcatgttcgagaaaggtccacggcaattctacgatgacacctgcgttgtgcccgaaaagtttgacggcgatattaagcaggagcctgggatgtaccgcgaaggaccgacataccaacgcagaggaagcctgcagctttggcagttcctggtggccctcttggacgacccatcaaacagtcactttattgcctggaccggccgcgggatggagttcaagctgatcgagccagaggaagtcgcccgtaggtgggggatccagaagaacagaccagcaatgaactacgataaactgagccgcagtctccgatattactatgaaaagggtattatgcagaaggtggcaggcgaaaggtacgtgtacaaattcgtttgcgacccggaggctcttttcagtatggcttttccagataatcagagaccgctgctgaaaacagacatggagcgccacattaatgaagaagacacagtcccactgtcccatttcgatgaaagcatggcttacatgcctgaaggagggtgttgcaatcctcacccatataatgaaggatatgtttattag

SEQ ID NO: 24024 - DNA, 372 bp, synthetic construct
  misc_feature 1..372: note = Description of Artificial Sequence: Synthetic coding sequence
  source 1..372: mol_type = other DNA
atggacggcttctacgaccagcaggtgccctacatggtgaccaactctcagcgggggcgtaactgcaacgagaagcctacaaacgtgcggaagcgcaagtttataaatagagacttagctcatgattccgaggagctcttccaggacctatcgcagctgcaggaaacctggcttgctgaagcccaggtccctgacaacgatgaacagttcgtgccagattaccaggcagagtctctggcttttcatggcctgccactgaagattaagaaagaaccacacagcccttgcagcgagatatccagcgcctgtagccaggagcagccattcaagttctcttatggcgaaaaatgcctgtataatgtctctgcctag

SEQ ID NO: 24025 - DNA, 1434 bp, synthetic construct
  misc_feature 1..1434: note = Description of Artificial Sequence: Synthetic coding sequence
  source 1..1434: mol_type = other DNA
atggacggcttctacgaccagcaggtgccctacatggtgaccaacagtcaacggggcagaaattgtaatgaaaaacccaccaatgtcaggaaacggaagtttatcaatcgcgacctagctcacgacagtgaggaactgtttcaggatctgtcgcagctccaggagacctggttggctgaagcccaggtaccagacaatgatgagcagttcgtgcctgactatcaggccgagtcactcgcgttccacggccttcctctcaaaatcaagaaggagccacattcgccatgtagcgaaatctcttctgcatgttcacaggagcaacccttcaaattttcgtacggggagaagtgtctctataatgtgtcagcttacgaccagaagccacaagtgggtatgagaccttccaatccacctacgccatcgagcacccctgtatccccgttgcaccacgcctcacccaatagtactcatactccaaagccagaccgtgccttccctgcccaccttccaccgtcccagagtatccctgacagttcctacccaatggaccaccgcttccggcgccaactgagcgaaccatgtaactccttcccccccctgccgactatgccacgggaaggtagacctatgtatcagcggcagatgagcgaacccaacattcctttcccgccccagggttttaaacaggagtatcatgacccggtatatgagcataataccatggtgggctcagctgcatctcagagtttccccccaccattgatgattaagcaggagcctcgcgattttgcttacgactccgaagttccaagttgtcattccatttacatgcgtcaggagggattcttagcccatccttcacgaactgagggctgtatgttcgagaaggggcctaggcagttctacgatgacacctgcgtggttcccgaaaagtttgatggggacatcaagcaggagccaggcatgtatcgcgaaggccccacctaccagagacgcggaagtctacaactatggcaattcctagtggctctgctggatgaccccagcaatagccatttcatcgcctggaccgggagaggcatggagttcaagctcatcgaaccggaggaagttgctcgtcggtggggaatacaaaaaaatagaccagccatgaactatgataagctgtcccgcagcctccgttactattatgagaagggaattatgcagaaggtcgctggtgaacgttacgtatacaagtttgtgtgtgatcctgaggcactcttctcaatggcctttcctgataatcagcggcccctgctcaaaaccgatatggaaagacatatcaatgaggaagatacggtgcctctaagccacttcgatgagtcgatggcgtatatgcctgagggtggctgttgtaaccctcacccttataacgagggatacgtttattag

SEQ ID NO: 24026 - DNA, 288 bp, synthetic construct
  misc_feature 1..288: note = Description of Artificial Sequence: Synthetic coding sequence
  source 1..288: mol_type = other DNA
atggacggcttctacgaccagcaggtgccctacatggtgaccaactcacagcgtggtcgtaactgcaatgagaaacctacaaatgtcaggaaaagaaaattcatcaatagggacctggcacacgactctgaggagctgttccaggacctctcacagttacaggagacctggctcgccgaagcccaagtcccggacaacgacgagcagtttgtccctgactaccaggccgaaagcttggcctttcacgggttacccctcaagattaagaaagagccacattctccatag

SEQ ID NO: 24027 - DNA, 63 bp, synthetic construct
  misc_feature 1..63: note = Description of Artificial Sequence: Synthetic coding sequence
  source 1..63: mol_type = other DNA
atggacggcttctacgaccagcaggtgccctacatggtgaccaacagccagcgaggacggtag

SEQ ID NO: 24028 - DNA, 1314 bp, synthetic construct
  misc_feature 1..1314: note = Description of Artificial Sequence: Synthetic coding sequence
  source 1..1314: mol_type = other DNA
atgctgcaggacctgagcgccagcgtgttcttccccccctgcagccagcatagaaccctggcgcaggtaccagataacgatgaacagttcgtgcctgactaccaggctgagtcccttgctttccacggacttcctctcaaaatcaagaaagaaccacattctccctgtagtgagattagcagtgcatgttcccaggagcagcctttcaagttctcatacggggagaagtgtctgtataacgtgagcgcatatgatcagaaaccgcaagtgggcatgaggccctccaacccgccaaccccgtctagcaccccagtatcccccctccatcacgccagtcctaacagtacccacacaccaaaaccagaccgtgctttcccagctcacctgccaccatctcagtctatccccgattcatcctatcccatggatcacaggtttcgcagacagctcagcgaaccctgcaacagctttcctccgctcccgacaatgcctcgcgaaggtagacctatgtatcaaagacagatgtctgagccaaatattccctttccccctcagggattcaagcaggagtatcatgaccccgtgtacgagcataacactatggtggggagtgcagcatctcagagtttccccccacccctcatgatcaaacaggaaccccgcgacttcgcatacgacagtgaggtcccctcctgccatagtatctatatgagacaggaaggattcctagcgcatcctagccgaactgaggggtgcatgttcgagaagggcccgagacagttttatgacgatacttgcgtggtgccagagaaatttgacggagacataaagcaggagccaggcatgtaccgcgagggacccacataccagcgcagagggtctctacaactgtggcaattcttggttgcactcctggatgacccgtcaaacagccactttatcgcttggaccggtcgggggatggagtttaaactaatcgaaccagaggaagtggccagacgttggggaatccagaaaaatcgccccgcaatgaactacgacaagctgagcagaagtctgcgctattactacgagaagggcatcatgcagaaagtggcgggcgagaggtatgtgtacaagttcgtgtgcgatcctgaagccttgttcagcatggcttttccagacaatcaacgccctttattgaagacagatatggaaaggcacataaatgaagaagatacagtccctctctcccacttcgatgagagcatggcatatatgcccgagggcggatgctgtaacccacacccatacaacgaagggtacgtgtattag

SEQ ID NO: 24029 - DNA, 1365 bp, synthetic construct
  misc_feature 1..1365: note = Description of Artificial Sequence: Synthetic coding sequence
  source 1..1365: mol_type = other DNA
atggacggcttctacgaccagcaggtgccctacatggtgaccaactcccagagaggccgcaactgtaacgagaagccgacgaacgtccgaaagagaaaatttataaacagggacttggcccatgatagtgaggagctgtttcaggacctgtcccagctgcaagagacctggctggccgaagcacaggttcctgacaacgatgaacagttcgtgccggattatcaagcagaatccttggcctttcatggactacccctgaaaattaagaaggagcctcactctccctgctccgagatatcctcagcttgcagccaggagcagccatttaagttttcatatggcgagaagtgcctgtataacgttagcgcctacgaccagaagccgcaagtgggcatgagaccctcaaacccacccacgccctcatcaacgcccgtgtccccactccaccatgcctcccctaatagcactcatactccaaagccggaccgagcgttccctgcccacttgcctcctagtcagtcaatcccagactcttcttaccccatggatcaccgctttaggcggcagctgtcggaaccttgtaactcctttcccccactccctacgatgccgcgtgagggaagaccgatgtaccagaggcaaatgtccgagcccaacattccttttccaccacaagggtttaagcaggagtatcacgacccagtgtatgagcacaatactatggtaggtagcgccgctagccagtcctttcctccgccgctgatgattaagcaggaacccagggattttgcttatgactcaggatgcatgttcgaaaaaggcccacgacagttctatgacgacacctgtgtggtgcccgaaaagtttgacggagatataaaacaagaaccaggtatgtaccgggaagggcctacctatcagagacgaggttccctgcaactgtggcagttcttggtggccctgttagacgatcccagcaactcccattttattgcgtggacaggacgcgggatggagtttaaactcattgagcccgaggaagtggcgagaaggtgggggattcagaaaaacagaccggccatgaattatgataagttatcacgctcgcttagatactattatgaaaaggggattatgcaaaaggtcgcaggagagcggtacgtttataagtttgtttgtgatccagaggccctcttcagtatggcctttccggacaaccagcgccctttgctgaaaactgatatggagaggcatataaatgaggaggatactgtaccacttagccacttcgatgaatctatggcttatatgcctgaaggagggtgctgcaacccacacccttataatgaggggtacgtgtattag

SEQ ID NO: 24030 - DNA, 1455 bp, synthetic construct
  misc_feature 1..1455: note = Description of Artificial Sequence: Synthetic coding sequence
  source 1..1455: mol_type = other DNA
atggagcggcggatgaaggccggctacctggaccagcaggtgccctatactttctcctcgaagagccctggtaacggctctctccgggaagccttgatcggccctcttgggaagctgatggatccgggtagtctccctcctttggacagcgaagatttgttccaagacctaagtcacttccaggagacatggctggcggaggcccaagtgcctgatagcgacgaacagttcgttcccgactttcactcagaaaacctggctttccactctcctaccactcggattaaaaaggaaccgcaatctcctcgcacagatccagccctcagctgctcccgcaaacccccactgccctaccaccacggggaacagtgcctgtactcctctgcatacgatccgccgcggcagattgcgatcaaatcgcccgcacctggagctctgggccagtcccctctccaaccttttccacgggctgaacagagaaattttcttcgtagctctggaaccagccagcctcatccaggacatggttatctgggagaacactctagcgtatttcagcagcctttggacatctgccattccttcacttcacaaggcggaggacgtgaaccgctccccgccccctatcagcatcaactttccgaaccctgccctccatacccgcaacaaagctttaagcaagagtaccacgaccccctttatgaacaggctggacagcctgccgtcgaccagggcggtgtgaatgggcacaggtatccaggcgccggagtcgtgatcaagcaggaacaaaccgatttcgcgtacgactccgacgtcaccggctgtgcctcgatgtacctccacaccgaagggttttcaggcccaagccctggtgacggagctatgggatatggctacgagaaacccttgcgcccatttccagatgacgtttgtgtggtgcctgaaaaattcgagggggacataaaacaggagggggttggcgcctttagggagggacccccctaccagcgccgcggagcattgcagctctggcagttcctggtcgcactgctggacgacccaaccaacgcccacttcattgcttggaccgggaggggaatggaattcaaattaatcgagcctgaagaggtggccagactttggggcattcagaaaaaccggcccgctatgaactacgataagctgtccagatccctgagatattattatgagaagggaatcatgcaaaaagtggccggtgagaggtacgtctacaagtttgtctgtgagcctgaggccctgttttcgctagcgtttccagacaaccagcgccccgccctgaaggcggagtttgaccggcccgttagtgaagaagatacagtgcccctctctcacctggatgagtccccagcttacctgcctgaactggccggcccagctcagcccttcgggcccaagggcggctattcctattag

SEQ ID NO: 24031 - DNA, 1455 bp, synthetic construct
  misc_feature 1..1455: note = Description of Artificial Sequence: Synthetic coding sequence
  source 1..1455: mol_type = other DNA
atggagcggcggatgaaggccggctacctggaccagcaggtgccctatactttttcctccaagtctcctggaaatgggtccctgagagaggccctgataggaccactcggaaagctgatggatcctggctcactgcctcctcttgactccgaagacctcttccaggatcttagtcactttcaagaaacatggctagctgaagcgcaagtccctgactccgacgaacagttcgtgcctgattttcattccgagaatctagcgttccatagtcctacgactcgcataaagaaggagccacagagccctaggactgaccctgctctctcctgcagtcgcaagccgccattaccctaccaccatggcgagcagtgcctgtatagcagtgcctacgaccccccccgccagattgctatcaagtctccagcccccggagcccttgggcagagtcctttacagccctttcctagggctgagcagagaaattttctcagatcttctggtacctcccagccacatcctggccacgggtacttaggagaacacagcagcgtatttcaacagccactggacatttgtcatagcttcacatctcagggcggcggtcgcgagcctctgccagcaccctaccaacaccagctgagcgaaccgtgcccaccttatccccagcagtcctttaagcaggagtaccacgatcctttgtatgagcaggcagggcaacccgccgttgatcagggaggcgtgaacggccacaggtaccccggcgccggtgtggtaatcaaacaggaacagactgacttcgcctatgattctgacgttacagggtgtgcttctatgtacctacacaccgagggcttctccggaccatctcctggcgatggggctatgggctacgggtatgagaaaccactccggccttttcccgatgacgtgtgtgtggtgcccgagaagttcgaaggcgatattaaacaggagggagtgggcgcattcagggagggccccccctaccaacgtaggggcgctctgcaactctggcagtttttggtcgcccttttagatgaccctacaaatgctcatttcatcgcttggaccggtcggggtatggagtttaagttgatcgagccagaagaagtagcccgtctttggggcatccaaaaaaatcgtcccgcaatgaattatgataaactcagcaggtcgcttcgatattattatgagaaagggatcatgcagaaggtagcaggcgaacggtatgtttacaagttcgtatgcgagcctgaggccctgttttctctggccttccctgacaaccagaggcctgctctcaaagccgaattcgatagacctgtgagtgaggaagacacagtacctttatcccaccttgacgaaagcccagcatacttgcctgaacttgctggccctgcccagccctttggccccaaaggaggttattcttattag

SEQ ID NO: 24032 - DNA, 1338 bp, synthetic construct
  misc_feature 1..1338: note = Description of Artificial Sequence: Synthetic coding sequence
  source 1..1338: mol_type = other DNA
atggaccccggcagcctgccccccctggacagcgaggacctgttccaggatttaagtcattttcaggagacctggctggcggaggcccaggttcctgattctgacgagcagttcgtccccgactttcacagcgaaaatttggcttttcattcacctacgacccgcatcaaaaaagaacctcagtctcccagaaccgaccccgcactgtcttgctcccgaaaacctccactgccgtatcaccacggggagcagtgcttatactcgtccgcatacgatcccccacgccaaattgcaattaagagccctgcccctggcgctctgggccagagcccactgcagccgttccctagggcggaacaaagaaatttccttcgaagctcgggtacaagccaacctcatcctggtcacggctatctcggggagcacagctccgtgttccagcagccacttgacatatgccactcttttacctcccaagggggggggcgagagcctctgccagcaccctaccagcaccagctgagcgagccatgccccccatatccccagcagagcttcaaacaagaatatcacgatcctctgtacgagcaagcagggcagcccgctgtggatcagggaggcgtaaatggtcacagataccccggggctggtgtcgttatcaaacaggaacagactgactttgcctatgacagtgacgtaactgggtgcgcctcgatgtatctacacacggagggattcagtggaccctcccccggggacggggcaatgggctacggctatgagaagcctctgcgaccctttccagacgacgtgtgcgtggtacctgagaaattcgagggggatatcaaacaggaaggggtgggggccttcagagaaggacctccataccaaaggcgtggtgcgctgcagctctggcagtttctggtcgccctgctggacgaccccacaaacgcacactttatagcctggactggacggggcatggagtttaagctgatcgagccagaggaggtagcccgtctgtggggtatccaaaagaatcgaccggctatgaactatgataagctgtcccggtccctgagatactactatgagaaagggattatgcagaaagtggctggcgagcgatacgtgtacaagtttgtgtgtgagccagaggccctgttttccttagcctttcccgacaaccagagacccgcattgaaggcagaattcgatcgccctgtctccgaagaggatacagtgccactgtcacatctggacgaatcacccgcatatttacctgaactggccgggccagcccagccattcggtccaaagggtggctactcctactag

SEQ ID NO: 24033 - DNA, 1293 bp, synthetic construct
  misc_feature 1..1293: note = Description of Artificial Sequence: Synthetic coding sequence
  source 1..1293: mol_type = other DNA
atggagcggcggatgaaggccggctacctggaccagcaggtgccctacactttttccagcaagagcccgggcaacggatcactcagggaagctcttatcggtccacttggcaagctaatggaccccggttctctccctcccctggatagcgaagacctttttcaggacctttcccacttccaagagacctggcttgcagaagctcaggtgcctgatagcgatgagcaatttgtgcccgacttccactccgagaacctagcctttcatagcccaaccacacggattaagaaggagccccagagccctagaaccgatcctgccttgtcatgttcccggaagcctccactgccttaccatcacggggaacaatgcctgtacagtagctcagtgttccaacagcctcttgatatctgccacagtttcaccagtcagggcggcggccgggaacccctcccagccccctatcaacaccagctgagcgagccgtgccctccttatcctcagcaatctttcaaacaagagtaccacgatcccctgtacgaacaagcgggacagccagctgtggatcagggtggcgtcaacggacatcggtatcctggggctggggtagttatcaaacaggagcagaccgactttgcctatgattctgacgtaactgggtgtgcgtccatgtatctccatactgagggtttctctggtcccagtcctggcgatggcgccatgggctacggctatgaaaagccactacggccttttcccgacgacgtctgtgtcgtgcccgaaaaattcgaaggtgatatcaaacaagaaggcgttggagcctttcgagaaggccccccttaccagagacgcggggctctgcaactgtggcagtttttggtcgcactattggatgacccgaccaatgcccacttcatcgcttggacgggtcgcgggatggaattcaagctcattgagcctgaagaggtggccagactgtggggaattcagaagaatcgccctgccatgaactacgacaagctgagtcgctctttgcgctactactacgagaaaggcatcatgcagaaggtagccggtgagaggtatgtctacaagttcgtttgcgagcctgaagcccttttctccttagcattcccagacaatcagagaccagcgctcaaagcagaatttgaccgacctgtctctgaagaagatactgttcctttgagccacctagacgaaagccccgcttatctacccgaattagctggccctgcccagccattcgggccgaaaggcgggtattcttactag

SEQ ID NO: 24034 - DNA, 1338 bp, synthetic construct
  misc_feature 1..1338: note = Description of Artificial Sequence: Synthetic coding sequence
  source 1..1338: mol_type = other DNA
atggaccccggcagcctgccccccctggacagcgaggacctgttccaggacttgtctcactttcaggagacatggctggcagaggcccaagtgcctgatagcgacgaacagttcgtgcccgacttccacagcgagaacttggctttccactcccctacaacgcgaataaaaaaggagcctcagtccccccggacggacccagccctgagctgttctcgaaagccaccactcccatatcaccatggcgagcagtgcttgtatagctctgcttacgatccgccacgtcagattgccattaagtcacccgcacctggggcattgggtcagagtcctctccagcctttccctcgggccgagcaacgtaatttcctccgctcaagcggtacgtctcagccgcatccagggcatggctacctgggggagcattcttccgtcttccagcagcctcttgatatctgccacagttttacatcccagggcgggggacgggaacctctgccagctccctaccagcaccaactgtccgaaccgtgtcccccttatcctcagcagtccttcaaacaggaataccacgatccactttacgagcaggctggtcagccggctgtggatcaggggggggtcaatggacatcggtaccccggcgcaggcgtggttattaaacaagaacagacagactttgcctatgactccgacgtaactgggtgtgcctccatgtacctgcacactgaaggatttagcggcccaagtcctggcgatggggctatgggttacgggtatgagaagcctctcagaccatttcccgatgacgtgtgcgtcgtgccggagaagttcgagggcgacattaagcaggaaggggtgggagccttccgcgaggggccgccgtatcagaggcgtggcgcactgcaactgtggcagttcctggtagcacttctcgatgatccaacaaatgctcactttatcgcctggaccggtcggggtatggaatttaaactcatagagcccgaagaagtggccaggttatgggggatccagaaaaaccgacctgcaatgaactacgataaattatcacggtccctgcggtattattatgagaaaggcattatgcagaaagtggcaggcgagcgctatgtttacaagttcgtgtgcgagcctgaagctcttttcagcctggctttcccagataaccagcgccccgcattgaaggccgagtttgatcgtcccgtctctgaagaggacactgtgcccctctctcatctggacgaatccccagcctatctccccgagcttgctgggccggcacagccttttggccccaaaggagggtatagctactag

SEQ ID NO: 24035 - DNA, 1791 bp, synthetic construct
  misc_feature 1..1791: note = Description of Artificial Sequence: Synthetic coding sequence
  source 1..1791: mol_type = other DNA
atggccggccggcgggtgaacgtgaacgtgggcgtgctgggccacatcgacagcggcaagaccgctcttgcccgtgctttgtctacgactgcttctaccgctgctttcgacaaacagccccagagccgagagcggggaataacacttgacctaggatttagctgctttagtgtgcctctccccgccaggctgcgctcctcccttcctgagtttcaagcagctcccgaagcggagcctgagcctggcgagcctctcctacaagtgacgttggtggattgcccaggccacgcctcattgatccgtacaatcatcggtggcgcccagatcatagatctgatgatgctggtcatcgatgtcactaaaggaatgcagacccaatctgctgagtgcctagttattggtcagatcgcctgccagaaactcgtggtcgtgttaaacaagatagaccttttacctgagggcaagaggcaagcagctatcgacaaaatgacaaagaagatgcagaagacactggagaatactaaatttcggggtgcccctatcatacctgtcgctgcgaagcccgggggccctgaggccccagagactgaggcgccccagggaatccctgaacttatcgagctcttgactagtcagatttctattcccactagggacccatcgggccccttcctcatgtccgtggaccactgcttctctatcaagggacagggaaccgtgatgacaggaacaattcttagcggtagcatctccctaggagactcagtcgaaattccggccctcaaggtagtgaaaaaggttaaaagcatgcaaatgtttcacatgcctattacctcggctatgcaaggtgataggcttggcatctgcgtcacccaattcgatccgaagctattggagcgcggactggtgtgtgctcccgagtccctgcataccgttcatgcagctctcatatctgtggagaaaattccatattttaggggccccctccagacaaaggcaaagtttcacatcactgtcggtcacgaaacagtgatggggcgcctcatgttcttttcacctgcacctgataacttcgatcaagagcccatcctggactcgttcaacttttcgcaggaatacctgttccaagaacaatatctgagcaaagatttgacaccagcagtgacagataacgacgaggcggacaaaaaggcgggacaagccactgaaggtcactgtcctaggcagcaatgggccctggtggaatttgaaaagccggtcacatgcccccgtctatgcctggtaataggtagtcgattagatgctgacatccatacgaatacgtgtagactggcctttcacggcatactgctgcacggcctggaggatcgcaactatgccgatagctttctgcctcgactcaaggtgtacaaactgaagcataagcacggtctagttgagcgcgctatggatgattatagcgtgatcggtagaagcctgtttaagaaggaaaccaacatccagctctttgtcgggttaaaagtgcacttgtccaccggtgagctaggcattatcgattccgccttcggccaatcaggcaaattcaaaatacacatccctgggggcctgagtcctgaaagtaagaaaatcctcactcccgccctcaaaaaaagggcgcgggcgggaagaggagaggccaccagacaggaggaaagcgcagagagaagtgagccgagccagcatgtggtactttctctgacatttaaacggtatgtttttgacacacacaagcggatggttcagtcaccgtag

SEQ ID NO: 24036 - DNA, 1233 bp, synthetic construct
  misc_feature 1..1233: note = Description of Artificial Sequence: Synthetic coding sequence
  source 1..1233: mol_type = other DNA
atggccgccgagatccacagccggccccagagcagccggcccgtgctgctctcaaagatagagggccaccaggacgcagtcactgcagctctgctgatccccaaggaagacggggtcataacagcgtccgaagaccgaaccatacgggtgtggctcaaacgggattcaggacagtactggccatcaatctaccatactatggcctccccctgttcagcaatggcgtaccatcacgactctcggcgcatcttcgtagggcaagacaatggcgctgttatggagtttcatgtgagcgaagactttaacaagatgaattttatcaagacatacccagcacaccaaaatcgggtgtcagccatcatcttcagcctcgcaactgaatgggtcatttcaacaggccacgacaagtgcgtcagctggatgtgcacaaggtctggtaatatgctgggtcgacatttttttacttcctgggcttcttgcctccagtatgatttcgacactcagtatgctttcgtaggagactactcaggacagatcacattattaaaactggagcagaatacctgtagcgtgatcaccactcttaaggggcacgagggtagcgtagcttgcctctggtgggatcccatccagcgactgctgttcagtggggcttctgacaactccattatcatgtgggatattgggggtagaaaaggcaggacactgctgcttcaaggccatcatgataaagtgcagtctttgtgctatctacagctgactagacagctggttagttgttcttctgatgggggaatcgccgtctggaacatggacgtgtcacgagaagaggcacctcagtggctggagtcagactcctgccaaaagtgcgagcagcctttcttctggaatattaagcagatgtgggacactaagaccttggggctgcgccagcaccactgtcggaaatgtggccaagctgtttgtggcaagtgctccagtaagagatcttcatatcccgtgatgggctttgagtttcaagttagggtttgtgactcatgttatgactccattaaggacgaagaccgaacctccctagccacatttcatgaggggaagcataatatctcgcatatgtcaatggatatcgcacgcggcctaatggttacctgtggaaccgacaggatcgtcaaaatctgggacatgaccccagtcgttggatgcagtctcgcaacagggttctcccctcactag

SEQ ID NO: 24037 - DNA, 1092 bp, synthetic construct
  misc_feature 1..1092: note = Description of Artificial Sequence: Synthetic coding sequence
  source 1..1092: mol_type = other DNA
atggccggcgacctgagcgccggcttcttcatggaggagctgaacacttaccgccagaagcaaggcgtggtgctgaaataccaggagctgcctaactcagggcctcctcacgataggcgctttacctttcaggtcatcatcgatgggagggagtttcccgagggagagggccggtcaaaaaaagaagccaaaaatgcagcggccaaactagctgtggagattctgaacaaggagaagaaagcagtgtctcccctgttactgaccacaacaaacagctccgagggtctgtctatgggaaactatatcggcctaatcaatcgtattgcgcaaaagaagaggctcactgtcaattacgagcagtgcgcttccggggttcatggccccgaaggtttccactacaaatgcaaaatgggacagaaggaatacagcattgggactggatctacaaaacaggaagccaagcagctcgcggccaaactcgcctacctacagatcctgagcgaggaaactagtgttaagtctgactacttaagctcaggctcatttgcaactacctgcgaatcgcagagtaacagcttagtgacatccactctcgcctctgagagctcttcggagggcgactttagcgctgacacctcagaaatcaactcaaattcagacagcttaaatagctcttcgcttctgatgaatggactgaggaacaatcagcggaaagcgaagagatccttagcaccccgtttcgatctgcccgatatgaaagagaccaagtataccgtcgataaaaggtttggtatggacttcaaggagatcgagttaataggctcaggtggcttcggccaggtgttcaaggccaagcaccggattgatggaaagacatatgttatcaagcgggtgaagtacaacaacgagagcaaaacgaaatgtctcttcatccaaatggaattttgcgataaggggaccctggagcagtggatagagaagcgccgtggagagaagctggataaagtactggctctggagctgttcgaacagatcaccaaaggagtggattacatccattctaaaaagaagaaaaaaaaaaagaaaaaatag

SEQ ID NO: 24038 - DNA, 309 bp, synthetic construct
  misc_feature 1..309: note = Description of Artificial Sequence: Synthetic coding sequence
  source 1..309: mol_type = other DNA
atggccggcgacctgagcgccggcttcttcatggaggagctgaacacttaccggcagaaacagggagtcgtgctgaaatatcaggagctgcccaactctggccccccccacgaccgacggttcactttccaggtcatcattgacggcagggaatttccagagggggaaggtaggagcaagaaggaggctaagaacgccgcagccaaactggcagtcgagattctcaacaaggaaaagaaggccgtgtcccctcttttgttgaccaccaccaactcctcagagggactcagcatgggaaactacatctag

SEQ ID NO: 24039 - DNA, 1656 bp, synthetic construct
  misc_feature 1..1656: note = Description of Artificial Sequence: Synthetic coding sequence
  source 1..1656: mol_type = other DNA
atggccggcgacctgagcgccggcttcttcatggaggagctgaacacctaccgtcagaagcagggcgtggtgcttaaatatcaggaactaccaaactccggacccccccacgaccgcaggtttacattccaagtcatcatagatgggcgcgagtttcccgagggggagggaaggtcaaagaaggaagccaagaacgctgccgcaaagctggcagtcgaaattctaaataaggagaagaaagcggtatcgcctctgctgttgaccaccaccaattcttcggaagggctctcaatggggaactacattggcctgatcaaccggatcgcccaaaagaaacggctgaccgtgaactatgaacaatgtgctagcggcgtgcacggcccagaaggtttccattacaagtgcaagatgggacagaaggagtattccatcggcaccggctcaactaaacaggaagccaaacagttagccgccaaattggcctacctgcagatccttagtgaagaaacttctgtaaaatcagactatttgtcctccgggtcatttgccacaacgtgtgagagtcagagtaactccctcgtgacatcgaccctggcctccgagagtagcagcgagggagatttctccgcagacacttcagagatcaattccaacagcgatagcctcaatagttcaagcctgctcatgaatggtctgcggaacaatcagcgaaaggccaagaggagcctggccccccgatttgatctacccgacatgaaagaaaccaagtacaccgtggacaagagattcgggatggacttcaaggagatcgagctgattggaagcggcggcttcgggcaggtttttaaagccaagcaccgtatcgacggcaaaacgtacgtcataaagcgagtcaagtacaacaatgagaaggccgagagagaggtgaaggcgctggctaagcttgatcacgttaatatagtccattataatggatgctgggatggtttcgattacgaccctgagacatcagatgactctttggaaagtagcgactacgaccctgagaatagtaaaaattcctctaggtccaaaactaagtgcctgtttattcagatggaattttgcgacaaggggaccctcgagcagtggatcgaaaaaagacggggagaaaagctcgacaaggtactggccctcgagttgttcgagcagattactaagggcgtggactacattcacagtaaaaaattgattcatagggatctgaaaccttctaatatttttctcgtggacactaaacaggttaagattggcgattttggcctggtgacaagtttgaagaacgatggcaagaggacccggtccaagggcacgctacgctacatgagtcccgaacaaattagtagccaagactacgggaaggaggtggacctgtacgctcttgggttgatccttgccgaattgttacacgtgtgcgatacagcttttgagacgtcaaaatttttcaccgatttgcgagatggcattatttctgacatctttgacaagaaagaaaagactctgttacaaaagctcttgtcaaagaagcctgaagacaggcctaacactagcgagattctcagaaccttgaccgtgtggaaaaagtctcccgagaagaatgagcgccacacgtgctag

SEQ ID NO: 24040 - DNA, 351 bp, synthetic construct
  misc_feature 1..351: note = Description of Artificial Sequence: Synthetic coding sequence
  source 1..351: mol_type = other DNA
atggccggcgacctgagcgccggcttcttcatggaggagctgaacacataccggcaaaaacagggagtggtgcttaaataccaggaactgcccaattctggcccaccacatgaccgacgttttactttccaagtgattatcgatggccgcgagttcccagagggagaggggcggtctaaaaaagaagcaaaaaatgctgcggcaaagctggctgtcgagattttgaataaggagaagaaagccgtcagccccctcctcctgacgaccaccaatagttctgagggactgagcatgggaaactacatcggcctgattaaccggattgcccagaagaagagactgactgtatag

SEQ ID NO: 24041 - DNA, 1533 bp, synthetic construct
  misc_feature 1..1533: note = Description of Artificial Sequence: Synthetic coding sequence
  source 1..1533: mol_type = other DNA
atggccggcgacctgagcgccggcttcttcatggaggagctgaacacctaccggcaaaagcagggggtggttttgaagtatcaagagctgcccaactctggtccaccacatgaccggcgcttcaccttccaggtcataatcgatggtagagaattcccagagggcgaagggagatcgaagaaggaggccaaaaacgctgccgccaaacttgccgtagaaattttgaacaaagaaaagaaggcagtgtctccgctcctgttaaccacaactaacagcagcgaaggtttgagtatgggaaactatatcggactgattaaccgaattgcacagaagaaaaggctcacagttaactacgaacagtgtgcgagcggggtgcacggtcccgaggggtttcactacaagtgcaagatgggacagaaggaatatagtatcgggacggggagcaccaaacaagaagcaaagcagctagcagctaaactggcctatctgcagattcttagtgaggaaacctccgttaaatcagactatctctcatccggctctttcgcgacaacgtgtgagtctcagtctaactccctcgtgacatccacccttgcctctgagagcagctctgagggagattttagtgccgacacttccgaaattaacagtaattccgattcacttaattcatctagtctgctgatgaacggacttcgaaataaccaaagaaaagccaaaaggagtttagccccccgttttgatctgcctgacatgaaggaaaccaagtatacagtcgataagcgcaaagctgaaagggaggtaaaagcgttagcgaaactcgaccatgtgaacatcgtgcattacaacggatgctgggacggcttcgactatgacccagaaacctcggatgactcacttgaatcatcagattatgatcctgagaatagcaaaaacagctcccgatctaaaaccaagtgccttttcatccagatggaattttgcgacaaggggactcttgagcagtggattgagaagcggcgcggcgagaaactggataaagtactcgcccttgaactctttgaacagattacaaaaggagttgactacattcacagcaagaaactgattcatcgtgatctcaaacccagtaatatctttctagtagacaccaagcaagtcaaaatcggcgattttggcttggtgacctccctgaaaaatgacggcaagcggactagaagcaagggcaccctgcggtacatgtcccccgagcagatctcatcacaggattacggaaaggaagtcgatctgtatgctctggggcttatcctggccgagttgctgcacgtctgcgacaccgcctttgagacctccaagttttttacagaccttagagatgggatcatctcagatattttcgacaagaaggagaagacacttctacagaagttgctctcaaagaaacctgaagaccgccctaacacgagcgagattttgcggacacttaccgtgtggaagaagagccctgaaaagaatgagcgtcacacctgctag

SEQ ID NO: 24042 - DNA, 4800 bp, synthetic construct
  misc_feature 1..4800: note = Description of Artificial Sequence: Synthetic coding sequence
  source 1..4800: mol_type = other DNA
atgaacaaggccccccagagcaccggccccccccccgcccccagcccaggcctgccccagcctgcttttcctcctggtcagacagctccagttgtattctccactccacaggcaactcagatgaatacccccagccagccaagacagcatttctatcccagcagggcacaaccccccagctccgccgcttcccgagtgcaatccgcggcccccgcccgcccggggcctgcggcacacgtttatcccgccgggtcgcaggtgatgatgatcccctcacagatttcctacccagcaagccagggcgcctattacatccccggccaggggagatcaacatatgttgtcccgacccagcagtatccagtacagcccggagcccctggcttctaccctggcgccagcccaacagaattcggcacgtacgctggagcttattacccagcccagggcgtccagcaattcccgactggcgttgcacccacccccgtgttgatgaatcaacccccacagatcgctcccaaacgcgaaaggaaaaccatccggattagggatcctaaccaaggtggaaaggacattaccgaagagatcatgagcggggcccgcacagcgtccacgccgacaccccctcagaccgggggtggactggagccgcaggctaacggagagacacctcaggttgccgtgatcgtaaggcccgatgaccggtctcagggggctatcatcgccgataggcccggtcttccggggccagaacattctccaagcgaaagccagccatcttcgccatcacccacgccatcgccctcccctgtcttggagcccggaagcgaaccaaatttagctgtcttgtctatcccgggggacactatgaccacaatacagatgtctgtggaggaaagcacccccatctcccgtgaaactggagagccataccgtctgagcccagagccaactcccctggcagaacctatcctggaggttgaggtgacactttctaaacccgtaccagagtctgagttctccagcagcccactgcaggcccctacaccattagcatctcacactgtggagattcatgagcccaacggcatggtgcctagcgaggacctggagccagaggtggaaagctcacccgagctggccccccctcccgcctgcccgtctgagtcacccgtgccaatagcccctaccgctcagcctgaggaattgctaaacggtgccccatctcctccagccgtcgacctcagtcccgtctccgagccagaagagcaggccaaggaggttacagcctctatggcgcctcctacaattccatccgcgacacccgcaaccgcaccttcggccacctccccagcgcaggaggaagaaatggaggaggaggaagaagaggaagaaggagaggccggtgaagccggagaggcggagtctgagaagggcggagaggagcttcttccgcctgaatctacccccatcccagcgaatctctctcagaacttggaagccgctgcagcaacacaagtggcggtttccgtgccaaaacgtaggagaaagatcaaggaactaaataaaaaggaagcggtgggagatctgctcgacgcgttcaaagaggccaatcctgccgttcccgaggtggaaaatcagccaccagccggcagcaatcctggccctgagtcagagggctctggggtgcccccacggcctgaagaagccgacgagacctgggactctaaagaggataagattcacaatgccgagaacatccagcccggcgagcaaaagtatgaatacaagtccgaccagtggaaacctctgaacttagaggaaaagaagcgttacgatcgggagttcctgctggggttccagtttattttcgcctcaatgcagaagcccgagggactgcctcatatatcagatgtcgtgctggataaggcgaacaagacgcctcttcggcctctggaccccacacgcctacaaggcatcaattgcggccccgacttcactccaagtttcgcaaatctgggcagaaccacactctccacgagaggcccccctcgaggcggccctggcggtgaactgcccagagggccggctggactgggcccccgccgctctcaacaagggccccgaaaggagcccaggaaaatcatcgccactgtgctgatgacagaagacatcaaactgaataaggccgagaaggcctggaaacctagctccaaacgaacagctgccgataaggaccgaggggaagaggacgcagatggatcaaaaacccaagacctcttccgccgtgtgcgcagcattttaaacaaattaactccacagatgtttcagcagctcatgaaacaggtaacacagctcgctatcgacacagaggagaggttgaagggggtgatcgacctgatatttgaaaaagccatcagtgagcccaattttagcgtcgcttacgcaaacatgtgtaggtgtttgatggccctcaaagtcccaactaccgaaaagcctaccgttactgttaactttagaaagttactccttaaccgctgtcaaaaagagtttgagaaggataaggacgacgatgaggtgtttgagaagaagcaaaaagaaatggatgaagccgcaacagctgaagaacgtggcaggctaaaggaggagttagaagaggcccgcgatatagcacgaagacgaagcctcgggaatattaagttcatcggggaactgtttaagttgaagatgcttactgaggctattatgcatgattgcgttgtgaaactgctcaaaaatcacgatgaggaaagtttggaatgcctttgtaggttgctcacgaccatcggcaaggatctagactttgaaaaggctaaacctagaatggaccagtactttaaccagatggaaaaaattattaaggaaaaaaaaacctcctcaagaattcggtttatgctccaggacgtgttggatttaagaggatctaactgggtcccccgacggggagaccaaggtcccaagacaattgaccagatacataaagaggccgaaatggaggagcacagggagcatattaaggtgcagcagttaatggcaaagggtagcgacaagcggcgggggggcccgcctggccctcctattagtcgcggactccccctcgtggacgacggtggctggaatacggtcccaatatcaaagggtagccgcccaatagacaccagtaggctcactaaaattaccaagccaggaagcattgattctaataatcagttgttcgcccccggaggccgactgtcctggggaaaaggatcttctggtggcagcggcgctaaacctagcgatgcggcgtctgaggctgcacggcccgcgacatcaactctaaatcggttttctgctctacagcaggcggtgcccacagaatccaccgataatcgccgtgtggtgcagcgaagctccctaagccgcgagcgcggcgaaaaagccggggaccgaggagatagactggaaaggagcgagcggggaggcgaccgcggagacagactggaccgtgccagaacacctgccacaaaacgctccttttcaaaagaagtcgaggaacgtagcagagaacggcccagccagccagaagggctgcgtaaagctgcctcccttacagaagacagagacagggggcgcgacgcggtgaaaagggaggcggccctaccgccggtcagcccgctgaaagccgcattgtcagaggaagaacttgagaagaagagcaaagctatcattgaggagtatctgcacctgaacgacatgaaggaagcggttcagtgtgtgcaagaattggcatctccaagcctgttgttcattttcgtgagacacggagttgaaagcactctggagcgatccgctatagcccgcgaacatatggggcagctgttacatcaacttctctgcgctggccacctgtcaaccgctcagtactatcaaggactgtatgaaattctggagttggccgaggatatggaaattgacatcccccacgtctggctgtacttagcggaactcgtgacacctatcctgcaggaaggcggggtgcctatgggagagctgtttagagaaataaccaaacctctgagacccttaggcaaagccgcgagcttacttctggagatcttgggacttctttgcaaatcaatgggcccaaaaaaggttggcaccctgtggcgagaagccggtctgtcctggaaagagtttttaccagagggtcaggacatcggggcttttgtggcagaacagaaagtggagtacacgctgggcgaggaatctgaagcgcctggtcagcgcgccttaccttcggaagagctaaaccgtcaactggaaaagttactgaaggaaggctcctccaaccagagagtgttcgactggattgaggccaacttgtcagaacaacagattgtgtctaacactctggttcgcgctttgatgacagcggtctgctatagcgccatcatctttgaaacaccgctcagggtggatgttgcggtcttgaaggcccgggccaaacttctccagaaatacctgtgtgacgagcaaaaagaactacaggccctttatgccttgcaggcactggtcgtgacgctcgagcagccgcccaacctccttcgaatgttctttgatgcactgtatgatgaagacgtggtaaaggaagacgctttctacagttgggagtcgagcaaagacccagccgaacagcagggaaagggagtcgccctgaagagtgttaccgccttctttaagtggctgagggaagccgaagaggaatcggaccacaattag

SEQ ID NO: 24043 - DNA, 4803 bp, synthetic construct
  misc_feature 1..4803: note = Description of Artificial Sequence: Synthetic coding sequence
  source 1..4803: mol_type = other DNA
atgaacaaggccccccagagcaccggccccccccccgcccccagccctgggcttccccaacccgccttccctcctggccaaaccgccccagtggtgttttctaccccacaagccacccagatgaatacgccatcacaacctaggcaacacttctatccatctcgcgcccaacctcccagctcagccgcatcaagagtacagagcgctgcccccgcccgacctgggcctgccgcacatgtctaccccgccggaagccaggtgatgatgattccgagccagatcagttatcccgcatctcagggagcgtattacattcctggtcagggcagatccacatacgtagtgcccactcaacagtaccccgtccagcccggtgcccccggcttttatccaggtgctagcccaacggaatttggaacatatgccggtgcttactatcccgcgcagggagtccagcaatttcccaccggcgtggcaccaacccctgtgctgatgaatcagccacctcagatcgcaccaaagagggagcggaaaacaatccgaatccgggaccctaaccagggcgggaaagacattacagaggaaataatgtccggcgcccgaaccgcctcgacgccaacgccacctcaaaccggaggaggactcgagccccaagcgaatggggaaacgcctcaggtcgctgtaatcgttagacccgatgatcggagccagggagctatcatcgccgacagaccaggtctgccagggcctgaacattcacctagtgaatctcagccctcttcgcccagtcctaccccttctccaagccctgtccttgaacctgggagtgaaccgaacctggccgtactctctatccctggagatacgatgactactattcagatgtcagtggaggagagcactcccatttctagagagactggcgagccctatcggctgtctcctgaaccgacaccactagcggaacccattctcgaagtggaggttaccctgtcaaagccagtgccggagagtgagttctcatcctccccacttcaggcgcctacccctctcgccagccacacagtggaaattcacgagcctaacggcatggtgcctagcgaggacctggagcctgaggtcgagtcctcccccgaactagcccctccacctgcctgcccatctgaaagccccgtgcccatagcccctactgcccagccagaggagctgctgaacggggcaccttccccccctgcggtggacctgagccctgtaagcgagcctgaagaacaagccaaggaggtgacagcctcgatggcccccccaacaatccccagtgctacacctgctactgccccctcagcaacgtcaccagctcaggaagaggaaatggaggaagaggaggaggaagaggagggcgaggctggtgaagctggcgaagccgaatctgagaagggcggggaggagctattacctccagagagtacccccatccctgcgaatctgagccagaacctagaagctgccgcagccacacaggtggctgtgtccgtgccaaaaagacgccgcaaaattaaagagctgaacaagaaagaggcagtgggggacctgctagatgccttcaaagaggctaaccccgccgttccagaggtggagaatcaaccccccgcggggtccaaccccggtccagaaagcgaggggtccggtgtaccaccacgtcctgaggaagctgacgaaacatgggattcaaaggaagacaaaatacacaacgccgagaacatccaaccgggtgagcagaaatacgagtacaaatccgaccaatggaagccgttaaatctggaggagaaaaagagatacgacagggaattcttgctgggattccagttcatcttcgccagcatgcaaaaacccgagggactgccacacatcagcgatgtcgttctggacaaagccaacaagacacccctcaggcccctagacccaacccgcctgcagggtattaactgtggtcccgatttcacaccttctttcgcaaatctgggtcgcacaacattatctaccagaggacccccccgaggaggacccggaggcgagctgccaaggggaccccaggctggactaggacccagacgttcccagcagggccccaggaaagagcctcgaaagatcatagccaccgtgctcatgacagaggacatcaagttaaataaagccgagaaagcttggaagccctcgagcaaaaggacggccgcagataaagatcgtggcgaggaagatgccgacggttctaaaacccaagatctgtttcgacgtgtacgaagcattctcaacaagctgacaccgcagatgtttcagcagctgatgaagcaggttactcagctggccattgataccgaggagcggctgaagggagtgatcgacttaatttttgagaaggccatctctgaacccaacttctccgtggcttacgctaatatgtgtcgatgcttgatggcactgaaagtgccaactaccgaaaaacccacggtgacggtgaatttccggaaactactgcttaatcgatgccaaaaggaattcgaaaaagataaggatgatgatgaagtgttcgaaaaaaaacagaaagaaatggacgaagccgccaccgctgaggaacgagggagactgaaggaggaactagaggaggcccgggatattgctagacggaggtccctgggaaatattaagtttatcggcgaactctttaagctcaaaatgttaaccgaagccatcatgcacgattgcgtggtgaagctgctgaaaaatcacgacgaagagagccttgagtgtctttgtaggctgctgacgacaatcggcaaagacctagatttcgagaaggcaaaacctcggatggatcagtattttaatcagatggaaaagataataaaggaaaaaaaaacaagctcacggattagatttatgctacaggacgtgctcgatctgcggggttccaattgggttcctaggaggggtgatcagggccctaaaacaattgatcagattcacaaggaggctgaaatggaggagcaccgcgagcacatcaaagtgcagcagctgatggccaaaggctccgataaaaggcgtggaggacctcccggcccgccaatctctagagggttgccactggtggacgacggcggatggaacaccgtgccgattagcaaaggttctcggcccatcgacacatctcgtttgacaaaaatcacaaagcctggctctatcgatagtaacaaccaactgttcgcacccggtggccgtctcagttggggcaaagggtcctccggtggtagcggggcgaaaccatccgacgctgcatccgaggcggcgagacccgccactagcaccctcaaccggttttccgctttgcagcaggccgtgccgactgaaagcactgacaacaggagagtagtccaacgtagttctttaagcagggaaaggggagagaaagccggggatagaggggaccgcttggagcgatccgagcgcgggggggacaggggggaccgactggatcgtgctcgcacgcctgcaacaaagcgcagtttcagcaaagaagtggaggagcgttcaagagaaaggccatcccagcctgaaggattacgaaaggctgcctctctgaccgaggaccgagaccgcgggagggacgcagtgaaacgcgaagccgcgttgcccccagtgtcgccactgaaggccgcactcagcgaggaagagctggaaaagaaaagcaaggctattatcgaggaatacctccacctcaatgatatgaaggaggccgtccaatgcgttcaggagctcgcatctccatctctgctgtttatctttgtgcgacacggtgtggagtcaaccctggagcggagtgccatcgcccgggaacacatgggacagctgctgcatcagctattatgtgccggccatctatctactgctcaatattatcaagggctctatgaaatccttgagttggctgaggacatggagatagacatccctcatgtttggctatacctggctgaactcgttaccccgatcctgcaagaagggggtgtgcctatgggagagctgttcagagaaataacaaagccgttgcgtccactcgggaaggctgcctccctcctgctggagatcctggggctgctgtgcaagtctatggggcccaagaaagtcggaaccctgtggcgcgaggccggcctgtcatggaaagagttcctgcccgaggggcaggacataggagcatttgtcgctgagcagaaagtggagtacaccttaggggaggagagcgaggcccccggccagcgtgcattgccgagcgaggaactgaatcgccagcttgagaaactactgaaagagggctccagtaatcagagggtcttcgattggatcgaagccaatctgtccgagcagcaaatcgtgagcaacacactggtcagggctctgatgacagctgtgtgttacagcgcgattatctttgagactccgctgagggttgacgttgccgtcttgaaggcacgtgccaaactgctgcaaaaatatctgtgtgacgagcaaaaagaactccaagccctctatgcactgcaggcattagtcgtgaccttagagcaaccacccaatctacttcgaatgttcttcgatgccctgtacgacgaagatgttgtaaaagaggacgctttctattcttgggagagttctaaagaccctgctgaacagcaaggaaaaggggttgccttgaagtcagtcacagctttcttcaaatggcttagggaggccgaggaggaaagtgatcacaactag

SEQ ID NO: 24044 - DNA, 4800 bp, synthetic construct
  misc_feature 1..4800: note = Description of Artificial Sequence: Synthetic coding sequence
  source 1..4800: mol_type = other DNA
atgaacaaggccccccagagcaccggccccccccccgcccccagcccaggactccctcagcctgctttcccacccgggcaaacagcccctgtagtgttcagcaccccccaagcaactcagatgaacacacccagccagccaagacaacacttctacccttccagggcacagccacccagtagcgctgcctctagggtgcaatcagctgcccccgctcggcccggtccagcggctcacgtctaccccgccggctcacaggtcatgatgatcccgtctcagatttcttatcccgccagtcagggagcatattacatccctggtcaaggccgctctacttacgtggttccaactcagcagtacccggtgcagccaggcgcgcccgggttttatccaggagcaagccctactgagtttggaacctatgccggtgcttattatcctgcccagggcgtgcagcagtttcctactggcgtggctcctacacctgtgttaatgaaccaaccacctcagatcgcccctaagcgcgagagaaagactattcgaatccgcgaccccaaccagggaggaaaggacattactgaggagatcatgtccggtgcccggacggctagcacccctacacccccccaaacaggtgggggcttagagccacaggccaatggcgagaccccacaggtggcagtgatcgtaaggcccgacgatcgttcgcaaggcgcaataatcgccgacaggccggggcttcccggccccgagcactcgccttccgagtctcaaccaagtagcccatcccctacgccaagcccctcgccggtgctcgaaccggggtcagagcccaacctcgctgtcttatctatccccggcgacaccatgacaacgatccagatgagtgtggaggagtctacccctatttctagagaaactggtgagccctacagattgagtccagagcccactcccctcgctgagccgatcctggaggtcgaagtgaccctgtctaaaccagttcccgaaagtgagttttccagctctcccttgcaggcccctacccctttggcttctcacacagttgagatccatgaacccaatggaatggtaccatctgaggatctggagcctgaagtcgaatccagcccagaactagcccccccacctgcttgcccctccgagtctcctgtgccaatcgcccccactgctcagccagaggagctgctgaatggtgccccatcgccccctgctgttgacttgtcacctgtcagtgaaccggaggagcaagccaaagaggtcactgcatctatggctcctcccaccattccctccgcaacacccgcgacagccccctcagcaacttcgcccgcacaggaggaggaaatggaagaagaagaggaggaggaggaaggtgaagctggcgaggctggcgaagccgaatctgaaaaaggaggcgaggaacttctgccacccgagtctacccccataccagcaaaccttagccagaatttggaggctgccgccgccactcaagtcgcagtgagtgtacccaagcgcagacgtaaaatcaaagagctcaataagaaagaggccgtaggtgaccttctcgatgcttttaaggaagccaaccccgccgtgccggaggtggagaatcagccacctgccggcagtaacccaggaccagagtctgagggttcgggagttccccccaggcccgaagaggcagacgagacttgggattctaaagaagacaagattcacaacgcagaaaacatccaacccggtgagcagaagtatgaatacaaaagtgaccaatggaagcccctcaacctagaagagaaaaagaggtacgaccgggaattcctgttaggctttcagttcatatttgcctccatgcagaagccagaggggctgccccatatctccgacgtggtgctggataaggcaaacaagaccccactcagacctttggatccaactaggttacagggcataaactgcggccccgatttcacaccctctttcgcaaatctaggacggaccactcttagcacaagaggcccccctagaggaggccccggtggagagcttccgcgcggaccagcaggactgggaccccgccgctcccaacaagggccccggaaagagccgaggaagatcattgccaccgtgctcatgaccgaggatatcaagctcaacaaagcagagaaggcctggaagccctcatccaagcgaaccgctgcagataaggataggggcgaagaggacgcagatggttccaaaacacaggatttgttccgacgcgtccgatcaatcctgaataagttaacccctcagatgtttcagcagctcatgaagcaggttactcagctggccatagataccgaggagaggctgaagggcgtgatcgacctaatattcgagaaagccattagcgagcccaatttcagtgtggcatacgccaatatgtgtagatgcctaatggcattaaaagtccccaccaccgagaaacctacggttacagtgaatttcaggaagctgctgctaaatcgttgtcagaaagagttcgaaaaggacaaggacgatgatgaggtgtttgagaagaagcaaaaagagatggacgaggctgccaccgcagaggaaagggggcggttaaaagaggaacttgaggaggctcgggacatagcccgcaggcgttcacttggcaatattaagttcataggcgagctgtttaagctgaagatgctgaccgaggcgattatgcatgattgcgtggtaaagctcctcaaaaaccacgatgaagagagcctggaatgtctttgtagattgctgacaaccatcggaaaagacttggacttcgaaaaggcgaagccaagaatggaccagtatttcaatcaaatggagaaaatcatcaaggagaagaagacaagctctcgaatcagatttatgctgcaggatgtcctggacctgagaggtagcaactgggttcctcgtagaggggaccagggacccaaaacgattgaccagattcacaaagaagctgagatggaggagcaccgagagcatattaaggttcagcagctcatggccaagggaagcgacaaacgtaggggaggaccacccggtccacctataagccgcggactgccccttgtcgacgacggaggttggaacactgtgcctatctctaaagggagtaggccaatcgatacctcccggttgacgaagatcaccaaacctggcagcatcgactcaaacaaccagctttttgcccctggaggacgcctgtcttggggtaaaggtagcagcggaggaagcggcgctaagcccagcgatgccgcctcggaggctgctcgaccggctacctcaactctgaatagattttctgctctccagcaagctgtgccaactgagtctactgataataggcgcgtggttcagcgcagtagtctgtcacgggaacggggggagaaagcaggagataggggtgatcggctggagagatctgaacgtgggggcgatcggggggacagacttgatcgcgctcggacccccgcaactaagaggagtttctccaaagaggtcgaagaaaggagcagggaacggcctagtcagcctgagggccttagaaaagccgcctcgctgacagaggaccgagatcgcggacgtgacgcagtgaaacgggaggcggccctccctccggtgagccctctgaaggcagcgctcagcgaggaggagctggagaagaaatctaaggcaatcatcgaggaataccttcatttaaatgatatgaaggaagctgtgcagtgcgtccaagagctggcctcgccttccttattgttcatttttgtgcgtcacggggtggagtctactttagaacgaagcgccatagcaagagaacatatgggtcaactactgcaccagctgctgtgcgctggacacctctccaccgcacaatattaccaagggctgtatgaaattctcgaattagccgaggacatggagatcgacattcctcatgtctggctgtatctggccgagctcgtcacccccattctccaggaaggaggcgtcccaatgggcgaactttttagggagattacaaagcccctgcggcctttaggaaaagcagcctctttgctgctcgaaatactgggacttttgtgcaagagcatggggccaaaaaaagtcggcacgctgtggcgcgaggcaggactgagctggaaagagttcctgcccgagggacaggacattggtgcattcgtggccgaacagaaagtagaatacaccctgggggaagaatctgaagcaccggggcagcgggcactacccagcgaagagctgaaccgccagctggaaaaattgctgaaggaggggtcatcaaaccagcgcgttttcgactggatcgaagctaacttatccgagcagcagattgtgagcaatacattggttagagcattgatgaccgcagtgtgctactctgccattattttcgagacacctctgcgggtcgatgtcgcagtgttgaaagctagggcaaaactgctccaaaagtacctgtgcgatgagcagaaggagctgcaggcgctatacgctctgcaagccttggtggtgaccctggagcagcctcctaaccttctgcggatgttctttgatgcgctctacgatgaggacgtggtaaaagaagacgctttttacagttgggaatccagtaaggatcctgctgagcaacagggaaagggtgtggctctcaagtcggtgacagcattttttaagtggcttagagaagctgaggaagaaagtgatcacaactag

SEQ ID NO: 24045 - DNA, 4308 bp, synthetic construct
  misc_feature 1..4308: note = Description of Artificial Sequence: Synthetic coding sequence
  source 1..4308: mol_type = other DNA
atgaaccagcccccccagatcgcccccaagcgggagcggaagaccattcgtatccgtgatccgaaccagggcggtaaggacatcaccgaggagataatgtcgggagctcgcacagcttctacccccacacctcctcagacaggcggggggttggagccccaggcaaacggcgagactcctcaggttgccgttatcgttagacccgacgaccgaagccagggggccattattgctgaccgaccggggctccccggcccagagcattctcccagcgaatcgcagcccagctcgcctagcccgacaccgtcgccctcgcccgtgttggagcctggatccgaacccaatcttgccgtgctatctattccgggcgacaccatgactactattcagatgagtgttgaggagtctactcctatttcaagagagaccggtgagccataccgcctatcccctgagcctaccccactggccgagcctattctggaagtggaggtgactttatctaaaccggtgcccgaatccgagttctcatcctctcccttgcaagctccaacccctttggcaagccataccgtcgagatacatgagccgaatgggatggtacctagcgaagacctggagcccgaagtcgaatcctcccccgaactcgcaccccccccggcctgtcccagcgagagtccagttcccatcgcacccacagcacaaccagaggagctactcaacggagcgccctcaccgccagccgtggatctgtctccagtgtccgaacccgaagaacaggctaaggaggtaacagccagcatggccccccccaccatccctagcgccaccccagccaccgcccctagtgccacctctcctgcccaagaggaggaaatggaggaggaggaagaggaagaggaaggcgaggcaggggaggcaggtgaggccgagtccgaaaaaggaggagaggaactgctgccccctgagtcaacgccaataccggccaatttgagtcaaaatctggaagccgccgctgctacgcaggtcgccgtctcagttcctaagcggcgtcggaagataaaggagctcaataagaaagaggcagtgggagatctgctcgacgccttcaaagaagccaaccctgccgtccctgaagttgaaaatcagcctcctgctggaagtaatccaggacctgagtctgagggctcaggtgtccccccgcggcctgaggaggccgacgagacctgggactcaaaggaagataagattcacaacgccgagaacatccagcccggagaacaaaagtatgagtacaagagcgaccagtggaaacctctcaatctcgaagaaaaaaaacggtatgacagggagttcctgctcggctttcagttcatttttgccagcatgcagaagccagaggggctgcctcacatctctgacgtggtgttagacaaggcaaacaagacccctctgcgaccattagacccaacgaggctgcagggcattaattgtggccctgacttcacaccaagttttgccaatctgggtcgtaccaccttgtctacccgagggcctccacggggcggccccggcggcgagctgccacgtggaccagctggactaggcccccgtcggtcccaacagggcccaagaaaagagcctaggaaaattatcgcaactgtgttgatgactgaagacattaagttgaataaggccgagaaagcatggaaaccttccagcaaaaggaccgctgctgacaaggatagaggcgaagaggatgcggacggctcgaaaactcaggacttgttcaggcgtgtgcgctcgattctcaataaactgaccccccagatgtttcaacaactgatgaagcaggtgacacagctcgccattgacaccgaggagagattgaagggtgtgatcgatctgatattcgagaaggccattagtgagcccaacttctctgtggcgtacgccaacatgtgcaggtgtctcatggctctcaaagtaccaactaccgaaaaaccgaccgtaaccgtgaactttagaaaactgctcttgaatcggtgtcagaaggagttcgagaaggataaagacgatgacgaggtcttcgagaagaaacaaaaagagatggacgaagctgctaccgcggaggagagagggcgacttaaggaggaactggaggaggcaagagacatcgctaggcggaggtctctcgggaatattaaattcattggggaactgtttaagctgaagatgctgaccgaagcaataatgcacgattgtgtggtcaaactgctgaaaaatcacgatgaagagagtttggaatgtctctgcaggctactcactacgatcggcaaagacctggatttcgagaaggcaaaaccccggatggatcagtacttcaatcagatggagaagatcatcaaggagaagaaaacctcttccagaatccgcttcatgctacaggatgtccttgatctgcggggctctaactgggtgccgcgccgaggtgatcaggggcccaaaaccatcgaccaaattcataaggaagcagaaatggaggagcacagggagcacattaaggtacaacagttgatggccaagggcagcgacaaacgtagggggggaccgccgggacccccaatctccagaggactccctctggtggacgacggcggctggaatactgtgcctatttccaaggggtcccgcccaattgatacttcccgactgactaagattacaaaacccgggtccatcgatagtaataatcaacttttcgcacccggcggacgtttgtcttggggcaaggggtcctctggtggtagtggcgccaagcctagcgacgccgcgagcgaggcagcccgaccagctacaagtaccctgaatagatttagcgctcttcagcaagctgtgccaaccgaatctactgacaacaggagagtggttcagagaagtagcctgtctcgcgagcgcggggagaaagcgggagacagaggagatcgcctcgagcgaagtgagcgtggcggcgacagaggcgataggttggatcgggccagaacccccgctaccaagcgttcttttagtaaagaggtggaagagagatccagggagagaccttcccagcccgaggggctgcgaaaggctgcttccttaactgaggaccgagatagagggcgcgatgccgttaagagggaggcagcgctgccgccagtctctccgcttaaggcagctttgagcgaggaggaactcgagaagaaatcgaaggcaattattgaggagtacttgcatcttaacgacatgaaggaagctgtgcagtgcgtgcaggaactggccagtccgtccctgctcttcattttcgtgagacatggcgtcgagagcactctggagcggagcgccatagctcgggagcatatggggcaactgttgcaccagctactgtgcgccgggcatctatccaccgctcagtactatcagggcttatacgagattctcgaactggctgaagacatggaaatcgatatccctcatgtctggctctatctagctgagctggtaactcctatactgcaagaggggggcgtgcctatgggggaacttttcagggagattactaagccgcttcgccctctgggtaaagcggcgagcctgcttcttgagattttaggcttgctttgcaagtcaatgggccctaaaaaggtgggtaccctgtggcgggaagcgggcctgagctggaaagagtttctgccggaggggcaagatatcggagcttttgttgccgagcagaaggtcgagtacacactcggagaagagtccgaggctcccggccagcgggcactgccctccgaggagctcaatcggcagcttgaaaagctcctgaaggagggatctagtaaccaacgcgtgttcgactggatcgaagccaatttatccgagcaacaaatagtctcgaacacactcgtgagggctctgatgaccgccgtgtgctattccgccattatcttcgaaacgcccctccgagttgatgtcgctgtgctgaaggctcgcgcaaaactattgcaaaagtacctttgtgacgagcagaaagaactgcaggcactgtatgccctgcaggcgttggtggtaaccttagagcagcctcccaatttgctccgtatgttcttcgatgccctttacgacgaggatgtggttaaagaggacgctttctacagctgggaatcctctaaagatccagccgagcaacaaggcaaaggagttgctctgaagagcgttacagccttttttaaatggttacgcgaggccgaggaagagtccgatcataattag

SEQ ID NO: 24046 - DNA, 4821 bp, synthetic construct
  misc_feature 1..4821: note = Description of Artificial Sequence: Synthetic coding sequence
  source 1..4821: mol_type = other DNA
atgaacaaggccccccagagcaccggccccccccccgcccccagccctggcttgcctcagcccgccttcccgcctggccagacagcacctgtcgtattcagcactccacaagccacacagatgaatactccatctcagcccaggcaaggcggtttccggtcactccagcacttttatccctcccgagcccagcccccttctagcgctgcaagtcgggttcaatccgcagcaccagctagacctggccccgccgcacatgtgtaccctgctggaagccaggtcatgatgattccatcccagatatcttaccctgctagtcaaggagcctactacatacccggccaaggccggtccacatatgttgtgccgacgcagcagtaccctgtacaacctggcgccccagggttctacccaggcgctagtccgacagagtttggaacatatgccggagcctattatccggcacagggggtgcagcaattccctaccggtgtagcacccacgcccgtgctgatgaaccagcctccccagatagcaccgaaacgcgagagaaaaactattagaattcgcgatccaaatcagggcggaaaagacatcaccgaagaaatcatgtctggagcacggacggcgagcacaccgacccctccccagacaggcgggggcctggaaccccaggcaaacggagaaacccctcaggtagccgttatcgtccgacccgatgacagaagtcaaggcgctatcattgcggatcgaccaggactgcccggtcctgagcattccccatcagaaagtcagccctccagcccaagcccgactccttcacctagcccagttctggagcccgggtcagaaccaaacttggccgtgctttccattcctggggacactatgacaactatccaaatgagcgtagaagaaagcaccccaattagtcgggaaacaggggaaccgtatcgtttgtctcccgagcctacacctctggctgagcccatcttagaagtggaagtgactcttagcaagcccgttcctgaatctgaattttcatcgagcccgcttcaagcacctactcctcttgcctcccataccgttgagatccacgagcctaacgggatggtgccatcggaggacctggagcctgaagtggagagctccccagaactggcccctccccctgcctgcccctctgaatcccccgtccctattgctcctactgcacagcccgaagagttactcaacggcgcccccagccctcccgcggtcgacctaagccccgttagcgaacccgaggaacaggctaaagaggtgacagcatctatggccccgccgaccattccttctgctactcctgcaacggcccccagtgccacctcaccagcccaggaggaagagatggaagaagaggaggaagaggaggagggagaggcaggcgaagccggcgaagctgaatcagagaagggaggagaagagctgctccctccagaatccacccccatccctgccaatctgagccagaacttagaggccgctgcagccactcaggtggcggtgtccgttcctaagaggaggcggaagatcaaggaacttaataaaaaggaagcggttggggatctcttggacgcctttaaggaggccaaccccgccgtacctgaagtggaaaaccagccgccagccggcagcaacccagggcctgagtccgagggaagcggggtaccaccaagaccagaggaggcagacgagacctgggattctaaggaggataagatacacaatgctgagaacatccaacccggggagcaaaaatacgagtataagtccgaccaatggaagcctctgaatctggaagaaaaaaaacggtacgaccgggagttcttgctaggtttccagtttatttttgcctccatgcaaaaacccgaggggctgcctcacattagtgacgtcgtgctcgacaaggctaataaaaccccgcttcgcccgctggatccaacgcgcctacagggcatcaactgtgggcccgatttcaccccctctttcgcaaacctgggtaggactaccctgtcaacaaggggccctccacgggggggccccggtggcgagctgccgaggggaccagcgggacttgggccacggagaagtcagcaggggcctcgaaaggagcccaggaaaatcatagctaccgtcctgatgaccgaggacattaagcttaataaggccgagaaggcctggaaaccctcatctaagagaacagcagctgacaaggataggggagaagaagacgcagacggtagcaaaactcaggacctgttcagaagagttcgctctatacttaacaaactgaccccccagatgttccagcagttgatgaagcaggttacccaactcgcgatcgatacagaagagagactgaaaggtgtaatcgatctgatttttgagaaagccatctcagaaccgaacttcagtgtggcctatgcgaatatgtgccgctgtctgatggcactaaaagtgccgaccactgagaagccaacagtgacagttaatttccgcaagctactcctcaatcgctgtcagaaagagtttgagaaggacaaggacgatgacgaagtcttcgagaagaagcagaaggagatggatgaggcggccactgcggaggaacgggggcggctcaaggaggaacttgaagaagcccgagacatcgccagaagacggtcgttaggcaatattaaatttattggggagttgtttaagctgaaaatgttaaccgaagctataatgcatgattgtgttgtcaaactgcttaagaaccacgacgaagaaagcctcgaatgtctctgtcgcctgctgactactatcgggaaggatcttgactttgagaaagccaaaccaaggatggatcaatactttaaccagatggagaagatcataaaggagaagaagacctctagcagaatccgcttcatgctgcaagacgtgctggatttgcgcgggagtaactgggtccctcgcagaggagatcagggtcctaaaacaattgaccagatccataaggaggccgaaatggaggagcacagggagcatatcaaagttcagcagcttatggcaaagggaagcgacaagaggagaggcggtccgccaggtcccccgatctcaaggggcttgcccttagtggacgacggaggctggaatacggtcccaatcagtaaaggcagcaggccaattgacacctcacggctgaccaaaatcactaagcccggctctatcgattccaataatcaattgtttgcaccagggggtcggctgtcctgggggaaaggctccagcggaggctcaggggctaagccctccgatgccgccagcgaggccgctaggcctgccacttcaacgctgaacagattttccgcactacagcaagctgtgcccaccgagagcactgataacagaagggtcgtgcagagaagctctctgtcgcgagagcggggtgaaaaggccggagatcgcggtgaccgcctggaaaggtccgagcgaggaggagaccgcggggaccgactagaccgcgccaggactcctgctaccaaaaggagtttctcaaaggaagtcgaggaaagatccagggagcggccctcgcagccagaggggctgcgaaaagccgcgtcactaacagaagatagggataggggccgagatgccgtcaaacgcgaagcagcgcttccaccggtaagtcccctcaaggcagctctttccgaggaggagttggagaagaagagcaaagccatcattgaggagtatctgcatctcaatgatatgaaggaggctgtacaatgcgttcaggaactcgcaagtccttcgctcctttttatctttgtgaggcacggcgtggagtctactcttgagcgatccgccatcgcaagagagcatatgggtcagttgctgcaccagctgttatgcgctggccatctctccacagcacaatattatcagggtctttatgaaatcctggaactcgccgaggacatggagatcgatattccacatgtgtggctctacctggccgagctcgttacacccatattgcaggaggggggcgtcccgatgggggagctgttccgagaaattacaaaaccgctcaggcctctgggaaaggccgcctccctgttgctggaaattctgggactgctctgtaaaagcatgggaccaaaaaaagtgggcaccctgtggcgggaggctggcttgtcatggaaggagtttttaccagaaggacaggacatcggggcctttgtcgccgaacagaaagttgagtacactttaggcgaggagagcgaagcacccgggcaacgggctttacccagtgaggaactgaaccggcagctcgaaaagttgctgaaggagggctcatcaaatcaacgagtcttcgattggatagaggccaatttatcagaacagcagattgtctccaacacactggtcagagctctcatgactgccgtctgttatagcgccataatcttcgagactcccttgagagtggacgtagcagtgctcaaggcccgtgccaagctgctgcagaaatacctgtgcgatgagcagaaggagctacaggcactctacgccctccaggctctggttgtcacgttggaacaaccaccaaatctgctgcgtatgttcttcgacgctttgtatgacgaggatgttgtcaaagaggacgccttttactcctgggagagctccaaagaccctgccgaacagcaaggaaaaggggtggcgctgaagtctgtgaccgcttttttcaagtggctgcgcgaagcagaagaagaatcagatcataactag

SEQ ID NO: 24047 - DNA, 4821 bp, synthetic construct
  misc_feature 1..4821: note = Description of Artificial Sequence: Synthetic coding sequence
  source 1..4821: mol_type = other DNA
atgaacaaggccccccagagcaccggccccccccccgcccccagccccggacttcctcaaccagcctttccaccaggacagaccgcccctgtggtctttagcacacctcaagccacacagatgaatactcccagccaacccagacagggtggattcagatccctgcagcacttctacccctcccgagcccagccccccagttctgctgctagtcgggtgcagtcggcagcccctgcaaggccgggcccagccgcccacgtgtacccagccggaagccaggttatgatgatacctagccagatttcctaccccgcctcacaaggtgcctattatattcccggacagggccgatcgacctatgtagtgcctacgcagcagtaccccgtccagcccggggctcccgggttctatcccggcgcgagtcctacagagtttggaacctacgccggtgcctattaccccgcccagggagtgcaacagttccctacaggtgtggcacctaccccggttctaatgaaccagccaccccagattgcacccaaacgagagaggaagacaattcgtattcgcgatcccaatcagggtggcaaggatataaccgaggaaattatgtcaggtgccagaacggcatctacacccacccccccccagacgggcggaggcctggagccccaggctaatggggagaccccccaggtggccgtcatcgtccggccagacgatcgctcccagggcgcaattattgctgatcggccaggtcttcccggaccagagcattctccatcagagagccagccttcgagcccatcccctacacctagcccatcgcccgtgctggaacccggaagcgagcccaatctcgctgtgctgtccatacccggagacaccatgacaaccattcagatgagcgttgaggaatcaacccccatctctcgcgaaactggcgaaccctacaggctgtctccagagcctacccccttggcagaaccaatactcgaggtcgaagtgactctttctaaacctgtgccagaaagcgaattttcgagcagtccccttcaagctcccaccccactcgcctcgcataccgttgagatacacgaaccaaacggcatggttccaagcgaagacctggaacccgaggtggaaagttcccctgagcttgctccccccccagcttgtccttcagagagtcctgtcccaatcgctccaactgctcagcctgaggagctcctaaatggtgctccctctccccctgcagtagatctaagccccgtaagcgaaccagaagagcaagccaaggaggtgactgcaagtatggccccaccaactattccatccgccactcccgctaccgctccgagtgctacatctccagctcaagaggaggaaatggaggaggaagaagaggaggaagagggggaggccggtgaagcaggggaggctgaatccgagaaaggcggcgaagagctactacctcccgaaagcactcccatccccgccaacctcagccagaatttggaagcagcagcagcgacccaggtcgcagtctccgtgccaaaaaggaggaggaagatcaaggagcttaataagaaagaggctgtaggggacttactggacgcgttcaaagaagcaaaccccgctgtaccagaagtggagaatcagcctccggctggatcaaatcctggcccagagtctgaaggatccggagtgccccctaggcctgaggaagccgacgagacatgggactccaaggaggacaaaatacacaatgcagagaatattcagcctggagagcagaagtacgagtacaagagcgaccagtggaagcctctgaacctggaggagaagaagcggtacgatagagaatttctgctgggtttccagtttattttcgctagtatgcaaaagcccgaaggactgccccacatttctgatgtggtgctagacaaggccaataagacgccacttaggcccctcgatcctacacgtttgcaagggataaactgtggcccagacttcaccccctcttttgcgaatctcgggagaacaactttaagtaccagaggcccacccaggggtggaccaggcggggaactacctcgcggcccggcgggcctcgggcctcgtcggtcacaacagggccctcggaaggagccaagaaagattatcgcaaccgtactaatgaccgaagacatcaagcttaataaggctgagaaggcatggaaacccagttctaagaggactgccgccgataaggacaggggcgaggaggatgctgacggctcaaagacccaggacctattcaggagggtacgatccatcctcaataaattaacaccacagatgttccagcaactgatgaagcaagtgacccagctggccatcgacacggaggaacgactgaaaggcgtcattgacctaatctttgaaaaggcgatctctgagcctaatttctcagttgcttacgctaatatgtgtcgctgtcttatggctttgaaggtgccaacaaccgaaaagccaactgtgacagtgaatttcaggaaactgctgctcaatcggtgtcagaaggagttcgaaaaagacaaggatgacgacgaggtctttgaaaaaaagcagaaggagatggacgaagccgcgacggctgaagagagggggcgtttgaaagaggaactggaggaagccagggacatcgccaggcgacggtccctggggaatatcaaattcattggcgagttgttcaaactgaagatgttaactgaggcaatcatgcacgactgcgtggtgaaactgctgaaaaaccacgacgaggaatcactggaatgtctatgtcgactgctgacgaccataggaaaggacctggactttgaaaaagctaaacctcgcatggatcagtactttaatcagatggaaaaaattattaaggagaagaaaaccagttcccggatcagatttatgctacaagatgtactcgacctcagaggatccaactgggtgccccgaaggggcgaccaggggccaaagacaatcgaccagatccacaaggaagctgaaatggaagaacacagagagcacatcaaggtgcagcagctgatggctaaggggtctgataagagacgtgggggacccccaggccctcccatatcccgtggtctcccgctcgtggatgacggcgggtggaacacggtgccaattagtaaagggtctcgacccattgacacttcgcggctgactaaaatcacaaaaccaggctcaatcgactccaataatcagctgtttgcgccaggcgggcgcctgtcctggggcaaaggaagcagtggggggagcggggctaagccaagtgacgccgctagcgaagcggctagaccagcaacaagcacccttaacagatttagcgccctccagcaggccgtgcccaccgagagcacagacaatcgaagggtcgtccaaagatcaagtttgtctcgtgagcggggagaaaaagctggggatcggggtgatcggctcgaacggtctgagcgaggtggcgacagaggcgatagactggaccgtgctagaactcccgccacaaaacgatctttttctaaggaggtggaggagcgttctcgggagagacctagccagcctgaaggcctaaggaaagcagcctccttgactgaggatagagacagaggacgcgatgccgtgaagagagaggccgcgcttccgcccgtctcacctttgaaggccgctctgagtgaggaggaactggagaaaaaatccaaagccattatcgaggagtatctgcatttgaacgatatgaaagaggccgtgcagtgcgtgcaggagttggcttcacccagtcttctgttcatatttgtgcgtcacggagtagagtctacactagagcggagcgcgatagcgagagaacacatggggcagctcctccaccaattactgtgtgctgggcatctttctacagcccagtactatcaggggctgtacgaaatcctggaacttgccgaagatatggagatagatatacctcatgtgtggctgtacctcgcagaactcgtaactccaattctgcaggagggaggagtgcccatgggcgaactttttagggaaataacaaagcccctgaggccattaggcaaggcagcttctttactgttggagatcctgggcctcttatgcaagtcaatgggacctaagaaagtaggcaccctctggagagaagccggcctgtcatggaaggagttcctacccgagggacaggacattggcgccttcgttgcggagcagaaggtggaatacaccctgggtgaggaatctgaggcccctgggcagcgggcgctgccttccgaggagctgaatcgccagctggaaaagctgctgaaggagggatcaagtaaccagcgggtttttgattggattgaggcaaatctgagcgagcagcagatcgtgtccaatacactcgtccgggcactgatgaccgcagtctgctattctgctattattttcgaaacaccgctgcgagttgacgtggctgttctgaaagcccgcgcaaagctgctgcaaaagtatctatgcgatgagcaaaaagaattgcaggcactctacgctctgcaggctttagttgtcactctggagcagccccctaaccttttgaggatgttcttcgacgcgttgtatgacgaggatgtggtcaaagaagacgctttctattcctgggagtcgtcaaaggaccctgccgaacaacaaggcaaaggtgtcgccctgaaaagcgtgacagccttcttcaaatggcttagggaagctgaggaagaatccgaccacaactag

SEQ ID NO: 24048 - DNA, 4539 bp, synthetic construct
  misc_feature 1..4539: note = Description of Artificial Sequence: Synthetic coding sequence
  source 1..4539: mol_type = other DNA
atgatgatccccagccagatcagctaccccgccagccagggcgcctactacattccgggccaaggacggtctacctatgtggttccaacacagcagtacccagtgcagccaggagccccaggattttaccccggggctagccctacggagttcggcacgtatgccggtgcgtactatcctgcacaaggcgtgcagcagttccccacgggcgtggccccaactcccgttctcatgaaccagccaccgcaaattgcacccaaaagggagaggaaaacaataagaatacgcgatcccaatcagggaggaaaggacattactgaagaaattatgagtggagctcggaccgctagcactccaaccccgcctcagaccgggggagggcttgaacctcaggccaatggagagactcctcaggtggctgtgatagtccgacccgacgaccggtcacagggggccatcatcgccgaccggcctggattgccaggccctgagcacagccctagcgaaagtcagcctagttccccgtcacccacccccagtccaagtcccgtcctggaacctggatctgaacccaacttggccgtgctgtcaatccccggcgacaccatgaccaccatccagatgtctgttgaggaaagtactcccatcagtcgggagactggagaaccataccgtctgtcgccggagcctactcctttggccgagccaatcctggaggtcgaagttactttgagtaaaccagtgcctgaatccgaattttcatccagccccctccaagcccccacacctctggccagccatacagtggagattcacgagcctaacgggatggtccccagtgaagacttggaacctgaggtggaatcaagccccgaactggcgccccctcccgcctgtccctctgagtcccccgttccaattgctcccaccgcccagcccgaagaactgctcaacggcgcccctagccctccggccgtggacctgagccctgtaagcgaacccgaagagcaggcgaaggaggtgacggcatctatggctccaccgaccattccttccgccaccccagccactgctcctagcgcaaccagtcctgcacaagaagaggaaatggaggaggaagaagaggaagaggaaggagaggctggagaagctggggaggcagaaagcgagaagggaggcgaagagttgttgcctcccgaaagcacccccatccccgctaacttatcccaaaatctggaggccgccgccgctacccaagtcgccgtgagcgtccctaagaggagacggaagataaaggagctcaacaaaaaggaggccgtgggcgatcttttagatgcgttcaaagaagcgaatcctgccgtgccggaggtggaaaatcagccaccagccggcagtaaccccggcccggaatccgaaggtagcggggttcccccacgaccagaagaagctgacgaaacgtgggattctaaagaggacaagattcacaacgccgagaacatccagccaggagaacagaagtacgagtataaatcagatcagtggaagcccctgaatctggaggagaagaaaaggtatgatagagagttcttgctcggttttcaatttatctttgcatccatgcaaaaaccggagggattaccgcacatctcagacgttgttttggataaggccaataaaacccctctgagaccccttgatccaacccgtcttcagggcataaactgcgggccagatttcactccaagcttcgcaaacctgggtaggacaacgctctctacacgcggacctccccgtggtggccctgggggggagctgccccggggccctgcaggcctgggacctagacgttcacagcagggaccgcgcaaagaacctaggaagattattgcaaccgtcctgatgactgaggatattaagctgaacaaagctgagaaggcctggaagccatccagtaagcggacggcggccgacaaggacaggggggaagaggatgctgatggtagcaagacacaagacttgttccggcgcgtgcgtagcattttaaataaactcactcctcagatgttccagcagctgatgaagcaggttactcaactcgccatcgacaccgaggagcgactgaagggcgtaatagacctaatctttgagaaagctattagcgagccaaacttctctgtggcctatgcgaacatgtgtcgatgcctgatggcacttaaggtccccactacagagaagccgaccgttacagttaacttccgaaaactccttcttaacagatgtcagaaggagttcgagaaagacaaagatgacgatgaggtgttcgagaaaaagcagaaggaaatggacgaagcggcgactgctgaggaacgagggagactgaaagaggagctggaagaagccagggatatcgccaggcgaaggtcactggggaatataaaatttatcggcgaactgtttaagctcaagatgctgaccgaggccataatgcatgattgtgtggtgaaactgttgaagaatcacgacgaggagtctctggagtgtctgtgccgactcttgaccaccataggaaaggacctggatttcgagaaagcaaagccccgcatggaccaatattttaaccagatggaaaagattataaaggagaagaagacaagctcacggataaggtttatgctgcaggacgtgctcgatctgcgtggaagtaactgggttccaaggcgcggggaccagggccctaagactatcgaccaaattcacaaggaggctgaaatggaggaacacagggaacatatcaaagtgcaacagctcatggccaaggggtccgacaaaaggaggggcgggcccccaggaccacctattagcaggggcctgccactagtggatgacggcgggtggaacactgtgcctatttctaagggaagccggcccattgacacttctaggctgaccaagataactaagccaggcagcatcgatagcaataaccagctgtttgcccctggaggccgtttatcatggggaaaggggagctctggagggtccggcgcaaaacctagcgatgccgcatctgaggccgccaggccagcaacctccaccctaaacagattttcagcccttcagcaggctgtgcctactgaaagtaccgataatcgcagggttgtgcaacgctctagcctaagtcgagagcgtggggagaaggccggggatcgcggagatcgacttgagcgaagcgagcgtggaggagaccgcggggacaggcttgaccgcgcccgcactcctgccactaagcggtctttttccaaagaagtggaggaaagatcacgggaaaggccttcgcagccagagggcctgagaaaggccgccagtctgacagaggatcgtgatcgtggccgcgatgctgtaaagcgagaggccgctttgccaccagtttcccctctaaaggccgcccttagcgaagaggaacttgaaaaaaagtctaaagccataatcgaggaatacttacacctgaacgatatgaaagaagcagtacagtgtgtccaggaacttgcaagccccagtctgctgtttattttcgtcagacatggagtcgagagcaccctagaaagaagcgctattgcccgcgaacacatgggtcagctcctgcaccagctactttgtgccggacacctttcaacagctcagtattaccagggactgtacgagattttggagctggccgaagatatggaaatagacatacctcacgtctggctctacttggcagaattagtgaccccaatcttgcaagaggggggtgtgcccatgggggaattattccgggaaattacaaagccactgaggccactgggaaaagcggcgtccctgctgctggagattttaggccttctctgcaagtccatggggcctaagaaagtcggaacactgtggcgcgaagccgggctttcctggaaagagtttctgcctgagggccaggatatcggagcattcgtggctgaacaaaaggtggaatacactctgggcgaggaaagtgaggctccgggccagagggccttacccagcgaagaacttaataggcaactcgagaagctgctcaaggagggctccagcaatcagcgagtttttgactggatagaggccaatctttcagagcagcaaattgtaagtaatacccttgtgcgggcactgatgaccgctgtgtgctactctgctatcatcttcgaaacgcctctgcgagtcgacgtggctgtgctgaaagcaagagcaaagctgttacagaagtatctttgtgacgagcagaaagaactgcaggctttgtacgccctgcaggcattggtcgtgaccctcgaacagcctcccaatcttcttcgcatgtttttcgatgcactgtacgacgaagatgtcgtgaaggaagatgctttctacagttgggaatcaagtaaagaccctgctgaacagcagggcaagggcgtcgccctgaaaagtgtgactgcgttctttaaatggctgagagaggctgaagaggagagcgatcataactag

SEQ ID NO: 24049 - DNA, 4539 bp, synthetic construct
  misc_feature 1..4539: note = Description of Artificial Sequence: Synthetic coding sequence
  source 1..4539: mol_type = other DNA
atgatgatccccagccagatcagctaccccgccagccagggcgcctactacattccagggcagggcagaagtacttacgtggttccaacccagcaatatcccgtgcaacccggggcccctgggttttacccaggcgcgagccctaccgaatttggtacttatgccggtgcttactatcccgcgcagggcgtgcagcagttccccaccggggtcgcccctaccccagtcttgatgaaccagcccccccagattgctcctaagagagagagaaagactatccggattagagaccctaaccagggaggcaaggatattactgaggaaatcatgagcggggcacggacggcgtcaacccccacgccaccccaaaccggaggggggcttgaacctcaagctaacggagaaacaccccaggttgctgttatcgtgcggccggatgacagatcgcagggcgcgattatcgctgacagacccggactccctggcccagagcattccccttccgagtcccagccatcttcgccctctccaactccgtctccaagtcctgtgttggaacccgggagcgagcctaaccttgcagtgctcagcatcccgggcgatacgatgacgaccattcagatgtccgtagaagagagcacacccatcagtagagagaccggagagccttatcgcctttcccccgaacccaccccattggccgagccgattctggaagtggaggtgaccttaagcaagcccgtgcctgagtcagagttctcctcttcccccctgcaggcccccacccctctcgcgtcccacactgttgagatccatgagcccaatggtatggtgcctagtgaggatctggagcccgaagtggaaagcagcccagaactagccccaccaccggcttgtcccagtgagagccctgttcccattgcacccaccgcccagcctgaggaactactgaacggcgccccaagtccaccagcggtggacctgagccctgtttctgagcccgaggagcaggccaaggaagtgactgccagcatggccccacccactattccttcagctactcccgccacggctcccagcgcaacttctcccgcacaggaagaagaaatggaagaagaggaggaggaggaggagggcgaagccggagaagcaggtgaggctgagagcgaaaaagggggcgaggagctgctgccacccgaatctacacctatccctgccaatctgagccagaatctcgaggctgccgcagccactcaggtggccgtgagcgtgcctaagcgcagacggaagataaaagaactcaataagaaggaggcagtgggggacctccttgacgcctttaaggaggctaaccctgctgtgcctgaggtggagaaccagccccccgctggcagtaatccaggaccagaaagcgaagggtccggtgttccacctcgccctgaagaggccgatgaaacctgggacagcaaagaggacaaaatccataatgccgaaaacattcagcctggagagcaaaaatacgaatataaaagcgaccagtggaagcctctaaatctggaagaaaagaaaagatatgatagggaattcctcctcggctttcagttcatctttgcaagcatgcagaagcccgagggtctgcctcatatttctgatgtggtcctggacaaagccaataagacacccctgcggccgctcgacccaacacgactgcagggcataaactgtgggcccgatttcacaccttcctttgccaatctcgggagaaccaccctctccacacgcggacccccaaggggcggacctggcggcgagctccccagggggcccgctggactcggtccccgccggtcacagcagggccctcgcaaagagcctcgaaaaattattgctacagttctcatgacagaggatataaagctcaataaagctgaaaaggcatggaaacctagttctaagcggacagccgccgataaggatcgcggcgaggaggacgcagatggctcaaaaacccaggacctctttcggagggttcgatccattttaaacaaactcaccccccaaatgtttcagcagctgatgaagcaggtaacacagctcgcaatagatacggaggaacgactgaagggcgttatcgacctgatctttgaaaaggctatttccgagcccaacttttcggtggcttacgccaatatgtgtcgttgcctgatggcacttaaagtgcccacaacggagaaaccaacagtgactgtgaactttagaaaactactgcttaatcgatgccagaaagagtttgagaaggacaaagacgatgacgaagtgtttgaaaagaagcagaaggagatggatgaggcagcaacagcggaagagagaggccgattaaaggaggagctggaggaagcgagggacattgccaggcggcggtctcttggaaacatcaaatttataggtgaactctttaaactcaagatgttgaccgaggccatcatgcatgattgtgtggttaagctactcaaaaatcacgatgaagagagcctggaatgtctgtgtcgcttgttaactaccatagggaaagacttagatttcgaaaaggcaaaacctcgcatggatcagtatttcaaccaaatggagaagatcataaaggaaaaaaaaacatctagtagaattcgcttcatgttgcaggatgtgctcgatttaagaggatcaaattgggtgcctagacggggagatcaaggtcccaagaccatagaccaaatacataaggaggccgagatggaggaacatagagagcacattaaggtacagcagctcatggccaagggctcagataagagacgtggcgggcctcctggtccccccatttctaggggcctgcctctggttgacgacggaggttggaatactgtgcctatttctaaaggctccaggcccattgatacctcccgactgacaaagatcacgaaacctgggtcgatcgactcaaacaaccagctttttgctccaggcggaagactaagttggggcaaaggaagctccgggggctctggcgcaaaacctagtgacgccgctagcgaggccgccaggcccgccacctcaactttaaatcggtttagtgctttacagcaggctgtgcctactgagtccacagataacagaagagtggtgcagcgttcctccttgtcacgtgagaggggagaaaaggcaggcgacagaggggacagactcgagaggagcgagagaggcggtgacaggggggaccgtctggatcgggcaagaaccccggccactaagcggtctttcagtaaggaggtcgaagagagatctcgcgaacgccccagccagcctgaaggtctccggaaggcggccagtctgacggaagatcgagaccggggccgagatgcagtcaagcgtgaggccgcgttacctccagttagcccactgaaagccgccttgtcggaggaagaacttgagaagaagagtaaggcaatcatcgaggaataccttcacctgaatgatatgaaagaagccgtgcagtgtgtgcaggaactggcatctccatccctgctgtttatattcgtgcgacacggtgtcgagagcaccctggagcggtccgcaattgcccgagagcacatgggacagctgctgcaccagctgctctgtgctggacatctaagcactgctcagtactaccaaggtctgtacgagattctggagctcgccgaggatatggagatagacattcctcacgtgtggttgtatctggccgaactggtcacacctatactccaggaaggcggggttccaatgggcgaattgttccgcgaaattactaagccacttcgtccgctcggtaaagcagctagtctgctgctcgaaatcctcgggctgctttgtaaaagcatgggacccaaaaaggtcgggaccctttggagggaggctggtctgtcctggaaggagtttctgcctgagggccaggatataggggcttttgtggctgaacagaaggtcgagtacaccttaggggaagagagtgaggcgcctggtcagagagccctcccttctgaggaactgaacaggcaactagaaaagctcctgaaagaggggagctcgaaccagagagtgttcgactggattgaggccaatctcagcgaacaacaaatagtctccaacaccctggtgcgggctctgatgactgctgtgtgctattctgccatcattttcgaaactcctctgagagtcgatgttgccgtgttgaaggcccgagccaagctgcttcagaagtatctctgcgacgagcagaaggagctccaggctctctatgctctacaggcgctggtcgttacattggaacaacctcccaatctgctgcggatgtttttcgacgccttatacgacgaggatgtggttaaagaagacgctttttactcctgggaatcttccaaggatcccgccgagcaacaaggtaagggcgtggccttgaaaagtgttactgcattctttaaatggctccgagaggccgaggaagagtccgaccacaactag

SEQ ID NO: 24050 - DNA, 4683 bp, synthetic construct
  misc_feature 1..4683: note = Description of Artificial Sequence: Synthetic coding sequence
  source 1..4683: mol_type = other DNA
atgaacacccccagccagccccggcagcacttctaccccagccgggctcaaccaccatcttccgccgcatctagggtgcagtccgctgctcccgcccggcctggtccagctgcccatgtttacccagccgggtcccaggtgatgatgattccttcccagatcagttaccccgcatcccaaggggcttactacattccaggccaagggcgcagtacttacgtagtgccgacacagcagtatcctgtgcagcctggagcccccggtttctacccaggggcgagtcccaccgagtttggaacctatgctggcgcatattaccctgctcagggagtacagcagtttcctaccggcgtcgcccccacccccgtgttaatgaatcaaccaccacaaattgctcccaaaagagagcggaaaacaattcgaattcgggatccaaaccaaggggggaaagacatcaccgaggaaattatgtccggggcaagaaccgccagtactcccacaccaccccagaccgggggaggactggagccgcaggcgaacggagagacccctcaggtggccgtgatagtcagacccgatgatagatcacagggtgctattattgccgaccggccgggccttccgggaccggagcactccccaagcgaaagccagccatcaagtccatcccctaccccaagtcctagcccggtgcttgaacctggctctgagcccaatctggcagtgctgtccataccaggcgacacaatgactacgattcagatgagcgtggaagaaagcactccaatcagcagggagactggtgaaccatacagactgtctcctgaaccaactccccttgctgaaccgatactggaagtagaagtgacactctctaaacctgtccctgaaagcgagttttcctcttccccactccaggcacccaccccactggcttctcacaccgtcgaaatacacgagccaaacggaatggtcccatccgaggacctggagcctgaagtggaatccagtccagaactcgcaccaccacccgcttgtccaagcgaatcccctgtccccatcgcccccactgcccagcctgaggagctattgaacggcgccccttctccacctgccgtagacctgagtcctgtctctgagcctgaggaacaggccaaggaagttacagctagtatggccccacctacgattccctctgccacccccgctactgcacccagtgctacaagccccgcccaggaggaagagatggaggaggaggaagaagaggaggagggggaagcgggggaggccggagaagcagagtctgaaaaaggaggcgaggagctgttgccgcccgagagcacccccatacccgccaatttaagccagaatctggaggccgcagctgcaacgcaagtggcagtgagcgttcctaaacggaggcggaaaatcaaggaactcaataagaaagaggcagtgggggatttgttagacgcatttaaggaagcaaaccctgccgtcccagaggttgaaaaccaaccgccagccggttcaaatcctggaccggagagcgagggatctggcgttcctccacgaccagaggaggcagacgagacctgggattctaaggaagacaagatacacaacgcagagaatattcagcccggcgaacagaagtatgagtacaaatccgatcagtggaagcctctaaatttggaagagaagaagcggtacgatcgagaattcctcctgggatttcagttcatttttgcctcaatgcagaagcctgaaggcttaccacacatctctgacgttgtgctcgataaggccaataaaactcccctgaggcctctggacccaacaaggctccagggcatcaattgtgggccggacttcacaccaagcttcgctaacttgggtaggactaccctcagtacacggggacctccacggggcggacccggcggagaactgcctcgtggtccccaagcggggcttggccctagacggagtcaacagggcccccggaaagagcctcggaaaatcattgcgaccgtgttgatgactgaggacatcaaactgaataaggctgagaaggcctggaagccctcctccaaaagaactgccgccgacaaagacaggggagaggaggatgccgacggcagcaagacccaggatctgtttagaagagtaaggtccatcctcaataaattgacccctcaaatgtttcagcagcttatgaaacaggtgacccagctggcgattgatactgaggaaaggttaaaaggcgttatcgatttaatttttgaaaaagcaatttcagagccaaatttcagcgtagcttacgcaaatatgtgtaggtgtctgatggccctgaaggtgccgacaaccgaaaagcccactgttacggtgaacttccggaaacttctgttgaacaggtgccagaaagagtttgagaaggacaaggacgatgatgaggtgtttgaaaaaaagcagaaggaaatggacgaagcagctacagccgaggaacgagggaggctgaaggaggagctggaagaagcgcgggacattgcgcgccggcgtagtctgggcaatataaagttcattggcgagttgtttaaactgaaaatgttaaccgaggccatcatgcacgattgtgttgtgaaattactcaaaaaccatgacgaagaaagtctggagtgcctctgcaggcttctcactaccatcggaaaagacctcgattttgagaaagcaaaacccagaatggaccagtatttcaaccagatggagaaaattatcaaagaaaagaagacttctagcagaatccgttttatgctgcaggacgtcctagacctgagaggatctaactgggtgcccagacgaggcgaccagggccccaagacgatcgatcaaatccataaagaagccgagatggaggagcacagagaacacattaaagtccagcagctcatggcaaaggggtctgataagcggcgtggagggccccccggacctccaattagtagaggcttgcccctagtggacgacggaggatggaacacagtgcccattagtaagggctctcgtcctatcgacacctctcggctcaccaagattacgaaacccggatccattgactctaataaccagctgtttgcgccgggaggacggctgagttggggtaaaggttcttcaggcgggtctggtgccaagccaagcgatgccgccagtgaagccgccagacccgcaacctctacattgaaccggttttccgccctgcagcaagcagttccaaccgaatcaaccgataataggagagtcgtgcagagaagtagcctctctagagaaaggggggagaaggcaggtgataggggggaccggcttgagcgcagcgagcgaggcggcgataggggggataggctcgatagagcccgcacacctgctaccaagaggagcttctcaaaagaagtcgaggagagatcacgggagcgcccgagtcagcctgagggactgcggaaggccgcgtccctgacggaggatagggaccgagggagggacgcggtcaagagagaggccgcactgccccccgtaagtccactcaaggctgccctgagcgaggaggagctcgagaaaaaatccaaggcaatcattgaagaatacctccatcttaacgatatgaaagaagcagtccaatgtgtacaagaactggcctcaccctcccttttattcatattcgtcagacatggagtcgagtcgacacttgagagatccgcgatcgccagggaacacatgggccaactgctgcaccagctcctctgcgcaggacatctctcaactgcccagtactaccaaggactttatgaaattcttgagctggcggaagacatggagatcgacataccgcacgtctggttatatttggctgaattggtgacccccattcttcaggaggggggagtgcctatgggagagctgtttagagagattacgaagcccctccggcctcttgggaaagccgccagcctcttattagagattctagggctgctgtgtaaatccatggggccaaaaaaggttggcactctgtggcgagaggcaggcttgagctggaaggagttccttcctgaggggcaggacattggtgcgttcgtagccgagcagaaagtggaatacaccctgggcgaagagtccgaggctccaggccaacgcgctctgcctagcgaagagctgaatcgacagctagaaaaactgctaaaggaggggtcctcaaaccagagggtgttcgactggattgaagctaatttatctgaacagcagattgtttccaatacactagttcgcgcactcatgacagcagtgtgctattccgccatcattttcgagaccccactgcgggtcgacgtggcggtcctgaaggctcgagctaagctactccagaagtacctgtgcgatgagcagaaggagttacaggccctgtatgctctgcaggccctggtggttaccctcgagcaaccccctaacctgttacgaatgtttttcgacgccctgtatgacgaagacgtggtcaaggaagatgccttttattcctgggagtctagtaaggacccagctgaacaacaagggaagggggtggccctgaaaagtgtaaccgcttttttcaagtggctgcgggaagctgaagaggagagtgatcacaattag

SEQ ID NO: 24051 - DNA, 4680 bp, synthetic construct
  misc_feature 1..4680: note = Description of Artificial Sequence: Synthetic coding sequence
  source 1..4680: mol_type = other DNA
atgaacacccccagccagccccggcagcacttctaccccagccgggctcagccgccaagctcggccgctagccgggtgcagtcagccgccccggccaggccaggccccgccgcgcacgtctacccagcaggctctcaggtgatgatgataccctcacagatttcataccccgctagccaaggggcctactacatcccgggacaaggaagaagcacttacgttgtacctacccagcagtacccagtgcagcccggcgcgccggggttttatcctggagcgtctcccaccgaatttggaacctacgccggagcatactaccccgcccagggagtgcagcagttccctactggcgttgcgccaacccctgttcttatgaatcagccccctcagattgcacctaaacgagaaaggaagacaatcaggatacgagacccaaatcagggagggaaagacatcaccgaggaaattatgtcgggtgcaagaaccgctagcacacccacccccccccagaccggtggaggcttagagccgcaggccaatggcgaaacaccgcaagtagcagtcattgtgcgcccagatgatcgaagccagggggctatcatcgcagatagaccagggctacccgggccagagcactccccctccgagtctcaacccagcagcccatccccaacacccagcccttcacctgtgctggagcccggctccgagccgaacctggctgtgctgagcatcccaggcgacacgatgactaccattcaaatgagcgttgaggagtcaacgccaattagtagggaaactggagaaccctaccgactcagccctgaaccgacccccctcgccgagccaatactggaggtggaggtgactctgtcaaagcccgtgcctgagtcggagttcagttcaagccctttgcaggcccccactcctcttgcatcccacacagtggagattcatgagcctaacggcatggtgcctagcgaggacttggaaccagaagtggagtcctcaccagagttggcccccccacctgcttgcccttctgaaagtcccgtgccgattgcccccaccgctcagcctgaggagctgctgaacggagctcctagtcctcctgcagtcgacctatcccctgtttcagagcctgaggagcaggccaaggaagtcaccgcaagcatggcacctccaactataccatcagcaacacctgctacggccccttcagctacgagcccagcccaagaggaggaaatggaagaggaggaagaagaagaggagggcgaggcaggggaggccggagaggccgaaagtgagaagggcggcgaggagctgctgcccccagagagcactcccatacctgctaatctgtcgcagaatcttgaggccgccgccgctacacaagtcgctgtgtcagtcccaaaacgtagacggaaaataaaggaactgaacaaaaaagaggctgtcggcgacctgcttgacgcctttaaagaagctaaccccgcggttcccgaggtagagaaccagccgcctgcaggctctaaccccggcccagaaagcgaaggtagcggcgtcccacctaggcccgaggaggcagatgaaacatgggactccaaagaggataaaatccacaacgcagagaatatccagccaggagagcaaaaatacgagtacaagagtgatcagtggaagcctcttaacttagaggaaaagaagcggtacgacagggagttcctgttggggttccagtttatcttcgcttccatgcagaagccagagggtttgccccatatctctgacgttgtgctggataaggcaaacaagacgcccctgcggccactagatccaacccggctgcagggaatcaactgtgggcccgattttacacctagctttgcaaacctgggtcggacaacgctgtctactcgtggcccaccccgggggggtcccggaggagaactgcctagggggcccgcaggccttggaccaagacgatcccaacaggggccaaggaaagagccgcggaagattattgctacggttttaatgacagaagacattaaactcaacaaagccgaaaaagcctggaagccaagctccaaacgcactgcggccgacaaggacagaggcgaggaggatgcagacggaagcaaaacccaagacttattccggagggtcaggagcatcttaaataagctgaccccccagatgttccagcagctgatgaagcaggtcacccagcttgcaatagataccgaagagcgtcttaagggagtgatagacctcatcttcgagaaggccatttcagagcctaacttctcagtcgcttacgctaacatgtgcagatgtctgatggccctcaaagtgcccacaacggagaagcccactgtgaccgttaacttccgaaaacttcttttgaacagatgccaaaaagagttcgagaaggataaagacgacgatgaggtattcgagaaaaagcagaaggaaatggacgaggccgccactgctgaagagcggggccgtctcaaggaagaactcgaggaggcccgcgacatcgccagacgccgttcgctgggaaatattaaattcattggtgaattgttcaagctcaagatgctgaccgaggcaatcatgcacgactgcgtcgttaagctgcttaagaaccacgacgaagaaagcctcgagtgcctgtgtcgtctgctgaccactatcggcaaagacttagactttgaaaaagctaaaccccgcatggaccagtactttaatcaaatggagaaaatcatcaaggagaaaaagacgtcctcacggatcaggttcatgctgcaagacgtgctggaccttcggggcagcaactgggttcctagaagaggggatcagggtcccaaaactattgatcaaattcataaagaagccgagatggaagagcacagggagcatatcaaagtgcaacagctgatggccaagggctcagacaaacggagaggcgggcctcccggcccgccgattagccggggcctcccactggtggatgatggaggatggaacactgtcccgatttccaaagggagtagacccatcgacacgtctcggcttacaaaaatcaccaagcctggcagtatcgactcaaacaaccaactttttgcgcccgggggacgcttgagctggggaaagggctcttcgggcggatcaggggccaagccaagcgatgctgcctccgaagcagccagaccagccacctcaaccttgaatcggttcagcgctctccagcaagctgtgccgaccgagtccaccgataatcgtagggtcgtgcaaaggagctctctgtcgcgcgagcgaggtgaaaaagcaggcgaccggggtgatcggctggaaaggtccgagcggggaggcgatcggggggaccgcctcgatcgtgctcgcacccccgccaccaagcggtccttcagtaaggaagttgaggagcggtctagggagagaccctcacagcccgagggcttgagaaaggctgcgtcgttgaccgaggaccgggaccgtggtagagacgctgtgaaaagagaagccgcactccctcccgtttccccattgaaggcagctctctccgaggaggaactggagaagaagtcaaaggccattatcgaagagtacttacacctgaatgatatgaaagaggccgtccagtgtgtgcaggagctcgcatccccgtctttactattcatatttgtgaggcacggggtcgagtctacgttggaacggtcggctattgccagggaacacatggggcagctgctccaccaactcctgtgtgctggccacctgagcactgcgcagtactatcagggcctgtatgaaatcctggaactggcggaggatatggagatagacattccacatgtctggctttacttggctgaattggtaactccaattctccaggaggggggcgtcccgatgggcgagttgtttcgagagatcacgaagccgctcaggcccctcggcaaagcagcctccctgttgctcgaaattctggggctgctgtgcaaatctatggggcccaagaaggttgggaccctgtggcgggaggccggactatcctggaaggagtttctcccagagggccaggacattggagcctttgtggcagagcagaaagtcgaatataccttgggcgaggagagtgaggcaccgggtcagcgcgccctcccaagtgaggagctgaacagacagctggaaaagcttttgaaagagggaagctcaaatcaacgcgtgtttgactggatcgaggcaaacctcagcgagcaacagatagtgagtaacactctggtgcgcgccctgatgacagcggtctgttactcagccatcatcttcgaaacccccctgcgggtcgacgtagccgtgctgaaggcccgggccaaactgctgcagaaatacctatgcgacgagcagaaagaactccaggctttgtacgcgctgcaggccctggtggtcacattagagcagccaccaaacctgctgcgcatgtttttcgatgcactgtatgatgaggatgtggtgaaagaagacgcattttattcatgggagagttctaaagatcccgcagagcagcagggcaaaggtgtggccttgaaaagtgtcaccgctttcttcaaatggcttcgggaggcagaggaggagagcgaccacaactag

SEQ ID NO: 24052 - DNA, 4821 bp, synthetic construct
  misc_feature 1..4821: note = Description of Artificial Sequence: Synthetic coding sequence
  source 1..4821: mol_type = other DNA
atgaacaaggccccccagagcaccggccccccccccgcccccagcccgggactgccgcagcccgcttttccgcccggacagaccgctccagtggtgtttagcacaccacaggctactcaaatgaatactccttctcaaccacgacagggcgggtttcgttccctgcagcatttttatccctcccgggcccagcccccctctagcgcagcaagtagagtacaatccgctgcaccagccaggcccggtcccgcagctcacgtgtacccggccggctcacaggtcatgatgattccaagccagatctcatatccggcatcccagggcgcctactacatccctgggcagggcaggtcgacatacgtggtccctacacagcagtatccagtgcagcctggagctcccggcttctatcccggcgcatcccctaccgagttcgggacctacgcgggggcctactacccagcgcagggcgtgcaacagttccccactggcgttgcgccaacccccgtgctgatgaaccagccacctcagatcgctcctaaacgagagcgaaagacaattcgcattagggatccgaaccaagggggcaaagatatcactgaggagattatgagcggggccagaacagcatccacccctacgccgcctcagactggcggaggtctggaacctcaggccaacggagagacaccccaggtagccgtgattgtcagacctgatgatcgcagccagggggctattatcgctgatagaccggggctgccggggcctgaacacagtccatccgaatcccagccttccagcccttcgccaacaccaagcccaagccctgttctggaaccagggagcgagccaaacctggccgtcttgtcaatccctggagataccatgaccacaatccagatgtctgtggaagagtccaccccaatcagcagagagaccggagagccttaccgactgtcccccgaacccacacccctagctgaacccatcctcgaggtggaggttaccctgagcaaacctgtacctgagtctgagttctcgtcttctccgctccaggcaccaacacccctggcttctcataccgtagagatccacgagcccaacggtatggtcccgtctgaagatctggagcctgaagtcgagtcatctcccgaactcgctccacccccagcatgcccctctgaaagccccgtgccaatcgcccctacagcccagccagaagagctattgaacggcgctccctcccccccggccgtggacctctcgcctgtgagcgaacctgaagaacaggccaaggaggtgaccgccagtatggcaccccccacaattcctagtgcaaccccagccaccgctccttctgccacgtcccctgcccaggaagaggagatggaggaagaggaggaagaggaagaaggcgaagccggcgaagccggggaggccgaatctgagaaaggcggcgaggagttacttcctcctgaatccacaccaatcccagcgaatttatcacagaatttggaagcagccgccgcaacccaagtggctgtgagcgtgcccaaaaggcgaagaaagataaaggaactgaataagaaggaggccgtgggagatttgctcgatgccttcaaagaggctaaccctgcagtgcctgaagttgaaaaccagccccccgcggggtctaatcccggaccggagagtgaggggtcaggcgtgcctccacgaccagaagaggctgatgaaacatgggacagcaaggaagacaaaatccacaatgccgaaaacatccaaccgggagaacagaagtatgagtacaaatcagatcagtggaaaccactaaacctcgaggagaagaagcgatacgaccgtgagttcctgctggggtttcagtttatctttgccagcatgcagaaacccgaagggctgcctcatatttctgatgtggtcttagacaaggcaaacaagacgcctctccggccgttagaccccacccgcctgcaaggtattaactgcggtccagatttcactccatcatttgctaacctgggccgcactacgctctctactcgcgggcccccccgtggagggcctgggggtgagctccccagaggacctgcgggcctgggtcctagaagatcacagcagggaccgcgcaaagagcccagaaaaataatcgcgacagtcctcatgacagaagacatcaagcttaataaggccgaaaaggcgtggaagcctagttcaaaacggacagccgccgacaaagacagaggtgaggaagacgcggatggttcgaagactcaagacctatttaggcgcgtgaggagtatcctgaacaagctcacaccacagatgttccagcagctcatgaagcaagttacccagctggccatagacactgaggaacgattgaaaggagtgattgatctcatctttgaaaaagccatctctgaacctaacttctctgtggcctatgctaatatgtgccggtgcctaatggccttgaaggtgcccacaactgaaaagcctaccgtcacggtcaactttaggaagctactgcttaaccggtgtcagaaggagttcgagaaagataaagacgacgacgaggtcttcgaaaaaaagcagaaggagatggacgaagcagcaacggctgaagaaaggggtcgactcaaagaggaactcgaggaggcccgtgacatcgcccgtagaaggtcactgggaaacattaagtttattggcgagttgttcaagcttaagatgctgaccgaagccattatgcacgattgcgtggtcaaactgctcaagaaccacgatgaggagtctctggaatgtctgtgtcggctgttgactactattggcaaggatctcgatttcgagaaagctaaaccgcgcatggaccaatactttaaccagatggagaaaatcatcaaagagaagaagacctcaagtagaatacggtttatgctacaggacgtgctcgatctccgcggcagcaattgggttccccgcaggggagatcaagggcccaagactatcgatcagatccacaaggaggccgaaatggaggagcatcgggagcacataaaagtccagcaactaatggctaaaggcagtgacaagcggcggggcggcccccctggtccccccatttcaagagggctccccctggttgatgacggcggatggaacaccgtgccgatatctaaagggtcacgacctatcgatacctcaaggctgacaaaaataaccaagcctggcagtatagactctaataaccaattattcgcgcctgggggtagactgagctgggggaaaggcagcagtggaggtagtggcgcaaagccatcagatgcagcgagtgaggccgcccgccccgccactagtactcttaaccggttttccgcactccagcaggcggtgccaacagaatctaccgataacaggcgggtggtgcagcggtccagcctgtccagggaacggggcgagaaggctggcgatagaggcgacaggctggagcgcagtgaaagagggggcgaccgcggcgaccgcttggatcgcgcgcgcacaccagctacaaaacgtagcttcagcaaggaagtggaagaaaggtccagggagcgacctagtcagcctgagggcctgcgaaaagctgctagcctcactgaggatcgtgacaggggaagagatgcagtgaagcgcgaagctgcattgccgccagtatcccctctgaaagccgcactgagcgaagaagagctggagaagaagtctaaagccatcattgaggagtatttacacctcaatgacatgaaggaagcggtacaatgtgtgcaggaactggcctcaccatcccttctatttatctttgtgcgccatggggtggagtcaaccctggaaaggagtgccattgctcgagagcacatggggcagctgctgcaccagttactatgcgccgggcacctgtctactgcgcaatactatcaaggactgtacgagattctggagttagccgaagacatggagattgatattcctcacgtctggttatatctagcagagttggtcaccccaatcttacaagaaggcggggtgcccatgggtgaactgttccgggaaataacaaagcctctacgacctctcggaaaagcagcatctcttttgctggaaattctggggctgttgtgtaaaagcatgggaccgaaaaaagtggggacactttggcgcgaagccggactgagctggaaggagttcctaccagagggtcaagacatcggtgccttcgtggccgaacaaaaggtcgagtatactctgggtgaggagagtgaggccccaggccagagggcactgccttctgaagagttaaacagacagctcgagaaattgctgaaggagggctcgtccaaccagcgggtatttgactggatcgaagctaacctgtccgaacagcagatcgtgagcaacactcttgttcgcgcccttatgaccgccgtgtgttactctgccatcatcttcgagacaccactaagagtagacgtggctgtcttgaaagcccgggcaaagctgctgcagaaatacctgtgcgatgaacagaaagagctgcaggcgctctatgcactccaggctcttgttgtaaccctcgaacagcctcccaacctgctgcgaatgttctttgatgctctgtatgatgaagatgttgtgaaagaggatgccttctacagttgggagtctagcaaagatccagctgagcagcagggtaagggtgtcgcattgaagtcggtcacagcgtttttcaaatggttgcgagaggccgaggaggagtctgaccacaactag

SEQ ID NO: 24053 - DNA, 492 bp, synthetic construct
  misc_feature 1..492: note = Description of Artificial Sequence: Synthetic coding sequence
  source 1..492: mol_type = other DNA
atgagcggcgcccggaccgccagcacccccacccccccccagaccggaggcggcttggaaccacaggccaatggcgaaactccgcaggtggcggtcattgtccggccggacgatcgctcccagggagccataatcgccgatagacccgggctcccagggcccgagcactccccttcagagagtcaaccgtcctctccatccccaacacctagtcccagtcccgttttggagcctggctctgaacctaacctcgccgtgctctccatcccaggagataccatgaccaccattcaaatgtctgtcgaggaatccacacccatatcacgggagactggggaaccctaccgcctgagcccggagcccacccccctggcggaaccgattctagaggtggaagtaacgctctctaagccggtgccggagtctgagttctcctcatctccactgcaggcaccaaccccactcgcatcccatacagtcgagatacactag

SEQ ID NO: 24054 - DNA, 4542 bp, synthetic construct
  misc_feature 1..4542: note = Description of Artificial Sequence: Synthetic coding sequence
  source 1..4542: mol_type = other DNA
atgatgatccccagccagatcagctaccccgccagccagggcgcctactacatacccggccaggggaggtccacgtacgtggtcccgactcagcagtaccccgtgcagcccggcgccccaggattttaccctggcgcctcccccaccgagtttggaacgtacgcaggcgcatattatcctgctcagggcgtccagcagttcccaactggcgtggccccaacaccagtgctgatgaaccaaccacctcagattgcccctaaacgcgagcgaaaaactatccgcattcgagatcccaaccaaggcggcaaagatatcactgaggaaatcatgtcgggtgcccgtacggccagcaccccaacaccccctcagaccggaggagggctagaaccccaggccaacggcgaaaccccacaagtggccgtcatcgtgcggccggacgacagaagccagggtgctatcatagccgatcgccctggcctaccagggcctgaacatagtccaagtgagagtcagccaagcagccctagccctacccctagtccctcgcccgtactcgagccagggtccgaacccaacttggctgtgttatctattcccggggacacgatgaccactatccagatgtccgtggaggaatctactcctatctctcgagagacgggcgagccttatcggctgtcgccagaacctactcccctggccgagccaattcttgaggtggaagtcactcttagcaagcccgttccagagagcgaatttagcagttcaccgctgcaggcaccgaccccgctcgcaagccataccgtggaaatccacgagccgaatgggatggtgccgagcgaagatctggaacctgaggttgaatcatctccagagcttgccccccctcctgcttgccccagcgaatcccccgtccccatagcccctaccgcacagcccgaggaactcctgaacggcgctccgtcaccgcccgcggtggacctatcaccagtcagcgaaccagaagaacaggccaaagaggtgacagcatctatggcacctcccactataccctcagctacccccgctactgctccgtccgcaacctctccagcccaggaggaggagatggaagaagaggaagaagaggaagagggcgaggctggggaagctggggaggccgagtcagagaaggggggggaggaactcctcccgccggagtcgacaccaatcccagcaaatttgagtcagaatctggaagccgccgctgccactcaggtcgccgtgagcgtgcccaaacggcgcagaaagatcaaggagttgaacaaaaaagaagctgtaggagaccttctggacgcctttaaagaagcaaatcccgccgtgcccgaagtggagaaccagccacctgcaggctctaaccctgggccagaatctgaaggctccggtgtaccgcctcgacctgaagaggcggatgagacctgggactccaaagaggataagatccacaatgcagagaatatacagccaggagagcagaagtacgaatataagtcagaccagtggaagccgctgaacctagaggaaaaaaaacgatacgatagggaattcctgctgggctttcagttcattttcgctagtatgcaaaaacccgagggcctgccccatatctccgacgtcgtcctggacaaggcaaataagacccctctccgccccctggaccctacacgtttgcaggggattaattgcgggcctgatttcacaccttcattcgccaatctggggcggactaccctctctacccgcggacccccccgcgggggaccaggtggggaattgccccgaggtcctcaggccggcctcggacccagacgatctcagcagggtccgaggaaggaacccagaaaaatcatcgccacggtgctgatgaccgaggatattaagctgaacaaggctgagaaagcctggaagcctagtagtaagcggacagccgccgacaaagataggggcgaggaagatgcagatgggagtaaaactcaggatcttttccggcgggtgcggagcattctgaacaaacttactcctcagatgttccagcagttaatgaagcaagtgacgcagctggccatcgacacagaggaacgtctgaagggagtaatcgatctcattttcgagaaagctataagtgagccgaacttctcagtggcctacgcaaatatgtgtcggtgtctgatggctctcaaggttccaacaacagagaaaccaacagtgaccgtaaacttcagaaaactgctcctcaaccgctgtcaaaaggaattcgagaaggacaaggatgatgacgaggtgtttgaaaagaagcagaaagaaatggacgaggctgccactgctgaagaaagagggcgcctgaaggaggaattagaagaagcccgagacatcgctcgcaggagatcattagggaatataaagtttataggggagcttttcaagttaaaaatgctgacagaagcaatcatgcacgactgtgtagtcaagcttctgaagaatcatgacgaggagagcctggagtgtctgtgtaggttattgaccactatcgggaaggatctggactttgagaaagcaaagcctcgtatggaccagtactttaaccagatggaaaagatcatcaaggagaagaaaacaagctccagaattagattcatgctccaagatgtgctagatctccgggggagcaactgggtacctaggaggggagaccagggccccaagacgattgatcaaatacataaagaagcagagatggaagaacacagagaacacatcaaggttcaacaacttatggctaaaggttctgataagcgacgtggcggccctccaggacccccaatctcaaggggtcttcctctggtggatgacggtggctggaatacagtgccgatctcaaagggctctcgccctatcgacacatctagacttacgaagatcactaagcccggttcaatcgatagcaataaccagttatttgcacccggtgggcgcctcagttgggggaaaggaagttccggcggttccggggcaaagccaagcgacgcggcatctgaggccgccagacccgccacctcaaccctgaatcgattttccgccctccaacaggctgtacctactgagagcaccgataataggcgagtagtgcagaggtcatcactatctagggagaggggcgagaaagcaggcgatcgaggggacaggctggaacgatctgaaaggggaggagaccgcggggatcggctggaccgtgctcgaaccccggccaccaagagatctttctcaaaggaagtggaggaaagatctcgagagcggccttctcagccagaaggcctgcggaaggcggcctctcttactgaggatagagaccgtgggagggacgcggtgaaaagggaagcagccttgccacccgtgagtccattgaaggcagccctgagtgaggaggaactggaaaagaagtccaaggcaattatcgaagagtatcttcatctaaacgacatgaaggaagccgttcaatgcgtgcaggaactggccagtcctagtctgctgtttatcttcgtccggcatggcgtcgaatccacgctggagcggtctgctatagcgcgggaacacatgggccaactgctgcaccagctcttgtgtgcagggcacctttcaaccgcacaatattaccaaggcttatatgaaatccttgagctcgccgaagatatggagattgacattccacatgtttggttatacctggccgagttggtgacacccattctgcaagaaggtggcgtacccatgggcgagcttttccgcgaaatcactaaaccgctgcggcccctgggtaaggctgccagtctgctcttggaaatcctcggtctcctctgcaaaagtatgggccctaagaaggtggggactctgtggagggaggcaggcctaagctggaaggaattccttccagaaggccaggatatcggagcttttgtggcagagcagaaggtagaatacaccctgggggaagagagcgaggcacctggccagagggcgctccctagcgaagagctcaaccgccagttggaaaagctactgaaagaaggcagcagcaaccaaagggtctttgactggatagaagctaatctgagcgagcagcagatcgttagtaatactctagtgagggccctgatgacagccgtctgctactccgcaatcatttttgaaaccccccttagggtggatgtggccgtgctgaaggcccgggccaaactgctgcagaaatacctctgcgacgagcagaaggagctgcaggcgctgtatgccctccaagccctcgtcgtaactctcgaacagcctcctaacttgttaaggatgttcttcgatgctttatatgacgaagacgtcgtaaaggaggacgcgttctactcttgggagagcagcaaggatccagccgagcaacagggaaaaggtgtggctcttaaaagcgtcaccgcttttttcaaatggctcagggaggccgaggaagagagcgatcacaattag

SEQ ID NO: 24055 - DNA, 432 bp, synthetic construct
  misc_feature 1..432: note = Description of Artificial Sequence: Synthetic coding sequence
  source 1..432: mol_type = other DNA
atgagcggcgcccggaccgccagcacccccacccccccccagaccgggggcgggcttgagcctcaggccaacggtgaaactccccaggtggcagttatagtccgcccagacgaccgctcacaaggagctataatcgccgaccgccccggtttgcccggacccgagcactccccaagcgaaagccagccatcctccccttctcccacccccagtcccagccccgtacttgagccaggtagcgagcctaatctggctgttctgagcatcccgggtgacactatgaccacaatccagatgtccgtggaggagtccacgcccataagtcgcgagacaggcgaaccataccggctttcccctgagcctactcccctggccgaacccatcctcgaggtggaggtaacactcagcaagccagtgcccgagtctgagtag

SEQ ID NO: 24056 - DNA, 4215 bp, synthetic construct
  misc_feature 1..4215: note = Description of Artificial Sequence: Synthetic coding sequence
  source 1..4215: mol_type = other DNA
atgagcggcgcccggaccgccagcacccccacccccccccagaccggcgggggactggaacctcaagccaatggggaaactccccaagtggctgttatagtgaggcccgacgaccgttcccagggcgcaatcatagccgacaggcccggactcccaggccccgaacactctcccagtgagagccagccatcttcccccagccctacgccttccccctctcctgtgctcgagcctgggagtgaaccaaatctcgcagttttgtcaattcctggcgataccatgacaaccatccagatgtctgtcgaagagagcacaccaatctcacgggaaaccggcgaaccctatcgcctttcacccgaacccacaccgctggcggaacccatcctcgaggtggaggtgaccctgtcaaagccagtaccggagagcgaattctctagttcgccactgcaggctcccacccccctggccagccataccgtcgaaattcacgagccaaacggtatggttccctccgaggacttggaaccagaagtagaatcttctcccgagcttgccccccctccggcatgccccagcgaaagccctgtacctatcgcaccaactgcccaacccgaagagttgctcaacggcgcaccatctccacccgcagtagatctctcgcccgtctcagaacccgaagagcaggcaaaggaagtgacagctagtatggcccctcctaccattcctagcgctactcctgcaaccgccccttctgccacttcacctgctcaagaggaggagatggaggaggaagaagaagaagaagagggcgaagccggggaggccggcgaagctgagtctgaaaaaggaggggaagagctgctcccgccagagtccacccccatacctgcgaacctaagccaaaacttagaggctgccgctgcaacacaggtggcagttagtgtccctaagcgacgccgcaagatcaaagaattaaacaagaaggaagccgtgggggatctgctggatgctttcaaggaggccaatccagccgtgccagaggttgagaatcaaccaccagcagggagtaatcccggtcccgaatctgaaggcagtggggttccaccacgccccgaggaggctgatgaaacatgggacagcaaggaagataaaattcacaacgccgaaaacattcaacccggtgagcagaagtacgaatataaaagcgaccaatggaagcctctgaatctggaggaaaagaaacgctacgatagagagtttcttctgggatttcagttcatctttgcctcaatgcaaaagccagaaggcctgcctcacatctccgacgtcgttttagacaaagccaacaagacgccccttagacccctggatcctactcgccttcaagggatcaattgcggccctgacttcactccatccttcgccaacctgggcaggacaacactttctacccgcggccctcccagagggggtcccggtggtgagctgccacgcggaccacaagcgggccttggacccagacgaagccaacaaggtcctagaaaagagccgaggaaaattatcgccaccgtgttgatgactgaggacattaagctgaataaggccgaaaaagcctggaaacctagttcgaaacgcacggcagctgataaagatcgcggagaagaggatgccgacggcagcaagacccaggacctttttagaagggtacggtcaatcctgaataagctaaccccacagatgttccagcagctcatgaagcaggtcacccagttagcaatcgatacagaggagcggctcaaaggggtaatcgacctgatcttcgaaaaagcgatctctgagccgaacttttctgtggcctacgcaaacatgtgtcgctgtctaatggccctgaaagttcctaccactgaaaagcccacagtgacagttaacttcagaaagctgttactaaatcgttgtcagaaggagttcgagaaagataaagatgacgatgaggtttttgaaaaaaaacaaaaggagatggatgaggcagctacagcggaggaaagggggaggctcaaagaggagctggaggaggcacgggacattgctcgaagacgctccctcggcaatataaagtttattggcgagctgtttaaactcaaaatgttgacagaggccatcatgcacgactgcgtggtaaagctgctgaagaaccatgatgaagaatctctggaatgtttgtgtaggctgttaacaacgattggcaaagatttagacttcgagaaggcaaaacctcggatggatcagtactttaatcaaatggaaaaaattattaaggagaagaagacatccagcagaatcagatttatgctccaggatgttctggacctgcgggggagcaactgggtgccccgaaggggcgaccagggcccaaagacaattgatcagatccataaagaagccgaaatggaggaacatcgcgagcacatcaaagtgcagcagctgatggcgaagggcagtgataagaggagaggcgggccacccggacctcccatttcaaggggacttcccttggtcgatgacggcggctggaacacggttccgatcagcaaggggtcacgacccatcgacactagccggttgactaagatcacaaagcctgggagcattgatagtaacaaccaactgttcgcccccggcgggaggttaagctgggggaaaggctctagtggtgggtccggtgcgaagccctctgatgccgcttcggaggccgccaggcccgccacatccacactaaatcggtttagcgcactacaacaggccgtccctacggagtccaccgacaaccgtcgcgtggtgcagcgtagctccttatctagagagcgcggtgagaaagccggggacaggggtgaccggcttgagcggtctgaaagagggggagacagaggcgacagactggatagagctaggacacctgccacaaaaaggagcttttccaaggaggtggaagagagatctcgcgagaggcccagccagcccgagggcttgcgaaaggcggcttccctcaccgaggaccgtgaccgcggcagagacgcggtaaagagagaagctgcactcccacccgtgtcgccactgaaggcggctttgtctgaggaagagcttgaaaagaaatcaaaggccatcatcgaagaatacctgcatctgaatgatatgaaagaggctgttcaatgtgttcaggagctggcttcgccgagcctactttttatcttcgtgcgtcatggagtcgaatccaccctggaacgcagcgccattgctagggagcacatggggcagctactgcatcaactcctgtgcgcgggtcacctgtcaaccgcccaatattatcagggcttatacgagattttggaacttgccgaagatatggaaatagacatacctcatgtgtggctttacttggctgagctggttacgcctattctccaagaaggcggtgtgcctatgggtgagctgttcagggagatcacaaaacccctgagacccctgggaaaagcagcctccctactgcttgagatattggggttgctgtgcaaatcaatgggcccaaaaaaggtcggtaccctctggcgcgaggccggcctgtcctggaaggaatttctgccagagggccaggacatcggcgcattcgtggctgagcagaaggtggaatacacgcttggggaagagagcgaggctcctggccagcgggcgctcccgagtgaagaactgaatcgtcaactggagaagctattgaaagaaggctcttctaatcagcgcgttttcgattggatcgaagcaaatctctccgagcagcagattgtcagtaacacactcgtccgagccttaatgacagcagtttgttacagcgccataattttcgagacccccctgcgcgtggatgtcgccgtcctcaaggcaagagctaagctgcttcaaaagtatctgtgtgacgagcagaaggagcttcaggcgctctatgccctgcaggcactggtcgtgactttagagcagcctcccaacttgctcagaatgttctttgacgcactgtacgatgaggacgtggtgaaagaagatgccttttactcctgggagtctagtaaagacccagcggaacaacagggcaagggggtggcactgaagtctgtgacagcgttttttaagtggttgcgggaagcggaagaggagagtgaccacaactag

SEQ ID NO: 24057 - DNA, 4212 bp, synthetic construct
  misc_feature 1..4212: note = Description of Artificial Sequence: Synthetic coding sequence
  source 1..4212: mol_type = other DNA
atgagcggcgcccggaccgccagcacccccacccccccccagaccggaggtggactcgagcctcaggcaaacggcgaaacaccacaagtggcggtcattgtgcggcccgacgacagatcccagggtgctatcatagcggacaggcccgggcttccgggacccgaacattccccatccgagtctcagccatcatccccctctcccacgccaagtccgtctcccgtacttgaaccgggcagtgagcccaacctggccgtcctttccattcccggcgataccatgacaacaattcagatgtccgtggaagaatcaaccccaatttcacgagaaaccggcgaaccatatcgactgtctccggagcccactcctctggctgagcctatactcgaggtggaggtaacgttgtccaagcctgtgccagagagtgaattctcaagctctccactgcaggcaccaacacccctcgctagccatactgttgagatccacgaaccaaatggaatggtgcccagtgaagaccttgaacctgaagtggaaagtagccctgagctggcaccgccacctgcgtgcccttctgagtcccctgtaccaatcgcccctactgctcagccagaagaacttttgaatggtgcgccctcacctccggcggtcgacctgagtccagtgagtgagccagaggaacaggctaaagaagttactgctagcatggctccccctacaattccgtccgccacccctgcaaccgcgccctccgctacgtctcctgcccaggaagaggagatggaggaggaagaagaggaagaagagggtgaggccggagaggccggtgaggctgagtcagagaagggcggcgaggagttactacctcccgagtccacccctatcccggccaacttgagccagaacctcgaagcagctgccgctactcaggtggctgtgagcgtccccaagcgtcggagaaagattaaggaactgaacaaaaaggaagccgtgggtgacctcctggacgcattcaaggaggccaatcccgcagtcccagaagttgagaaccagcctccggctgggtccaatcccggcccggaaagtgaaggttccggggtccccccccgccccgaagaggctgatgagacatgggattccaaggaggacaagatccacaacgccgagaacattcagccgggggaacaaaagtacgaatacaagagtgaccaatggaagcctctcaaccttgaagaaaagaagcgctacgaccgtgaattcttattgggcttccagtttatcttcgcttccatgcagaagccggaggggctgccgcacatcagcgatgtggtcctggacaaagcgaacaagacccccctgcgacctctcgacccaacccgactgcagggtataaactgcggtcctgacttcacgccctcgtttgctaatctgggaagaaccactctgagtactcggggtcctccgagggggggacctggcggagaactgcctagaggacccgccggcctggggcctagaaggagtcagcagggacccaggaaagagccccgaaagatcattgccaccgtcctcatgacagaagatatcaaacttaataaagctgagaaggcctggaaaccttcctctaaaaggaccgccgctgataaagaccggggggaggaggacgcggacggtagtaaaactcaggacctgtttcgccgtgtgagaagtatattgaataaactgaccccccagatgtttcaacagttaatgaagcaagtaacccaactcgccatcgacaccgaagagcggctgaagggcgtcattgatttgatcttcgaaaaggcaatttcagagcccaattttagcgtggcatacgccaacatgtgtcgttgccttatggctctaaaggtgcccaccacggaaaaaccaacggtcaccgtgaatttcaggaaactgcttcttaatagatgtcagaaagaattcgagaaggacaaagacgacgacgaagtttttgaaaaaaaacagaaggagatggacgaggctgcgaccgctgaagagcgtgggaggcttaaagaagaattggaggaggctagggacatcgcaaggagacggtcgcttggtaatataaaatttattggagagctgtttaaactaaagatgttaactgaagcaattatgcatgactgtgtggtaaagctccttaaaaaccacgatgaagagtcccttgagtgtttatgccgcctcttgactaccattgggaaagatcttgattttgaaaaagccaagccccgtatggatcagtatttcaatcagatggagaagattattaaggaaaaaaaaacatcgagccggatccgctttatgctgcaggacgtgctggatctgcgggggagtaattgggtgcccagacggggggaccagggacccaagaccatagatcagattcacaaggaggccgaaatggaggagcacagagagcacatcaaggtgcaacaactcatggcaaaagggtccgacaagaggcgcggaggcccgcctggcccccctatttcgcgcggcctgcccctcgtggatgacggcggctggaacactgtccccatctcaaagggctcacgtcccatcgacacttctaggctgacgaagattaccaagccaggaagcattgacagcaacaaccagctctttgcgcctggaggacggctctcctgggggaaaggtagcagcggtggatccggagccaaaccatcagacgccgcctctgaagccgcaagaccagccaccagcaccctgaataggttctccgccttgcagcaggccgtgcccaccgagtcgacagacaatcggcgagtggtgcaaaggtcaagtctgagtagggaacgtggtgagaaagctggggatcggggcgaccgattagagagaagcgagaggggaggcgaccgtggtgaccgcctggacagagcacggactcctgcaaccaagcgctcatttagcaaggaggtggaagagcgaagcagagagagacccagccagccggaaggtctgcggaaggcagcttccctgactgaggatcgcgataggggacgcgatgccgttaagcgcgaggcggcacttccaccagtaagccctcttaaggcagcactgagcgaagaggaacttgagaaaaaatctaaggctattatcgaggagtatcttcatctcaacgatatgaaagaggcagtgcagtgcgtccaggagttagcttctccctctctgctctttatcttcgttagacatggagtggagagcacactggaacgctccgctatcgcacgggaacacatgggtcagctcctgcaccagctcctgtgtgcaggccacctgtccacagcccagtactaccaggggctttacgagatcctcgagcttgccgaggacatggaaatagatataccccatgtgtggctgtatctggctgagctcgtgaccccaattctgcaggagggtggcgttccgatgggggaactgttccgggagatcaccaagcccctccgccccctgggaaaggccgcttcattgctgctcgaaatattggggttattgtgcaagagtatggggccaaaaaaggtcggaacactatggagagaggccggcttgtcttggaaggagttcctcccagagggtcaggacataggcgcattcgtggccgagcaaaaggtcgagtacaccctcggggaagagtcggaagctcccggtcagagggcgctgcccagcgaagagctcaacagacaactggagaagttactgaaagagggttcgagcaaccagcgcgtcttcgattggattgaagctaatctgagcgagcagcagatcgtgagcaataccttagtacgggccctcatgactgctgtgtgctactcggccatcattttcgaaacaccattgcgcgtcgacgtggccgttctgaaagcacgcgccaagcttctccagaaatatctgtgtgacgaacagaaggagctgcaagccctgtatgcccttcaagccttagtagtcacacttgagcagcccccaaacctgctgcggatgtttttcgatgctctgtacgacgaagacgtcgtcaaggaagacgccttttactcctgggaatctagcaaagaccccgcggagcaacagggaaaaggcgtggctctgaaaagtgtgactgccttctttaagtggcttcgtgaagcagaggaagagtctgaccacaactag

SEQ ID NO: 24058 - DNA, 4311 bp, synthetic construct
  misc_feature 1..4311: note = Description of Artificial Sequence: Synthetic coding sequence
  source 1..4311: mol_type = other DNA
atgaaccagcccccccagatcgcccccaagcgggagcggaagaccattaggattcgcgaccctaaccagggggggaaagatataaccgaggaaattatgtccggtgccaggacggcgtccacaccaacaccccctcagacggggggaggactggagccccaggcaaacggggagacccctcaggtggctgtgatcgtaagacctgacgaccgttctcagggtgcaattattgccgatcggccggggctgcctggaccggaacattccccttctgagagccagcctagctccccatcaccgactccaagcccatcccccgttctggagcccggatcagaacccaatctggcggtgctgtccatcccgggagataccatgaccacaatccagatgtccgtggaggaatccaccccgattagtcgcgaaaccggcgagccttataggcttagtccagagccgacaccccttgccgagcccatactggaagtagaggtcactctttcaaaaccagtgcccgagtccgagttcagttccagccccctacaggcacctactccgcttgcgtcccatactgtggaaattcatgagccgaacggaatggtacctagcgaggacctggagccagaggtggagagttcccctgaactggcccccccaccggcatgcccgagtgaatcacctgttcctatcgctcccactgcccaacccgaggagctgttgaatggggccccgtcacctccagctgtcgacctgagtcctgtctcggagcctgaagagcaggctaaggaagtcacagcctctatggcgccgcctactattccaagtgccactcccgccactgctccaagcgcaaccagcccagcccaagaagaggagatggaagaggaggaagaagaggaggaaggggaggccggggaggctggcgaagcagagagcgaaaaagggggcgaggagttgctcccacccgaatctacacccatccccgccaatcttagccagaacctcgaggccgctgcggcgacccaggtggccgtgagcgtgcctaaacggaggcggaagataaaggagttgaataaaaaggaggccgtgggggatctcttggatgccttcaaggaggcaaatccagccgttccagaagtcgagaatcagccccctgctggttcgaaccccggacccgagtcggaaggatccggggtcccgccgaggcctgaggaggctgacgagacatgggacagtaaagaagataagatccacaacgcagagaatatccaaccaggagaacagaaatatgagtataaaagcgaccagtggaaacctctgaaccttgaagaaaaaaagcgctatgatagagaattcttacttggttttcaattcatctttgcatcaatgcagaaacctgagggtctgcctcatatctcagatgtcgtgttggacaaagcgaataagactcctctgcggccactcgacccgacccggcttcaggggattaattgtggtcctgacttcaccccatccttcgcaaacctggggagaaccacactttcaacgcgcggtccaccaagaggcggtccgggaggcgagctgccccgggggccacaggctggcctaggaccacgccgatctcagcagggccctagaaaagagccgagaaagatcatcgcgacggtcctgatgacggaagacatcaaacttaataaggctgagaaagcctggaagccttcttccaagcgaacagcggcggacaaggacagaggggaggaggatgcagacggctctaaaacacaggatctgtttagaagagtgagaagcatactgaacaaactgacacctcagatgttccagcagctcatgaaacaagtgactcagctggctatcgataccgaagaacgtctgaagggagtgatcgacctgatcttcgagaaggccatcagtgagcctaacttctctgtggcatatgctaatatgtgtaggtgtctcatggccctgaaggtcccaacaaccgagaaacctacagtaaccgtaaactttagaaaactcttattgaacagatgtcaaaaagagtttgaaaaagataaggatgatgatgaagtcttcgagaagaagcaaaaagaaatggatgaagctgcgactgctgaagaaaggggccgcttaaaggaggaactggaggaggcacgtgacatagcaaggcgtcgcagcctgggcaatattaaattcataggagaattattcaagctgaaaatgctaactgaggcgataatgcacgattgcgtcgtgaaactcctaaagaatcatgatgaagaatccttggagtgcctgtgccgcctcctgacgactattggcaaagatcttgactttgagaaggctaaacctagaatggaccagtacttcaaccagatggaaaagataatcaaagaaaagaaaaccagctcgcgaattcggttcatgcttcaggacgttctagacctgcgaggtagcaactgggtgccccgtcggggagatcaaggaccaaagacaatcgatcagattcacaaagaagccgagatggaagaacacagagaacatatcaaggtccagcagctaatggccaaagggtctgacaaaagacggggcgggcctccgggaccccctatatcgcggggcctgcctctcgtcgacgacggtggatggaataccgttccaatctctaagggctcaaggcccatcgataccagtagactgacaaagatcacaaagcctggcagcattgacagtaataatcagctgttcgcccccgggggacggctcagttggggtaaaggctcctctgggggctccggggccaaaccttccgacgcagcaagcgaggcagcccggcccgccacctccactctgaaccggtttagtgcactgcaacaggcagtgcctacggaatccacagataaccggcgtgtggtgcaacgtagcagcctgagtagggagcgaggtgagaaagctggcgaccgtggagatagacttgaacgcagtgaaagaggaggagatcgcggcgataggctcgatcgcgctcgtactcccgctactaagagatctttcagcaaggaggtggaggagcgaagtagagagcgacctagtcagcctgagggcctgagaaaagctgcgagtctgactgaagaccgcgacaggggccgtgatgcggtgaaacgtgaggcagcattgccgccagtttcaccactcaaggccgccctctcagaagaggaactggaaaaaaaatccaaagcaatcatcgaggaatatctgcacctgaatgacatgaaggaagccgttcaatgtgtacaggaactggcctcacccagtctgttgttcatatttgtgcgacatggagtggagagtaccctagaacgatctgccattgctcgggaacatatgggccagctcctacatcagctgttgtgtgccggccacctgtctacagcacagtattaccaggggctttacgagatcttggagctggctgaggacatggaaatcgacatcccacatgtctggctctatttggccgaattggttacacccatcctccaagagggcggcgtgccgatgggggaactctttcgtgagatcacgaagcccttaaggccattgggaaaggccgcctctcttctgctggaaattctgggcctactttgtaagtctatgggaccaaaaaaggtggggacgctctggcgggaggccggtttgtcatggaaggagttcctgccggaaggccaggatataggagcattcgtggctgaacagaaggtcgaatatacactcggggaggaaagtgaagctccagggcagcgggccctccccagcgaggagctcaataggcagctggagaagctgctgaaagagggctcttctaatcagcgagtcttcgattggatcgaagctaacctgtccgaacagcagatcgtgtctaacactttagtaagggctttgatgaccgctgtgtgttatagcgccataatcttcgagacacccttacgggtcgatgtcgccgtgctgaaggcaagggcaaaactgctccagaaatacctgtgtgacgagcagaaggagctccaggccctgtatgcattgcaggctctggtggtgactctcgagcagccccctaatttgctccgaatgttcttcgatgctctgtacgacgaggacgtcgttaaggaggacgccttttactcctgggagtcctccaaggatccggccgagcagcaaggcaagggggtggctctcaagtcagtgaccgcatttttcaaatggcttcgcgaggctgaggaagagtcagaccataactag

SEQ ID NO: 24059 - DNA, 384 bp, synthetic construct
  misc_feature 1..384: note = Description of Artificial Sequence: Synthetic coding sequence
  source 1..384: mol_type = other DNA
atgagcggcgcccggaccgccagcacccccacccccccccagaccggcggagggctcgagccacaggcaaacggggagactccccaggtggccgtgattgtgagacccgacgaccgcagccagggggctataattgccgataggccaggtctcccagggcccgaacacagtccctccgagtcccagccctctagccctagccccaccccctcaccctcgcctgtcttggagcctggtagcgaacccaatttggctgtgctgtcgatccctggggacaccatgacgacaatccaaatgtcagtggaggagagcaccccgatttctcgggagaccggcgagccataccgcctgagtccagagcctactccacttgccgagccttag

SEQ ID NO: 24060 - DNA, 264 bp, synthetic construct
  misc_feature 1..264: note = Description of Artificial Sequence: Synthetic coding sequence
  source 1..264: mol_type = other DNA
atgaacacccccagccagccccggcagcacttctaccccagccgggcacaaccacccagtagtgcagcctctcgcgtgcagagcgcggcacccgctcgcccagggccagctgcccacgtttatcctgctggtagtcaagtgatgatgatcccgagtcagatctcatatccagcttcccagggggcttactatattccggggcaaggccgatctacctacgttgtcccaacccaacagtacccagtgcaacccggcgccccttag

SEQ ID NO: 24061 - DNA, 858 bp, synthetic construct
  misc_feature 1..858: note = Description of Artificial Sequence: Synthetic coding sequence
  source 1..858: mol_type = other DNA
atgagcggcgcccggaccgccagcacccccacccccccccagaccgggggcggcttggaaccacaggctaacggtgagactccccaggtggctgtcatcgttcgccccgatgacagatcccaaggcgccatcattgcagacagacccggactgccgggccccgagcacagtcctagcgagtcccagccatcttctccgagccccacccccagtccttcacccgtacttgaaccagggtccgaaccaaacctagctgtcctttccatccccggggatacgatgacaactatacagatgagcgtagaggagagcacacccatcagtagggaaacaggagaaccttatcgtctgagccccgagccgacccccctggccgaaccgatcttagaagttgaggtcactctgtccaagccagttcccgaatccgaattcagctcctcacccttgcaggccccaacacctctggcatctcatactgtggaaatccacgagccaaacggcatggtgccaagtgaggacctcgagcctgaagtggaaagcagtcccgaattggcacccccccccgcttgtccaagtgagtctcctgttccaattgcaccaaccgcccagcccgaggagctcctgaacggcgctccaagtccgccggctgtcgatctttcacccgtaagcgagccggaggaacaggctaaggaggtgacagcctctatggcgcctccaacaatcccttctgccacgccggctaccgccccaagtgcgaccagcccggcacaggaagaggaaatggaagaggaagaagaggaagaggaaggcgaagcgggcgaagcgggcgaggctgaatctgaaaaaggcggcgaatag

SEQ ID NO: 24062 - DNA, 1836 bp, synthetic construct
  misc_feature 1..1836: note = Description of Artificial Sequence: Synthetic coding sequence
  source 1..1836: mol_type = other DNA
atggccgccagcgccaagaagaagaacaagaagggcaagaccatctccctcacagactttttagcagaagatggcggcactggcggcgggagcacttatgtgtctaaacctgtatcttgggccgatgaaactgacgatctggaaggagatgtctctacaacttggcacagtaacgatgatgatgtatatcgggcgcctccaattgaccgcagcatactccccacagccccccgtgctgccagagaacctaatattgaccgcagtaggttaccaaagtcccctccatatactgcttttttagggaatttgccttacgatgtgaccgaggagagcatcaaagagtttttcagagggttgaacatctctgccgtgaggctcccccgggaaccatctaaccctgaacgactgaagggcttcggatatgctgagttcgaggatctcgatagtctgctttccgctctttctctcaacgaagaatctcttggcaacaggagaatccgcgttgacgtggccgatcaggcacaagataaagaccgcgacgaccggtcctttggcagggacaggaatcgggactcagataagaccgatactgactggagagcacgtcccgcaactgattcattcgatgattacccccctaggcgtggggacgatagtttcggggataaatatcgggatcgctacgactcagacagataccgcgatggctatcgtgatggctatcgagatgggcctcgccgggatatggacaggtacggtggcagggacaggtacgatgacagaggttcccgggattacgatagagggtacgactcaagaattggttctggcaggagggcttttggcagtggttacaggagggatgatgattataggggcggcggggatcgctacgaagataggtatgaccggagggatgatcggagctggtcttctcgggacgattattcgagggatgattatcgaagagatgacagggggcccccacagcgacccaaattgaatctgaaacctagatcaacacctaaggaggacgacagctcagcctccactagccagtctacccgtgcagctagcatttttggaggcgccaagcccgtcgatactgccgcacgcgagcgcgaagtggaggaacgattgcagaaagagcaggagaagctccaaaggcagcttgatgagcccaagctggaaagacgacccagggagcggcatccgtcttggcggtccgaggaaacacaggaaagagagcggagtagaactgggagcgagtcctcccagacaggcacgagtactacctccagccgaaatgccaggaggagggagtctgagaagagtttagagaatgagaccctgaataaggaggaggactgtcatagtcctacgtccaagcccccgaagcctgatcaacctttaaaggtgatgcctgcccccccccccaaagaaaacgcctgggttaagcggtcctccaatccccccgctcgaagccagagctctgatacagagcagcagtcccctacctctgggggaggaaaggtcgctcccgcacaaccctccgaagagggccctggaaggaaggatgagaacaaggtggacggtatgaacgcacccaagggacaaacagggaactcgtctcgcggaccgggtgacgggggtaatagggatcattggaaagaatcagatagaaaggacgggaaaaaagatcaggacagcagatccgcccccgaacccaaaaaaccagaagaaaatcccgcttctaaattctctagtgcctctaagtatgctgccctgtccgtcgacggggaagacgaaaacgaaggagaagactatgctgaatag

SEQ ID NO: 24063 - DNA, 1764 bp, synthetic construct
  misc_feature 1..1764: note = Description of Artificial Sequence: Synthetic coding sequence
  source 1..1764: mol_type = other DNA
atggccgccagcgccaagaagaagaacaagaagggcaagaccatctctctgaccgacttcctcgccgaagatggtggcaccggtggcgggagcacttacgtgagtaaaccagtctcttgggcagacgaaaccgacgatctggagggggacgtgtccaccacttggcattctaacgatgacgatgtataccgggccccaccgattgacagatcaatcctcccgaccgcgccaagggcagcaagagaaccaaatatagacaggtcaaggctgcccaagtctccaccatacacggcatttctggggaatttaccctatgacgtcacagaggagtccatcaaggagtttttccgcggcctaaatattagcgccgtgcgtcttccaagagaaccttccaatcccgaaagacttaagggatttgggtatgccgagttcgaagacctagatagcctcctgtccgctctctccctcaatgaggagagtctgggaaataggcggatcagggtggatgtggctgatcaggctcaggacaaggatcgcgacgacagatcattcgggcgcgaccggaaccgagattctgacaaaacggacactgactggcgcgcccggcctgcaaccgattcttttgacgattatcctcctaggcgaggcgatgactccttcggcgacaagtatcgggaccgctacggcgggcgcgacagatatgatgatagagggtccagggattatgacaggggatatgactcccgaattggcagtggccgtagggccttcggatcgggataccgtcgcgatgacgattatcgaggaggcggagatcggtacgaagatagatacgatagacgggatgaccgaagctggagctccagggacgactactctcgcgacgattaccggcgcgatgatcgaggacctcctcagcgtcctaagctgaaccttaagcctagatcaaccccgaaggaggatgattcttctgctagtacttcacaaagcacacgcgcagcatccatattcggcggagctaaacccgtggacacagctgccagagaaagagaagttgaagaaagattgcaaaaggagcaggagaagcttcagcgccaactggacgagccaaagcttgagaggagacccagggaacggcatccatcctggcgaagtgaagaaacccaggaacgagaaagatccaggaccggaagcgaaagctcacagacaggtacaagcacgacctcatcacggaacgctagacgccgggaatccgagaagtctctggagaacgagactcttaataaggaggaagactgtcacagtccgacctcaaagcctccaaagcctgaccagcccctgaaagtgatgccagctccaccacctaaggaaaatgcatgggtcaagcggtcatccaaccctcccgcccggagccagtctagcgatacagaacagcagtctcctaccagtggtggtggaaaggtggctcccgcccaaccttctgaggagggccccggcaggaaggacgaaaacaaggttgatggaatgaatgccccgaaaggacagacaggtaattcaagccggggacccggggatggcggaaacagggaccactggaaggaaagcgatcgcaaggatggcaagaaagaccaggattcccggagcgcgcccgagcctaagaaacctgaagaaaatccagcctctaaattttccagtgccagtaagtacgccgctctatcagtcgacggggaagatgagaatgagggtgaggactatgcagaatag

SEQ ID NO: 24064 - DNA, 714 bp, synthetic construct
  misc_feature 1..714: note = Description of Artificial Sequence: Synthetic coding sequence
  source 1..714: mol_type = other DNA
atgctggacctgaccagccggggccaggtgggcaccagccggcggatggctgaagctgcatgttctgcccattttcttgagacaactccaacaccaaacccccctactaccgaagaggagaaaaccgaatctaaccaagaggtcgccaaccccgaacattatattaagcatccccttcagaaccgatgggcactgtggttttttaaaaacgacaaatctaagacttggcaggcaaatctgcgcttgatctcgaaattcgatacagtggaagacttctgggcactgtataatcatattcagttaagtagtaatctaatgccaggctgtgactatagcctgttcaaagatggcattgaacctatgtgggaagatgagaagaataaaagaggaggacgctggctgattactctgaacaaacaacaacgccggtctgatctcgacaggttctggctcgaaaccctgttgtgcctgattggtgaaagcttcgatgactacagcgacgacgtatgcggggcagtggtaaatgtgagggcaaagggcgacaagatagctatctggacgacggagtgtgagaatcgggaggccgtgacccacatcgggcgcgtatataaggagaggctcggtctgccacccaaaattgtcataggctaccagtctcacgctgacactgcgaccaaaagcggatctacaaccaagaatagatttgtagtttag

SEQ ID NO: 24065 - DNA, 654 bp, synthetic construct
  misc_feature 1..654: note = Description of Artificial Sequence: Synthetic coding sequence
  source 1..654: mol_type = other DNA
atggccaccgtggagcccgagaccacccccacccccaacccccccacaaccgaagaggaaaagacggaaagtaatcaggaagtagctaacccggaacactatataaaacacccactgcagaacagatgggccctgtggttctttaaaaatgataagtccaaaacttggcaggccaacctgcggttgatctccaaattcgacaccgtggaggatttctgggcactatataatcacatccaactgtcttcgaacctgatgcctgggtgcgactactcactgtttaaagacggtattgagccaatgtgggaagatgagaaaaataagcggggtgggagatggttgattaccctcaacaaacagcagcggaggtcagacctggaccgcttttggctagagacattgctctgcttaatcggtgagagctttgatgactattctgatgatgtctgcggcgctgtggtgaatgtgcgcgcaaaaggagacaagatcgcaatttggactaccgagtgtgaaaatcgcgaagccgtcacgcacattgggcgtgtgtacaaggagaggcttggcttgcctcctaagatcgtgatcggctatcagagccacgccgataccgccacaaaatcggggtcaacaactaaaaacaggttcgtggtgtag

SEQ ID NO: 24066 - DNA, 747 bp, synthetic construct
  misc_feature 1..747: note = Description of Artificial Sequence: Synthetic coding sequence
  source 1..747: mol_type = other DNA
atggccaccgtggagcccgagaccacccccacccccaacccccccaccaccgaggaggagaaaaccgagtcgaaccaggaggtggcaaatccggagcattacataaagcatcccttacaaaacagatgggcactgtggttctttaagaatgataagagcaagacctggcaagctaacctgcggctcatctccaaatttgatactgtcgaagacttttgggcactgtacaatcatattcagctctcctcaaacttaatgcccgggtgtgactattccctgttcaaagacggcattgagccgatgtgggaagatgagaaaaataaacgtggcgggcggtggttgataacgctaaacaaacagcagcgaaggtctgacttggatcggttctggcttgaaacccggtgggatctcgccatgctgcctcgattagtgtctaacttttggccccaagtgattctaccattgcagcccccaaaggtgctggaattgcaattgctttgcctgatcggagaatcttttgacgactacagtgacgatgtgtgtggcgccgtcgtgaacgtacgggccaagggagacaagatagccatatggacgacagaatgtgaaaaccgggaggcagtgacccacatcgggcgcgtttacaaggaacggctgggccttcccccaaagatcgtgataggctaccagtcacacgccgatacagccacaaaaagtggttctactactaagaatcggttcgttgtctag

SEQ ID NO: 24067 - DNA, 357 bp, synthetic construct
  misc_feature 1..357: note = Description of Artificial Sequence: Synthetic coding sequence
  source 1..357: mol_type = other DNA
atgagcggcggcagcagctgcagccagacccccagccgggccatccctgccactcgtagagtggttctcggggatggcgtgcaacttcctccaggcgattattctactacgccaggcggaacattgttctccaccacaccgggtggcacaaggatcatctacgacaggaaatttctgatggaatgcagaaactcacctgttaccaaaacccccccgcgcgacctaccaactatccccggcgttacctcaccatcatccgacgagcctcctatggaggctagccagagtcatctacgcaacagccctgaagataagagagccggcggtgaggaatcccagtttgagatggatatttag

SEQ ID NO: 24068 - DNA, 1857 bp, synthetic construct
  misc_feature 1..1857: note = Description of Artificial Sequence: Synthetic coding sequence
  source 1..1857: mol_type = other DNA
atggccagcaccgactacagcacctacagccaggccgccgcccagcaaggatacagtgcttacaccgcccaaccgactcaaggctacgcccaaaccacccaagcttacgggcagcagagctacggcacctatggccagcctacagacgtgagctatacccaagcgcagactacggcaacctatggccaaacggcatacgcaacatcctatggccagccccccacaggctatactacccctacagcacctcaagcttatagtcagcccgtgcaaggatatggcacaggggcatatgacaccaccacagcgactgtgaccacaacgcaggcctcttatgccgcccagtctgcctatgggacccagcctgcctaccctgcctacggccaacaacctgcagccacagctcctactcgaccccaagatgggaataagccgacagaaacctcccagccacagagtagtacagggggttataatcaaccaagcttaggctatggtcagagcaactatagttacccacaggtccctggttcttaccctatgcagccagtgactgcgcccccatcctacccgcctacttcctatagcagcacccaacccacttcctacgaccagagttcttattctcaacagaacacctatggccagcccagctcctacggacagcaatcatcctatggccagcagtcatcgtacggacagcagcctccaacgagttatccgccccagaccgggagctactcccaggcgccctctcagtattcacagcagagttcctcctacggtcagcagtcctccttccgccaagatcatcctagtagcatgggcgtttacggccaggagtctggggggttttccgggcctggagagaataggagtatgagcggacccgataatagaggacgcgggcgcggaggatttgatcgcggcggaatgtccagggaccccgatgaagatagcgacaatagcgccatctacgtccaaggccttaatgatagcgtgacgctcgatgacctcgcggattttttcaaacagtgtggcgtggtcaaaatgaataagagaactggtcaacctatgatccacatctatcttgataaggagaccggaaaaccaaaaggcgacgccactgtgtcatacgaagacccaccaaccgctaaggcagcagtcgagtggttcgacggcaaggacttccagggcagcaagctaaaagtatccctcgcaagaaagaagcctcccatgaattctatgcgcggggggctgcctcctagagaggggagagggatgcccccacccctgcggggggggcccggcgggcccggaggccccggaggacctatggggcgcatggggggacggggcggcgataggggagggttccccccgagaggccctcgggggtcccgcgggaatccctctgggggaggaaacgtgcaacaccgcgcaggagactggcagtgccccaaccccgggtgtgggaaccagaatttcgcatggcgtaccgagtgtaaccagtgcaaagccccaaaacctgaaggcttcttaccgccacccttcccccccccaggcggtgaccggggacgcgggggtcccggagggatgagaggtggccgaggaggactgatggaccgtggcggcccgggggggatgtttagaggcggtcgtggaggagacagagggggtttcagaggtggccggggaatggacagaggagggtttggaggcgggagacggggaggccctggaggaccccccggccctctgatggagcagatgggagggcggcggggtgggcgcggaggacccggaaagatggacaaaggggagcatcgacaggagaggcgggaccgcccatactag

SEQ ID NO: 24069 - DNA, 1803 bp, synthetic construct
  misc_feature 1..1803: note = Description of Artificial Sequence: Synthetic coding sequence
  source 1..1803: mol_type = other DNA
atggccagcaccgactacagcacctacagccaggccgccgcccagcagggatacagcgcctacacggcccagcccacccaggggtatgctcagactacccaggcatatggccagcagtcctacggtacttacggccagccaaccgacgtgagttacacccaggcacagaccaccgctacctacggccaaactgcgtatgcgaccagttacgggcagcccccgactggatataccacacctacagccccacaagcatactcgcaaccagtccagggctatggaaccggtgcttacgatactaccaccgccactgtgacaaccacccaggcatcctacgccgcacaaagcgcatacgggacccagccggcctaccccgcttatggtcagcaacccgctgctactgcccccacttcgtactcctcaacacagccaacctcttacgaccagtcatcttactctcagcagaatacctatggccagccgtcaagctacggtcagcagtcctcgtacggtcaacagtcctcctacgggcagcaaccacccaccagctacccgccacaaacaggcagttactctcaggccccctcccagtactcccagcagagcagcagctatggccagcagtccagctttagacaggaccacccaagctctatgggcgtttatgggcaggagagtggaggcttttccggtcctggcgaaaatagaagtatgtcagggcctgataatcggggcaggggacgcgggggtttcgaccggggaggtatgagccgcggcggccgtggagggggccgtgggggtatggggagcgcgggtgaaagaggaggatttaataaaccaggtgggcccatggatgaagggcccgacttggacctggggcctcccgttgaccccgatgaagactcagacaattctgctatttatgtccagggactgaacgactcagttactctcgatgacctggccgattttttcaaacagtgtggcgttgtgaagatgaacaagcggacggggcaaccgatgattcatatctacctcgataaggaaaccggcaaaccgaagggtgacgctacagtgtcctacgaggatccaccgactgccaaggccgcagttgagtggttcgacgggaaggattttcagggcagtaagctgaaggtgtccctcgcccgcaagaagcctcctatgaatagcatgcgcggtggccttcccccaagagaaggaaggggaatgcctccaccgctgaggggaggccctggtggcccaggtgggcccggcggtcccatgggccggatgggcggccgcgggggtgatcggggtggattcccccccagaggtcccaggggatcgaggggaaacccttctggcggcggaaatgtccagcatcgagccggcgattggcagtgccctaaccccggttgcggaaatcaaaactttgcatggcgcaccgaatgtaatcagtgcaaggcaccaaagccagaagggttccttccaccaccctttcccccacccggcggcgatcgcggcagaggagggcctggcggaatgcggggtggcagaggcgggctgatggacaggggagggcccggcggaatgttccggggtgggcgaggcggcgatcgcggagggtttagaggaggccgtggcatggaccggggtggatttggcggcgggcgcagaggggggcctgggggacctccagggccgctcatggagcaaatgggtggtcgcagaggaggcaggggcggcccgggcaagatggataaaggggagcaccggcaggaaaggagagacaggccctactag

SEQ ID NO: 24070 - DNA, 1752 bp, synthetic construct
  misc_feature 1..1752: note = Description of Artificial Sequence: Synthetic coding sequence
  source 1..1752: mol_type = other DNA
atggccagcaccgactacagcacctacagccaggccgccgcccagcagggatatagcgcgtacacagcacagcctacccagggctatgctcagacaacacaggcctatggacagcagagctatgggacctatggccaacctacagacgtgagctatacgcaggcccagaccactgctacatacgggcagaccgcctatgccacgtcttacggccaacctcccacagggtacactacacccacagccccacaggcctacagccaacctgtacaaggatacggaacaggtgcttacgatacaacaaccgccaccgtcactacaactcaagcgtcttacgcggctcagagtgcgtatgggactcagccggcatatcctgcatacggtcagcagcccgccgccacagcacctaccagaccgcaggacggaaataagcctactgagacaagccagcctcagtcctcaaccggcggatataaccaaccatcactgggctatggacagtccaattattcgtaccctcaagtccctgggtcatatcccatgcaaccggtgactgctcccccaagttatccccctacatcctattcgtccacccaacctacctcatacgaccagagttcctatagtcagcaaaacacctacggacagcccagctcctacgggcaacagtcatcttatgggcaacagagttcgtacggtcagcagcctccgacgtcttacccaccacaaactggtagttacagtcaagctccctcacagtactcccagcaatccagctcctatggccaacaacggccaatggatgaaggaccagacctggacttgggccctccagttgatcccgatgaggattctgataatagtgctatttacgtccagggtttaaacgatagcgttacactcgacgacttggcggacttcttcaaacaatgtggcgtggtgaagatgaacaagcgcaccggacaacctatgatccacatttacttagataaagaaactgggaaaccgaaaggggacgcaaccgtctcttacgaagatccacctactgcaaaggccgccgtagagtggttcgacgggaaagatttccagggttctaagttaaaggtgagtttggcacgtaagaaaccccctatgaattcgatgcgggggggcctgcccccacgggagggccggggtatgcctccacccttgaggggcgggcctggcggaccaggaggtccaggagggccaatgggtaggatgggtggtcggggcggagacagaggcgggtttccaccacgtggcccccgggggagtcggggcaatccctcgggagggggtaacgttcagcatagagctggggactggcagtgtccaaaccccggatgtggtaatcagaatttcgcctggagaaccgagtgcaatcaatgcaaggctcctaaacctgaagggtttttgcctccgccttttcccccccctggtggcgacaggggtagagggggccccggtggtatgaggggaggccggggcggactcatggacaggggaggtcccggtggcatgtttagaggcggccgggggggcgacaggggaggtttccgcggcgggaggggaatggacaggggaggttttggggggggcagaagagggggcccgggcgggcctcccggacccctcatggagcagatgggcggtcggaggggggggcgcggaggccccggcaaaatggataagggtgagcaccgccaggaacgaagggacagaccatactag

SEQ ID NO: 24071 - DNA, 1971 bp, synthetic construct
  misc_feature 1..1971: note = Description of Artificial Sequence: Synthetic coding sequence
  source 1..1971: mol_type = other DNA
atggccagcaccgactacagcacctacagccaggccgccgcccagcagggctactccgcctataccgctcaacccacccagggatatgcgcaaacaactcaggcttacggccagcaaagctacgggacatacggacagcctacagacgtgtcctacactcaggcacagacaactgcgacctatgggcagacggcatatgcgacgtcttacggacagccccccactggatatacaacacctactgcccctcaagcctactcccagccagtccaggggtacgggactggggcctacgataccaccaccgctacggtgaccaccacccaggcctcctatgctgcccagagcgcatatggcactcaacctgcctatccggcttacggtcagcagccggcagctaccgcgccaacacgacctcaggacgggaacaagcccactgagacctcccagccgcaatcatccactggcggttataatcagccatcactggggtatgggcagagtaattatagctatccccaggtccccgggtcttatcccatgcagcccgtgaccgcgcctcccagttatccacctaccagctacagtagcactcagcccaccagttatgatcaatctagctatagtcagcagaatacttatgggcagccctctagctatggacaacagagctcctacggccagcagtcaagctatggacagcagccgccaactagttatcccccacagactggcagttacagtcaggccccaagccaatacagtcagcagagtagtagctatggtcaacagtcctcattcagacaagatcacccgtcctctatgggtgtgtatggacaggaaagtggtggcttttctgggcccggtgagaaccgttcgatgtcggggccagacaatcggggaagaggtcgcgggggttttgatcgcgggggaatgtctcgcggcggacgcggcggggggcggggcggcatgggctccgccggtgagcgaggcgggttcaataagccaggggggcctatggatgaagggcctgatcttgatctaggtccccccgtagaccctgacgaagattctgataattctgctatctatgtgcagggtctcaacgatagtgttacgctggacgacctggccgatttctttaagcaatgcggggttgtgaagatgaacaagaggacagggcaaccgatgatccacatttacctggataaagaaacaggcaagcctaaaggggatgctacagtctcctatgaggacccgccaacagccaaggcagccgtcgaatggtttgacggaaaggacttccagggaagtaaactgaaggtctccctggcccgcaagaagccccctatgaattcgatgcgcggtggtcttccacctcgcgagggtcgaggtatgcctcctccgttgcgaggggggcctggaggtccaggcggacccggggggcccatggggcggatgggcgggaggggcggggaccgcggcggatttcccccgcgtgggccaagaggcagcagaggcaatcctagtgggggcggcaatgtacagcaccgagccggggattggcagtgtcccaaccccgggtgcggtaatcaaaattttgcctggcggaccgaatgtaatcagtgtaaggcgccaaagcccgaaggctttttgccgcctccattccccccacctgggggagaccgtgggcggggaggacccggcggaatgcggggcggccggggtggacttatggacagggggggcccaggcggaatgttccgcggtggaagagggggagataggggcggttttcggggcgggcgagggatggacagggggggcttcgggggcggacgccgaggaggacctggcggccctcctggacctctgatggagcagatgggaggacgaagggggggccgaggaggacctgggaaaatggataaaggcgagcatcgacaggagaggcgggacagaccctactag

SEQ ID NO: 24072 - DNA, 1968 bp, synthetic construct
  misc_feature 1..1968: note = Description of Artificial Sequence: Synthetic coding sequence
  source 1..1968: mol_type = other DNA
atggccagcaccgactacagcacctacagccaggccgccgcccagcagggctactcagcatatacggctcagccaactcaggggtatgctcagacaacacaggcctacggccaacagagttatggtacgtatggccagcctacagatgtctcctatacgcaagctcagacgacggccacctacggacagactgcctatgctacctcatatggtcaaccacccacaggttataccactcctaccgctccgcaggcctacagccaacctgtccagggctatgggacaggcgcatatgacaccaccactgcgaccgtgaccacaacgcaggcgagctacgcagcccagagcgcatacggtacccaacctgcctacccagcctacgggcagcagcctgccgcgaccgccccgacaaggcctcaggacgggaataaacctactgagacatctcagccacagtccagtacaggcggctacaatcagccctccctgggctatggccaatctaactatagctatccccaggtccctggatcatacccaatgcagcctgtgaccgcacctcctagctacccgcccacgtcctactccagcactcagccaacgtcctatgaccagagcagctacagtcaacagaacacttacgggcagccgagctcatatgggcagcagtcctcctacggacagcagagctcatatggccagcagccgccaaccagctatcccccacagacaggctcatacagtcaggctccttctcagtattcccagcaatccagctcttacggccagcagtccagcttccggcaggatcacccgtcaagcatgggcgtctatggacaagaaagcggaggcttcagcggccctggcgaaaatcgctctatgagcggacccgataatcggggccggggccgaggaggctttgatagaggtggaatgtcaagggggggaagaggggggggcaggggagggatgggcgccggagaacgtggcgggtttaacaaaccaggaggtcctatggacgagggcccagatttggatctcggcccacccgtggacccagatgaggacagcgataatagcgctatatacgtgcaagggctaaatgacagtgtgacactcgatgacctggccgattttttcaaacagtgcggagttgtgaaaatgaataagagaaccggccagccaatgattcatatatatctcgataaagaaaccggaaaacccaagggcgatgccacagttagttatgaggacccacccacagccaaagcagccgtggagtggttcgacggaaaagacttccaaggcagtaagctcaaagtctcattggcacgaaaaaagccacctatgaactctatgcgtgggggactgccccccagggaggggagaggcatgccgccgccccttcgggggggacctgggggaccaggaggaccaggagggcccatggggaggatgggaggtcgtggaggagaccgcgggggcttccctccccgtggacccagggggtctagggggaacccctctggcgggggtaatgtgcagcaccgggccggcgattggcagtgcccaaaccccgggtgcggaaaccagaactttgcttggagaacggagtgtaatcagtgtaaggcaccaaaacctgagggtttccttccaccaccattcccgcctcctggaggcgataggggacgagggggcccgggggggatgagaggaggccggggcggcctcatggacaggggaggacctggcggaatgtttcgcggcggcaggggcggtgacaggggtggattccggggaggcagggggatggacagaggaggtttcggcgggggccggcgcggcggaccgggcggacctccaggaccattgatggagcaaatgggcggcagaagaggcgggaggggtggccccggcaagatggataagggcgagcacaggcaggagcgtcgggataggccctactag

SEQ ID NO: 24073 - DNA, 1986 bp, synthetic construct
  misc_feature 1..1986: note = Description of Artificial Sequence: Synthetic coding sequence
  source 1..1986: mol_type = other DNA
atggccagcaccgactacagcacctacagccaggccgccgcccagcagggatacagtgcttacacggctcagccgacgcagggctatgctcagactacccaggcatatgggcagcagagttatggcacatacgggcagcccacggacgtcagttacactcaggcccagaccaccgccacatatggacagacagcctacgcaacctcttatggtcagcctcccactgtggaaggtacaagcactgggtataccacccctactgctccacaggcgtattctcagcctgtgcagggctacgggaccggtgcctatgacaccactacagccactgtaactactactcaagcttcctatgctgcgcagtcagcctacggaactcagccggcatatcccgcttacggccagcaacctgccgccaccgcccccacaaggccacaggacggcaacaagcctacggagacctcgcagcctcaaagtagcaccggcgggtataatcagcctagtctcggatacggtcagagtaactattcatatcctcaggtgccaggctcatatcccatgcaacccgtaactgcacccccatcctatccccctacctcctacagttccacccagccgaccagctatgaccagtcctcttattcccaacaaaacacatatggtcaaccatcaagttatggacaacagtccagctatggacagcagtctagctacggccagcaaccacctaccagctaccccccccagacaggatcctactcccaggctcccagccagtattcacagcagtcaagcagctacgggcagcaatcctccttccggcaagaccacccttcatcaatgggcgtttatgggcaagagagcggagggtttagtggccccggggagaatagatcgatgtcaggacccgacaacaggggacggggccgcggcggattcgacagggggggcatgtcacgcgggggacgggggggtggaaggggaggtatgggggctggagaacggggcggatttaacaagccaggcggcccaatggatgaagggcctgacctcgacctgggcccaccagtagatccagatgaggatagtgacaattctgcaatttacgtccagggtctgaatgactccgtgactctcgacgatctggcggactttttcaagcagtgtggtgtggtcaagatgaacaagaggacaggccagcccatgatccacatctatctggacaaggagactggtaaacctaaaggtgatgctaccgtgagctacgaagaccccccgactgccaaggcagcagtggagtggtttgatggcaaggattttcaggggagcaaacttaaagtcagcttggccaggaagaaacccccaatgaattccatgagaggtggattgccacctagagaggggaggggtatgcctcctcctctgcgcgggggcccagggggaccaggagggcctggaggccctatggggcggatggggggacgtggaggggacagaggcggtttcccacctcggggaccccggggctcacggggcaacccgtcgggtggtggcaatgtgcaacatagagccggggattggcaatgccctaatccgggttgtgggaaccagaacttcgcttggagaaccgagtgcaaccaatgcaaggcccctaagcccgaaggatttctcccacctccctttccccctccggggggtgatcggggcagagggggaccaggggggatgagaggaggccgaggagggctgatggatcgcggcggacccggcggaatgtttcgcggcggacggggaggagaccggggaggttttagagggggacgtggtatggaccgcggagggttcggcgggggaaggaggggcggccctggcggtccaccgggccctctgatggaacagatgggagggagacgaggagggcgcgggggaccgggaaagatggataagggcgaacatcgtcaagaaagaagggaccgtccatattag

SEQ ID NO: 24074 - DNA, 543 bp, synthetic construct
  misc_feature 1..543: note = Description of Artificial Sequence: Synthetic coding sequence
  source 1..543: mol_type = other DNA
atggccagcaccgactacagcacctacagccaggccgccgcccagcaagggtactctgcatacaccgcccaaccgacccaaggttatgctcagacaacccaagccagctacgcagctcagagcgcatatggaacgcagccagcctacccggcctatgggcagcagcccgcagcgactgctcctacccggccacaggacgggaacaaacctactgagacatcacagccccaatcaagcactgggggttataatcagccgtccctcggctacggacagtctaactacagctacccacaggtaccagggagctatcccatgcagccagttactgctccgccaagttacccccccacatcttatagctctactcaaccgacatcttacgaccagtcatcatacagccaacagaatacatatggccaaccatcttcctacgggcaacagagcagctacgggcaacagtcctcttatggacagcaaccaccaacttcttatccgccccagacaggcagctattcacaggctcccagccagtactcttag

SEQ ID NO: 24075 - DNA, 1065 bp, synthetic construct
  misc_feature 1..1065: note = Description of Artificial Sequence: Synthetic coding sequence
  source 1..1065: mol_type = other DNA
atggccagcaccgactacagcacctacagccaggccgccgcccagcaaggttattcggcatacacagcccagcccacccagggctatgcgcaaaccacccaagcatacgggcagcagtcctatggcacctacggtcagccaacagatgtatcctacactcaggctcagacaaccgcaacgtatgggcagacagcctacgcaactagctatggccagcctcccacaggatacactaccccgactgctccccaggcctactcccagcctgtgcagggttatggaactggagcttacgatacaaccacagccaccgtcaccactacccaggcctcatatgccgcccagtccgcatacggtacccagccggcgtatccggcctatgggcagcaacctgctgcaacagctccgaccagacctcaggacggaaacaagccgacagagacgagccagcctcaatcaagtacgggaggctataaccagccctccctgggctatgggcagtccaattactcataccctcaggtccccgggagttatccaatgcagcctgttacagccccccccagctatcccccaaccagttacagtagtactcaacccacttcctacgatcagtcgtcttactcccagcagaacacttacggccagccatcttcttacggacagcaaagctcttatggccaacagtcatcatacggccagcagccccctacctcctacccccctcagaccggcagctatagtcaggctccatcccagtactcccaacagtctagctcttacgggcagcaatcctcctttcggcaggatcatccctcgtccatgggagtgtacggacaggaatccggaggcttcagcggtccaggcgagaatcgcagcatgagcggcccggacaatcggggcaggggaagaggtggcttcgaccggggcggcatgtctagaggtggccgcggtggaggacgcggaggcatgggcctgcagagtgaatcacttgtgtacacttctattctgaagaagtatccttacagcgtgctctctagacagcataatgagaaatgggactag

SEQ ID NO: 24076 - DNA, 972 bp, synthetic construct
  misc_feature 1..972: note = Description of Artificial Sequence: Synthetic coding sequence
  source 1..972: mol_type = other DNA
atggaccccggcaaggacaaggagggcgtgccccagcccagcggccctcccgcgagaaagaaattcgtgatccctctcgacgaggacgaggtgccacccggagtggctaaacccctttttcgatctacccaatcactgccaaccgtggatacctctgctcaggccgctccccagacctatgccgaatacgctatttcgcagcctctcgagggcgcaggcgccacttgtcccactggatctgagcccctcgcaggagagacacccaaccaagccctgaaacctggggccaagtccaattctattatcgtttcccccagacaacgaggtaaccctgtgctgaaattcgtgcgaaatgtgccttgggagttcggagatgtgatccctgattacgtgctagggcagtctacctgtgccctatttctttctctaaggtaccacaatctgcatcccgactacatacatggacggctgcagagcttagggaagaactttgcactgcgcgttttgcttgttcaagtggacgtcaaggacccccagcaggcgctcaaagagctggcaaaaatgtgtattctcgctgactgcacgttgattctagcctggtctccggaggaggctggcaggtacctggagacctacaaggcttacgagcagaagccggccgatctcctgatggagaaacttgaacaggacttcgtgtcaagggtgacagaatgtcttactacggtgaaaagcgtgaacaaaactgattcccagaccctactgacgacattcggcagcctggagcagttgatagccgcatccagagaggatctggccctatgccccgggctgggcccacagaaggtcagggcactgggcaaaaaccctcggagctggggaaaggagcgcgctccgaataagcataacttacgcccccagagttttaaagtcaagaaggaacctaaaacacggcattcagggttccgcctgtag

SEQ ID NO: 24077 - DNA, 894 bp, synthetic construct
  misc_feature 1..894: note = Description of Artificial Sequence: Synthetic coding sequence
  source 1..894: mol_type = other DNA
atggaccccggcaaggacaaggagggcgtgccccagcccagcggcccgccggctcgcaaaaagtttgtcatcccccttgatgaagacgaagtaccccccggcgtggctaaaccactctttcggtctacacagtctcttcctactgtggacacatccgcgcaggctgctccgcagacgtacgctgagtacgctatttcccagccactggaaggcgcaggagccacatgcccaacaggcagtgaacctctcgctggcgagaccccgaaccaggctctgaagcccggtgctaagagcaacagtatcattgtatccccccgtcagagggggaacccagtccttaaattcgtccgtaatgttccctgggagttcggagatgtgattcccgactatgtcttggggcagtcaacctgcgctttattcctcagcctacgctaccataatcttcaccctgattacattcatggccggctccagtctttggggaagaactttgctctgcgggtgctgctcgtacaagtggatgttaaggatccccaacaggcacttaaagaactcgcaaagatgtgcatcctcgctgattgtacccttatcctagcatggagccctgaagaagccggaaggtatctcgagacgtataaagcttacgaacagaaacctgcagacctactgatggagaaactcgaacaagatttcgtgagcagagttacagaatgtctgacaacagtcaagtccgtgaacaaaactgacagtcagaccctgctgaccacctttggctcgcttgaacagctcatagcggcttcacgagaggacttagctctttgtcctggcctcggaccccagaaggctcgtagactcttcgacgtcttgcatgagcccttcctgaaggttccctag

SEQ ID NO: 24078 - DNA, 822 bp, synthetic construct
  misc_feature 1..822: note = Description of Artificial Sequence: Synthetic coding sequence
  source 1..822: mol_type = other DNA
atggaccccggcaaggacaaggagggcgtgccccagcccagcggccccccggctagaaagaaatttgtcattccactggacgaagacgaagttccacccggtgtggcaaagccgctgttccggagtacgcagtccctccccaccgtcgacacctctgctcaggccgctcctcagacatatgcggagtatgccatcagccagcccttggagggggcaggcgcgacctgccccacaggctccgagcctctggccggagagaccccaaatcaagccctgaaacccggcgcaaagagtaattccatcatcgtgagcccccgtcagaggggaaacccagttttgaaatttgtgaggaacgtgccgtgggagttcggcgatgtaattcccgactatgtgttgggccagagtacctgtgccctttttctcagtctaagataccataacttgcacccggattacattcatgggaggttgcagtcactaggcaaaaactttgcactgcgcgttctactcgttcaggttgacgtcaaagatcctcagcaggctctgaaggaattggcaaagatgtgcatattggctgactgtacattgattttggcgtggtcccctgaggaggcagggcggtacttggaaacttataaagcgtacgaacagaaaccggcagacctcctgatggagaagctggagcaggatttcgtatctaggtcactggagcaacttatcgccgcctccagggaggatctagccttatgcccaggcttggggccccaaaaagctcgcagactgttcgatgtcctccatgaacctttccttaaggtaccatag

SEQ ID NO: 24079 - DNA, 678 bp, synthetic construct
  misc_feature 1..678: note = Description of Artificial Sequence: Synthetic coding sequence
  source 1..678: mol_type = other DNA
atggaccccggcaaggacaaggagggcgtgccccagcccagcggccctccggcacgcaaaaaattcgtgatcccacttgacgaagacgaagtgcctccgggtgtgcgggggaaccctgtgctgaagttcgtccgtaatgttccatgggagtttggcgatgtgatccccgactatgtgcttggccagtctacatgcgctctgttcctgagtcttcggtatcataacttacaccccgattacatccatggtagacttcagagtttgggcaagaactttgcactccgcgtgttgctggtacaggtggacgttaaggatcctcagcaagcgcttaaggaactcgccaagatgtgcatcctcgcagactgtacattaatccttgcttggtccccagaggaagctggaaggtacctggaaacttataaagcttatgagcaaaaacccgcggatctgctaatggagaaactggagcaggactttgtttcacgagtcacagagtgcctaacaaccgtgaaatccgttaacaagacggatagccagactctccttacaacattcggcagtctggagcagctgattgcagccagcagagaggatctggcactttgtccaggcctgggtccccagaaagcaaggcgcctgttcgacgttctccatgagccattcctgaaagttccctag

SEQ ID NO: 24080 - DNA, 120 bp, synthetic construct
  misc_feature 1..120: note = Description of Artificial Sequence: Synthetic coding sequence
  source 1..120: mol_type = other DNA
atggaccccggcaaggacaaggagggcgtgccccagcccagcggccctcccgcaaggaagaaattcgttatccctctggatgaggacgaggtgcctccgggggttagcaagcctctgtag

SEQ ID NO: 24081 - DNA, 726 bp, synthetic construct
  misc_feature 1..726: note = Description of Artificial Sequence: Synthetic coding sequence
  source 1..726: mol_type = other DNA
atggccagcctgagcggcctggccagcgccctggagagctaccggggcagggaccgcttaataagagttctaggctattgttgccaactagtaggaggtgtgttagtggaacaatgtccagcccggagcgaggttggcacaaggctcctcgtggtcagtacccaacttagtcactgtaggaccatacttcgcctcttcgatgacctggccatgtttgtttataccaagcagtatggtctgggtgctcaggaggaagatgctttcgttagatgcgtgtcagtgctagggaatttggcagaccagctgtactacccttgcgagcacgtggcctgggcggccgatgcccgggtcctgcacgtggactcttcgcgatggtggacgctatcaaccactctgtgggccctctctctcctgctgggcgtggctcggagcctgtggatgttgctaaagctgcggcaaaggcttcggtctcctacagctccattcacgtcacctctcccccgcggcaagagacgggccatggaggcccagatgcagagtgaagctctgtctttgctttcaaacctagccgatctggccaatgctgtgcactggcttccgcgtggcgtgttgtgggccgggcgcttcccaccttggttggtcgggctgatgggcactatttcttcgatcctgtctatgtatcaggctgcaagagctggagggcaggctgaggccacaaccccatag

SEQ ID NO: 24082 - DNA, 1218 bp, synthetic construct
  misc_feature 1..1218: note = Description of Artificial Sequence: Synthetic coding sequence
  source 1..1218: mol_type = other DNA
atgcgggagctgaagcggaccctggacgccaagggccacggcgtgttagaaatgccttcaggcaccggaaagacagtaagtctgttggcactgataatggcctaccaaagggcctacccactggaggtgaccaaacttatttactgctccaggacagtgccagagattgagaaggttatagaagagttgaggaaattgttgaacttttacgaaaagcaggagggcgagaagctccctttcttggggctggcattgtctagcagaaaaaacctctgtatccaccccgaggtcacaccgctgcgctttggaaaagacgtggatgggaagtgccactctctgacagcctcctatgttagagctcaataccagcatgacacatctctcccccattgccgattttatgaggaattcgacgctcatggacgcgaagtccccctgccagctggaatatacaaccttgatgacctcaaggcactcggaaggcggcagggttggtgcccttactttctggcccgatactctatcctgcatgccaatgttgtcgtctactcttaccattatctccttgacccaaaaatcgctgatttggtctctaaggagctggctcggaaggcagtagttgtgttcgacgaagcccacaacatcgataacgtgtgcattgattccatgtcggtgaatcttacccgaaggacactggacaggtgtcaggggaacttggagacgttacagaaaacagtcttaagaatcaaggaaaccgacgagcagaggttgcgagacgagtacaggaggctggtggagggtctccgcgaagcaagcgcggcccgagaaaccgacgcgcatctagccaatcctgtattacccgatgaagttctgcaagaggccgtgcccggatccattcgcaccgccgagcacttcctcggcttcttaagacggctcttggagtacgttaagtggcgcctacgggttcagcatgtggtacaggagtcacctcccgcctttttgagcggactggcacagcgggtctgtatccaaagaaagcctttaaggttctgtgcagagcgcctgcgctccttgctgcatacattggaaatcaccgacttggccgactttagtccgcttaccctcctagcaaattttgccactttggtgagcacctacgccaaagggcaggcccagcactgtggttcaagtcgaaatcagaagcgctcacatccatag

SEQ ID NO: 24083 - DNA, 2133 bp, synthetic construct
  misc_feature 1..2133: note = Description of Artificial Sequence: Synthetic coding sequence
  source 1..2133: mol_type = other DNA
atgcgggagctgaagcggaccctggacgccaaggcctaccccctggaggtgaccaaattaatttactgtagcagaaccgtgcccgagatcgaaaaagtgatcgaagagctgcggaaattgctcaatttttacgagaagcaggaaggtgagaagctacctttcctgggactggctttgtctagccggaaaaatctgtgcatacatcctgaggtcaccccgctaaggttcggcaaggacgtggatgggaaatgtcattctttaaccgcctcttatgtgagggcccagtatcagcacgacacctcattacctcattgcagattctacgaagagtttgacgcccacggacgcgaggtcccgctccccgccggtatttacaacctcgacgatttaaaagcattgggacgccgccaagggtggtgtccctatttccttgctcggtactcgattctgcacgctaatgtagtggtctatagctaccattatctgcttgatcccaaaattgcagacctggtatccaaagagttggcgaggaaggctgtcgttgtgttcgacgaggctcacaatattgacaacgtttgtatagatagtatgtctgtgaatctgacccgcaggacacttgaccgctgtcagggaaacttagaaactttgcagaagacggttctgcggattaaagagacggacgagcagagactacgtgacgagtacagaaggctggtggaaggcctcagggaggcttcggccgccagagaaaccgacgctcatctggctaatcccgtattgccagatgaagtcctccaagaggccgtgccgggaagtatacgcacagctgagcactttctcggattcctaaggcgccttctcgagtacgttaaatggcgtctccgtgtgcaacatgttgtgcaggaaagtccgcccgcctttctttcagggcttgctcagagggtctgcatacagcggaaacctttaagattctgtgccgagcgtttgagaagcttgctgcatactctggagattaccgatttagccgatttttctcccctgacgctgctcgctaatttcgccaccctcgtcagcacctacgctaaagggtttacgatcatcatcgagccgtttgacgacaggaccccaaccatagcaaatccaatccttcatttttcttgcatggatgctagtctcgctattaagccagttttcgagcgatttcagtctgtcattatcaccagcggaaccctgtcacccctggatatttatccgaaaattctggattttcatcccgtgaccatggcgactttcacaatgactcttgctcgtgtgtgcctgtgtccaatgatcatcgggcgcggaaacgaccaagtggctatcagtagtaagttcgagacaagagaagatatcgccgtgatccggaactatggtaatcttctcttagagatgtctgcagttgtgcccgatggcattgtggcgttcttcacatcataccagtacatggagagcactgtggcttcttggtacgaacaggggattcttgaaaacatccagcgcaacaagctgctcttcatcgagacacaggacggcgccgaaacttccgtggccttagagaaatatcaggaagcttgcgagaatggcaggggcgccatactgcttagcgttgccagaggaaaggtgtctgaggggatcgattttgttcaccattacggccgcgctgttatcatgttcggcgtaccatacgtgtacacacaatcacgtatcctgaaagccagacttgaatatcttagagatcagttccagattcgagaaaatgactttttgactttcgacgccatgaggcacgctgctcaatgtgtgggacgggcaatccgcgggaaaacagactatggtttgatggtttttgccgacaaaaggttcgcacggggcgacaagcgtggaaagctcccccgatggattcaagagcacctgaccgacgccaacttaaatctcacagtcgacgagggcgtacaagttgcaaaatattttcttcgacagatggctcagccatttcaccgtgaggaccagctcgggctctcccttctgtccctcgaacagctggagagcgaggagacactgaagcggatagagcagattgcacagcagctctag

SEQ ID NO: 24084 - DNA, 2211 bp, synthetic construct
  misc_feature 1..2211: note = Description of Artificial Sequence: Synthetic coding sequence
  source 1..2211: mol_type = other DNA
atgcgggagctgaagcggaccctggacgccaagggccacggcgtgttggagatgccgtcaggcaccgggaaaaccgtcagtttattggcacttataatggcctaccaacgggcctaccctcttgaggtgaccaagttgatctactgctctcggacagtgccagagatcgaaaaagtgatagaggagctcagaaagctgttaaatttttacgagaaacaggaaggggagaagctgccttttctgggcctagctctgagcagtaggaagaacttgtgtatacaccccgaggtcacgcccttaaggttcggcaaggatgtggacgggaagtgtcactcactcacagccagctatgtgagagctcaataccaacatgatacttctctcccacactgtagattctatgaggagtttgacgcccacggacgtgaagtaccactgcccgccgggatatataacttggatgacctcaaggcactcggtagaaggcagggatggtgtccatattttctagccaggtactccatcctgcacgccaatgtggtggtgtattcttaccattacctgctggaccccaagatcgcagatctggtaagcaaagaattagctagaaaggctgttgtcgtgtttgacgaggcacacaacatcgacaatgtttgtatcgacagtatgtctgtgaacctgacacggcgcaccctggatcggtgtcaggggaacctggagaccctgcagaaaacggttctgagaataaaagaaactgacgaacagcggctgcgcgatgaatatcgtagactcgtagaaggtctgagggaggcctctgccgccagggaaacagacgctcacttggctaaccccgtgctccccgacgaggttttacaggaagcagtgcccggatccatcaggacagctgaacactttctaggttttttgagaagactgctggaatacgttaagtggcggctaagagttcagcacgtagtacaagaaagccccccagcgttcctgtctggcctcgcacaacgagtttgcattcagagaaaaccattgcggttctgcgctgagcgcctcagatctctgcttcacacactggaaatcaccgacctggccgatttcagccccctcaccctcttggctaactttgccaccttagtatcaacctacgccaaaggctttaccattattatcgagccattcgacgatagaacccctacaattgctaacccgattctgcattttagttgcatggacgcatcactcgccatcaagcccgtctttgaacgatttcagtctgtaattattacaagtggaacgctgtcaccgctggatatctatcctaaaattctcgacttccatccagtgaccatggccacattcacaatgaccctggctagagtttgtctgtgcccaatgatcatcggaaggggaaatgatcaggtcgccatctctagtaaattcgagacaagggaagatatcgctgtgatccggaattacggaaatctcctgctggaaatgtctgcagttgtgccagatggtatagttgcctttttcacttcctaccagtacatggagagtactgtggcttcgtggtatgagcaaggaatcctggagaatatccagcgcaacaaactgctcttcatagagacacaggatggagccgaaacctctgtcgcactggaaaagtaccaggaagcatgtgagaacgggcgcggagccatcctgctctcagttgccagggggaaggtgtctgaaggcatcgacttcgtgcaccattatggtcgggcagtgataatgttcggcgtgccatatgtctatactcagagcaggatcctgaaagccaggttggaatatctgagggatcagtttcagatccgggaaaacgatttcctgaccttcgacgcaatgcggcacgcggctcaatgtgttgggagagctatccgtggaaagactgactacggcctgatggtgttcgctgacaaacgctttgcacggggggataagcggggaaagctgccgcgctggatccaggagcatttaacagatgctaatctgaatcttaccgtcgatgagggcgtgcaggttgcaaagtatttcctgaggcagatggcgcagcccttccatcgcgaggatcaattggggttgagcctcctgtccctggaacaactcgagagcgaggaaacactgaaacgtattgagcagatcgcacagcagctctag

SEQ ID NO: 24085 - DNA, 2049 bp, synthetic construct
  misc_feature 1..2049: note = Description of Artificial Sequence: Synthetic coding sequence
  source 1..2049: mol_type = other DNA
atgaagctgaacgtggacggcctgctggtgtacttcccctacgactatatctatcctgaacaattctcctacatgagagagctcaagcgcacactcgacgctaaggggcatggagtgctggagatgccctctggtacaggcaaaacggtgtctctcctggcgctcattatggcctaccaacgggcttatccccttgaagtgaccaaactcatctactgtagcaggacagtgcctgaaattgagaaagttatcgaggaattacgaaagctgttgaatttttacgagaaacaagagggggaaaagcttccttttcttggcctggctctgtctagtaggaagaacctctgtatccatcctgagattttgcatgccaacgtcgtggtatactcctaccattatctcctcgatccaaagattgccgatctagtttcgaaggagctggcccggaaggcggttgtcgtgttcgatgaagcccataacatcgacaacgtctgcattgacagtatgagtgtcaaccttactaggcggaccttggacaggtgtcagggaaatcttgaaacactccaaaagactgtacttcgcattaaagaaacagatgaacagcggttacgcgacgagtataggcgtcttgtggagggtttgagagaggcttcggcagcacgcgaaaccgacgcccaccttgctaaccccgtgctgccagacgaggtgctgcaggaagccgtcccgggatccattcggactgccgaacacttcttgggttttctgcggagactcctagagtacgtgaaatggagactgcgagttcaacacgtggtgcaggaatcccccccagctttcttaagcggcttggctcagcgtgtgtgtattcaaagaaaaccacttaggttctgtgcggaacgactgcgatctctcctccacacacttgagattacagacctggcggacttctctcccctgactctactcgcaaactttgcaaccttagtctcaacttacgccaagggctttactatcatcatagagcccttcgacgataggacacctaccattgcaaatcccatcttgcacttttcttgtatggatgccagcctggccattaagcccgtgtttgagcgatttcagtctgtcattatcacatctgggactctgtcacctctcgatatctacccaaagattctggacttccaccccgtaaccatggccactttcacaatgacactggctcgagtgtgtctttgccctatgataatcgggcgaggcaacgaccaagtcgcgatctcatccaagttcgagacaagagaagacatcgccgtcatcagaaattacgggaacctcctgttagagatgtccgcagtcgtgcccgatggcatagtggctttcttcacttcctaccaatacatggaatccaccgtcgcctcatggtacgaacagggcatactggaaaatattcagagaaataaactgttatttatcgaaacgcaggacggagccgaaacctcagtcgcgctggagaagtatcaggaggcatgtgaaaatgggcggggcgcaatactgttgtcggtagcccgcgggaaagtgagtgagggcatcgacttcgtccatcactacggtcgcgcagttattatgtttggtgtgccttacgtgtatacccagtcgcgcattcttaaggcacggctcgaatatctgcgggaccagtttcagatccgcgagaacgactttctcacatttgatgcgatgaggcacgccgctcagtgtgtggggcgggcaattagagggaaaacggattatggcttaatggtgtttgcagacaagaggttcgcacggggagacaagcgtgggaaactgcccaggtggatccaagaacacctgaccgatgccaatctgaacttgaccgtggatgagggagtgcaggtggcaaagtacttcctacgtcaaatggctcaaccctttcaccgggaagaccagttgggtttaagtctgctctctctggagcagttggagtccgaggaaaccctgaaacgcattgagcagatcgcacaacagttgtag

SEQ ID NO: 24086 - DNA, 2283 bp, synthetic construct
  misc_feature 1..2283: note = Description of Artificial Sequence: Synthetic coding sequence
  source 1..2283: mol_type = other DNA
atgaagctgaacgtggacggcctgctggtgtacttcccctacgactacatttaccctgagcagtttagctacatgcgagagctgaaacgaacgctggacgccaagggccatggagttctggagatgccttccgggaccggaaagacagtttcactgctcgcactgataatggcttatcagcgggcatatccgttagaggtcactaaactcatatactgctcccggacggtgcctgagatagaaaaagtgatcgaggaactccgaaaactgctaaacttttatgagaaacaggaaggcgagaagttgccgttcctgggacttgctctgtccagccgcaaaaacctgtgtatccatcctgaggtgacccctctgcgttttggcaaagacgtcgacggcaaatgccactctctcacagcatcctacgttcgagctcagtaccaacacgatacatcgctcccacattgccgattttatgaagagttcgatgcccacgggcgggaagtgcccctgccagcaggaatatataacctggatgacctgaaggctttgggccgccgtcagggttggtgtccatattttctggcccgttacagcatcctgcacgctaacgtagtggtctatagctaccactacctgttggatcctaagattgccgatctggtgagcaaggaacttgcccgcaaagcggtcgtggtgttcgatgaggcccacaacattgataatgtatgcattgatagtatgagcgtgaatctcacaaggaggaccctggaccggtgtcaggggaaccttgaaaccctgcaaaaaactgtgctcagaatcaaagaaactgatgagcagcggctccgggacgagtatcgccggctggtggagggcttgagggaagctagtgctgcaagggaaacagacgcccacctggccaaccccgtgctacctgatgaagtcctgcaggaggctgtgccagggagtatcaggacggcagagcactttctcgggtttcttcgccgcctgctggaatacgtgaaatggcggttgcgggtgcagcacgtcgttcaggagagccccccagcgttcctgagtggccttgcccagcgagtatgtatccagaggaaaccactgagattctgcgcggaaaggcttagaagtctgctccacactctggagataaccgacttagcagacttctcaccgctgacgttgctggccaattttgctacattagtgtcaacttatgctaaggggtttactataattatcgagccattcgatgaccgaacacctactatcgcaaatcctattctgcattttagctgtatggacgcctccctagctatcaaaccagtattcgagcgattccagtcagttattatcactagtgggaccctgtccccactggatatatatcctaaaatcttagacttccaccctgttacgatggccacctttactatgaccctagccagagtgtgcctttgccctatgattatcggtagggggaatgaccaggtggcaatttccagcaaattcgagaccagagaggatatcgctgtaataagaaactacggcaatctcctccttgagatgagcgccgtggtccctgatggcatcgtggccttctttacctcatatcagtacatggagagcaccgttgccagctggtacgaacagggaatactggaaaatatccagcgcaacaaactcctgttcatcgagacccaggacggggcggaaacatctgtggccctggagaagtaccaagaggcctgtgagaacggccgaggggccatcttgctgtctgtggctcgggggaaggtgtctgaaggcattgacttcgtgcatcactatggaagagccgtgatcatgttcggggtgccatacgtctatactcagtcgagaatcctcaaggcccgcctggagtacctgcgtgaccaatttcagattagagaaaatgattttctgaccttcgacgccatgaggcacgctgctcaatgcgtgggacgggctattagagggaaaaccgactacggcctgatggtttttgctgacaagcgcttcgcccgcggagacaagcgagggaaactcccaaggtggatccaggagcatctcaccgacgccaatctgaacctaacggtcgatgagggtgttcaggttgcaaagtatttcctgcgccagatggcccagccattccaccgggaagaccagctcggtttgtccctcctgtcattggagcaattagaaagcgaggagacactgaaacggattgaacagatcgctcagcagctgtag

SEQ ID NO: 24087 - DNA, 2751 bp, synthetic construct
  misc_feature 1..2751: note = Description of Artificial Sequence: Synthetic coding sequence
  source 1..2751: mol_type = other DNA
atggagagcggccagcccgcccggcggatcgccatggcccccctgctcgagtatgaacgtcagcttgtgctggagctgttagacacagatggacttgtcgtgtgcgcccgcgggctgggagccgatcgtctgctatatcacttcttgcagttacactgccatcctgcatgcctggtcctggtgctgaacacccagccagctgaagaggaatatttcatcaatcagctgaaaatcgagggcgtggaacatctgcccagaagggttaccaatgagatcacttccaactcaagatacgaggtgtatacccagggaggtgtgatcttcgcgacctcacgaatactggtcgtggatttcctcactgacaggattccatctgacctgatcacaggcattttagtctatcgtgctcaccggatcatagagtcgtgtcaggaagcctttatcctgagacttttccgtcagaaaaataagcggggatttatcaaagccttcacagataacgcagtagcattcgatacaggtttctgccacgtcgaacgggtgatgcggaatctgttcgtgcgcaagctatatctgtggccccggtttcacgtggcagtgaatagtttcctggaacagcacaaaccggaagtagtggagattcacgtgtcgatgacccccacaatgctggctattcagactgccatcctggacattctaaacgcctgcttaaaagagctcaagtgccacaatccctcattggaggtggaggacctctccttagaaaatgccattgggaagcctttcgacaagactatccgccattatctcgaccctttatggcaccagttgggggcaaagacaaaatccctcgtgcaggatctgaagatccttcggactctgttgcaatatctttcacagtatgactgtgtgaccttcctgaacctgctcgagtcacttagagcaaccgagaaggcattcgggcaaaatagtggctggctgtttcttgactcctccacgtccatgtttatcaatgcccgggcccgtgtctatcacttaccggatgcaaaaatgtctaagaaagagaagatttcagagaagatggagatcaaagagggtgaggagactaaaaaggagctcgtgctggaatcgaacccaaagtgggaggcgctgaccgaggtgcttaaggaaatcgaggcagaaaacaaggaatccgaagctctcgggggcccaggtcaggtgctgatatgcgccagtgacgatcggacatgtagccagttgcgcgattatattaccctgggtgcggaggcattcttgctccggttataccgtaagactttcgagaaggattccaaagctgaggaagtgtggatgaaattcaggaaagaggactcttccaaacgaatccgaaagtctcacaagcgccctaaagatccccagaacaaggaaagggcaagcaccaaagagaggacactgaaaaaaaagaagcggaaacttactttaacccagatggtgggaaaacctgaggagctggaggaggagggtgacgtagaagagggttataggcgcgaaatctcctccagtccggagtcctgccctgaagaaatcaaacatgaggagttcgatgtcaatctcagctcggatgcggcatttggaatcctcaaggagcctctgacaataatacatccgctgctcgggtgctcagatccatacgccctcactcgcgttcttcatgaagtagagccgaggtacgtcgtcttatacgatgccgagttgaccttcgtgcggcagctggagatctacagagctagccgcccagggaaacctctcagggtctattttctgatttacggggggtccactgaagaacaacgatacttgaccgcactccgaaaggaaaaagaagccttcgagaaactgatacgggagaaagctagcatggtcgttcctgaggagagggaaggccgggatgaaactaatcttgaccttgtccgcggcacagcttcagctgacgtgagcacagacactcgcaaggcgggtggtcaggagcaaaatggtacccagcagtccattgtggtggacatgcgggagttccgctcagagttgccctctctgatccatcgacgcggcattgatattgagccagttactctggaggttggagattatattctcaccccagaaatgtgtgtggagaggaagtccatttcagacctgatagggtccctcaacaatggacgcttatactcacagtgcatctctatgtctcgctattacaagcgcccggttctgctgatagaatttgacccttccaaaccattttctctcacaagcagaggcgcactctttcaagagatcagttccaatgacatttcgagtaagttgactctgctgaccctgcactttcctaggcttcgcattttgtggtgtccaagtcctcatgccactgcggagctgttcgaagagctgaagcaatcaaagccccagcccgacgctgccacagctctcgccattacagcggattcagagactctgcctgaatccgaaaagtacaaccccggcccccaagacttcctactcaaaatgcccggtgtaaatgctaagaactgccgctctttgatgcatcacgtcaaaaacattgctgagttggccgcactttcccaggatgaactcacatctatcctggggaatgcagctaatgcaaaacaattatatgacttcattcacactagcttcgccgaggtcgtctccaaagggaagggtaaaaaatag

SEQ ID NO: 24088 - DNA, 2715 bp, synthetic construct
  misc_feature 1..2715: note = Description of Artificial Sequence: Synthetic coding sequence
  source 1..2715: mol_type = other DNA
atggcccccctgctggagtacgagcggcagctggtgctggagctgctggatacggatggactcgttgtctgcgcccgtgggctgggggccgacagactcctataccatttcctacagctccactgccatcccgcatgcctggtcctggtgttgaatacccagccagcagaggaggaatactttatcaaccagcttaagattgagggggtcgagcatttgccaagaagagtcacaaatgagatcacttcaaacagtagatacgaagtctacacccagggaggagttattttcgccacctctcgaatcctcgtagtggacttccttaccgatcgcatcccatcagacctcattactggaattctggtgtatcgcgcacatagaatcattgaatcttgccaagaagccttcattctccgcctgtttaggcaaaagaacaaaaggggtttcattaaagcttttactgataacgccgttgcttttgataccggtttctgccacgtcgagcgagtcatgcgaaatctgttcgtgcgtaaattatacctgtggccacgattccatgtggccgtcaatagtttcctggagcaacacaaaccagaagtggtggaaattcacgtgtccatgacaccaacaatgctcgctatccaaaccgccatcctggatatcttgaatgcatgcttgaaagagctgaagtgtcacaatcccagtcttgaggtggaagatctttctctcgagaatgccatcgggaagcctttcgataagacgataaggcactatctggacccgctgtggcaccagctcggagccaagacaaagtcactggtgcaggacctgaaaatactaagaacgctgctccaatacctgtcacagtacgactgcgtaacgtttttgaatctgctagagtctctgcgagccaccgaaaaagcgtttgggcaaaattcagggtggctgtttctcgactcctctacttctatgttcatcaatgcacgagccagggtctaccacttacctgatgccaagatgagcaagaaagagaagatatcggagaaaatggaaatcaaagagggtgaggaaaccaagaaagagctggtactggagagcaacccaaaatgggaagccctgacagaggtcctcaaggaaatagaggctgagaacaaggagagcgaagctctgggaggacccgggcaggtcctgatttgcgcctccgacgatcgaacctgctcccagctccgcgactatataactctgggcgccgaggctttcctattgagactgtataggaagacattcgaaaaggatagcaaggctgaggaggtgtggatgaagttccgaaaagaggattcgtctaaacggatccggaagagtcacaaacgcccaaaagatcctcagaacaaagaacgggcctcaaccaaagagcgtaccctcaaaaagaagaaacgtaagctgacactcacacagatggttggcaaacccgaggagttggaggaagagggggacgttgaagaggggtatcgtcgcgagatctcgtcatctcctgagagctgtcctgaggagatcaaacatgaggaattcgatgtcaacctgagttctgatgccgccttcggtatattaaaggaaccattgacaataattcaccccctgctaggctgctccgacccatacgccctgacaagagtgcttcacgaagtcgagcctagatacgtggtgctctatgacgctgagctgacgtttgtgaggcagctggaaatctacagagccagtcggcctgggaagcctctgcgctacttcctgatatatggaggctcaacagaggaacagcgttacctcactgctctccgcaaagaaaaagaggctttcgaaaagctcatccgagagaaggccagcatggtggtgccagaggagagagaaggacgtgatgaaactaatttagatttagtgagaggcactgcttccgccgacgtttcgactgataccagaaaagctggcggccaggagcagaacggcacccaacagtccatagttgtcgatatgagggagtttagaagcgaactgccttctctcattcaccgtcggggcatcgacatagaaccagtgactctagaggttggagactatatcctgactccagagatgtgcgttgagcgcaaaagcatctctgacctcattggctccctgaataatggtcgactgtatagccagtgcatcagtatgagcagatactataagcggccagttttgctgatcgagttcgacccgagtaagccattctcgctgacaagccgaggcgcgttatttcaggagataagctcaaatgacatcagctccaaactgactctgctgacactgcattttcctcggctgcgcatactgtggtgcccatcaccccacgcaactgctgaacttttcgaagaactaaagcaatctaaacctcagcccgacgcagctaccgccctggccatcacagctgattctgaaacactacctgaatccgagaagtataatcctggtccccaggacttcctactgaagatgcccggcgtgaacgcgaagaactgtcggtctctcatgcatcacgtgaaaaacatcgctgagttggccgccctcagtcaagatgaactaacttccatcttggggaatgcggccaacgctaagcagttatacgatttcatccacacatcattcgcagaggtcgtatctaagggtaaagggaagaaatag

SEQ ID NO: 24089 - DNA, 1071 bp, synthetic construct
  misc_feature 1..1071: note = Description of Artificial Sequence: Synthetic coding sequence
  source 1..1071: mol_type = other DNA
atggcccccctgctggagtacgagcggcagctggtgctggagctgctcgatactgatgggttggtcgtctgcgcacgcgggctgggtgcagacagactgttgtaccatttcttacagctgcattgtcaccctgcgtgtttggttctggtgctgaatacccagccagcagaggaggagtatttcattaaccaactcaaaatagaaggcgtggagcatctgccccgccgggtcaccaatgagatcacaagcaatagccggtacgaggtgtacacacagggcggtgtcatatttgcgacgtcgagaatcctggtggtggatttcctcacagataggataccatcagacctcataaccggaatcctcgtttatcgcgcgcacagaatcattgagagctgccaggaggcttttatccttcggctatttagacaaaagaataagagaggatttattaaggcttttactgacaatgccgtggcctttgatacagggttttgtcacgtggagcgcgtgatgaggaatctgtttgtgaggaaactgtacctttggcctaggttccatgtggctgttaattcattcctggaacagcataagccggaggtggtagaaatccatgtctcgatgactcctactatgctcgccatccagacagctattttagacatactcaacgcctgccttaaagaactgaagtgtcataacccctccctggaagtagaagacctgtctctcgaaaatgcaattggcaagccttttgacaagacaatcaggcattaccttgacccactttggcaccagttaggggccaagaccaagagtttggtacaggatctaaagatcctgaggaccttactccagtatctctctcaatacgattgtgttacttttctgaatttactggagtctcttagggccactgagaaagcctttgggcagaactctggatggctgttcctcgactcatcaaccagcatgtttattaatgcccgcgcacgcgtctaccatctccctgacgcaaagatgtccaagaaggagaaaatctcagaaaaaattaagaagaagaagaaaaagtag

SEQ ID NO: 24090 - DNA, 3561 bp, synthetic construct
  misc_feature 1..3561: note = Description of Artificial Sequence: Synthetic coding sequence
  source 1..3561: mol_type = other DNA
atgggcgtgcagggcctgtggaagctgctggagtgcagcggccggcaggtgtccccagaggctcttgaagggaaaatcttggccgtcgacatttcaatttggctgaaccaagctttaaagggggtccgcgacagacatggcaactctattgaaaaccctcacttgcttacactgttccaccggctgtgcaagctgttgttttttagaattcggcctatctttgtattcgatggggatgcacctctgctcaaaaaacaaaccctagtgaagcgacggcagcggaaagacctggccagctccgactctaggaaaactaccgagaaacttcttaaaacattcctgaaaaggcaggctattaagactgctttccgctctaaacgggacgaagcgctcccttcactgacccaggtccgcagggaaaatgatctctacgtattgccaccactgcaggaggaggaaaaacatagcagcgaggaggaagacgagaaggagtggcaagaacggatgaatcagaaacaggcccttcaggaagaattttttcacaacccccaagccatcgatatcgagtcggaagacttttcttcactccctccagaagtgaagcacgagattctgacagatatgaaggaattcactaagaggcggcgcacccttttcgaagcgatgccagaagagtccgatgacttctcccagtatcaactgaagggtctcctgaagaagaattatctgaaccaacacattgaacatgtgcagaaagaaatgaaccagcaacacagcggacacatcagaagacagtatgaggacgagggaggtttcctgaaagaagtcgaatctcggagagttgtgtcagaagatacttctcattatatcctgattaaaggtattcaggcaaagactgttgccgaagtggacagcgagagtttgccttcgtcctccaaaatgcacggcatgtcctttgacgttaagagcagcccttgtgagaagctgaaaaccgagaaagagcctgacgctacaccgccaagcccccgaaccctgttggcaatgcaggccgcactgttgggttcaagctcggaggaggaactcgagagcgaaaacagacgtcaggctagggggagaaatgcccctgcagccgtagatgaagggtccatctctcctagaacattaagtgccataaagagggcactcgatgacgatgaggatgttaaggtctgtgctggggatgacgttcaaactgggggacccggagccgaggagatgcggatcaactcatccactgagaacagcgacgaaggactcaaagttagggatggcaagggaatccctttcacagctacgctagccagttcttccgtgaactctgcagaagagcatgttgcctctacgaacgaggggcgggagcccaccgattcggtacctaaagagcaaatgagccttgtgcatgtgggcactgaggcattccccatctctgacgagagtatgataaaggaccgcaaggaccgcctccccctggagtctgccgtcgtccgccactcggatgcccccgggctgccaaatggtcgggagctgacacctgcctcgcctacctgtaccaatagcgtcagtaaaaacgaaactcatgccgaagtactggagcagcagaacgagctgtgtccatatgaatccaagtttgatagcagtctcctgagtagcgatgacgagactaagtgtaagcctaactcggcttcagaggtgatcgggccagtatctcttcaggaaacctcatctatcgttagcgttccgagcgaagccgtcgacaatgttgaaaacgtcgtttccttcaacgccaaagagcatgagaacttcctcgagacaattcaggagcagcaaaccactgagagcgccggccaggacctgatctccatccccaaggccgtggaaccaatggaaattgactctgaggaatcagaaagcgatggtagctttattgaggtacagtctgtgatcagtgatgaagaactgcaagctgagttccctgagacatctaagccaccctcagaacaaggggaggaagaactcgtgggaactagagagggcgaagcccctgctgagtcagagagcctgctgagagataactccgaaagggatgacgtagacggcgagccgcaggaggcggagaaggacgctgaggattccttacatgaatggcaggacattaacctggaggaactggagacgctggaaagtaatttgctggcacaacaaaactcactgaaagcacagaagcaacagcaggagagaatagctgccacagttacaggccagatgtttctggagtctcaggagctgctgagactgttcggaattccctacatccaggcccccatggaggcggaagcacaatgcgcaattcttgacctgacggaccaaactagtgggacaatcaccgatgattccgatatctggctgttcggagccaggcatgtctatagaaattttttcaataagaacaaattcgtcgagtactaccagtatgtggactttcataaccaactggggctggataggaataagcttatcaacctcgcttaccttctgggaagcgattacacggaaggaattcctacggtgggctgtgttactgccatggaaatcctaaatgagttccccggccatggcttggagcctttattaaagttctcagaatggtggcatgaagcacagaagaatcctaaaattcggcccaatccacacgacactaaggtgaagaaaaaactccgcacactgcaactgactcctgggtttcccaatcctgctgtcgccgaggcctacttgaagcctgtggtcgacgattccaaaggctcgttcctttgggggaagccagatctagacaaaattagggagttttgtcaaagatactttggttggaacagaactaagaccgatgagagcttgttccctgtcttaaagcaacttgacgcgcaacagacgcaactgaggatcgactcatttttcaggctggcgcaacaggagaaggaagacgctaagcgcataaaatctcagagactgaacagggctgtgacatgtatgctacgcaaggaaaaagaagccgcggcctctgaaatcgaggcagtctcggtggccatggaaaaggagttcgagcttcttgacaaagctaagggcaagacccagaaacgcggcattactaacactcttgaagaatcatcttccctgaaacgcaagcgcctcagtgattcaaagggaaaaaacacctgcggagggttcctcggagaaacctgcctgtccgaatccagcgacggatcttccagtgaagacgcagagtccagctccctaatgaatgttcaaaggcgcactgcagcaaaagaaccaaagaccagcgcttccgacagccagaactccgtgaaggaagctccggtgaagaatggaggggcgaccacaagctcctcctcagactccgacgacgacgggggcaaagagaagatggtcttagtcacggctcgctcagtcttcggcaaaaaacgaaggaaactgcgccgcgctcggggtcgcaaaaggaagacctag

SEQ ID NO: 24091 - DNA, 1260 bp, synthetic construct
  misc_feature 1..1260: note = Description of Artificial Sequence: Synthetic coding sequence
  source 1..1260: mol_type = other DNA
atgttcctggagagccaggagctgctgcggctgttcggcatcccctacatccaggccccaatggaggcagaggcccagtgcgccatcctggatttaactgaccaaacaagtggaactatcactgatgactcggacatctggttgtttggcgctagacatgtttacagaaactttttcaacaaaaataagtttgtcgaatactatcaatatgttgatttccacaatcagcttgggctcgataggaataaactcatcaacctggcgtacctgttgggatccgactacaccgagggtatcccaactgtgggttgcgtcaccgcgatggagattcttaatgagtttcccgggcacggcttagaacctctgctgaagttctcagagtggtggcacgaagcacaaaagaatccgaaaatccgacccaatccccatgatactaaggtaaagaaaaagctcaggaccctccagttaacacccggatttcccaatccagcggtcgcagaagcctacctcaaacctgtcgtggatgattccaaaggctccttcctgtggggcaagcccgacttagacaagatcagagagttctgccagcggtattttggctggaataggaccaaaactgacgagtccctcttcccggtgctgaagcagctggatgcgcaacagacccaattgcggatcgactctttttttcggttagctcagcaagagaaagaagacgctaaacgcataaaaagtcagcggctcaatcgggccgtgacatgtatgctgaggaaggagaaagaggctgccgcctccgagatagaggccgtgtctgttgctatggagaaggagttcgagctgctggacaaggccaaaggaaaaacgcaaaagagggggatcacaaacactttggaggagtcttcatcattaaagcgcaagcggctctctgatagtaaaggaaaaaatacatgtggggggtttcttggggagacttgtctgagcgaatctagcgacgggtcaagctcagaagatgcagagagctcaagcctgatgaacgtgcagcggcgtaccgccgccaaagagccaaagacttccgcttcggattcacagaactcggtgaaagaagcacccgtaaaaaatgggggcgccactacctcctcatcaagcgacagtgacgacgatggcggcaaggaaaaaatggtcctcgtgaccgctcggtccgtgttcggcaaaaaaagaagaaagctccgccgagcaagaggccgcaagcggaagacatag

SEQ ID NO: 24092 - DNA, 3057 bp, synthetic construct
  misc_feature 1..3057: note = Description of Artificial Sequence: Synthetic coding sequence
  source 1..3057: mol_type = other DNA
atgaaccagaagcaggccctgcaggaggagttcttccacaacccccaagcaattgacatcgaatcagaggacttttcatcactgcccccagaagtaaagcacgaaatactcacggacatgaaggagtttactaagaggaggcgaacccttttcgaggccatgcctgaagaatccgatgacttctctcagtatcaattgaaaggcctgctcaagaagaattatctaaatcagcacatagagcatgtgcagaaagaaatgaaccagcagcattcaggacatatcaggaggcaatatgaggacgagggaggatttttaaaagaggtagaaagccgccgggtggtgagcgaagatacctctcactacattcttataaagggcattcaggccaagaccgttgccgaggttgactccgaaagcctgccaagttccagcaagatgcatggcatgtcttttgacgtcaaatcgtccccctgcgagaagctgaagactgagaaggagcctgatgccaccccaccttcaccaaggactctgctggccatgcaggcagcgttgctcggctcttccagcgaggaagaactggagagcgaaaatcggcgtcaggcaagggggcgaaatgcccccgctgccgtggacgaaggaagtatatcccctcgaactctgtcagccataaagcgagccttggatgacgacgaggacgtgaaagtgtgtgcgggcgatgatgtgcagacaggcggcccgggggcagaggagatgcgcattaacagcagtactgaaaacagcgatgaaggccttaaggttagggacggtaaagggattcccttcaccgctactctggccagctcatctgtgaatagcgcagaagagcacgtcgcctccaccaacgaaggtcgagagccgacggactcagttcccaaggaacaaatgtctcttgtgcatgttggtactgaagctttccccatcagtgacgagagtatgattaaagaccgcaaagatcgacttccgcttgaatccgctgtcgtgcgccattccgatgccccaggcctgcccaatggtcgcgagctgacgccagcttctccaacttgtacaaactctgtttccaaaaatgaaacacacgctgaagtcctggagcagcagaatgaactttgcccatacgagagtaaattcgactcaagcctgctatcgtccgacgatgagaccaaatgtaaacctaatagcgcaagcgaagtgataggcccagtgtcccttcaagagacgtcgtccatagtctccgtaccttccgaggcagtcgacaatgtggagaacgttgtcagctttaacgcaaaggagcacgagaacttcctggagactatccaggaacagcaaaccacagagtcggctggccaggacctgatctccattcctaaggctgtggaacctatggagatcgacagcgaggaatctgagagcgatgggtcttttatcgaggtgcagagcgtgatcagcgatgaggaactgcaggcagagtttcccgagacgtctaagccacccagtgaacagggagaggaagagctggttgggacacgcgagggagaggcccctgcagagtctgagagtcttctcagagacaattctgagagggatgacgtcgacggcgagccacaggaagccgagaaagatgctgaagatagcttgcatgagtggcaagatattaacttggaagagctcgaaacactcgagtctaatctgctggcccagcagaacagcctcaaagcccagaagcagcagcaggaaagaattgccgcaacggttacagggcagatgttcctggagtcccaggaacttctcaggctttttggtatcccatatattcaggcccccatggaggccgaagcacagtgtgccatcctggacttaactgaccagacgagtggaactatcaccgatgacagcgacatctggttgtttggagcacggcatgtgtatagaaacttcttcaacaaaaacaagttcgtggagtactaccaatatgtggacttccataatcagctgggcctggaccgaaacaagttgataaatctggcctacctcctgggctctgattacaccgaagggatcccaacagtcggttgtgtaacagccatggaaatcctgaacgagtttccggggcatggtctggaacctctgctgaagttcagcgaatggtggcatgaggcccagaagaatcccaagatccggccaaacccccacgacactaaggttaaaaaaaaattgcgaacgcttcaattgacccctggatttcccaatccagcagttgccgaggcctacctgaagcccgtagtggacgattctaaggggagtttcctgtggggcaaaccagacctggacaagattcgagagttttgtcagagatactttggctggaataggaccaaaacagacgagagtctatttcctgtattgaaacagttggatgcacagcagacccaactgagaatcgatagttttttccgactcgcgcagcaagagaaagaggacgctaagaggataaagtctcagaggttgaaccgagctgtgacgtgtatgctgaggaaagagaaggaggctgctgcctcggagatcgaagccgtctctgtggcaatggagaaggaatttgaattgctcgacaaggccaaaggtaagactcagaaaagagggatcaccaacacattggaggaaagttcctctctgaagagaaagcgattatctgacagtaaggggaaaaacacatgcggaggctttctcggagagacatgtctgtcggaatcatccgatgggtcctctagcgaagatgcagaaagctctagcctgatgaacgtacagcgtcggacagctgcaaaagagccaaagacctcagcctcagatagccagaattccgttaaggaagccccagttaaaaatggcggcgccactacatcatccagttctgactcagacgatgatggtggaaaggagaaaatggtcttagtgaccgctcggagcgtcttcggcaaaaagagacggaagttgcgtcgggcacgaggccgaaagcggaagacttag

SEQ ID NO: 24093 - DNA, 4836 bp, synthetic construct
  misc_feature 1..4836: note = Description of Artificial Sequence: Synthetic coding sequence
  source 1..4836: mol_type = other DNA
cagggcgccgtgaagagcttctgcaccagcgccagcggcgcccccctcggcccaaaaggagatggccactatccctggtcctgccccgtaacccacacgcgggagaaaatatatgccatctgcagcgattatgcttttttaaatcaagctacctccatttataaaacccccaacccaagccgctctccttgcttgccagattctacctccctctcagctggaaataactcctcccgctatatcggaatccccacaagcacttctgaaattatttacaacgaagaaaacagcctcgagaacctgtcaaattctctaggcaagctgccgctggcgtgggagatcgataaatccgagttcgatggcgttaccactaacagcaaacacaagtctggcaacgctaagaagcaggtatctaaacgaaagacatcagataaaaaagggagatatcagaaggagtgtccacaacactccccattggaggacatcaaacagcggaaggtactcgacctgcgccggtggtattgcatcagcaggccacagtacaagactagttgcgggatatcctctctgattagctgttggaattttctgtatagtacaatgggagcaggcaacttgcccccaattacacaggaggaggcgctgcatatcctgggctttcagccgccatttgaagacattaggtttggccccttcactggtaacacgacactaatgcgttggtttcggcagatcaatgaccattttcatgtaaagggatgcagttatgttctctacaagcctcacggtaagaacaagactgctggagagactgcctcgggcgccctgtctaagctgacccgcggtctcaaggatgaaagcctcgcctacatctaccattgtcagaaccattatttttgtcctattggattcgaagccacacccgtgaaggcaaacaaagccttttctcgcggccctctcagcccccaggaggtcgaatactggatcttgattggcgaaagctctcgaaagcatcctgccattcactgtaagaaatgggcagacattgtaaccgatcttaatacacagaatcccgaatacctcgacatacgtcacctggaacggggacttcagtaccgcaaaacaaaaaaagtaggcggcaacctgcactgtataatagcatttcagcggctgaattggcagagattcggcttatggaactttccatttggcactatcaggcaggagagccaaccccccacccacgcgcaagggattgcgaagagcgaatcggaggacaacatcagcaagaagcagcatggccggcttggtcggtcttttagcgcttcatttcaccaggactctgcctggaagaaaatgtcaaatatttctatctggctgaatcaagcacttaagggtgtgagagaccgtcatgggaattctattgaaaacccccaccttcttaccctgttccacagactctgtaaactgctgttttttcggatcaggcctatctttgtcttcgacggggacgcccctctgcttaaaaagcagacactggtcaaacgaagacagagaaaagacctggcatcatcagactcaagaaaaaccacagaaaagctgctgaaaacgttcctgaaacggcaggctattaagactgccttcaggtccaaaagagacgaggccctgcccagcctgacacaggtcagacgggagaacgacctgtatgtacttccgccattacaggaggaagaaaaacacagcagcgaagaagaggatgaaaaggagtggcaggaacgaatgaaccagaaacaagccttacaggaagaattcttccataatccgcaggccatcgatatcgagtctgaggacttttcgtccttgcccccagaggtaaaacatgaaattttaacagacatgaaagaattcacaaaaaggagacgcaccctctttgaggcgatgccagaggaatctgacgatttcagccagtatcagctcaaaggtctgctgaaaaagaactacctgaatcaacacatcgagcatgtgcagaaagagatgaatcagcagcatagtggtcatattcggagacagtatgaagacgagggtggtttccttaaagaggtggagagccgacgcgtcgtgagtgaagacacttcgcactatatcctgatcaaggggattcaagcaaaaaccgtggcagaagtcgacagtgagagtctgccctctagcagcaaaatgcatggaatgagctttgatgtaaaaagttctccctgcgaaaagctgaagacagagaaagaacctgatgctacccctccttctcccagaacgctgctggcaatgcaagccgccctgctaggttcaagctcagaggaagaattggagagcgaaaaccgtaggcaggcacgcggcagaaacgctcctgcagctgtggacgaaggttcaatctccccacggaccctcagtgcaatcaagagagcgctcgacgatgatgaggacgtgaaggtgtgcgcgggcgatgacgtccagactggaggacccggcgccgaagaaatgcgtatcaactcctctacagagaattctgacgagggacttaaagtgcgagacggaaagggcattccttttaccgctactctggcaagcagcagtgtgaacagcgccgaagagcacgttgcctctactaatgaggggagggagccaaccgactccgtgcctaaggagcagatgagcctggttcacgttggcaccgaggcctttcccatttctgatgaaagtatgatcaaggatcgcaaggatcgcctgcctctcgaatcagccgtggtgcgccatagcgatgcccccggtctgccgaatggtcgcgagctcactcccgcgtcccccacctgcactaactcagttagcaagaacgagacccatgctgaagttctggaacagcagaatgagctttgtccctatgaatctaagtttgatagtagccttctgtcgtctgatgacgagacaaagtgcaaaccaaatagcgcatcagaggtcatcggccctgtctctctccaggagacttcctcaatcgtctccgtcccttccgaagccgtggacaacgtcgaaaacgttgtctcttttaatgccaaagagcatgagaattttctggaaaccattcaggagcagcagaccactgaaagcgccgggcaggatctgatatctatccccaaggctgtggagccaatggagattgactcagaggaatcagaatctgacgggtcctttatcgaagttcagagcgtcatctctgatgaggagttgcaggccgagtttccagagacctccaagcccccatccgagcagggggaggaggagcttgttgggactagggagggggaggcccccgcagaaagtgagtctctgttgcgggacaactctgagcgagatgatgtagacggggaaccacaggaggccgagaaagatgccgaagacagcttacacgaatggcaggatatcaacctggaggagctggagacactggaaagcaacctgctggctcaacagaactccctaaaagcccaaaaacagcagcaggaacggattgccgctacagtcacaggacagatgtttctggaaagtcaagagctgctgaggctgttcggcataccttacattcaggcgcctatggaggcagaggctcagtgcgctatccttgacctgaccgaccagacctctggcactatcaccgatgactccgatatatggctttttggcgccaggcacgtttatcgcaactttttcaataaaaacaagtttgtagaatattaccagtatgtggattttcacaaccagctcgggctcgatcgaaataagctcatcaacctggcgtatctgctcggaagcgattacacggagggaataccaactgttgggtgtgtaaccgccatggaaatcctgaacgaattccctggccatgggttggaaccattattaaaattctcagaatggtggcacgaggcccagaagaatcccaagatcagacccaaccctcacgacactaaagtgaaaaaaaagctccgaaccctgcagctgacccctggctttcccaatcctgctgtggctgaagcatacctgaagccagtggtggatgacagcaagggttcattcctctgggggaagcccgaccttgacaagatccgcgagttttgccagcgttacttcgggtggaaccgcacgaaaacagacgagtcattgtttccagtgttaaaacaactggacgcccagcagacgcagctccggatagattcgttttttcgactggcgcagcaggaaaaggaagatgccaaacgtatcaagtcccagagactcaaccgggcggtgacctgcatgttgcggaaagaaaaagaggctgcggccagcgagatagaagccgtttccgtggcaatggaaaaagaatttgaactcttggataaagcgaagggcaaaacacagaagaggggtatcaccaacaccctcgaggagtcctcatccctaaagcgaaagcgtctaagcgatagtaaagggaaaaatacgtgcggcggctttctcggtgaaacttgtctgtcagaatcgtctgacggctcatcttccgaagatgcagagtcttcctctcttatgaacgtccagagaagaaccgccgccaaggaacctaagacgagcgccagcgactcccaaaattctgtgaaagaagcaccagtgaaaaatggcggagcaacaacatcctcttcttctgattccgatgacgacggcggcaaggagaaaatggttctcgtgacagcgcgttctgtgttcgggaagaaaagaagaaagctgagacgagctcgcgggcgcaagaggaaaacctag

SEQ ID NO: 24094 - DNA, 699 bp, synthetic construct
  misc_feature 1..699: note = Description of Artificial Sequence: Synthetic coding sequence
  source 1..699: mol_type = other DNA
atgggcgtgcagggcctgtggaagctgctggagtgcagcggccggcaggtgtcgcctgaggccctcgagggcaagattttggctgtcgacataagcatctggctgaaccaggcccttaaaggggtccgggatcgccatggtaactcaatcgagaatccgcatctacttactctcttccaccgtctatgcaaattgctcttcttccgaatcaggcccatattcgtgttcgacggagacgccccactgctgaagaagcagaccctcgtgaaacggcgccagagaaaagatctggcctctagcgattctcgaaagaccacagagaagcttctgaaaacctttctaaagcggcaagctatcaaaactgcctttcgctctaagagagacgaggccctgccatctctcacgcaggttagacgcgaaaatgatctgtatgtgttgccacctctgcaggaggaggagaagcattcttccgaggaagaagacgagaaggagtggcaggaaagaatgaatcagaagcaggctctgcaggaggagttttttcataacccacaggccatcgatattgagtccgaggacttcagttctctgccgccggaggtcaagcacgagatcttaaccgacatgaaggagttcaccaagcgtcgtcggaccctgttcgaggccatgcctgaagtgtacctacccttgcttcagccctag

SEQ ID NO: 24095 - DNA, 4482 bp, synthetic construct
  misc_feature 1..4482: note = Description of Artificial Sequence: Synthetic coding sequence
  source 1..4482: mol_type = other DNA
atgcccaacgagggcatcccccacagcagccagacccaggagcaggactgtctgcagagccagccggtcagcaataacgaggaaatggccataaagcaggaaagtggcggagatggtgaggtggaagaatatctgtcattccgatctgttggggatggactctccacaagtgcagttggatgcgcgtctgcggccccaaggaggggtcctgccctgctccacattgaccgccaccagattcaggctgtcgaaccaagcgcccaggccctggaactccagggactgggtgttgatgtttacgatcaagatgtcctggaacagggcgtcctacagcaggtcgacaacgccatccacgaagcctccagggctagccagcttgttgacgtggagaaggagtaccgcagcgttctggacgacctcactagctgtacaacctccctaaggcagatcaacaagatcatcgaacagctgtctccccaggcagcaaccagccgcgatataaatcgaaaactggattctgtcaaacggcaaaaatacaataaagagcagcaactcaaaaagattaccgccaagcagaaacatctgcaagctatcctaggcggggcggaagtcaaaatcgaactcgaccacgcgtcccttgaagaggatgccgagcctggccccagctccctcgggagcatgctgatgccagtgcaagagacagcctgggaggagctgattcgcactggccagatgacaccattcggcactcagatccctcagaagcaggagaagaagcctcgcaaaatcatgctcaacgaagctagtgggtttgaaaagtacctcgccgaccaggctaagttaagctttgagcggaagaagcagggatgcaataaacgtgcagctagaaaagcccctgcgccagtaacaccacccgcccccgtccaaaacaagaataagccaaataaaaaggcccgcgtgctgtccaagaaggaggagcggctaaaaaagcacatcaagaaactccagaagagggcgttacaattccaaggaaaagtagggctaccaaaggctcgacgcccctgggaatccgacatgaggccagaggccgagggagacagtgagggagaggaaagcgagtacttccccactgaagaggaagaagaagaagaggacgacgaggtagaaggtgcagaggccgatctgtcaggcgacgggaccgactacgagttgaagccattgccgaagggcggcaaacgccagaagaaagtgccagttcaggaaatcgatgatgattttttcccatcctctggggaggaggcagaagcggcttcggtaggggagggtggcggtgggggccgcaaagtggggcgctatagagatgatggcgacgaagactactacaagcagagactccgcaggtggaataaattacggttgcaagataaagagaagcgcctcaagctcgaagacgattccgaagagtctgacgcagagtttgatgaagggtttaaagtcccaggattcctgtttaaaaaactatttaagtatcagcagacaggcgtgcgatggctgtgggaactacactgccagcaagccggtggcatcctcggagatgaaatgggtctaggtaaaaccatccagataatcgcattcctggccggcctctcttattcaaaaattcgcacaaggggttccaactaccggtttgagggactggggcccacggtgatcgtgtgccccaccacagtgatgcaccagtgggtcaaggagttccatacatggtggcccccatttcgcgtagccatactgcatgaaaccggatcctacacacataaaaaggaaaagctgatcagagacgtagcccattgtcacggaattctcattacctcttattcttacatcaggctcatgcaagatgacatctcacgctatgattggcactacgtgattttggacgaaggccacaaaattaggaatcctaacgcagcagtgaccctggcctgcaaacagttccggacgcctcacaggattatactctccgggtctccaatgcagaataatctgcgcgaactctggtcactcttcgatttcatattccctggcaagcttggcacactgccggtgtttatggaacagtttagtgtcccaatcacaatgggcggctatagtaatgcttctcccgtgcaggtgaagacagcatataaatgtgcatgtgtcctgagggacaccattaacccatacctcctgcgccgcatgaaaagcgacgtgaagatgtccctctccctcccggataaaaacgaacaggtgctattttgtcgattgactgatgagcagcacaaggtctatcaaaactttgtggactccaaagaggtgtatagaattctcaacggcgagatgcagatcttttctgggttaatagctctacgcaaaatttgtaaccacccagatctgtttagcggaggtcccaagaacctgaagggcctgcccgatgacgaactggaggaggatcagtttggttactggaaacgcagcggaaagatgatcgtggtggagagtctgcttaaaatttggcacaagcaaggccaacgggtgttgttgttcagtcagtccaggcaaatgctagacatacttgaggtgtttttaagggcccagaaatacacctacctaaagatggacggcactactaccatagcctcccgccagcctcttatcacccggtataacgaagacacctccatcttcgtattcctgcttaccacgagggtgggaggactgggcgtgaatttaacaggtgccaaccgggtcgtgatctatgaccctgactggaatccatccacagatacgcaagcacgagagcgcgcttggagaatcggccagaagaagcaagttacagtatatcgcctcttgaccgccggaaccattgaggagaagatttaccaccgccagatctttaagcagtttctgacgaaccgggtactcaaagatccaaagcagagaaggttttttaagtccaatgacctctacgagctatttacactgacctcccctgacgcttcccagtcgactgaaacttcagccatttttgcagggactggatctgacgtgcagaccccgaaatgccacctcaagaggcgtatacagcctgccttcggtgccgaccacgatgtacccaaaaggaaaaaatttcccgctagcaacatttccgtgaatgacgccacttcctccgaagaaaaatcggaagcgaaaggtgctgaggtgaacgccgtgacgtctaataggagtgacccgctgaaggacgatcctcacatgagctctaatgttacgagtaatgacagactgggtgaagaaacaaatgccgtgtctggtccggaagaactctcagtgatcagcggtaacggcgagtgctcaaactcctccggaacgggtaaaaccagcatgccatcaggtgatgagtctatagatgaaaagctgggcctttcctacaagcgagaaaggccctcacaggcacagactgaagcgttttgggaaaacaagcaaatggaaaacaatttttataagcacaagtccaagaccaagcaccactctgtggcagaggaagaaacgctcgagaaacatttgcgaccaaagcagaagcccaagaattctaagcattgccgggacgccaaattcgagggcacacgcatccctcatctggtgaagaaaaggagatatcaaaagcaggacagcgagaacaagagtgaggccaaagaacagtccaatgatgattatgtgctagagaagcttttcaaaaaatccgtgggagtccacagtgtcatgaaacacgacgccataatggatggagccagtcctgactacgttctcgttgaagctgaagcaaacagagtcgcccaggatgctctgaaggctctccggctgtctagacagaggtgtctgggagctgtgagtggcgtgccaacttggaccggccaccgcggtattagtggcgctcccgcagggaaaaagtcccgatttggaaagaaacgtaacagtaattttagcgtccaacaccccagcagtacaagtccaacggaaaaatgccaggatgggattatgaaaaaggagggaaaggataacgtccctgagcacttctctgggagggccgaagatgctgacagctcttcaggccccctggctagtagcagcctgctggctaagatgagagcccgtaatcacctgattctgcctgagagactggaaagcgagtcaggccatctgcaagaggcatctgctttgctcccaaccactgaacacgacgatctcttggtggaaatgcgaaatttcatagccttccaagctcatacggatggtcaggcttccactcgcgagattttgcaggaatttgagtccaaactttctgcttcccagagttgcgtgttccgagagctgctgcgcaacctgtgtacatttcataggacctccggtggggaggggatttggaagctgaagccagagtactgctag

SEQ ID NO: 24096 - DNA, 2613 bp, synthetic construct
  misc_feature 1..2613: note = Description of Artificial Sequence: Synthetic coding sequence
  source 1..2613: mol_type = other DNA
cagcagcccttccaccggcacctgctgatgaccaccgccctgcactccgagaagctcatacgggacgttgcgcattgccatggaatcctgataaccagctattcttacattcgactcatgcaagatgatatcagcaggtatgattggcattatgtcattctggacgaagggcataagatcaggaaccccaacgccgctgtgacccttgcctgcaaacaattccggacgccgcatcgcattatactctccggctccccaatgcagaataatctcagagaactatggtccctgtttgattttatttttccaggcaagttagggaccttgccggttttcatggaacagttttctgtgccaataacgatgggcggatacagtaatgcgtctcctgtccaggtcaagaccgcctataagtgcgcctgcgtcctccgcgatactatcaacccttacctcctgcgcagaatgaaaagcgatgttaagatgagcttgagcttaccggataaaaatgagcagatcttctctggacttatcgcgctgcgaaaaatctgcaatcatcctgatctgtttagcggaggtccaaaaaacctcaaggggcttccagacgacgaactggaggaggaccagtttggctattggaagcgctccggtaagatgatagttgttgaaagtctcttaaagatttggcacaagcagggccaacgggtattgctgttcagtcagtcaaggcagatgctggacatactggaggtgttcctcagggcccagaaatacacgtacttgaagatggatgggaccaccacaatcgcgtccaggcagcccttaataactcgatacaacgaagatacttcaattttcgtttttctgttaactacccgggttggcggtctgggagtgaacctgactggcgctaaccgcgttgtcatttacgacccggattggaacccgtctactgacacccaggcccgcgagcgagcgtggcgaatcggacaaaaaaagcaggtgacagtgtaccgcctcttgactgcgggaaccatagaagagaagatctaccatcggcagatctttaaacaatttctgacaaaccgagtattaaaggatcctaaacagcgacgatttttcaaatctaacgatctgtacgaactgtttaccctcacctcacccgacgcaagtcagtccactgaaacatctgctattttcgctggaaccggatcagatgttcagacgccgaagtgtcacctgaagcgaaggatccagccagcctttggtgcagaccatgatgtgccaaagcgcaagaagttcccagcatcaaacatatctgtgaacgatgccaccagtagtgaggagaagagtgaggccaaaggtgctgaggtcaatgccgtcacgagtaatagatccgatcccctgaaagacgatccacacatgtcttcgaacgtgacatccaacgaccgactgggcgaagaaaccaatgccgtgtccggacccgaggaactgtcagttatctcaggtaacggggagtgcagcaatagctccggcaccgggaagacgtccatgccctctggggatgaaagcattgatgagaagttaggactgtcctataagcgcgagagacccagccaggcacagaccgaggccttctgggaaaataagcagatggagaacaacttctacaagcacaaatccaagacgaagcatcactcggtggcagaggaggaaacccttgaaaagcaccttagacctaagcagaagcccaagaactccaagcattgccgcgatgctaaattcgaaggcactcgcatccctcacctggtgaagaagcggaggtatcagaagcaggattcggagaataagagcgaggcaaaggagcagagcaacgatgattacgtactcgagaagttgttcaaaaagtccgtaggagttcactccgtgatgaagcacgatgccatcatggatggggcttcaccagactacgtcctggtagaggcagaggcaaatcgagtagctcaggatgcactgaaggcattgcgactgtccaggcagcggtgccttggagcagtcagcggcgtccccacctggacaggccaccgcggcattagcggagctcccgcaggaaagaaaagcagatttgggaaaaagagaaatagcaacttttctgtccaacatccaagctccacttctcctaccgagaaatgccaggacggcattatgaagaaagagggaaaggataatgtgcctgaacactttagtgggagggctgaagatgctgacagtagctctgggcccctggccagtagctccctccttgctaagatgagagccagaaatcatttgatactgccagaacggctcgagtcggaatcgggccatctccaagaggcttcagctctcctgcccacaaccgaacatgacgatttactggtggagatgcgtaactttatcgccttccaagcccacaccgacgggcaggcctctaccagagagattcttcaagagtttgagtccaaactgagtgctagtcagagttgtgtttttcgggagctcctgagaaatttatgcacttttcacagaacatccggaggagaagggatctggaaactgaagcctgagtactgctag

SEQ ID NO: 24097 - DNA, 540 bp, synthetic construct
  misc_feature 1..540: note = Description of Artificial Sequence: Synthetic coding sequence
  source 1..540: mol_type = other DNA
atgcccaacgagggcatcccccacagcagccagacccaggagcaggattgcctacagagccagcctgtgtccaacaacgaggagatggcaattaagcaagaatcgggtggcgacggggaagttgaggagtacttgagctttcgttccgtgggtgacggcctgtccacctccgctgtggggtgcgcgagcgccgcgccgcgcaggggacccgcgttattgcacattgatcggcaccaaatccaagcagtcgagccaagtgctcaggctcttgagctgcagggtctgggtgtcgatgtgtacgaccaggacgtcctggaacaaggggtgctgcagcaggttgacaatgccatacatgaagcgtctcgagcctcacagcttgtggacgtagaaaaggaataccgcagtgtgctcgacgacttgaccagttgcacaacttccttgagacagatcaataaaattatcgagcagttgagccctcaagctgccacctcacgtgatatcaaccgaaaactcgattcggtgaaacggcaaaaatattag

SEQ ID NO: 24098 - DNA, 318 bp, synthetic construct
  misc_feature 1..318: note = Description of Artificial Sequence: Synthetic coding sequence
  source 1..318: mol_type = other DNA
atgagcctgagcctgcccgacaagaacgagcaggtgctgttctgccgtttaacagacgagcaacataaagtctaccagaattttgtggacagcaaggaggtgtaccgtattttaaacggcgagatgcaggaggtcctgcagtccttcacatcaatccacctgcacgaatctcctctaaatttcttcaggagtttccaggtaagagggtcccggtcccattaccccggaaagggcatgcaaactacactaggcatcgttaacttcttggtggtaactcttaaaagaaaaaagcgtaaccgcttctcacctgatctgtag

SEQ ID NO: 24099 - DNA, 2592 bp, synthetic construct
  misc_feature 1..2592: note = Description of Artificial Sequence: Synthetic coding sequence
  source 1..2592: mol_type = other DNA
atgcaggacgacatcagccggtacgactggcactacgtgatcctggatgagggccacaagatccgtaaccccaacgccgccgtgactctggcatgtaaacagttccggacaccacatcgaatcatcttatctgggtctcctatgcagaacaacctaagagagctgtggagcctctttgattttatcttccccggaaagttgggtacactccctgtgtttatggagcagttcagcgtcccaattacgatggggggctattccaacgctagccccgttcaggtcaagacagcctacaaatgcgcttgcgtgctgcgtgacaccattaacccctatctgttgcgacgcatgaaaagtgatgtcaaaatgagcctgagcctgcctgacaaaaacgaacaggtactgttctgtagactgacagatgaacagcataaggtgtaccagaacttcgtggactccaaggaagtctaccgtatactaaatggtgagatgcagatcttcagcggacttatagcgctccgtaagatctgtaaccaccctgacctctttagcgggggccccaaaaacttgaaagggttgccagacgatgaactggaagaggatcagttcggttattggaagcgatctggcaagatgatcgtggtggaatctctgcttaaaatctggcataagcagggccagagggtgcttttgtttagtcagtcccggcagatgctggatattctggaggtcttcctgagagctcagaagtatacctacctgaagatggatgggactacaaccatcgccagtaggcaaccgctaatcacacgctacaacgaagacacctccatctttgtgtttctgttaacaacccgcgtgggaggtttgggtgtgaacctcacaggggcaaatagagtggttatttatgatccagactggaacccttccaccgacactcaggcaagggagcgtgcatggagaattggccagaagaagcaggtgaccgtctacaggcttctgactgctgggaccattgaagagaagatctaccaccggcagatctttaagcaatttctgaccaatagagtgttgaaggacccgaaacagcggcgcttcttcaaatctaacgatctgtacgaactttttaccctaacaagccctgatgcaagccaatccacagaaacgtcagccattttcgccggtacagggtccgatgtgcagactcccaaatgtcatttgaaacgcagaatccagccggcatttggagcggaccatgatgttcctaagaggaaaaagttccctgccagcaatatttcagttaacgatgctacctcatccgaggagaagtctgaggctaagggagcagaggtcaacgctgtaaccagcaatcgttccgaccctctgaaggatgatcctcacatgagcagcaacgtgacctcgaatgataggctcggtgaggagaccaatgctgtgtctggaccagaggagctctccgtcatctccggtaacggagagtgctctaactcttcaggaacagggaagactagcatgcccagtggcgacgagagcattgacgagaaattgggcttgtcctacaaacgagagaggcctagtcaggcccagaccgaggcattttgggaaaataagcagatggagaacaatttttacaagcacaaaagcaaaacaaagcaccacagcgttgctgaggaggagactctggaaaagcacttaaggccaaagcagaagcccaagaacagcaagcattgccgggatgctaaattcgagggtacaaggattccccatctggtcaaaaagagacgttaccagaagcaggatagtgaaaataagagcgaggcgaaggagcaaagtaatgacgattatgtgcttgagaaacttttcaaaaagtcggtgggcgttcactcagtaatgaagcacgatgccatcatggatggggcttcaccggattatgtactagtcgaagctgaggcaaatcgggtggctcaggacgctctcaaggctctgcggctgagtaggcaacgctgccttggagctgtgtccggtgtgcccacatggaccggccacaggggcatctcaggggctccagctgggaaaaagagccggttcggtaagaagcgtaattccaattttagtgtccaacatccctctagtacttcccccacagaaaagtgtcaggacggaatcatgaagaaggaaggaaaggacaatgtacccgagcactttagcggcagagcagaagatgcagatagttccagcggccccttggcatctagttctcttttagctaagatgcgcgccaggaatcatctgatactgcctgagaggcttgagtcagagagtggacatttgcaggaggcgagtgccctcctccccacaactgagcacgacgacctcctggtggaaatgcggaacttcatcgcctttcaggctcacactgacggacaggcctcaactcgtgaaatcctacaggagtttgaatccaagctctccgcctcacagtcatgtgtgtttagggaacttctgaggaacctgtgcacctttcatagaacatccggcggagaaggtatatggaaacttaagcccgagtactgttag

SEQ ID NO: 24100 - DNA, 1191 bp, synthetic construct
  misc_feature 1..1191: note = Description of Artificial Sequence: Synthetic coding sequence
  source 1..1191: mol_type = other DNA
atgctgggcttcctgagcgcccggcagaccggcctggaggaccccctgcgtctgcggcgagcagaaagtacccgcagggttctgggtttggaacttaataaggatagagacgtggagcggatacatgggggcggaatcaacactcttgatatcgagcccgttgaaggaaggtacatgctctccggagggtccgatggagtaatcgtgctctacgatctggagaattctagtagacagtcatattatacatgcaaagccgtgtgtagtattggaagggatcacccagatgtgcatagatattctgttgagaccgtccagtggtacccacatgatactggcatgttcaccagctcctcatttgataaaacactcaaagtttgggacacaaataccctgcagacagccgacgtgttcaacttcgaagaaactgtctatagtcatcatatgagtcctgttagcacaaaacactgcctcgtcgccgtcgggactcggggtccaaaagttcagctctgtgatctcaagtctggttcgtgtagccatattctacagggtcatagacaggaaattctcgctgtgagctggagtccaagatatgattacattttggcaactgcgagcgccgactcccgtgtgaagttgtgggacgtgaggagagcatcagggtgtctaattacactggaccaacacaacggtaaaaagtcccaggctgttgagtcagccaacactgcacacaacggcaaggtcaacggtctgtgctttacaagcgatggactccatcttttgacggtggggacggacaatcgtatgcggctgtggaattcttcgaacggtgagaacaccctggtaaactatggcaaagtatgtaataattctaagaaaggactcaagttcacggtgagttgcggatgtagttctgaattcgtttttgtgccatacggtagcaccatcgccgtgtatacagtttacagtggagaacagatcacgatgctcaagggtcactataagaccgtcgattgttgtgtttttcagtccaactttcaggaactatacagcggcagtagagactgcaacatccttgcctgggtaccgtctttgtatgagcctgttcccgacgatgatgagacaacaactaagtcccaactgaacccagccttcgaagacgcctggtcctcttccgatgaggaaggctag

SEQ ID NO: 24101 - DNA, 1017 bp, synthetic construct
  misc_feature 1..1017: note = Description of Artificial Sequence: Synthetic coding sequence
  source 1..1017: mol_type = other DNA
atgctgagcggcggcagcgacggcgtgatcgtgctgtacgacctggaaaacagctcccgccaatcatactacacctgcaaggctgtctgttcaattgggagggaccacccggacgtccatcggtactctgtcgagactgtgcagtggtacccgcatgataccgggatgttcactagctcctcattcgataagacactaaaggtgtgggataccaacaccctgcagactgccgatgtgtttaacttcgaagagaccgtctacagccatcatatgagcccagttagcacaaaacattgcctcgtcgcagtgggaaccagagggccaaaagtgcaactctgtgatctgaagagtggctcctgctcacacatactgcagggccatcgccaggaaatcctggccgtgagctggagtcccaggtacgactatattcttgctaccgcgagcgctgatagtagggtgaagctgtgggacgtcaggagggcctcaggctgcctgattaccctcgatcagcataatggcaagaaatcccaggcggttgagtccgccaacactgcacataacgggaaggtgaacggactgtgtttcacctccgacggcctgcacctgctaaccgtcggaaccgacaacagaatgcgactgtggaattccagtaatggcgagaacaccctggtaaattacggtaaagtctgtaataacagtaaaaagggccttaagtttacagtgagttgcggatgttctagcgaatttgtgtttgtgccctacgggtccaccatagctgtgtacactgtctacagcggtgaacagatcactatgcttaagggccactacaaaacagtagattgctgtgtgtttcagagcaacttccaagaactctactcaggatcccgcgattgtaatatcctggcctgggttccctccctgtacgagcctgtgcctgacgatgatgagactacgacaaagtcacaactcaatcctgccttcgaggacgcctggtcatctagcgatgaggagggatag

SEQ ID NO: 24102 - DNA, 1188 bp, synthetic construct
  misc_feature 1..1188: note = Description of Artificial Sequence: Synthetic coding sequence
  source 1..1188: mol_type = other DNA
atggccaccagcagcgcccccgccggcgtgcggacccggtacgccggcgtctttgtgaggacaccaaatggcttcggaggccccagttcaccctctgagtctcgggtaaacaccgaaagtttcggaacaggtattaacactctggacatcgagcctgtggagggacggtacatgctaagcgggggttccgatggcgtgatcgtgctctacgacctggagaacagttcacgtcaatcttactacacttgcaaagcggtctgttccataggacgagatcatcctgacgtccatcggtactcagtggagactgtgcagtggtacccacacgacactggcatgtttacgagctcctcatttgacaaaaccctcaaggtatgggataccaacacactgcaaaccgctgatgtgttcaacttcgaagagacagtgtactctcatcatatgagtcctgtttccaccaaacattgtctcgtcgccgtaggaaccagagggccgaaagttcagctgtgtgacttgaaatctggatcctgcagccatatcctgcagggccatagacaggagatcctggcagtcagctggtcaccaagatacgactatatcctggctactgcgtccgcagattcacgggtcaagctgtgggatgttagaagggcctccggatgcctgatcacattggatcaacacaatggaaaaaagtcacaggcagtggaaagcgccaataccgctcataatgggaaggtgaatggcctctgttttactagcgatggactgcaccttttaacagtgggtactgacaatcgcatgagactgtggaattctagcaacggtgaaaacacacttgtcaactacgggaaagtgtgcaacaactcaaagaaaggactgaaatttactgtctcctgtgggtgcagctccgaattcgtcttcgtgccctacggctcgacaattgcagtgtacaccgtgtattcaggtgagcagattactatgctaaaaggacattacaaaaccgtggattgctgcgtgttccaatccaacttccaggagctgtactccggaagccgtgactgtaatatcttagcatgggtcccgtcgttgtacgaacccgtccctgacgatgatgagactaccaccaaatcccagctaaatcccgcatttgaggatgcgtggtcctcatccgacgaagagggttag

SEQ ID NO: 24103 - DNA, 732 bp, synthetic construct
  misc_feature 1..732: note = Description of Artificial Sequence: Synthetic coding sequence
  source 1..732: mol_type = other DNA
atgggctacaagtacatcaccatcggcacccggggccccaaggtgcagctgtgcgatctcaaaagcggaagctgttcccacatattgcaaggccaccgtcaggaaattctggcggtgagttggtcaccgcgttatgactatatcctggcaactgcgagcgcggacagtcgggttaagctatgggacgtgcggcgggcatccggatgcctcatcacccttgatcagcacaacgggaaaaagtcacaagccgtagagagtgccaatacggcccacaacggcaaagttaatgggctgtgtttcacttccgacgggctccatctgttgactgtcggcactgacaacagaatgcgtctatggaactcttccaatggtgagaatacccttgttaactacgggaaagtgtgtaataatagtaagaaaggtttaaagtttacagtaagttgtggctgctccagcgagtttgtgtttgtaccctacggcagtacaatcgccgtgtacaccgtgtatagtggggagcagattacaatgctgaagggacattataagaccgtcgactgttgcgtgttccagtctaattttcaggagctgtactcgggatcacgggattgtaacatccttgcatgggtgccaagcctttacgagcccgttcctgacgatgacgaaaccaccaccaaatctcagctcaacccagcctttgaggatgcctggtcaagtagcgacgaagaaggatag

SEQ ID NO: 24104 - DNA, 2541 bp, synthetic construct
  misc_feature 1..2541: note = Description of Artificial Sequence: Synthetic coding sequence
  source 1..2541: mol_type = other DNA
atgggcatccagggcctgctgcagttcatcaaggaggccagcgagcccatccatgtgagaaagtacaaaggtcaagttgtcgctgtcgatacgtattgttggctgcataaaggagccatagcatgcgcagagaagctagccaaaggagaacctaccgatcggtatgtggggttttgcatgaaattcgtgaatatgctactgtctcacggtattaaacccatacttgtgttcgacggatgtacgttgcccagcaagaaggaagttgagcgttcccgccgagaaaggagacaggccaatctgctgaagggtaagcagctgctgcgggaaggcaaagtcagtgaggctcgggagtgttttaccagaagcatcaacattactcacgctatggcccacaaggtaattaaggcagcccgcagccagggagttgattgcctcgtggccccctacgaggctgatgcccagctcgcatacctgaataaggctggcattgtgcaggctatcatcacagaggattcagacctgctggccttcgggtgtaaaaaagtgatcctaaaaatggaccagttcgggaatgggctggagatcgatcaagcaaggctgggaatgtgccgccagctgggcgatgtattcacagaggagaaatttcggtacatgtgcatcctaagcggctgtgattatctctcatccctcagaggaatcggtctcgccaaggcatgcaaggtgctgcggttagccaataaccctgatattgtaaaggtcatcaaaaagattggtcattacctaaagatgaacatcaccgtgcctgaagattacattaatggcttcattagagcgaacaacacctttctttaccaactggttttcgatccaatcaagcgaaaattaatacccctgaacgcctacgaagatgacgtagatcccgaaaccttgagctacgccgggcagtatgttgacgatagcattgcgttgcagatagctctgggcaacaaagacatcaacaccttcgagcagatcgatgattataacccggatacggcaatgcccgctcactcacggagccacagctgggatgataagacatgtcaaaagtctgcaaatgtcagcagcatctggcaccggaactactcgccacggcccgagagtgggactgtgagcgatgccccacagctgaaggaaaatcctagcaccgtgggtgtggagagggtaattagtaccaaaggtttgaatctccccagaaagtctagcatcgtgaagagacctcgttccgccgagttatccgaggatgatcttttgagccagtatagcctgtctttcaccaagaagactaagaagaactcatccgaggggaacaagagcttaagcttctccgaggttttcgtccccgatctcgtgaatggaccaacaaataaaaagtcggtgtcaacacccccacggacgaggaataaattcgctacctttctccagaggaaaaatgaggagtccggcgccgtggttgtgcctggcactagatcgagatttttctgttcttcagatagcacagactgtgtatcgaataaggttagcattcagccacttgatgagacggctgtcaccgacaaggaaaataacctccatgaaagcgagtacggggatcaagaggggaaacgcttggttgataccgacgttgctagaaattcatccgatgacattcccaacaaccatattcccggggaccacataccagataaagctactgtgttcaccgatgaggagtcatattcctttgagagctcgaaatttacaaggacgatcagccctcctaccttagggactttgaggtcttgcttcagctggagcggtggactgggagatttctctcggacaccatcaccaagtcctagcaccgctctgcaacaatttcggcgaaaatctgacagcccaaccagtcttcccgagaacaacatgtcagatgtttcccagctgaagtccgaagagtcgagcgacgatgaaagccacccactgagagaggaagcatgttcatcgcaaagtcaggaatcaggcgagttctccctgcagagtagcaatgcctctaagctatcccaatgtagttccaaagatagtgactcagaggaatctgactgcaacattaagctgctggacagtcagagtgatcagacatcgaagctgcgcctgtcacatttttccaagaaagatacacccctcaggaataaggtgccaggactgtataagagctcttccgcggactccctgagtacaaccaaaataaagcccctaggaccggctagagccagtggtctgtcgaaaaaacccgccagcattcaaaagcgtaagcaccacaacgccgagaataagcccggactgcagattaaactcaatgaactgtggaaaaattttggatttaagaaagactccgagaaattgccaccttgcaagaaacccctgtcccctgtacgagataacattcagttgactcccgaagcagaggaagacatcttcaataagcccgagtgcggacgcgtgcagcgggctattttccagtag

SEQ ID NO: 24105 - DNA, 510 bp, synthetic construct
  misc_feature 1..510: note = Description of Artificial Sequence: Synthetic coding sequence
  source 1..510: mol_type = other DNA
atgggcatccagggcctgctgcagttcatcaaggaggccagcgagcccattcacgtgagaaaatataagggccaggtagtggcagtagatacttactgctggttacataaaggtgcaatagcctgtgctgaaaagctcgccaaaggtgaaccgacagatagacggcgacaggccaacctcttgaagggcaaacagctgcttagagagggcaaagtgagcgaagcccgcgagtgctttacccgatccatcaacataacccatgccatggcccataaagtcattaaggcagcgcgatcacagggagtcgattgcctcgtggctccctatgaggctgatgcccaactggcctatctcaacaaggctggaatcgtgcaggccattatcaccgaagactcagacctgctagccttcggttgtaaaaaagtgatcctcaagatggaccagttcgggaatggacttgagatagatcaggctaggttaggaatgtgtcgccagcttggggacgtgtag

SEQ ID NO: 24106 - DNA, 2541 bp, synthetic construct
  misc_feature 1..2541: note = Description of Artificial Sequence: Synthetic coding sequence
  source 1..2541: mol_type = other DNA
atgggcatccagggcctgctgcagttcatcaaggaggccagcgagccaatccacgtgcgcaaatacaaaggccaggtggtggcagtggatacctattgctggctgcacaagggggcaatcgcttgtgccgagaagctcgctaagggcgaacccactgaccgatacgtgggattttgcatgaagttcgttaatatgctactctcgcacggcatcaagccaattcttgtgttcgacggatgtactctaccttccaaaaaggaggtggagcggtctcggagggagcgcagacaagccaatttgttaaaggggaagcagctgcttcgtgagggcaaggtgagcgaagcgagggagtgctttacccggagcattaacataacgcacgccatggcacataaggtcattaaagctgctaggtcccagggcgtagactgtttagtcgctccctacgaggcagatgcccaactggcttacctgaacaaggcagggatcgtgcaggcgatcatcacggaggactccgaccttctggcgtttggatgcaaaaaggtaattctgaaaatggaccagtttgggaacggccttgaaatcgaccaggcacgactcgggatgtgccgccagctcggtgacgtgtttacggaggagaaatttaggtatatgtgtattctttccggctgtgactatctgagctccctgcgcgggatcgggctcgcgaaagcctgtaaggtgctgcgattggccaataacccggatattgtaaaggtgatcaagaagataggccattatttgaagatgaacatcacagtgccagaggactacatcaatggttttatccgggctaataataccttcttataccagctggtcttcgacccgatcaagagaaagctcatccccctgaacgcgtatgaggatgatgtggacccagaaaccctgtcctacgcaggacaatacgtcgacgattctatcgccctgcaaatcgcattgggaaataaggacataaacacgttcgagcagattgatgattataatcctgacaccgccatgcccgcacattcaaggagccactcttgggatgacaaaacctgccagaagagtgcgaacgtgagttccatctggcaccggaactacagccctaggccagagtctggcaccgtctcagatgcaccccagcttaaagagaacccttccacggttggcgtagagcgcgttatcagcacaaagggtctcaacctaccccgcaagtctagcattgtcaagcgccctcggagcgccgaattgtctgaagacgatctgctgagccagtatagtctttcttttacgaagaagaccaagaaaaattcttccgaaggcaacaaatcactctccttctccgaagtattcgttcctgacctggttaacggtccaactaacaagaagagtgtgtccacccccccacggactaggaataaattcgccacatttctgcaacggaaaaacgaagagagtggtgccgtagtggtgcctgggacccgatcacggtttttctgttcttctgatagcaccgactgtgtctctaacaaggtttcaattcagcccctggatgagacagccgtgacagacaaggagaataatttacacgaatcagaatacggcgaccaggaggggaagcgactggtagacaccgatgtggcacggaattccagcgacgacataccaaataaccacatcccaggcgaccatatcccggacaaggccacggtgtttaccgatgaggagtcctattctttcgaaagctccaagtttacaagaactatcagccctcctactcttggaacacttcggtcctgcttctcctggtctgggggtcttggagatttcagtaggactccgtcaccttcccctagtacagcactccaacaattccgaagaaagagtgacagccctacctcacttccagagaacaacatgtccgatgtctctcagttaaagagcgaggaatcatccgacgacgagtcccatcccctacgagaggaggcttgctcttcacagtcccaggaatcaggagaattctccttgcagtcatctaacgcatctaaactgtcccagtgtagctctaaggactcggatagtgaggagtcagattgtaacattaagctgttggattcccagtccgatcaaacatctaagctccgactctcccatttttcgaagaaggatacgccactgcgaaataaggtgcctggactttataagagctcctcagcggacagcctgtccactacaaaaattaaacccctcgggccggccagagcttctggactgagcaaaaaaccagcaagtattcagaagcgcaagcaccacaacgcagagaacaagcccggacttcagatcaagctgaatgaactatggaagaactttgggttcaagaaggatagcgagaaacttcccccatgcaagaaacccctgagtcccgtgagagacaacatccagttgacccccgaggcggaggaagatatttttaacaaacccgaatgcggccgggtgcagagagctatcttccagtag

SEQ ID NO: 24107 - DNA, 408 bp, synthetic construct
  misc_feature 1..408: note = Description of Artificial Sequence: Synthetic coding sequence
  source 1..408: mol_type = other DNA
atgggcatccagggcctgctgcagttcatcaaggaggccagcgagcctatccacgtgaggaagtacaaaggacaggtcgttgctgttgacacgtactgctggctgcataagggggcaattgcctgtgcggagaaattggccaaaggcgagccgacagacaggtatgttgggttctgcatgaagtttgtcaacatgctgctttcacatggtattaagcccatcctagtcttcgatggctgcactttgccgagcaaaaaagaggtggagcgttcacgcagggaaagaagacaagcgaacctgttaaaggggaagcagctactcagagaagggaaagtgagtgaggccagagagtgcttcactcgaagcattaatattacgcatgcaatggctcacaaggtgattaagtag

SEQ ID NO: 24108 - DNA, 2412 bp, synthetic construct
  misc_feature 1..2412: note = Description of Artificial Sequence: Synthetic coding sequence
  source 1..2412: mol_type = other DNA
atgggcatccagggcctgctgcagttcatcaaggaggccagcgagccaatccatgttcgcaagtataaggggcaggttgtcgctgtcgatacctactgctggttgcataagggcgcaattgcttgtgctgagaaactcgctaaaggtgaaccaaccgacaggtatgtgggcttctgcatgaaatttgtgaatatgcttctctcacacgggattaagcccatcctggtctttgacggctgcacgctcccttcgaagaaggaggtggagagaagccgcagagaacgacggcaagcaaacctcctgaaaggcaaacagctgctacgcgagggaaaggtcagcgaagcacgcgaatgttttactcgatctataaatataacacacgccatggcacacaaggtgatcaaggccgcccgcagtcaaggcgtcgattgccttgtggcaccctacgaggctgacgcccagctggcctatttgaataaggcagggatcgtccaggcgatcattaccgaagacagtgacctcttggcctttggatgtaagaaggtgatattgaaaatggatcagttcggcaatggacttgagattgatcaggcacgactgggtatgtgtcggcagttgggcgacgtctttacagaggaaaaatttaggtatatgtgcatcctctcaggatgcgattacctgtcctccctccgaggcattggactggctaaagcatgtaaagtgctcagactggcgaataatcccgacattgtcaaagtaattaagaagatagggcactatctaaagatgaatattaccgtgcccgaggattacattaatggcttcatccgcgcgaataatacctttctgtatcagctggtgttcgaccctattaaacgcaaactcattcctttgaacgcatatgaggacgatgttgacccagaaacgctgtcatatgcaggacagtatgtggatgatagtatagcgctccagatcgctctgggcaataaggatatcaacacattcgagcagattgatgactacaatccagatactgccatgcctgcccactccagaagtcattcctgggatgataaaacttgccagaagtcagctaacgtttcctctatttggcaccgaaattacagtcccaggcctgaaagcggcaccgtgtcagacgcccctcaattgaaagaaaatcctagcacggttggggtagagagggtgattagcacgaagggcctgaatttgccaaggaagagctccatcgtcaaacggcccaggagcgccgagcttagtgaagacgatcttctttcacagtactctctgtcttttactaaaaaaactaaaaagaattccagtgaaggaaataagtcccttagtttttcggaagtgttcgttcccgacctggtcaatggaccgacaaataagaaatccgtgtccacgcccccgaggactcggaataaattcgctactttcctccagcgtaagaatgaggagtctggcgccgtcgtcgtccccgggaccagatcacgctttttctgtagctcagactccacggactgtgtatccaataaagtttcgattcagcccctcgacgaaacggcagtcacagataaagagaacaacctgcacgaatcagaatacggagaccaggaaggtaaacggcttgtggatacggacgtagcccggaattcctctgacgacatcccaaataaccatatccccggcgatcacatcccagataaggccacggtgttcacagacgaagagtcctactccttcgagagctcgaagttcactcggaccatctcaccgcccaccctgggtacgctccgctcatgcttctcatggtccggcggtctgggcgacttttccagaacaccctctccatccccttctactgcactccagcagttcaggcggaagtcagacagcccaacaagcttgccagaaaacaacatgtctgacgtgagtcagctcaagagcgaggagtccagcgacgatgagagccatcctttacgagaagaggcatgcagttcccagtcacaggagagcggggagtttagccttcagtcttctaacgccagtaagctcagccagtgttccagcaaggactccgactctgaagagagcgattgtaacattaagttgcttgatagccagtcagatcagacgtctaagcttagactcagccactttagcaagaaagacaccccgctcaggaataaagttccagggctgtacaagagctccagcgcagactctctatctaccaccaagattaagccattaggacccgcccgagccagcggcctgagcaagaaacccgcctccatccagaaacggaagcaccataacgcagagaacaagccaggcctgcagatcaagttaaacgagttgtggaagaactttggttttaagaagttttag

SEQ ID NO: 24109 - DNA, 36 bp, synthetic construct; identical to SEQ ID NO: 10645
  misc_feature 1..36: note = Description of Artificial Sequence: Synthetic coding sequence
  source 1..36: mol_type = other DNA

SEQ ID NO: 24110 - DNA, 2241 bp, synthetic construct
  misc_feature 1..2241: note = Description of Artificial Sequence: Synthetic coding sequence
  source 1..2241: mol_type = other DNA
atgcaggccaagaagcggtacttcatcctgctgagcgccggcagctgcctggccctgttattctactttggaggccttcagttcagagcatcccgctctcattccagacgggaggagcactccgggagaaacggcctgcatcatccttcccccgatcatttctggcccaggtttccggatgcgctgcgaccctttgtgccttgggaccagctggagaatgaggattccagcgtgcacatcagcccacgccaaaagcgagatgccaatagcagtatctacaaagggaagaagtgccgtatggaatcttgctttgatttcaccctgtgtaagaagaacggatttaaggtctatgtttacccccagcagaaaggggagaagatcgccgagagctatcagaacattctcgccgctatagaagggtctcgcttctatacctccgacccgagccaggcctgcttattcgtgctgagccttgacactctggatagagaccagttgtcaccccagtacgtacataacctgcggtccaaagtgcagtccctccatctgtggaataatgggcgcaatcatctaatatttaacttgtacagtggcacttggcccgactatactgaggacgtggggttcgatatcggacaagctatgctcgctaaagcctccatctctacagaaaactttcgccccaattttgacgtgtcaatcccactcttttccaaggaccaccccagaaccgggggcgagaggggcttccttaaattcaatacaattccccccctccggaaatatatgctggtgtttaagggcaaaagatacctgacaggtataggctcggatacaaggaacgcgctgtatcacgtgcacaacggagaagatgtcgtcctgttgaccacttgtaagcacggcaaggactggcaaaagcataaggactcccggtgcgaccgggataacaccgagtacgagaaatatgactatcgcgaaatgcttcacaacgctaccttctgcctggtgccgcggggccgcaggctcgggtcattcaggtttctggaagcactgcaggcggcttgtgtccccgtaatgctctctaatggatgggagctgccttttagtgaggtgataaattggaaccaggctgctgtgatcggagatgaacgtctgctgctacaaattccttccacaattcggtccatccatcaggacaagatattagccctcaggcaacagactcagttcctttgggaagcctattttagctctgttgaaaagattgtcctgactaccctcgagattatccaggaccgaatttttaagcacatctcgagaaattctctcatatggaataaacaccccggcgggctgtttgtgctaccacagtactcctcatatctgggggatttcccctactattacgcaaatcttggcctaaagcctccatcaaagttcaccgcagtgattcatgccgtgactccgctggtgtctcagtcgcagcccgtgttgaagttattggtagcggctgccaagtcccaatactgtgcacagatcatcgtgctgtggaattgcgacaaacccttgcctgccaaacatcggtggccggccacagctgtgccagtagtggtaattgagggagaaagcaaggtgatgtcttcaaggttccttccatacgacaatattataacagacgctgtgctgtctttagacgaagatacagtgctgtctacaaccgaggttgatttcgctttcacagtttggcagagcttcccagagcgtatagtgggttacccagctaggagccatttctgggacaacagcaaggagcggtggggatacacctccaaatggacaaacgattatagcatggttctgacgggagccgctatctatcataagtattaccattatctgtattcccactacctcccagcaagccttaaaaacatggtggatcaacttgccaactgcgaagacatcttgatgaactttctggtctcggctgtcaccaaacttcctcccatcaaagttacacagaagaaacaatacaaagaaacaatgatgggccagaccagtagggccagtagatgggcggacccagaccacttcgcccagcgccagtcttgcatgaatacgtttgcctcctggtttgggtacatgcccctcatccattctcaaatgagattagacccagtattattcaaagatcaagtctctattctgcgcaaaaagtaccgagatattgagcgactgtag

SEQ ID NO: 24111 - DNA, 2157 bp, synthetic construct
  misc_feature 1..2157: note = Description of Artificial Sequence: Synthetic coding sequence
  source 1..2157: mol_type = other DNA
atgtgcgccagcgtgaagtacaacatccggggccccgccctgatcccacggatgaaaaccaaacatcgaatctattatattaccctgttcagcattgttctcctcgggctgatcgcgactggcatgtttcaattttggccccactctatcgaatcttctaacgattggaacgttgagaaacgttcgatccgggacgtgccagtagttcggctccctgctgactcaccaattcctgaaagaggggatctaagttgccgcatgcacacctgtttcgatgtttacaggtgtggtttcaatccgaagaacaagattaaggtctacatttacgccctgaagaagtatgtcgatgacttcggagtaagcgtgtctaataccatcagtcgggaatacaacgagctcctcatggcaattagtgactctgactattacactgatgatataaatagagcttgtttgttcgtgcccagtatcgacgttctaaaccagaacactctgagaatcaaagagaccgcacaagccatggcccagctcagcaggtgggataggggtactaatcatctcctgttcaacatgctccccggaggacctcccgattataacacggcattagatgttccgcgggaccgcgcgttactggctggaggtggattcagtacctggacctacaggcaggggtatgacgtgagtatccctgtgtattcccctctttccgccgaagtggacctgcccgaaaaaggaccagggccccggcagtatttcctcctctcgagccaggtggggttgcatcctgagtacagggaggacctggaagccttgcaggtgaagcacggagagagtgtgcttgtcttggataagtgcacaaacctttccgaaggcgtgctgagtgttcgcaaacgatgccacaagcaccaggtatttgactatccgcaagtgctgcaggaagccacattttgtgtggttttgcggggagcccgattgggccaggccgtcctgagcgatgtgctccaagcaggctgcgttcctgtagtgattgcagactcatacatcctgccattttccgaagtgcttgactggaagagagctagcgtcgtagtgccggaggaaaagatgtccgacgtgtactctatcctgcagtcaatccctcagcgacagatcgaggaaatgcagcggcaagcccggtggttttgggaggcctactttcagagcatcaaggccatcgctctcgccaccctgcagatcattaatgatcggatttatccttatgctgctatttcctacgaagaatggaacgatccacctgctgtcaagtggggttccgtgtccaacccactgttcctgcccctgatccctccacaatcccagggattcaccgccatcgtgttgacgtatgatcgagtggagagcctcttccgcgtgattaccgaggtaagcaaggtgcctagcctgtcaaagctgctagtggtctggaacaatcagaataaaaacccacctgaggacagtctctggcccaagatacgggttcccctgaaggtggtgagaaccgccgagaacaaactttccaaccggttctttccctacgatgagatagagaccgaggccgtgctggcaatcgacgacgatatcatcatgctgacatcagacgagctgcagtttggttatgaagtctggagagagtttccagacaggcttgtgggctatcccggtaggctccacctgtgggatcacgaaatgaacaaatggaaatatgaaagtgaatggaccaatgaggtgtccatggtgctcacgggggccgccttttaccataagtatttcaattatctgtacacatacaagatgccaggcgacatcaaaaattgggttgacgcgcacatgaactgcgaggatatcgccatgaactttctggtagctaatgtgaccggaaaagctgtgatcaaggtcacgccaaggaagaagttcaagtgccccgaatgcacagcaattgacggactatctctcgaccagactcatatggtggaacgcagcgagtgcatcaataaattcgcgtccgtcttcggcacaatgccactaaaggtggtggaacatcgggcggacccagtgctgtacaaagatgacttccccgagaagctgaaatcctttcccaacattggcagcctgtag

SEQ ID NO: 24112 - DNA, 2187 bp, synthetic construct
  misc_feature 1..2187: note = Description of Artificial Sequence: Synthetic coding sequence
  source 1..2187: mol_type = other DNA
atgtgcgccagcgtgaagtacaacatccggggccccgccctgatcccaaggatgaaaacaaagcacaggatttactatattacactatttagcatcgtgttgcttggcctgatagctaccggaatgttccaattctggccacactctatcgaatccagcaacgattggaatgtggaaaagcggtctatcagggacgtgcctgttgtccgcttgcccgcagactccccgatcccagaaagaggggacctgagctgcagaatgcacacctgctttgatgtgtatcggtgcggattcaaccctaaaaacaagatcaaggtgtacatctacgcccttaagaagtacgtggacgacttcggcgtatcggtgtccaacaccatttcacgagagtacaacgagttgttgatggccatttctgatagcgattactacaccgatgacatcaaccgggcttgcttgtttgtgccttcgatcgacgtgctcaaccagaatacattgaggattaaagagacggctcaggccatggcccagctatctagatgggaccgggggacaaaccaccttctgtttaacatgctgccaggggggccccccgattataacacagcgttggatgtgccaagggaccgggctctcttagccggggggggattcagcacctggacgtaccgacagggatacgatgtatctatacccgtgtactctcctctgagcgctgaggtcgacctgcctgagaagggccctgggcctcgacagtattttctcctatcttcccaggtcggccttcatccagagtaccgtgaggatctcgaagccctgcaagtgaagcacggcgagagcgttctcgtgctggataaatgcacaaatctatccgagggagttttaagcgtgcgtaagcgctgccacaagcaccaggttttcgactatccccaagtgcttcaagaggccactttctgtgttgtcctgagaggtgcgagactgggacaagcagtcctgtcggatgtgttacaggccggctgtgttccagtggttatcgcagattcctacattctcccattctcagaagtattggattggaagagggcaagcgttgtggtgccggaggagaaaatgtcagacgtctattcgatcttgcagtcaatcccccaacggcaaatcgaagagatgcagcgacagctgtttatggaacctgcacgacgggagaactggtccgccgcaaatcaccagatgaatagtctcatctggccacgggagcagtgggatagtcagattatcaacgatcgtatatacccgtatgccgccataagctatgaagagtggaacgacccccccgccgtgaagtggggctcagtcagcaatcccctctttcttccactgatacctccacaatcgcagggcttcactgctatcgtcctaacatacgaccgagtagagtctttgttccgggtgatcaccgaggtgagtaaagtacccagcctgtctaaactgctggttgtgtggaacaaccagaacaagaacccaccggaagactcgctgtggcctaagataagagtgcctctcaaggtggtgcgcaccgctgaaaacaaactcagtaaccgtttcttcccttatgatgaaattgagactgaagcagtcctggcaattgatgatgacatcattatgctgacatccgacgaacttcagttcggttacgaagtgtggagagagtttccagatcggctcgtgggctaccccgggagactccatctgtgggaccatgaaatgaacaaatggaagtacgagagtgagtggacaaacgaagtctctatggtgctaacaggagctgccttttatcacaagtatttcaactacttgtatacatataagatgccgggtgatataaagaattgggtcgatgcccacatgaattgcgaagacatcgctatgaatttcttggtggctaacgtcaccggcaaggcagtcataaaggtcacgcctaggaagaagtttaagtgcccagagtgcaccgcaatagacggcttgtcactggaccaaacccatatggttgagcgttccgaatgcatcaataagtttgcctcagtcttcgggactatgcccctcaaagttgtggagcaccgcgctgatccagtcctgtataaagatgattttcctgaaaaactgaaatcgttcccgaacatcggctccctttag

SEQ ID NO: 24113 - DNA, 2256 bp, synthetic construct
  misc_feature 1..2256: note = Description of Artificial Sequence: Synthetic coding sequence
  source 1..2256: mol_type = other DNA
atgagctgcgccagcggcagcggcggcggcctgcggcaccccctgagatgtcagaaaccatgggatgaagaatgtgaagaagaggctgtttgcgtcatcatgtgcgcgtcggttaagtataatatccgtggtccggctctgatcccacggatgaagacaaagcaccgcatctattatattacactgtttagcattgtgcttctgggattgattgccacaggaatgttccagttttggcctcactctattgagtctagcaacgactggaacgtcgagaagcggtccatccgggatgtgccagtggttcgcctgccagccgactccccgatacctgagcgtggggacctgtcctgccggatgcatacatgcttcgacgtttatcgctgtggcttcaatcctaaaaacaaaattaaggtgtatatttatgctctcaagaagtacgttgacgactttggtgttagcgtgtcaaacacgattagtagagaatacaatgaactgctcatggcgatctccgatagcgactactacaccgacgacatcaaccgcgcatgtctatttgtgcctagcatcgatgtcttaaatcaaaacacgctgaggatcaaagagaccgcacaggctatggcccagctgtctagatgggatagaggcacgaaccatctgctcttcaacatgctccccggaggcccccctgattacaacactgcactggatgttccccgcgatcgggctctcttggcaggcggaggcttttccacctggacatatcgccagggctatgacgtctctattccagtgtattctcccctctctgccgaagttgacttacctgagaaggggcccggacccagacagtacttcctgcttagtagccaggtggggctccatcctgaataccgggaagacctggaagccctacaggttaagcacggggagtcggttttagtcctggacaaatgtactaatctttcggagggggtgctcagcgtccggaagcggtgtcataagcaccaggtttttgactatcctcaagtgttacaggaggccactttctgcgtggtcctccgaggggctaggctggggcaagctgtgctgtctgacgtgctacaggctgggtgcgttcccgttgtgatcgcagactcttatatcttaccgtttagtgaagtgctggattggaaacgtgcctcggtcgtagtgccagaggagaagatgagcgatgtttactccatcctgcaatcaatcccccaacggcagatagaagaaatgcaaagacaggctaggtggttctgggaggcctacttccagagcatcaaggccatagcgctggccaccctccagatcattaacgatcggatctacccctacgctgccattagctatgaggagtggaacgacccaccagccgtgaaatggggttctgtcagtaatcctctttttcttccactcatcccacctcaatctcagggctttacagctatcgtcctgacatacgatagggtcgagtctctgttcagggtcataacagaagtatcaaaagtgccctcactttctaagcttctggtagtttggaataaccagaacaaaaacccccccgaggatagtctgtggccgaaaattcgggtgcctcttaaagtagtacgaaccgcagagaataagctttctaaccgcttcttcccatacgatgagattgagaccgaggccgttttagctattgacgatgatattatcatgcttacctccgacgagttgcagttcgggtacgaagtgtggcgcgagttccccgataggctggtgggatacccgggccggttgcacctgtgggaccacgaaatgaataagtggaaatacgagtctgagtggacaaacgaagttagtatggtacttaccggagcagcgttttatcacaagtatttcaattatctgtacacctacaaaatgccaggagatattaagaattgggtcgatgcgcatatgaattgtgaggacatagccatgaactttctagtcgctaacgttaccggaaaagctgtgattaaagtgacaccacgcaaaaagttcaaatgtcctgaatgtacagccatagatggtctgtcattggaccagacacacatggtggagcgatcagagtgtatcaacaaatttgcatccgtgtttggcaccatgccactcaaagtggtggaacatcgcgctgacccggtcctgtacaaggatgactttcccgagaaactcaaaagcttccctaacatcgggagcctttag

SEQ ID NO: 24114 - DNA, 339 bp, synthetic construct
  misc_feature 1..339: note = Description of Artificial Sequence: Synthetic coding sequence
  source 1..339: mol_type = other DNA
atgtgcgccagcgtgaagtacaacatccggggccccgccctgatcccccgaatgaagactaagcatcggatttattacattactctcttctcgattgtactgctgggattaatcgcaaccggtatgttccagttctggccacacagcatcgagagttccaatgactggaacgtggaaaagcgctctatccgggacgtccctgtcgtgaggctgcccgccgacagccccatcccagagcggggcgatctgtcttgccgtatgcatacatgttttgacgtctacagatgcgggttcaaccctaagaataaaattaaggtgtatatctacgcattaaagtag

SEQ ID NO: 24115 - DNA, 150 bp, synthetic construct
  misc_feature 1..150: note = Description of Artificial Sequence: Synthetic coding sequence
  source 1..150: mol_type = other DNA
atgtgcgccagcgtgaagtacaacatccggggccccgccctgatccctagaatgaagacaaaacacagaatctattacatcacattgttctctattgtgctcctaggtctgatcgctactggcatgttccagttttggccacactcttag

SEQ ID NO: 24116 - DNA, 2157 bp, synthetic construct
  misc_feature 1..2157: note = Description of Artificial Sequence: Synthetic coding sequence
  source 1..2157: mol_type = other DNA
atgtgcgccagcgtgaagtacaacatccggggccccgccctgatcccgaggatgaaaactaaacataggatctattacattacgttattctcgattgtgctgctgggcctgatcgcgactggtatgttccaattttggcctcactccattgagtctagtaatgattggaacgtcgagaaacgatccattcgggatgtgcccgtggtacgactgcccgcggatagccccatcccagaaagaggggacctctcttgtagaatgcatacctgctttgatgtataccggtgtggcttcaaccctaagaacaagattaaagtctacatctatgcactgaagaaatatgtcgatgattttggggttagcgtatcaaacactattagccgagaatataatgagctgctgatggctatctcagattcagattactataccgacgacattaatagggcctgccttttcgtcccctctatcgatgtgcttaatcaaaacactctgagaatcaaagaaacggctcaggcaatggcccagttaagtcggtgggatagaggaactaaccacttgctgtttaacatgcttccagggggaccaccggattacaacaccgcactggacgtaccaagggaccgtgccctgctggcggggggtggctttagtacttggacttacaggcagggctacgacgtgtccatacccgtttactctccattgtccgccgaagttgatctgccagaaaaggggccaggtccacgacagtatttcctgttgagcagccaggtgggcctccatcccgagtatcgtgaggatcttgaagctctgcaagttaaacacggtgaatccgtcctggtcctggacaagtgtacaaatctgtccgaaggagtgttgagcgtcagaaagaggtgtcataagcaccaggtgttcgactacccccaagtcctgcaagaggccacattctgcgtcgtcctcaggggggcccggctcgggcaggcagtgctgagcgacgtgctccaggcggggtgtgtgccagtagtgatcgcagacagctacattctcccgttctccgaggtgctggattggaaacgagcctcagtcgtggtccccgaggaaaaaatgagcgacgtgtattctatactgcagtccatcccgcaaaggcagattgaggagatgcaacgccaagccagatggttttgggaggcctacttccagtccatcaaggccatcgcactagcaaccctccagatcatcaatgaccgcatctatccgtacgccgctatctcctacgaggaatggaatgatcctccggctgtgaagtggggttcggtgagtaatccattgttcctgcccctcattccaccacagtcccagggatttactgccatagttctgacttacgacagggtggaatctctctttcgggtgataacagaagtgtccaaagtcccaagtctgagcaagctgctcgtcgtgtggaataatcagaacaaaaatccccctgaggatagcctctggcccaaaattagggtgcccctaaaggtagtacgcactgcagaaaataagctgtctaacaggttctttccctatgatgaaatagagacagaggcagtgctggctatcgacgacgacattatcatgctgacaagcgatgaactgcagttcggctacgaagtgtggcgggaattccctgaccgcctggtgggatatcctggcagactccacctgtgggatcacgagatgaacaagtggaaatacgagtccgagtggaccaacgaagttagtatggtgctaaccggcgctgctttctaccacaaatacttcaactacctctacacttataagatgccaggtgatatcaaaaactgggttgacgcgcatatgaactgcgaggacattgccatgaattttttggtagcgaatgtcacaggtaaggctgtgatcaaggttaccccccgcaaaaagtttaagtgtcccgagtgcacggccatcgacgggctatccttggaccaaactcatatggtagagaggtctgaatgcatcaataaatttgcatcagtgttcggaaccatgcccctgaaagtggtggaacatcgcgccgacccagttctttataaagatgacttccctgagaagctgaaaagtttccccaacatcgggtctttgtag

SEQ ID NO: 24117 - DNA, 1761 bp, synthetic construct
  misc_feature 1..1761: note = Description of Artificial Sequence: Synthetic coding sequence
  source 1..1761: mol_type = other DNA
atgcccaagcccatcaacgtgcgggtgaccaccatggacgccgagctggagtttgctatccagccgaataccacgggaaaacaactgtttgatcaagtggtcaagaccatcggattgcgggaagtgtggtactttggtcttcattacgtggacaacaagggctttcctacctggctcaagctcgacaagaaagtctctgcgcaagaggtgagaaaggagaaccccctgcagttcaaattcagggctaagttttaccctgaggatgtggccgaagagcttatccaggatataacacagaaactgttctttcttcaggtcaaggaaggaatcttgtcagacgagatttactgtccacctgagactgccgtgcttttggggtcctacgctgtccaggcaaaatttggagattataacaaagaggtccacaaatccggatacctgtccagcgagagactgattccacagagggttatggaccagcataagttaactagggatcagtgggaggatcgaatccaggtgtggcacgccgagcacagagggatgctgaaagacaacgccatgctagagtatctaaagattgcccaggatcttgaaatgtatggtataaattacttcgagatcaagaataagaaaggcacggacttgtggttaggtgtagatgctttaggactgaacatctatgagaaagacgacaaattgacacccaagatagggttcccttggtcggaaatccgaaatatcagcttcaacgacaaaaaattcgttatcaaaccgatcgacaaaaaagctcctgacttcgtcttctatgctcctaggctgagaataaataaaagaatacttcagctgtgtatggggaaccacgaactttacatgcgtagacggaagcctgatacaatcgaagtccaacaaatgaaggcccaagctagggaagagaagcaccaaaaacagttagagcggcagcagctggaaactgaaaaaaagagaagggaaactgtcgagcgcgagaaagaacagatgatgagagagaaggaggaactcatgctccggctgcaggactacgaggagaaaactaaaaaagcagagagggaactgtctgagcagatacagcgcgcacttcaactcgaggaggagagaaaacgcgctcaggaagaggcagaacggctggaagctgataggatggccgctttaagagccaaggaggagctcgaacgccaggcagtggatcaaatcaaatctcaggagcagctggccgccgagttagctgaatatactgccaagatcgcattgcttgaagaggcacgtcggaggaaagaggatgaggtagaagaatggcagcaccgcgctaaagaggcccaggacgacctagttaaaactaaggaggagctgcacctggttatgaccgctccacctccacctccacctccggtctatgagccagtctcatatcacgtgcaggagtctctgcaggatgaaggagcagagcccaccgggtactcagccgagctgtctagcgaaggcatcagagatgataggaacgaagaaaagagaattacagaggcagagaagaacgagcgcgtccagcgacagctgctaacactgtcatcggagctctctcaggcacgggacgaaaacaagcgcacccacaacgatatcatacataatgagaacatgcgccagggccgggacaagtacaaaaccctgagacagattagacaggggaataccaaacagcgaatagacgaatttgaagccctgtag

SEQ ID NO: 24118 - DNA, 1761 bp, synthetic construct
  misc_feature 1..1761: note = Description of Artificial Sequence: Synthetic coding sequence
  source 1..1761: mol_type = other DNA
atgcccaagcccatcaacgtgcgggtgaccaccatggacgccgagcttgagttcgcgatccaaccaaacacaacagggaagcaactattcgaccaggtagtgaaaaccatcggtttgagagaggtctggtacttcgggctacactacgtcgacaacaaaggtttcccgacctggttgaagttagacaagaaggtgtccgcgcaagaggttcgaaaagagaatcctctccagtttaaattccgcgctaagttctaccccgaggatgtggctgaggaattgatacaggacataactcagaagctcttcttcttacaggtgaaggagggcattctgtccgacgagatatactgcccgccagagacggccgtcctgctggggagctacgcggtgcaggccaaatttggcgattacaataaggaggttcataaaagcggctacctctcttcagaacgtcttatcccgcagagagtgatggaccagcacaagctcaccagagaccagtgggaggaccgcatacaggtatggcacgccgagcacagaggtatgctgaaggataacgccatgcttgaatatctcaagatagcccaggaccttgagatgtacggcatcaactactttgagatcaagaataagaagggtactgatttgtggctgggcgtcgatgcactgggtcttaacatctatgagaaggatgacaagctgactccgaaaatcgggttcccatggagcgagatcaggaatataagcttcaatgataaaaaatttgtcatcaagcccatagacaagaaagctccagattttgtcttttatgctccacgcctgcggatcaacaagaggatacttcagctgtgcatgggcaaccatgaactttatatgcgccggcgcaagcctgacaccatcgaggtgcagcagatgaaagctcaggctagagaagagaaacaccagaaacagctggaaagacagcagctggagactgaaaaaaagaggagggaaacagtcgagcgcgagaaagagcagatgatgagggagaaggaagagttgatgcttagactccaggactacgaagaaaagactaagaaggcggagagagagttgtccgagcaaatccagagagccctacagctggaagaagaacgcaaaagggcccaagaggaagcggaacgacttgaggcggatcgcatggccgcactccgcgccaaggaggaactggaacggcaggcagtggatcagataaagagccaggaacagttggccgctgaactggctgagtacacagccaagatagccctgttagaagaggcacggaggagaaaggaggacgaggttgaggaatggcagcatcgggcaaaggaggctcaagacgatctggtgaaaaccaaagaagagttgcacttggtgatgacagctccaccaccgccccccccacccgtctacgagcccgtcagttatcatgtgcaggaatctttgcaggacgagggtgcagaacccactggctactctgccgaactgtctagtgagggcattcgagatgacaggaatgaggaaaagcgaatcaccgaggccgaaaagaacgagcgggtgcagagacaactgttgaccttgtccagcgagctgtcccaagctcgtgatgagaataaacggacccacaatgacataattcacaatgagaacatgagacagggcagggataaatataaaacactgcgacagatccggcagggcaataccaaacagcggatcgacgagtttgaggctctatag

SEQ ID NO: 24119 - DNA, 1665 bp, synthetic construct
  misc_feature 1..1665: note = Description of Artificial Sequence: Synthetic coding sequence
  source 1..1665: mol_type = other DNA
atgcccaagcccatcaacgtgcgggtgaccaccatggacgccgagctggagtttgcaatccagccaaacacaaccgggaaacagctctttgatcaggtcagcgcacaggaagtgcgaaaggagaatcctctgcagttcaagtttcgggcgaagttttatccagaggatgtggccgaggaactgattcaggacatcacccagaagctcttcttcttgcaggtcaaggagggcattctatcagatgaaatctattgtcccccggagacggccgtcctgctggggtcttatgcagtacaggctaaattcggcgattataataaggaagtgcacaaatccggataccttagcagcgaacggctcatacctcagcgcgttatggatcaacacaaactgacccgggaccaatgggaggaccggattcaggtttggcacgccgaacaccgaggcatgctgaaggataacgccatgctggaatacctgaagatcgctcaagatctcgaaatgtatggaatcaactactttgagattaaaaataaaaaaggaaccgatctgtggttgggcgtcgacgccctgggcctgaatatttacgaaaaggacgataagctgacgcctaaaattggcttcccctggtccgaaattcgcaatattagtttcaacgacaaaaagttcgtgatcaaacctatcgataagaaggcacccgactttgttttttacgcacccaggttacgcattaacaagagaatactgcagctgtgtatggggaatcacgagctgtatatgcggcgccgaaagccagatacaatcgaagtgcaacagatgaaggctcaggcacgcgaggagaaacaccaaaaacagctggaacgtcagcagctggagacggaaaagaagcggcgtgagaccgtggaaagagaaaaggaacagatgatgcgggaaaaagaggagctaatgctacgcctgcaggattacgaagagaagactaagaaggcagagagggaacttagcgaacagattcagcgcgctcttcagcttgaagaagaacgaaaaagggctcaagaggaggcagagaggttggaagcagacagaatggcagctttaagggcaaaagaggagctcgagcgtcaagccgtggatcaaatcaaaagccaggagcagctggccgccgagttagcagagtatacggctaagatcgcactcctggaagaagcaagacggcgtaaagaggatgaagtggaagagtggcagcaccgggccaaggaggcccaggatgacctggtaaagactaaggaagagctgcatcttgtcatgaccgcgccacccccccccccaccaccagtgtacgaaccagtgagttaccacgttcaagagtctctgcaggacgagggtgccgaacccaccggctacagtgccgaactgagctctgagggaatccgggatgatcgcaacgaggagaagcgaatcaccgaggcagaaaaaaacgagcgcgtccagaggcagctcttgactctgtcttctgaactgtcacaagcgcgcgacgagaataaacgcacacacaatgacatcatacataacgagaacatgcgccaagggcgcgataaatataagacactcaggcaaattcggcagggtaatacgaaacagcggattgatgaattcgaggctctgtag

SEQ ID NO: 24120 - DNA, 900 bp, synthetic construct
  misc_feature 1..900: note = Description of Artificial Sequence: Synthetic coding sequence
  source 1..900: mol_type = other DNA
atgggcaccaaggcccaggtggagcggaagctgctgtgcctgttcatcctcgctatccttctctgcagtttagccctggggtccgtcaccgtgcattcgtccgaacctgaggtgaggattcctgaaaacaatcccgtgaagctaagctgtgcctattctgggttcagctcccccagagtcgaatggaaattcgatcaaggggatacaacccgcctggtttgctacaacaataaaattacagcttcatacgaggaccgggtcaccttcctgcccaccggcattacattcaagagtgtcactcgagaggatacaggcacttacacttgcatggtctctgaggagggggggaacagttatggggaggtcaaagtgaaactcattgtcctagtgccaccaagtaaacccacagtgaacatcccttcatccgcaacaatcggaaaccgggccgttctgacctgttcagagcaggatggatcccctccatcagagtacacctggttcaaagatggtatagtgatgcctacaaaccctaaatccaccagagctttttcaaactcctcttacgtgctcaaccccaccaccggcgaattggtcttcgaccctctgagcgcgtcggacaccggagagtattcctgcgaagcccggaatggatatggcacaccaatgacaagcaacgcggtgagaatggaggccgtggagcgaaatgtcggtgtgatagtggcagcggttttggtgacccttatcctgctcggcatcctggtctttggcatttggtttgcttactctaggggccactttgaccggactaagaagggcacatcatcaaagaaagttatctacagccagcccagtgcacggagtgagggcgagttcaaacagacctcctccttcctcgtctag

SEQ ID NO: 24121 - DNA, 900 bp, synthetic construct
  misc_feature 1..900: note = Description of Artificial Sequence: Synthetic coding sequence
  source 1..900: mol_type = other DNA
atgggcaccaaggcccaggtggagcggaagctgctgtgcctgttcattctggccatactgttatgcagccttgccttaggttcagtgacagtgcacagctccgaacctgaggtgcgtatcccagaaaacaatcctgtgaaactgtcttgtgcctacagcggattctcatctcctcgagttgaatggaaattcgatcagggcgacaccactcggttggtttgctataataacaaaataaccgcttcctacgaggatcgagtcacatttttgcccacaggcatcactttcaaaagcgtgacccgagaggataccgggacatacacctgcatggtttcagaagaaggtggtaatagctatggagaggtgaaggtgaagctaattgttctcgtacccccatctaaacctactgtgaacatcccctcaagcgctaccataggaaatcgggctgtactcacttgcagcgagcaggatggttccccccctagcgaatacacctggtttaaggacggcatcgtgatgcccactaacccaaaatctacacgtgctttctcaaattcatcttacgtgctgaaccctacgaccggggagcttgtatttgacccgctgagcgcctcagatacgggggagtattcttgtgaggcaagaaatggctacggaactccaatgacttctaacgccgtgagaatggaagcggttgagcgcaacgtcggcgtgatagtagccgctgtgttagttacactgatccttctgggcattctggtctttgggatttggttcgcatatagcagaggccacttcgaccggaccaaaaaggggactagtagcaagaaagtcatatactctcagccttcggcgaggtcagaaggggaattcaagcagacatctagctttttagtttag

SEQ ID NO: 24122 - DNA, 900 bp, synthetic construct
  misc_feature 1..900: note = Description of Artificial Sequence: Synthetic coding sequence
  source 1..900: mol_type = other DNA
atgggcaccaaggcccaggtggagcggaagctgctgtgcctgttcattcttgctatactattgtgtagcctcgccctcggcagtgttacagtacactcaagcgagcccgaagttcgcattccagagaacaacccagtaaagctatcatgtgcttatagtgggttttcgtctccccgtgtagagtggaagtttgatcaaggtgacactactcggctggtgtgttacaataacaagattaccgcctcttacgaagatcgtgtgacgttccttcctacaggtattacattcaagagcgttacaagagaagacactggaacttacacctgcatggtctctgaagaaggcggcaattcatacggtgaagtgaaggtcaagctcattgtgttggtgccaccctcaaaaccgacagtgaatatcccttcctccgcgacaattggcaatcgggctgttctcacgtgttcagaacaagacgggtcccctccatccgaatacacttggttcaaggatggcatcgtgatgcctacaaaccctaagagtacacgcgcattctctaactcaagttacgtgcttaaccccactactggggagctggtgtttgatcctcttagcgcctcagatactggggagtattcgtgcgaggcaaggaacggctacggaacaccgatgacctccaatgcggttcgcatggaggccgtagaacgcaacgttggggttatagtcgccgccgttcttgttacacttatcctgttaggcattcttgtgtttggcatctggttcgcatatagcagaggtcattttgataggaccaagaaaggcacctcctccaagaaagttatctacagccagccatccgctaggagtgaaggcgaattcaagcagacaagctctttcctggtttag

SEQ ID NO: 24123 - DNA, 912 bp, synthetic construct
  misc_feature 1..912: note = Description of Artificial Sequence: Synthetic coding sequence
  source 1..912: mol_type = other DNA
atgctgcaggccccccggggccgggcccgggccgccctgcggcggctcgccgtggccacgagaactatggcagggggcagcttggccctgggaagcgtaacagtgcactcaagcgaaccagaggtgcgaatccctgagaacaacccagtgaagctgtcctgtgcttattccggctttagctctcctagagttgagtggaaattcgatcagggggacacaacacgacttgtgtgttacaacaacaaaataacagccagctatgaagaccgggttacattcctgccgacaggaataactttcaagtcagtgactcgagaagacactggcacctacacatgtatggtgagtgaagaggggggcaactcttacggcgaggtcaaagtaaaactcattgtgttagttccaccaagcaagcctacagtgaacatcccatcaagcgctaccattggtaaccgggctgttcttacttgcagcgagcaagacggatctccacctagcgagtacacatggttcaaggacggtatagtgatgcctactaaccctaagagtaccagagcattctctaactccagttacgtgctgaaccctacgaccggcgagcttgtgtttgaccccctctccgcaagtgacaccggcgagtattcgtgcgaggctcgaaacgggtatggcacccccatgaccagcaatgccgtgcgcatggaagccgtggaaaggaatgtgggcgtgatcgtggccgctgtcctggttaccttgatcctgctgggcatcctcgttttcggtatctggtttgcctattcccggggacactttgatcggacaaagaagggcacatccagcaagaaggtgatatattcccaaccgagcgctaggtccgagggggaatttaaacagacgtcttcgtttctcgtctag

SEQ ID NO: 24124 - DNA, 753 bp, synthetic construct
  misc_feature 1..753: note = Description of Artificial Sequence: Synthetic coding sequence
  source 1..753: mol_type = other DNA
atgggcaccaaggcccaggtggagcggaagctgctgtgcctgttcatcctggcgattctgctgtgcagcctggccctgggcagtgtgacggtgcactcttccgagccggaggtgaggatcccagagaataaccctgttaagttgtcatgtgcttattccggcttctcaagcccccgcgtggagtggaagtttgaccagggcgacaccacacgattggtgtgctacaataacaagattactgtacctccaagcaagccaaccgtgaatataccctccagcgcgaccatcgggaaccgcgcagtcctgacctgtagtgagcaggacggatccccccccagcgagtacacatggtttaaagatggcatagtaatgccgaccaatccaaagtccacccgggctttttccaatagctcttatgtgctgaatcccacaacgggagagcttgtttttgaccctctcagcgcctctgataccggtgagtatagttgtgaagctcgtaatgggtacggcacacccatgacttcaaacgctgtgcggatggaggctgtagagagaaatgtcggcgtgatcgtggctgccgtcctagtgaccctcatactgctgggaattcttgtatttggcatctggttcgcatacagcaggggacacttcgataggacaaagaaaggcacgtcctccaaaaaggtgatctactcacagcctagcgctcggagtgaaggtgagttcaaacaaacgagctcatttcttgtctag

SEQ ID NO: 24125 - DNA, 3357 bp, synthetic construct
  misc_feature 1..3357: note = Description of Artificial Sequence: Synthetic coding sequence
  source 1..3357: mol_type = other DNA
atgggcgtgcagggcttccaggactacatcgagaagcactgcccctcggcggtggttccggtggaactgcagaaactggctagaggaagcttggtgggcggtggcaggcagcggcccccacagaccccccttcggcttttggtagacgccgacaattgcttgcatcgattatacggcggcttttacaccgattgggtgtcaggaggacagtggaaccacatgctggggtacttagccgcattggcgaaggcctgcttcgggggaaacatagagctgttcgtcttcttcaatggtgccttggagaaggcaagactacacgagtgggtcaagagacagggcaatgagcgacagaccgcacaacagatcgtcagccatgtgcagaacaaggggactcccccacctaaggtgtggttcctgccacccgtgtgcatggcacattgtatcaggcttgctctcatcaggttccatgttaaggtggcccagtctatcgaagatcatcatcaggaggtcataggattttgtcgcgaaaatgggttccatggcctggtcgcatacgacagcgattatgcactgtgcaacattccatactacttctccgcccatgctctaaagttgtcccgaaatggaaagtctcttaccacaagccagtacttgatgcacgaggtggctaagcagctggacctgaaccccaatcggtttcctattttcgcagctcttcttgggaatcacattctaccagacgaggacctggcctctttccattggagtctcctcgggcccgaacatcctttagcttccctcaaggtgagagctcaccaattggtccttcctccttgtgatgttgtgattaaggccgttgccgactatgtgcgaaacatacaggatacctccgacttagatgcaatcgccaaggacgtgttccagcactctcagagcagaaccgacgacaaggtaattcgcttcaaaagagccattgggtactattcggccacgtccaaacctatgagcttccatccaccacattacctagcggcgcgacccggacctttcggtatgcccggcatggtgccgcctcatgtgccaccacaaatgctgaatattccacagacatctctacaggcgaaacctgtggcccctcaggtgccatctccagggggcgcaccaggtcagggaccatatccctattctttatctgaaccagcaccactaacactcgacacctccggcaagaacctgaccgagcaaaattcctacagcaacataccccacgaaggaaaacacacccccctatatgagaggagtagtccaattaaccctgcacaatctgggtcgccaaaccacgttgactctgcatatttccccggcagtagcacttccagtagctccgacaacgacgaaggttctgggggagcaacaaatcacatctccgggaacaaaatcggatgggaaaagaccgggtcacacagtgaacctcaggccaggggcgatccgggagatcaaacaaaagccgaaggaagttctaccgcctctagtggttcccagctggccgagggcaaggggagccagatgggcaccgtgcaacccatcccgtgcctattgtctatgcctaccagaaaccatatggacataactactccccctttacctcccgtcgcaccagaggtactacgagtagcagaacacaggcacaagaaagggttgatgtacccttacatttttcacgttttaacgaaaggcgagatcaagattgccgtgtccatcgaggatgaagccaacaaggatctgccacctgcagcccttctgtatcgacccgtgcgacagtacgtttacggggtgcttttctccctggctgaatcaagaaagaagaccgaacgactggcttttcggaagaacagactccctccagaattcagtccagtcattatcaaagaatgggctgcatacaaaggcaagtccccacaaaccccagagttggtggaggctttagcctttagggaatggacctgtcccaacctaaaaaggttatggctcggaaaagctgttgaggacaaaaataggcggatgcgcgccttcctagcatgcatgagatcagacactcctgctatgctgaaccccgctaatgttccaactcacctcatggtgttatgctgtgtgctgcgttatatggtacagtggccaggagcgcgcatcctaagaagacaggaactcgatgcattcctggcccaagccttaagcccaaagctctatgaacccgatcaactacaggagttaaagattgaaaatttggaccctaggggcatacagctgtctgcattgtttatgagtggtgtagacatggccttatttgcaaatgatgcatgcggccagcccatcccttgggaacactgctgtccttggatgtacttcgatgggaagctatttcagtccaagctcctcaaggcctcaagggagaaaactcctcttatcgacctgtgcgatggacaagctgaccaggctgccaaagtggaaaaaatgagacagtccgtgctggaaggactttccttcagcaggcagagtcacactctaccttttccaccaccccctgctctgccgttttatccggcttcagcctacccacgacacttcggccccgtcccaccaagtcaggggagagggcgtggcttcgcgggtgtgtgcgggttcggcgggccatacggcgagaccgttgccactggcccttatagagccttccgtgtcgctgccgcttccggccactgtggtgccttctctgggtcagattctagtcggacgtcgaaaagtcaaggtggagtacagccaatcccttcccagggcggaaagctcgagattgcgggcacagtcgtaggtcactgggctggatcccggagaggacgtgggggcagaggacccttccctctgcaggtggtttccgtcggtggccctgcgagagggagacctcggggagtgatctccactccagttatccgtacatttggtcgcggaggaagatactatggcagggggtataaaaatcaggccgcaatccaggggcgaccaccttatgctgcctcagctgaggaagtggctaaggagctgaagtccaagtctggggaatccaagtcctccgccatgtcgtccgatggctccctggctgaaaacggggtgatggcagaagaaaagccggctccacaaatgaacggctctactggtgacgctagagcccccagtcatagcgaatctgccctgaacaacgactcaaagacgtgtaataccaacccccatttgaatgctctgtccaccgactctgcatgccggcgagaagctgctcttgaggctgccgtgctcaacaaagaagagtag

SEQ ID NO: 24126 - DNA, 3441 bp, synthetic construct
  misc_feature 1..3441: note = Description of Artificial Sequence: Synthetic coding sequence
  source 1..3441: mol_type = other DNA
atgggcgtgcagggcttccaggactacatcgagaagcactgcccctccgccgtggtgcctgttgaacttcagaagttggcccggggttccctagttggcgggggacggcagaggcctcctcagacaccacttagacttctggtagacgcggacaactgtctccatcgcctgtatggtggcttttatactgactgggtatccggtgggcagtggaaccatatgctgggctatctggcagccctcgctaaagcctgcttcggcggcaatattgagctcttcgtgttttttaacggcgcactggagaaggctcgcctgcatgagtgggtgaaacggcagggaaacgaaaggcagacagcccagcagattgtcagccacgttcaaaataaggggaccccaccccctaaggtctggttcttaccgccagtctgtatggcccactgcattcggttggcattaatccggtttcacgtcaaggttgctcaatctatcgaggaccaccaccaagaagtgatcggcttttgtagagagaatggattccacggattggtagcctacgacagcgactatgccttgtgtaacatcccctactacttctccgcccatgcactgaagctgagtaggaatggaaagagcctgacaacttctcagtacctgatgcacgaggtggctaagcagctggatctgaacccaaatcgattcccgattttcgcagcactcctaggtaatcacattctcccagatgaagacttggctagtttccactggtcactgctcggccccgagcaccctctcgcctctttgaaggtcagagcccaccagcttgtactaccaccttgtgacgtggtcattaaagcggtggccgactatgtgcggaacattcaggacacctccgatttggacgcgattgcgaaagacgtgtttcagcatagccagagtagaacagacgacaaagtgattcggttcaagagggccatcgggtactacagtgccacttccaagcctatgtccttccatcctccacactaccttgctgcgcgtcctggaccgtttggaatgcccggcatggtccccccacacgtgccaccacaaatgctcaatatcccccagacttctcttcaggcaaagcccgttgcacctcaggtccccagcccagggggcgcaccaggacagggaccttatccttactcactttctgagcccgctcccctgaccctggacaccagtggtaagaatctcacggaacaaaacagttattccaatatcccccacgaggggaaacacactccgctgtatgaacgctccagcccaatcaatcccgcccagtctggatccccaaaccacgtcgacagcgcatacttccccggcagttctacatcttcgtcctccgacaacgatgaggggagtggcggggctacaaagccattccagctgtatctccaaaaaaatttcgtcttccacaaggagaactctatcgttttatgctccaggatcctgcggcacggtcatatatcaggtaacaagattggatgggaaaaaactggatcacatagcgagccccaggccaggggagatcccggggaccagaccaaggctgaagggtcttccaccgcttctagcgggtctcagctggcggaggggaagggctcacaaatgggcacagtgcagcctatcccttgcctgctctcaatgcctacccgcaatcatatggacattaccaccccgcccctcccgcccgttgcgcctgaggtcctgagggtcgcggaacaccggcataaaaaaggcctcatgtacccttatatctttcacgtgctgacaaaaggtgaaatcaagattgcagtgtcgatagaggacgaggctaacaaggacctgccccctgcggcgctgctgtaccgcccggtaagacagtacgtttacggggtgctgttctccctagccgaaagtcgcaaaaaaaccgagaggctggcgttcagaaaaaatcggctgcctcctgaattctcccctgtgatcattaaggaatgggccgcctataaaggtaagtctccacagacacccgagctggttgaagccttggcctttagggagtggacatgcccaaacctgaagcgtctgtggctggggaaggctgtcgaagataagaatcggagaatgcgcgcttttctcgcttgcatgcgtagcgacacccctgcaatgctgaatcccgcaaatgtcccaacgcatttaatggtcctgtgctgtgtgctgaggtacatggttcagtggcctggcgcgcggatccttcgcaggcaggaactggatgccttcctggcccaagctctgtctcctaaactctatgagcctgaccagctacaggagttgaagatcgaaaatctggaccctcggggaatccagttgagtgctctgttcatgagcggcgtagacatggctcttttcgcaaatgacgcatgcggtcagcccatcccctgggaacactgctgcccatggatgtacttcgacggcaaattgttccagtcaaagttgctgaaggcctcccgtgaaaaaacacctctgatcgatctgtgtgatgggcaggctgaccaggctgctaaagtagaaaagatgaggcagagcgtgctcgagggactgtccttttctcggcagtctcacaccctgcctttcccacctccaccagcactaccattctaccctgccagcgcttaccctagacactttggaccggtgccgccatcccaaggcagagggcgtggatttgcaggggtctgtggttttgggggtccctacggggaaacagtggctacaggaccctaccgagcgtttcgggtcgccgcagcgagcgggcattgtggtgctttctccggatcggactcttcccggactagcaaaagtcaggggggagtgcaacctattccgtcccaaggaggaaagctggagatcgccggaaccgtggttggccattgggccgggtccagaagaggccgcggcggtagaggacctttcccactgcaggtggtgtctgtgggcggtcccgcgagaggacggcctcggggagttataagcaccccggttatccgcaccttcggcagggggggccgatactatggaaggggctataagaatcaggctgcgatacaggggagaccgccttacgctgcctccgccgaggaggtggccaaggaattaaaatcaaaatcaggagagagtaagagctccgctatgagttctgacgggagcctggccgaaaacggtgtgatggccgaagagaagcccgcccctcagatgaatggctccaccggagacgccagggctccgtctcattcagagtccgctcttaacaatgacagcaagacatgtaacactaacccacacttaaatgctttgtccacggattcagcgtgcagacgggaggcagctctggaggccgctgtgcttaataaggaggagtag

SEQ ID NO: 24127 - DNA, 3219 bp, synthetic construct
  misc_feature 1..3219: note = Description of Artificial Sequence: Synthetic coding sequence
  source 1..3219: mol_type = other DNA
atgggcgtgcagggcttccaggactacatcgagaagcactgcccctccgcggttgtgcctgtggagctccaaaaacttgctagggggtccctggtgggcggagggcgccaaaggcccccccagacgcctctgagactcctggtcgatgccgacaattgcctgcaccggttatatgggggcttttacacagattgggtgagtggtggacaatggaatcacatgcttggatacctagctgccctggcgaaggcctgctttggcggcaacatagaactcttcgtattttttaacggggctcttgaaaaggcccggctccacgaatgggtaaaacgacagggcaatgagcgacagacggcgcaacaaattgtcagtcacgtgcagaacaaaggaactccgccccccaaagtgtggttcttaccacccgtatgcatggctcactgtattcggctggcactcatacgatttcatgttaaggtggctcaatctattgaggatcaccaccaagaggtcattggcttttgcagggaaaatggttttcacggtttagtagcctacgactccgactacgcactgtgcaatatcccttactacttttccgcccacgccctaaagctgagtagaaatggtaagagcttaaccacatctcaatatttgatgcacgaggtcgcgaagcagctggatttgaaccccaaccggttcccaatctttgctgccctgcttgggaaccacatcctacctgacgaggatctcgcctctttccactggagtctgttgggaccagagcaccccctcgcatccctgaaagtaagagcccatcagctggtccttcctccctgtgacgtggttatcaaggccgtggccgactatgtgcgaaatatacaggacacttctgatctggacgccatcgctaaagatgtctttcaacattcacaaagtagaactgacgataaggtcataaggtttaaacgcgcaattggatattatagtgcaaccagcaaacccatgagctttcatccccctcactaccttgcagcacgcccaggcccattcggaatgcctggcatggtgcctccacatgtgccacctcagatgctcaacatcccccagacgtccctgcaggctaagcccgttgcacctcaagtccccagccccggcggggcccctggtcagggtccctacccgtattccctttccgagccagcaccactgacgctggacactagcggtaaaaacctcaccgagcaaaacagctatagtaatattccacatgagggaaagcatacccctctgtacgaaaggagttcacctatcaaccctgcgcagtcaggatctcctaatcatgtagactccgcttattttccgggctcctccacctccagcagttcagacaacgatgagggatctgggggggccaccaatcacatttcagggaataagatcgggtgggagaaaaccggctctcatagcgaaccccaggccagaggcgatcctggcgaccagaccaaggcggaaggaagtagtactgcctccagcggctcccagctggcggagggcaagggctcacagatgggtacagtgcagcccatcccttgtttattgagcatgcctacacggaatcatatggacataaccactcccccccttcccccggtagctcctgaagtgctcagggttgcagagcatcgccacaagaaaggccttatgtacccctatatttttcatgttctcaccaagggagaaataaagatcgcagtaagcattgaagacgaggccaataaggatctgccccctgctgctttgctataccggcccgtaagacaatacgtttacggcgtgctctttagcctggctgagtcaagaaaaaagacagagcgccttgccttccgaaagaaccgtctgcctcctgagttcagcccagtgattatcaaagaatgggccgcctataaaggaaagtcccctcaaacaccagagctcgtggaggctctggcatttcgggagtggacctgtcccaacctaaagagactgtggctgggcaaggcagttgaagataagaatcgacgcatgagagcgtttctggcctgcatgagaagcgacactccagccatgttgaatccagcaaatgtccccacccacttgatggtgctgtgctgcgtgctgagatacatggtgcaatggcctggtgccaggatattacgcagacaggaacttgatgcctttctggcccaggcattgagccctaagctttatgagcccgatcagctgcaagagctcaaaatcgaaaacctcgaccctaggggaatccagctgtctgcactgttcatgtcaggcgtggacatggctctctttgccaatgacgcatgtgggcagccaatcccctgggagcactgctgtccttggatgtacttcgacgggaaactgttccagtctaaactgctgaaggcttcaagggagaagacgccattgatcgacctgtgcgacgggcaggccgatcaggcggcaaaagttgagaagatgaggcagtcagtactggagggactcagttttagtaggcaaagtcatactctccccttcccacctcctccagccttgcccttttaccccgccagtgcatacccgagacattttggccccgtccccccctcacaaggccgcggtaggggatttgctggcgtgcagccaataccgagtcaggggggtaaactggaaattgccggcactgttgttggccattgggctggcagccggcgcgggaggggtggaagagggccatttcctctgcaggtagtctcagtgggcggaccagccagaggacgccctcggggtgtcatcagcactcccgtcatcagaacattcggtaggggtggccgatattacgggcgagggtataagaaccaggctgccatccaggggcgtcctccgtatgctgcatccgccgaggaggtcgcaaaggaactcaagtctaaaagcggcgaatccaaaagtagcgccatgtcctcagacgggagtctggccgagaatggggtgatggccgaggagaagcccgctccacagatgaacggatctacgggggatgcgcgggccccttcgcacagtgagagtgcgctgaacaacgactccaagacatgtaataccaacccccacctgaacgcactttccaccgacagcgcctgtagaagggaagcggccctggaggccgccgtcttgaacaaggaagagtag

SEQ ID NO: 24128 - DNA, 1887 bp, synthetic construct
  misc_feature 1..1887: note = Description of Artificial Sequence: Synthetic coding sequence
  source 1..1887: mol_type = other DNA
atgggcgtgcagggcttccaggactacatcgagaagcactgcccctccgcggtggtgcctgtcgaattacagaagcttgcacggggcagcctggtcggcggaggacggcagcgccctccacagacccctctgcgactcctggtcgacgctgacaattgcctgcaccgtttgtacgggggattctatacggactgggtgagcggaggccagtggaaccacatgctgggttatctggccgcactagccaaagcgtgtttcggcggaaatatcgaacttttcgtgttttttaatggcgcgttggagaaggcccgcctacatgagtgggtgaaacggcagggcaacgaacgtcagacagctcaacaaatcgtgagccacgttcagaataaaggaacaccacccccgaaggtctggttcctgcccccagtgtgcatggcccactgtattcgccttgctctgatcaggtttcatgtgaaagtggcacagtccatcgaggatcatcaccaggaggtgattggtttttgcagggaaaacggattccacggcctggtggcatacgattctgactacgccttatgtaacattccttactatttttctgcacatgctttgaaactgtcacgaaacggcaaaagcctgacaacctctcagtatctgatgcatgaggtggctaagcagctggatctaaaccccaaccgattccctatctttgcagccctgctcggcaatcacattctcccagacgaagatctggcttcatttcactggtccctgctcggtccagagcacccacttgctagcttaaaggtgcgggcacaccagcttgtgttgccaccctgcgacgtagtgatcaaggcagtggcagattatgtacgtaacatccaggacacatccgacctcgatgccatagcgaaggatgtctttcagcatagtcaatcacggacagatgataaggtgatccgcttcaagagagccatcgggtactactctgccacttccaaacccatgagctttcatcccccacactatctggcagcccggcccggacctttcggtatgcctggaatggtccccccccacgtgcctccacagatgctgaatattcctcaaacttcccttcaggcaaaacctgtcgccccccaggtgcctagtcctggaggcgctcccggccagggcccctatccatattccctttccgagcccgcccccctgactctagacaccagcggaaagaatctgacagagcaaaacagctactccaatataccacacgaaggaaaacacacacctttgtacgaaaggtcaagccccatcaatcctgcacagagtgggtctcccaatcatgtagacagcgcctatttccctggctcttccacctcctcctcctcagacaatgatgagggatcaggtggggcaacaaatcatattagcggcaataagattggctgggaaaagaccgggtcacattcagagccccaggccagaggggatcccggcgaccagaccaaagctgagggctcaagcaccgcatcatccggaagccagttggcggagggaaagggatctcagatgggcaccgttcaaccaatcccctgcctgctgtcaatgcctacccgcaatcacatggatatcactacccccccactcccacctgtggcccccgaagttctccgcgtagccgagcatcgccataaaaaaggactgatgtatccctacatcttccatgtgttgactaaagttctcagcaaaggcccctggtccggattctgttatctgatgtcgggacacagttacggctgttttgtgctcctgagcttcttcgaacctttcttctgtctcactaacctgctggagacaaaattcacgtttccttttcttaatatcgagtag

SEQ ID NO: 24129 - DNA, 1485 bp, synthetic construct
  misc_feature 1..1485: note = Description of Artificial Sequence: Synthetic coding sequence
  source 1..1485: mol_type = other DNA
ggcgagatcaagatcgccgtgagcatcgaggacgaggccaacaaggacctgccacctgcggcactactttacagacccgtccgtcagtatgtgtatggggtcctgttttccctagccgagtccaggaaaaagaccgagagactggcctttaggaagaaccgactaccccccgaattcagtccggtaatcatcaaagagtgggcggcttacaaggggaagtcaccacaaacaccagaactggtcgaagcactcgcctttcgggaatggacatgccctaatctgaaacgactgtggctgggaaaagccgttgaagataagaatcgcagaatgcgggcctttcttgcatgcatgaggtctgatacccctgccatgctcaaccctgcaaacgtcccaacacatttgatggtgctgtgctgtgtgctgaggtacatggtccagtggcccggggcccggattctgcgcagacaggaactggacgcatttctggcgcaagcgctctctcctaagctgtacgaacccgaccagctccaggaactcaaaattgagaacttggatccaagggggattcagctcagcgccctgttcatgtctggtgtggatatggcactcttcgcgaatgacgcgtgcggccagcccattccgtgggaacactgctgcccatggatgtatttcgacggcaagttatttcaatccaagttactcaaagcatcaagagaaaagacccctctgatcgacctctgcgatgggcaagccgatcaggcagccaaagtggaaaaaatgaggcagtccgttctcgaaggtcttagcttttctcgtcagtctcatacactaccctttccccccccgcctgccctccccttctaccccgctagcgcctatcctagacacttcgggccagtcccaccctctcaggggcggggaagaggcttcgccggcgttcagccgatcccaagtcaaggagggaagttggagatcgccggcactgtggtggggcactgggcaggcagtcgccgggggcgaggcggcagaggcccattccctctgcaggtggtgagtgtgggtggtcctgcccgagggagaccccgaggggtcatttcaacaccagttatacgcacctttggacgtgggggccgctattacggaaggggctacaaaaaccaagcagccatccaaggacggcccccttacgcggcctcagctgaagaggtggctaaggagctgaaaagcaagtctggtgagagtaaaagcagcgctatgtcaagcgatggctcactggcagagaacggcgtgatggctgaggagaagcctgcgccacaaatgaatggcagtaccggagacgcccgcgcgccatcccatagcgagagtgctctcaacaatgactctaagacgtgcaacaccaacccgcatctcaatgcactgagtacggattcagcatgccggagagaagcagccctggaggctgcggtcctgaacaaggaggaatag

SEQ ID NO: 24130 - DNA, 1485 bp, synthetic construct
  misc_feature 1..1485: note = Description of Artificial Sequence: Synthetic coding sequence
  source 1..1485: mol_type = other DNA
tgagtggcccagagcatcgaggaccaccaccaggaggtgatcggcttctgtcgggaaaacggctttcatggcctcgttgcttatgactctgactacgccctctgcaacattccatactatttttctgcccacgccctgaaacttagccgcaatgggaaaagcctgacaacatctcagtacctgatgcatgaagtagcaaagcagctggatcttaaccctaatcggtttcccattttcgccgcgctgctcggaaatcatattctgcccgatgaagatttggcatcctttcactggtccctgcttggtccggagcatcctctcgccagtctgaaagtgagagcccaccagctggtgctcccaccatgcgatgtggttatcaaggccgtggccgactacgtgaggaacatccaggacacatctgatcttgatgcgattgctaaagacgtgttccagcactcccaatcacgtaccgacgacaaagtgataaggttcaagcgagcaatcggctactacagtgcaactagcaaaccgatgagtttccatccgccgcactatcttgctgcgagacccgggccattcgggatgccggggatggtgccaccacacgtgccccctcagatgctcaatatcccacaaacaagccttcaagccaaacctgtcgctcctcaggtgccttctcccgggggcgcacctgggcaaggcccttatccctactctctgtctgaaccagcaccactgactctggataccagcggtaagaacctaaccgaacagaattcctattccaacatacctcacgagggcaagcacacacccttgtacgaacgtagcagtccaattaaccctgcacaatccggcagtcctaaccacgtggattcagcttactttccgggttcaagtacaagtagttctagcgataacgacgaaggctctgggggtgctacaaatcatatttcaggcaacaagataggctgggagaagactgggtcccacagcgagccccaggcccggggggatccaggcgaccagactaaagccgaaggcagcagcactgcgtcctctggatcccaactggcggaaggaaagggctctcaaatgggcacagtgcagcccatcccctgcctactgagtatgcctacccgaaaccacatggacatcaccacgcccccactgccgcctgttgcacctgaagtcctacgagtcgccgaacacaggcataaaaagggcctgatgtacccctatatctttcatgttctcacgaagggggaaatcaagatcgccgtttctatcgaagacgaagctaacaaagatcttccccctgccgcgttattgtataggcccgtcaggcagtatgtttatggtgtcttgttttcactggccgagagtagaaaaaagactgaaagattggccttcagaaaaaataggttgcccccagagtgcatgtactgcaataatcccctgttcgtcttcctggggacatcttag

SEQ ID NO: 24131 - DNA, 969 bp, synthetic construct
  misc_feature 1..969: note = Description of Artificial Sequence: Synthetic coding sequence
  source 1..969: mol_type = other DNA
atggtggccgacctggagctgcagcaggacctgatcgtgcccctgggtcacacacccagccaagaacacttcctcttcgagatttttcgccgaaggttgcaagctctcacaagtggctggtcagtcgccgcttctctgcagcgccagcgcgagttactcatgtataagagaattttgttgcgactgcccagcagcgtcctctgtggctcatcatttcaggccgagcagccaattaccgcccgatgtgagcagtttttccacctggtcaactctgaaatgcggaatttctgcagccacggcggagcactgacacaggatatcacagctcactttttcagaggcctgctgaatgcctgcttacggtcacgtgacccatctctcatggtcgactttattctggctaagtgtcagacgaagtgccctctgatcctcacctccgctcttgtgtggtggccatctcttgagcccgtgttgctgtgtaggtggcggcgacactgtcagagccccttaccaagggaattgcagaagctacaggaaggcaggcagtttgcctccgatttcttatcccccgaggctgctagtccagcccccaatcccgattggctttcggctgctgccctgcattttgcaattcagcaggtaagagaagagaatatacggaagcagcttaaaaagttggattgtgagcgcgaggagcttctggtgttcctcttcttcttctcccttatgggattgctgtcttcccacttgacctcgaattccaccacagatctgccgaaggcgttccacgtgtgcgctgccatcttggagtgtttggagaaacggaagatcagctggctggctctattccaacttactgagtctgggaaaaaacacgccgcagaggcccagatgaggcgagctgccctgttcaggggtatcctgcagatggtgaagaacgagccctccctgcgattcctggcaaaatag

SEQ ID NO: 24132 - DNA, 4368 bp, synthetic construct
  misc_feature 1..4368: note = Description of Artificial Sequence: Synthetic coding sequence
  source 1..4368: mol_type = other DNA
atgagcgacagctgggtgcccaacagcgccagcggccaggaccccgggggtcgccgcagggcttgggctgaactccttgctgggagagtgaagcgcgagaagtataacccagagcgagcgcagaaattaaaggaaagcgcggtacgcctcctcagatcccaccaagatctcaacgccctgctcctggaagtggagggccctctgtgcaagaagctatccctgtccaaggttatcgactgtgatagcagtgaggcatacgccaaccactcctcaagttttattgggagcgctttacaggatcaagcttctcgattgggggtccctgtgggtattctttcagcagggatggttgcaagctctgtgggacagatctgcaccgcccccgccgaaacttctcatccggtgcttctgacagtcgaacagagaaaaaagctttcttcattactggaattcgctcagtatctgctggcccacagcatgttctcgcgtctgtccttctgtcaagagctgtggaagatccaaagttccctacttctagaagctgtctggcatttacacgtgcagggcatagtgtctttgcaggaattgttagagagtcacccagacatgcacgccgtggggagctggctcttcaggaatctttgttgtttgtgtgaacagatggaagccagttgtcagcacgctgatgtcgcccgagcaatgttgagtgattttgtacagatgttcgtcctgaggggatttcagaaaaactccgatttgaggagaacagtcgaacctgagaagatgccacaagtaacagtggacgtcctgcaaaggatgctgattttcgcactggacgctcttgcagcaggagtacaagaggagtcttctacacacaagattgttcgctgctggtttggtgttttttctggacatactcttggttccgttatctctacagaccctctgaagcggtttttctcccataccctgacgcagattctgacgcactcgccagtgttgaaggcctctgacgctgttcagatgcagcgcgagtggagtttcgctcgcacccaccctcttctgacatccttatacaggcgcctatttgtgatgctgtcagctgaagagctggtgggccacttacaagaagttctggagactcaggaggtccactggcagcgcgtcctctcattcgtctcagcactcgtggtatgttttcctgaggctcagcagctcctggaagattgggtggcaagactgatggcacaggcctttgagtcttgccagctcgattcaatggtgacggccttcctggttgtccggcaggccgctcttgaaggaccctctgccttcctgtcttacgcagattggttcaaggcctcctttgggagcacgaggggataccacggatgctccaagaaggcactggtgtttctgtttacatttttatccgagctcgtgccattcgagtcccccaggtatctccaagtgcacatcctgcaccccccgcttgtgcccggcaaatatcggagtctgctaacagactacataagccttgcgaagacccggctagccgatctcaaagtctcaatcgagaacatggggctttatgaagatctttcctccgcaggcgacatcaccgaaccccatagtcaagccctgcaagacgtggaaaaggctataatggtatttgagcacacaggaaacattccagtgacagtgatggaggcaagtatatttaggcgcccctattatgttagccactttctgccagcgttgcttaccccccgggtgctgcccaaggttccggattcaagggttgccttcatagaatctctgaaaagggcagataaaatcccccctagcctatattccacctactgccaggcttgcagtgcggcggaagagaaacctgaagacgctgccctcggagttagagcagaacctaactctgccgaagaacctctcgggcagctcactgccgcacttggagaactgcgggcctctatgaccgatccgtcacaaagggacgttatctccgcacaggttgcagtgatttcggagcggctgagggctgtcctaggacacaatgaagatgattcaagcgtggagatcagcaagattcagctctccataaacactcctcgcctggaacccagggagcatatggctgtggacctgctactgaccagcttttgtcaaaacttgatggctgcttcttctgtcgctccccctgaacggcagggaccctgggccgcgcttttcgttcgtacgatgtgtggccgagttctgcctgctgtactcacacggttgtgtcagctgcttagacaccaaggccctagtctaagtgcccctcacgtgctgggcctggctgctcttgccgtgcatctgggcgagagtcgtagcgcattacctgaggtggatgttggccctcccgcccccggggcgggactgcccgtgcctgccctgtttgatagtctgctaacctgtcgaactcgggacagtttattcttttgcttgaagttctgtacagctgcaattagctacagcctgtgcaagtttagcagtcagtcaagggacactctctgttcctgtctgagtccaggtcttatcaaaaagtttcagtttctgatgtttagacttttttccgaggcgcggcagcccctgtccgaggaggacgttgctagtctttcttggaggccactgcatctcccctctgcggactggcagcgcgctgcgctgagtctgtggactcatagaaccttcagagaagtgctgaaggaggaagatgtccacctgacctaccaggattggcttcatctcgagctggaaattcagccagaggccgatgccctgagtgatactgagcggcaggacttccaccagtgggccatccatgaacactttttgcctgaatcatccgcgagcggcggctgtgacggcgatctccaggccgcctgcactattcttgtaaatgccctcatggattttcatcagagttcgaggagctacgaccacagtgaaaacagtgacctggtgttcggaggccgcactgggaatgaggacattatctctcggctccaagaaatggtggctgatctggagttacaacaggacctgattgtgccgcttggccacactccttcccaggaacatttcttgttcgagatttttaggagacggttgcaggccctcaccagcggctggtccgtcgcagcctcccttcagcgccagcgcgagcttctgatgtacaagagaatcttgctgaggctgccttctagtgtgctgtgtggctcttcctttcaggccgaacagcccataaccgcacgctgcgaacagttcttccacttagtgaacagcgagatgcgtaacttttgttctcacggtggggccctcacacaagacatcacagcacacttctttcgaggactacttaatgcttgtctgcgaagtcgcgacccaagcttaatggttgacttcattctggccaagtgccaaaccaagtgtcccctgatccttacaagcgccctggtctggtggcccagcctggaaccagtcctgctgtgcagatggagacggcactgtcagtcccctcttccaagggagctgcaaaagttgcaggagggtcgtcagttcgcctccgattttttgtctcctgaggccgcctctcccgcccccaatccagactggctgtccgcagctgccctgcactttgcgatccagcaggtccgcgaagagaatattcgcaaacagctgaaaaagctggattgtgagcgagaggaactgctggtgttcctcttcttttttagcctgatggggctgcttagttctcatctgacatccaatagcaccactgatctccccaaggccttccacgtgtgcgcggccatccttgaatgtctggagaagcgcaaaattagctggctggctctcttccagcttaccgagagtgatctgcgcctcggacgacttctgctgcgggtggctcccgaccagcatacccgactcctgccctttgcgttttacagcctgctgtcctactttcatgaggacgctgctatacgtgaggaagccttcctgcacgtcgcggtcgacatgtacctgaagttagtccagctgttcgttgcaggcgacacatcgacggtaagccctcccgccggccgatcactggagcttaaagggcagggtaacccagtggagctgataaccaaggcccgcctgttcttgctccagctgattcccagatgtccgaagaaatccttcagccacgttgccgagcttctagccgacaggggagattgtgatcctgaggtcagcgccgcactacaatctcgtcagcaggcagcgcctgacgcagacctaagccaggaaccccaccttttctag

SEQ ID NO: 24133 - DNA, 894 bp, synthetic construct
  misc_feature 1..894: note = Description of Artificial Sequence: Synthetic coding sequence
  source 1..894: mol_type = other DNA
atgagcgacagctgggtgcccaacagcgccagcggccaggaccccggggggagaaggcgcgcctgggccgaattgctcgccggccgagtgaagcgggagaagtataatccagaaagagcccagaagctcaaagagtccgctgtgcggctgctgcggagccaccaggatttgaacgccctgctgctggaagtggaaggaccgctgtgtaagaagttgagtctttctaaagtaatagattgcgacagttctgaggcctacgcgaatcactcaagcagtttcatcgggagcgccctccaagaccaggcctctcgcttgggggttcccgtgggaatactcagtgccggcatggtggcttcatctgtgggtcagatctgtactgccccagccgagaccagccaccccgtgcttctgacagtggagcagcgcaaaaagctgagctctctgctcgaattcgcccagtatttgctggcacactctatgttcagccggctttctttttgccaggagctgtggaagattcagagcagtctgctgctggaggcagtgtggcatctgcacgtgcagggtattgtgtcacttcaggagttactggaatctcaccccgacatgcatgccgtgggttcctggctgttccgcaacctttgctgtctctgcgaacagatggaagcttcgtgtcagcacgctgacgtggcccgggcgatgctgtcagacttcgtgcagatgtttgtactgcggggattccagaaaaatagcgacctgcgacggacagttgaacctgagaaaatgccacaggtgacagtggacgtgctgcagcggatgttgattttcgcactcgacgcattggccgccggggtgcaggaagaaagctctacacacaagatcgtgagatgctag

SEQ ID NO: 24134 - DNA, 909 bp, synthetic construct
  misc_feature 1..909: note = Description of Artificial Sequence: Synthetic coding sequence
  source 1..909: mol_type = other DNA
atgagcgacagctgggtgcccaacagcgccagcggccaggaccccgggggtcgacgcagagcttgggctgagcttctggccggtagggttaagcgcgaaaagtacaaccccgagcgggcacagaaactgaaagagtcagcagtgcgtctcttgaggtcacatcaggaccttaatgctcttctcttggaagtagaaggcccgctctgcaagaagctgtccctgtccaaggtcatcgattgtgattcttcggaggcatacgctaatcactcctccagctttatagggtctgctcttcaggaccaggcaagtcggctcggagtgcccgtgggaatcttatccgctgggatggtggctagctcagtgggccaaatctgcaccgcccccgccgagacctcacatcctgtgttgctgactgtcgagcagagaaagaagctctccagtctgctcgagtttgcccagtacttgttggcccacagcatgtttagcaggcttagtttttgtcaggaactgtggaaaattcagtcatccctgctgttagaagcagtttggcacctgcatgtgcagggtatcgtgtctctgcaggagcttcttgagtcccatccagacatgcatgccgtgggcagctggctgttccgtaatctctgctgtctatgcgagcagatggaggcttcttgtcagcacgcagatgtcgccagggccatgctaagcgactttgtccagatgtttgtcttgcgaggatttcagaagaactctgacctgagacgcacggtcgaacccgaaaaaatgccccaggtgactgtggatgtactgcagaggatgctgatcttcgctctagacgcattggccgccggcgtgcaagaagaatcaagcactcacaagatcgtgcgagcttctgcagccaggtcatag

SEQ ID NO: 24135 - DNA, 798 bp, synthetic construct
  misc_feature 1..798: note = Description of Artificial Sequence: Synthetic coding sequence
  source 1..798: mol_type = other DNA
atgagcgacagctgggtgcccaacagcgccagcggccaggaccccggagggcgccgcagggcctgggctgagctgctcgccggtagggtgaagagggaaaagtacaaccccgagagggcacagaagttaaaagagtctgctgttcggttgcttaggagtcaccaggacctgaatgcactgctccttgaggtggaaggacccctgtgcaaaaagctgtccctgtctaaggtgatagactgtgattcctctgaggcttatgccaaccacagcagcagcttcatcgggtcagcactgcaggaccaggccagccggctaggcgtgccagtgggaatcttgagcgctggaatggtcgcctcctcagtgggtcaaatctgtaccgcacccgctgagacttcacaccctgtgttattaactgtcgaacagagaagcagtctgttactggaagccgtgtggcaccttcatgtgcaggggatagtgagtcttcaggagctgctggagtcccatcctgatatgcatgccgtagggagctggctcttcagaaatctgtgctgcctgtgcgagcagatggaagcctcctgccagcatgcagacgttgcccgtgctatgctgtctgactttgtccagatgttcgtgttaagaggcttccagaagaattcggacctgaggcgcacagttgagccggaaaagatgcctcaggtaacagtcgacgtcctgcaacggatgctgatcttcgcgctggatgcgctggcagctggggtccaggaagaatcaagcactcacaagatcgtcaggtgttag

SEQ ID NO: 24136 - DNA, 1869 bp, synthetic construct
  misc_feature 1..1869: note = Description of Artificial Sequence: Synthetic coding sequence
  source 1..1869: mol_type = other DNA
atgagccggcagaccaccagcgtgggcagcagctgcctggacctgtggagggagaagaacgatcggcttgtgagacaagcaaaagttgcccagaactctgggctgaccctgcgaagacaacagctggcccaggacgcgctcgagggactgagaggattgctgcactcgctgcaaggtctgccagccgcagtgcctgtactgcctcttgagcttaccgtgacctgcaactttatcatactccgagccagcctggcccaggggttcactgaagatcaggctcaggacatccagcggagtcttgagagagtcttggagacccaggagcagcagggacccagactggagcaaggacttcgggaattgtgggacagcgtgcttagagccagctgtttgctccctgaattattgtcagcccttcatcggctcgttggtctgcaagctgcgctgtggctgagcgccgacaggctaggcgaccttgcactgctcctagagactctgaacggatcccaatctggagcgagcaaggatcttctgctcttgctgaaaacttggagtccaccagctgaggaactggacgctccacttacattgcaggacgcccaggggcttaaagatgtcctgttgactgctttcgcttacaggcagggcctccaagaattaatcacggggaacccagacaaagccctgagcagtttacacgaggccgcctctgggctgtgcccaaggcccgtgctggtgcaagtgtacaccgcattgggatcctgtcataggaaaatgggaaatccccagcgcgccttgttatacctggttgccgcactcaaagaaggctctgcttggggaccacctctcctggaagcatcaaggctgtaccagcagttgggagataccaccgctgaactcgaatccttagagcttttggtcgaggcactgaacgtaccctgctcttccaaagcacctcaatttctaatcgaggtcgaactcctgctgcctcctcccgatctcgcttcaccactgcactgcgggacccagagtcagacaaaacacattctggcctctcgttgtttgcaaacagggcgggccggcgatgccgcagagcactatctggacctactggccctgctgctggatagttctgaaccccgcttttcccccccacccagcccccccgggccctgcatgcccgaagtatttctggaggccgccgtggcattgatacaggccggacgggcacaggacgcattgacactttgcgaagaactcctcagtcgtacatcttccctgctgcctaaaatgtcccgcctgtgggaggatgccagaaagggcacgaaggaactgccatactgtcccctgtgggtctcagccacccacctgttgcaggggcaggcctgggtgcagctgggagcccaaaaggttgccatctctgagttctcacgctgcctggaactgctgttcagggccacacccgaggagaaggagcagggcgccgcgttcaactgtgagcagggatgcaaatccgatgcagctctacagcagctacgggctgccgccctgatatcccggggcctagaatgggtggcatcaggccaggataccaaggccttgcaggacttccttctctcagtacagatgtgtcctggtaacagagacacttattttcatctcctgcagacccttaagcgtctggacaggagagacgaggctacggctctgtggtggaggcttgaggcgcagacaaaggggtcccacgaagacgcactgtggagcctgccactgtacctcgagtcgtatctaagttggattagaccctccgaccgagacgcatttctcgaggaatttagaaccagcctccctaagtcatgcgacctttag

SEQ ID NO: 24137 - DNA, 648 bp, synthetic construct
  misc_feature 1..648: note = Description of Artificial Sequence: Synthetic coding sequence
  source 1..648: mol_type = other DNA
atgagccggcagaccaccagcgtgggcagcagctgcctggacctgtggagagagaagaacgataggctggtgcggcaggcgaaggtggcgcagaattccggcctgacactccggagacaacagctggcacaagatgcgctcgaagggctcagaggactgctgcactctttacaggggctcccggctgcagtacccgtcctgcccctggagttaacagtcacatgtaacttcatcatccttcgtgccagcctggcccaggggttcactgaggaccaggcccaagatatccagcgaagtctggagagggtgcttgaaacacaggagcaacagggcccgcgcctggagcaagggttgcgggaactgtgggacagcgttttaagggcaagttgtctgttgccagaactccttagtgctctgcacaggcttgttggcctccaggccgcactgtggctgtctgcagaccgcttaggggacctggcactgttgctggaaaccctgaacggctctcagtccggggcctctaaggatttgctactcctgttaaagacctggagcccacccgccgaagaattagacgcgccactgacgctgcaggacgcccagggcctgaaagacgttctgctgactgctttcgcgtaccgccagtag

SEQ ID NO: 24138 - DNA, 1347 bp, synthetic construct
  misc_feature 1..1347: note = Description of Artificial Sequence: Synthetic coding sequence
  source 1..1347: mol_type = other DNA
atgagccggcagaccaccagcgtgggcagcagctgcctggacctgtggcgcgagaagaatgataggctcgtacgtcaggctaaggtagctcaaaacagcggccttaccctgaggcgacagcagttagcgcaggatgctctagaagggctaagaggtctgctccactcactccagggtctccctgccgcagtaccagtcctacccctggagctcactgtgacctgtaacttcattatccttcgggcaagccttgcgcaggggtttacagaagaccaggcccaggacatccagaggtccctggaacgagtactggagacacaagagcaacagggacccagactcgagcaggggttgagggagctgtgggactccgtgttgcgggccagctgtcttttgcctgagttgttaagtgccttgcacaggctggtgggcctccaggcagccctgtggctatcagctgacaggcttggagacctcgcgttgctgctggagacattaaatgggagccagtcgggcgcgagcaaagatctgctcttgctgctgaagacctggtctccccccgccgaagagctcgatgcccccttgactttgcaggatgcccagggtctgaaagatgtcctgctcacggcctttgcatacaggcaggggctgcaggagctgatcacaggtaatcctgataaagcactgtcctccttgcatgaggcagctagtggtctgtgtccaagaccagttctcgtccaagtttacactgcactcggctcgtgtcacaggaaaatggggaatcctcagcgagcattgctatacctcgttgcagccctgaaagagggaagcgcatggggaccgccattgctggaggccagtcgcctgtaccaacaactaggagacacgactgcggaactggagagcttggagctgttagttgaggctctgaatgtcccctgcagctccaaggctccccagttccttatcgaagtggagctgttgctgccacctccagacctcgcgtccccacttcattgcggaacgcagtcacagactaaacacatcctggccagtcgatgcctacagacagggcgggccggcgatgccgcagagcattacctggatttgctagctctgctgttggattctagcgaacctcggttttcaccccccccctccccacctggaccatgtatgccagaagtgtttcttgaggctgctgttgcgctaattcaagcgggcagggctcaggacgctctgactctctgcgaggagttattatctcgtacctcaagtctccttcccaagatgtccaggttatgggaagacgctaggaagcggaccagggggagctttcagctgtag

SEQ ID NO: 24139 - DNA, 663 bp, synthetic construct
  misc_feature 1..663: note = Description of Artificial Sequence: Synthetic coding sequence
  source 1..663: mol_type = other DNA
atgctgggcatctggaccctgctgcccctggtgctgaccagcgtggctcggctctcgagtaagtccgtcaacgcgcaagtcacagatatcaattctaaggggctggaacttaggaaaaccgtaactacagtggagacccagaatctggagggcctccaccacgacgggcagttttgtcacaagccatgtccaccgggagagagaaaggctagagactgcactgtgaatggcgacgagccagattgcgtgccatgccaggagggaaaggaatataccgacaaggcccacttcagctccaaatgccggaggtgcagattgtgcgatgagggtcatgggctagaagtcgagatcaactgcactaggacgcaaaacaccaaatgccgctgtaagccaaacttcttctgtaattcaaccgtgtgcgagcattgcgatccatgtacgaaatgcgagcatggaatcattaaggaatgcacacttacttccaacaccaagtgtaaagaggaggggtcaaggtcaaatctgggatggctgtgcttgctcttgcttcccattcctttaatcgtttgggtgaaacgtaaggaagtccaaaagacttgtcggaagcatcggaaagagaaccagggctctcacgaaagtcccactctgaatcccatgctcacatag

SEQ ID NO: 24140 - DNA, 1008 bp, synthetic construct
  misc_feature 1..1008: note = Description of Artificial Sequence: Synthetic coding sequence
  source 1..1008: mol_type = other DNA
atgctgggcatctggaccctgctgcccctggtgctgaccagcgtggcccgcctctcgagcaaatctgtgaatgcccaggtgaccgacattaactctaaggggcttgaattgcgaaaaaccgtgaccaccgtcgagacccagaacctggaaggactgcatcatgatggtcaattctgtcacaagccgtgcccccctggggaacgcaaagctcgtgattgtactgtgaatggggacgagcctgactgtgtgccttgccaggaaggcaaggagtacaccgacaaagctcatttttcatctaaatgcagaaggtgccgcctgtgtgacgaaggccacggcctggaggtggagataaattgtacgcgtacgcagaacaccaaatgtaggtgcaagcccaacttcttttgtaatagtaccgtctgcgaacactgcgacccctgtactaagtgcgagcacgggatcatcaaggagtgcaccctgacgagcaacaccaagtgcaaggaagagggatcccggtccaacctgggttggctttgcctgctcttgctccccatccccctgatcgtttgggtgaagcgcaaagaggtccagaaaacctgtaggaagcacagaaaagagaatcaaggcagtcacgagtcccccacccttaaccctgaaacggtcgctatcaacctgagcgatgttgacttatctaaatacatcacaaccatcgctggtgttatgactctctctcaggtaaagggttttgtgcgcaaaaacggggtaaacgaagcgaagatcgatgagatcaagaatgataacgtgcaggacacagcagagcagaaagtccagctgctgcggaattggcaccaactgcatggcaaaaaggaggcttacgacacactaatcaaggacttaaaaaaagccaatttgtgcactttggcagagaagatccagacaatcatcctcaaggacattacatctgacagtgaaaactcaaactttcggaacgaaatacagtcactggtatag

SEQ ID NO: 24141 - DNA, 945 bp, synthetic construct
  misc_feature 1..945: note = Description of Artificial Sequence: Synthetic coding sequence
  source 1..945: mol_type = other DNA
atgctgggcatctggaccctgctgcccctggtgctgaccagcgtggccagactttctagtaaatcggtgaacgctcaggtcaccgatatcaacagcaagggactggaactccggaagactgtaacaactgtcgaaacgcagaacctggagggcctccaccatgatggtcagttttgtcacaagccctgtccacctggggagaggaaagctagggactgcacagtaaacggtgacgagcctgactgtgttccctgccaagaagggaaagagtataccgataaagcccacttctcaagcaagtgccgcagatgtagattgtgcgatgagggccatggtttagaagtagagataaactgcacacgcacccagaatacaaagtgtagatgtaaaccgaactttttttgcaactctactgtttgcgagcactgcgatccttgcacgaaatgtgaacacggaatcattaaggagtgcaccctaacctcaaacaccaaatgcaaagaagaagttaagcgcaaggaggtgcagaagacatgtaggaagcatcgcaaggaaaatcagggctctcatgagtctcctacattgaatccagagaccgtggctatcaatctgagtgatgtcgacctctccaagtacataaccacaattgcgggcgtcatgaccttgtcccaggtcaaaggcttcgtgcggaagaacggcgtgaatgaggccaagatcgacgaaataaaaaacgacaacgtgcaggatactgcagagcagaaagttcaactcttgcggaattggcaccagcttcacggcaaaaaggaggcatatgacacactgattaaagacctcaagaaagccaatctttgtacactcgctgagaagatccagaccataatcctgaaagacatcacaagcgattcagaaaattcgaatttcaggaatgaaattcagtctctggtttag

SEQ ID NO: 24142 - DNA, 735 bp, synthetic construct
  misc_feature 1..735: note = Description of Artificial Sequence: Synthetic coding sequence
  source 1..735: mol_type = other DNA
atgctgggcatctggaccctgctgcccctggtgctgaccagcgtggccagattgtcttccaaaagcgtgaatgcacaggtgactgacattaactctaaaggtctggagcttcggaaaaccgttaccaccgtggaaactcagaatctagaagggttgcaccatgacgggcagttctgtcataagccatgcccccccggcgagaggaaagctagagactgcaccgtgaacggcgatgagcctgactgtgtaccctgccaggagggaaaagagtatactgacaaggctcacttcagctctaagtgtcgacgttgccgtctctgcgatgaaggccacggtctggaagtggaaattaactgtaccagaacacagaacactaagtgccgctgcaaacctaattttttctgtaactcaacagtgtgtgagcattgtgatccctgcaccaagtgtgagcacggcattattaaagagtgcacactgacttccaataccaagtgtaaagaggagggcagccgctccaatcttggttggctctgcctccttctcctccccattcccctcattgtctgggtgaagcgcaaggaggtacagaaaacgtgcaggaagcacagaaaggagaaccagggcagccacgagagccccacccttaatccagaaacagtagcgatcaatctgtccgatgtcgacctatcaaagtatcatcattactgctggagtcacgacaccaagtcctcctag

SEQ ID NO: 24143 - DNA, 1089 bp, synthetic construct
  misc_feature 1..1089: note = Description of Artificial Sequence: Synthetic coding sequence
  source 1..1089: mol_type = other DNA
atgctgcgggtgtgcgcccagggctggcacgcccagggcctgccccatggtacgaactctttactgaaaggaggaacagaaacaagcctgtccacccctaccagattagtcgtgttgacatctgtggcccgcctctcatcgaagtctgtgaatgcccaggtgactgacattaattctaaggggcttgagctgcggaaaaccgtgaccaccgtggaaacccagaatctggaaggactccaccatgatggccagttttgccacaagccatgcccgcctggagagcgcaaagctcgggattgtaccgttaacggcgatgaacctgactgtgtcccttgtcaagaaggaaaggagtacacagataaggcccacttttcctctaagtgcagacgctgccgcctctgcgacgaagggcatgggctcgaggtcgagattaattgtacaagaacacagaatactaagtgccgatgtaagcccaactttttctgcaatagcacagtatgtgaacactgcgacccgtgtactaagtgcgagcacggtattatcaaggaatgcacgctgaccagcaacacgaaatgcaaagaggagggaagtaggtctaacttggggtggctgtgtctccttctgttgcccattcccctgatagtgtgggtgaagaggaaagaagttcaaaaaacttgtcgcaaacatcggaaggaaaaccagggcagtcatgaatctcctaccttgaaccccgtgggcatagagatcgacttctccgacgtggacctgtccaagtacattactaccattgcaggggtcatgacactgtcgcaagtaaaaggattcgtgaggaaaaacggcgtaaacgaggcgaagattgatgagatcaaaaacgataatgttcaagatacagctgagcagaaggtgcagctgcttagaaattggcaccaactccacgggaagaaggaggcatacgatacactgatcaaagaccttaaaaaggctaatctctgcaccttggcggaaaaaattcagacgattattctaaaagatatcacctctgattccgaaaactctaacttccgtaatgagatccaatctcttgtctag

SEQ ID NO: 24144 - DNA, 627 bp, synthetic construct
  misc_feature 1..627: note = Description of Artificial Sequence: Synthetic coding sequence
  source 1..627: mol_type = other DNA
atggaccccttcctggtgctgctgcacagcgtgagcagcagcctgtcttcttccgaactgaccgaacttaagttcctttgcctaggaagggtggggaaacggaaactggagcgagtgcagtcagggctagaccttttctctatgctgctagagcagaacgacctggaacctgggcataccgaactgctaagagaactgctggcatctttgcgcaggcatgatcttctgagaagggttgacgacttcgaggctggcgccgcggccggggctgcgcccggtgaggaagacctctgcgctgcttttaacgtgatctgtgacaacgtcgggaaggactggaggcgtctggccagacagttgaaggtctccgatactaaaatcgacagcatagaggatcgttaccctagaaatctaacggagagagtgagggagagcctgcgaatctggaagaacaccgagaaagagaacgcaacagtggcgcacctcgtgggcgccttacgctcatgtcaaatgaatttagtggccgacctagtgcaggaggtccaacaagcacgcgacctgcagaatcggtctggagccatgagccccatgtcctggaattccgacgcctcaacaagtgaggccagctag

SEQ ID NO: 24145 - DNA, 384 bp, synthetic construct
  misc_feature 1..384: note = Description of Artificial Sequence: Synthetic coding sequence
  source 1..384: mol_type = other DNA
atgcagcagcccttcaactacccctacccccagatctactgggtggactcttctgcttccagtccttgggccccccccggaactgtactcccctgccccacttctgtgcctagacgcccagggcaaaggcgtccaccccctccgccgcccccacctccactgcctccgccccctcccccaccacctttaccgcctttacccttgccaccactgaaaaagcggggtaaccacagtacagggttgtgtctactcgtgatgttttttatggtgttggtggccttagtggggctcgggctgggaatgttccagcttttccacctgcaaaaggagttggccgagctgagagaggccactccggtgcatccgcttaagaagagaagctag

SEQ ID NO: 24146 - DNA, 846 bp, synthetic construct
  misc_feature 1..846: note = Description of Artificial Sequence: Synthetic coding sequence
  source 1..846: mol_type = other DNA
atgcagcagcccttcaactacccctacccccagatctactgggtggactcctcagcatcttctccgtgggcaccgccagggactgtgttgccctgccccacgtcagtccccagaagacctggtcagcggcgaccgccccctccccctcctccaccacctctgccgccccctcctcctccgcctcccctacctcccctcccgctccccccgctgaaaaagcgaggtaaccacagtaccggtctctgcttacttgtcatgttttttatggtgttagtcgccctggtgggcctcggtctggggatgttccagctattccatctacaaaaggagctggccgaactccgcgaaagcaccagccaaatgcacacagcatcctctttggaaaagcagatcgggcacccctctccacctccagagaagaaggagctcaggaaggtggctcaccttaccggcaagtccaactctcgaagcatgcctctcgaatgggaagacacatacggtatagtgttgctcagtggggttaagtacaagaagggcggcctagtgattaacgagactgggttgtactttgtgtacagcaaagtctatttccggggacagagttgcaacaatctcccactcagtcataaggtgtatatgcgcaattccaagtacccacaggacctggtaatgatggagggcaagatgatgtcttactgcaccaccggtcagatgtgggctaggagtagctacctcggtgccgtatttaacttgacctccgcggaccacctgtacgtgaatgtgagcgaactctccctggtgaacttcgaggaaagtcaaacatttttcgggctctataagctctag

SEQ ID NO: 24147 - DNA, 13773 bp, synthetic construct
  misc_feature 1..13773: note = Description of Artificial Sequence: Synthetic coding sequence
  source 1..13773: mol_type = other DNA
atgggccggcacctggccctgctgctgctgctgctgctgctgttccaacactttggagattcagatgggagtcagaggttggagcagacccccctgcagttcacgcatctggaatacaatgtgaccgttcaagaaaattccgcggcgaagacttacgtgggccacccggttaaaatgggggtgtacatcacgcacccagcttgggaagtcaggtacaagatcgtctctggcgacagcgagaacctcttcaaggccgaagagtacatactaggcgatttttgctttctgcgtatccgaactaagggaggtaatactgcaattcttaaccgtgaggtcaaagatcactatactttaatcgtaaaagctctggagaagaacaccaacgtcgaagccagaactaaagtgagagtgcaggtgcttgacacaaacgatctccggcctctgttttctccaacaagttactcagtgagtttacctgagaacactgccatcagaacctctattgccagagtctccgcaacagatgccgacatcggaactaacggcgaattctattactcattcaaggacagaacagacatgtttgcgatccaccctacatccggcgtgattgtgttgacaggcagactggattatctggaaacgaagctgtatgaaatggagattttggctgcagataggggcatgaagctctacgggagtagtggcatttcttcgatggcgaagctgacagtgcatattgaacaggcaaatgagtgcgctcctgtaattaccgccgttacgctgtcaccaagcgagctggatagggaccctgcctacgccatagtcacagtggacgactgcgatcagggtgcaaacggagatatcgctagtctgtccattgtcgcgggtgatttgttacaacagttcaggacagttagaagcttccccggcagcaaagagtacaaggttaaagctatcgggggcatcgattgggactcacaccctttcggctacaatctgacacttcaggctaaggataagggcacacctcctcagttcagctcggtcaaggtaatccatgtaacaagtccacaatttaaggcgggcccagtaaagttcgagaaggacgtgtatcgggccgaaatcagtgagttcgcgcctcctaacactcccgtggtgatggtgaaagctattccagcttacagccaccttcgctatgtctttaaaagcacccccggaaaagcaaaattttccttaaactataatacaggcctcatttcgatcctggaacccgtcaaacggcagcaggctgctcattttgaactcgaggtgactacttctgatagaaaagcaagtaccaaagtcttagtgaaagtacttggagctaacagcaacccacccgaattcacacagacagcatacaaggcagccttcgatgagaacgtacctatcggcactaccgtcatgagtctatccgccgtggacccagacgagggggagaacgggtacgttacctattcgatcgctaacttgaaccacgtaccctttgcgatcgatcatttcacgggtgccgtatctacctccgaaaacttggactacgagctaatgcctcgcgtctataccctgcgcattagggccagtgattggggcctgccttataggcgcgaggtggaggtcttggcgactatcacattaaacaatttgaatgataataccccactgtttgaaaaaatcaactgcgagggtaccattccacgtgacctgggagtcggcgagcaaattactaccgtaagcgccatcgatgcagacgaactacaactcgtgcagtaccagatcgaggccggcaacgagttggattttttttcgttgaatcccaacagcggcgttctctccttaaaacgcagtctgatggacggcctgggagctaaagtctcattccattccctgcggattacagctacagatggagagaactttgcaacccccctatatatcaacattaccgttgcggcatcacacaagctagtgaacctgcagtgcgaggaaacaggagttgcaaagatgctggcagaaaaactcctacaagccaataaattgcacaaccaaggagaggtggaagacatttttttcgattcccacagcgttaacgcccacattccacaatttcggagcaccctgccaaccggaattcaagttaaggagaatcaacccgtgggcagttcagtcatattcatgaattctaccgatttagacaccggattcaacgggaaattagtctatgccgtgtccggagggaatgaagattcttgctttatgattgatatggagacagggatgctaaagatcttgtcaccacttgacagagaaacaactgataaatacaccctcaacataacagtgtatgacctcggcattccccagaaagctgcatggagactgcttcatgtcgtcgtcgtcgatgccaatgacaatccgcctgaatttctccaggagtcctacttcgtagaggtgtctgaggataaggaagtgcactctgaaattatccaggtggaggccactgacaaggacctgggacctaacggccacgtgacatacagcatagtcactgatactgatacatttagcattgacagtgtgactggagtggtgaacatagcacgtcctttggaccgcgaacttcagcatgagcactcccttaaaatcgaagccagagaccaggcacgggaggaaccacagctgttctccacagtggtagtgaaggtaagcctcgaggatgtgaatgacaaccccccgacattcatcccacccaactatcgagttaaggtgcgagaggatctgcccgagggaacagtcatcatgtggcttgaagcacacgatccagacttggggcagtccggtcaagtgaggtatagtctccttgatcatggagagggaaactttgacgtcgataaactgtctggagctgtcagaatcgtgcagcagttggacttcgagaaaaagcaggtgtacaatcttacagtaagggcaaaggacaaaggaaaacctgtatccctgtcgagtacatgttacgtcgaagttgaagtcgtggacgttaatgaaaatctgcaccccccagtcttttcctctttcgtggaaaaagggaccgtcaaagaagatgcaccagtcgggtctctcgtcatgacggtcagcgcacacgatgaggacgccaggagggacggcgaaatacggtactccatccgcgatgggtccggcgttggtgtcttcaagatcggcgaggagacaggggtgattgaaacaagcgatcgactcgatcgtgagtctacaagccattactggctgaccgtttttgctaccgatcagggagtggttccattgtcttcatttattgagatctacattgaggtagaggatgtgaacgacaacgctccgcagacctcggaaccagtctactatcccgagataatggagaattcaccaaaagatgtgtcggttgtacagattgaggcttttgaccccgatagtagctctaacgacaaactgatgtacaaaatcaccagtgggaaccctcagggctttttttccatccatcctaagactggcctgataacaactacgtcccgtaagttagaccgagagcagcaggacgaacacatcctggaagtgacagttactgataacggatcgccaccaaaatccaccattgctagggtgatcgtaaagatccttgacgaaaatgataataaacctcagtttctacaaaaattctacaaaattaggctacctgagcgtgaaaaacctgatcgggagcggaatgccaggcgtgaaccactctaccatgttatcgcaacagataaggatgaagggcctaatgccgaaatttcctatagtatcgaagatgggaatgaacatggcaagttcttcattgaacctaagaccggtgttgtcagtagcaaaagatttagtgccgccggtgagtatgacatactaagtatcaaagccgtggataacggccggccacagaagtcttccaccaccagactgcacattgaatggatcagtaagcctaagccctctctggagccaattagctttgaggagagttttttcaccttcactgttatggagagcgaccctgttgcacacatgattggggtcatatctgtggagccaccaggtatacctctctggtttgatatcacaggtgggaactacgattcccactttgatgtcgataaagggaccggtacgattatagtggcaaagcccctggatgcagaacagaagtcgaattataatttgaccgtcgaagctaccgacggaaccacgacgattctgacccaagtgtttattaaagtcatagataccaatgaccaccgacctcagttttctacctccaaatacgaggtggtgatcccagaagatacagcacccgagacagagattcttcaaattagcgctgtagatcaagacgagaaaaataaacttatatatacgttgcaaagtagcagagaccctctgagcctgaagaagttcaggctcgaccccgctaccgggagcctatacacatctgaaaaactcgatcatgaagctgtgccagcccacctcacagtgatggtgcgtgaccaggacgtccccgtgaagcgcaattttgccagaatcgttgttaacgtctctgacactaacgaccatgccccatggtttaccgcctcctcttataagggtcgggtctatgagtctgcggctgttggatctgttgtgctgcaagttacggcactagacaaagacaaaggaaagaatgcggaggtgttgtacagcattgagagtggaacttttggcaatattggcaattcattcatgatagatccagtgctcggcagcattaaaactgccaaagagttagatcgatccaaccaggcagaatatgaccttatggtcaaggcaacggacaaagggtctcccccaatgagcgaaattacatcagtgcggattttcgtcactattgccgataacgcatcacccaagttcacctcaaaggagtactccgtagagctctcggagacagtttcaattggctcttttgttggtatggtcacggcccacagtcagtcttcagtggtatacgaaatcaaggatggaaacactggagacgctttcgatatcaatccacacagcggcaccattataactcagaaggccctcgactttgagaccttgccaatttatacacttattatccagggtacaaacatggctgggctgagcactaatactaccgtgctggtgcatctgcaagacgagaatgataatgcgccggtgttcatgcaagctgagtataccggactgatctctgaatcagcaagcattaactcagttgtgcttacagacagaaacgtgccgctggttatccgggcagccgatgctgataaagactcaaacgctcttctggtgtatcatatagtcgagcctagcgtgcacacttatttcgccattgattcgtccacaggggctatccatactgtgcttagtctcgattacgaggaaacgagcatcttccattttacggtccaggtacacgacatggggacccccagactgttcgccgaatatgctgccaatgtgacggtccacgttatcgacatcaacgactgccccccagtgtttgccaagcctttgtacgaggcctccctgctgctccccacctacaagggggtcaaagtcatcaccgtgaacgcaacggatgccgatagttcagccttctcacagctaatttatagtataaccgagggcaatatcggagagaaattcagcatggattacaaaaccggagcattgaccgtgcaaaataccacacaactcagatcccgatacgagctgactgtaagggcctccgacggccggttcgctgggctgactagcgtgaaaatcaatgtcaaagagtccaaagagagccatttgaaatttactcaagacgtatactcagctgtggtcaaggaaaacagtacggaggccgagacccttgccgttattacagccattggcaaccctattaacgagccactgttttaccacatattaaatccagacagaaggttcaagatctctcgtacatctggagtgttgtcgactaccggcaccccttttgatcgtgagcagcaggaagctttcgacgtggtagtcgaggtgaccgaagagcataaacctagtgccgtggctcatgtggtagtaaaagtaatagtggaggaccaaaatgacaacgccccagtgtttgtaaacctgccttattatgcagtggttaaagtggacacagaggtcgggcacgtcataaggtatgtcaccgctgtcgatcgagactccgggcggaatggcgaggtacattattacctgaaggagcatcacgaacatttccagattggccccctgggtgaaatttcattaaaaaaacaattcgagctggacacgctgaacaaagaatacctggtgacagtggtggctaaggacggtggcaatccagcctttagtgctgaagtgattgtgcccatcaccgtcatgaataaagctatgcccgttttcgagaaacccttctactccgctgagatagccgaatccatccaggtacactctccagtagtgcacgtgcaggcaaattcacccgagggactcaaagtgttctactctattacggacggggaccctttctcacaatttacaataaactttaatacgggggttatcaacgtgatcgcacccttagactttgaagcccatcctgcttataagctgagtatacgggccacagacagcctaaccggcgcacacgctgaggtcttcgtcgacatcatagttgacgacatcaatgataacccccctgtctttgcgcagcagtcctacgccgtgaccctgtccgaagcaagcgttatcggaactagtgtcgtgcaggtgcgggcaactgactccgattccgaacctaaccggggtatttcctatcaaatgtttgggaaccactcaaaatcccatgatcactttcacgtggattctagcacaggcctcatctctctgctaagaaccttagattatgagcagtctcgacagcatactatattcgttagggccgtcgatggagggatgcccactctcagctccgacgtgattgtgaccgtagacgtaactgatcttaatgataatcctcctctatttgaacagcaaatatacgaggcacgaatcagcgagcatgcccctcatggccactttgtaacatgtgttaaagcgtacgatgccgatagtagcgatattgacaaactccaatactcaattctatctgggaacgatcacaagcactttgtgatcgactccgctactggcattatcactctgagtaacctccacaggcatgcccttaaaccgttctatagtctgaatctgagtgtgtccgacggcgtgttccggagctccacccaggtgcatgtaacagtgatcggcggcaacctgcattcccccgccttcttacagaacgagtacgaagtggagctggccgagaatgcccctctgcataccttagtgatggaggtcaaaaccactgacggagacagtggaatctacggccacgtgacataccatatagtgaatgacttcgcgaaagacaggttctacatcaatgaacgcggacagatctttactctcgagaaactggaccgcgagactcctgctgaaaaggtcatcagcgttcgcctgatggccaaagatgctggcggtaaagtggcattttgcacagtgaatgtcatactcacagatgataacgacaacgctcctcaattcagagccactaaatatgaggtcaatataggaagctccgctgccaagggcacatccgtggtgaaggtactcgcctcagatgcagatgagggaagtaacgccgatatcacatatgcaatcgaggcagactcagagagcgttaaggagaacctagagatcaacaagttgtctggggtaataactactaaggaaagcctgattggacttgaaaatgagttcttcacattctttgttcgcgccgtggataacgggtcaccttccaaagagtcggtggttttggtttatgtgaaaatcctgccgccagagatgcagctgccaaaatttagcgaaccattttacacattcacggtgtcagaagatgttccgatcgggactgaaattgacctgattagagctgagcacagtggtacagtcttgtacagcttggttaaaggcaataccccagaaagcaaccgcgacgagagtttcgttattgatcggcagtctggaagactgaagttggagaagtccttggatcatgagaccactaagtggtaccagttttccattctggcccgttgtacacaggacgatcacgagatggtcgcttccgtcgatgtcagcatccaggtgaaagacgcaaacgataatagtccagtatttgaatcctcaccctacgaggcctttattgttgaaaatttacccggaggtagccgcgtcatccaaatcagagcgagtgatgcagattcagggactaacgggcaggtcatgtactctttggatcagagtcagagcgtggaagtgatcgaaagctttgctattaatatggagaccggctggatcaccacattgaaagagctcgatcatgagaagagagacaactatcagatcaaagtggtagcctctgaccatggggagaagattcagctgtcgagcacagcgattgtagatgtgactgtcacagatgtcaacgacagccctccaaggtttaccgcagagatctataagggcaccgtctctgaagatgatccccagggaggcgtgatcgcgattctatccaccaccgacgccgactcagaggagattaaccggcaggttacttacttcatcaccggtggcgaccccctgggacagttcgccgtggagactatccagaacgaatggaaggtctacgtgaagaaaccacttgacagagaaaagcgggacaattatcttctcactattactgccacggatggaaccttcagctccaaagctatcgtggaagtgaaagtcctggacgctaatgataattcgccagtgtgcgagaaaactctgtattccgacacaatcccagaagacgtcctgccaggaaagctgatcatgcagatttcagccaccgatgcggacattcgttctaatgccgagattacttatacattactgggttctggcgccgaaaagtttaagctgaatccagacactggagaactcaaaacctcgaccccactggacagagaggagcaggcagtctatcatctgctggttagagccacggacggcggtgggcgattttgtcaggcctctatagtgctgacgctggaagatgttaatgacaacgccccagagttcagtgccgatccttatgcaattacagttttcgagaatacggagccaggcaccctgctcactagggtgcaggccactgacgccgacgcaggtcttaacaggaagattctttatagccttatcgattctgccgacggtcagttttccatcaatgaactgtcggggatcatacagttagaaaagcccctggaccgcgagttgcaggccgtttacaccctgtccctgaaggctgttgatcagggacttcctaggcgcctgaccgccaccggtaccgttatagtgtccgttctagacatcaatgacaaccctcctgtctttgagtatagggagtatggggccactgtgagcgaagacatactcgtgggtaccgaggtcctccaggtttatgcagcgagccgtgacatcgaggctaatgctgaaatcacgtactccataatctccggaaacgaacacggaaaattcagtatcgacagtaaaacaggtgcggtcttcatcatagagaatctggactacgagagttcgcacgagtattatctaaccgtggaagccactgatggaggcactccctccctgagtgatgtcgccacagtgaatgtgaacgtgacggatattaacgacaacaccccagttttctcccaggacacatacacgacagtgatctctgaggacgctgtccttgagcaatccgtgatcaccgtgatggcagacgacgccgatggccctagtaactcccatatccactacagcatcattgacggcaaccaaggctctagcttcactattgacccagtccggggcgaggttaaagtgaccaaactattggacagggaaacgatcagtggctatactctgacagtgcaagcatccgataatggcagtccgccacgcgtcaacactaccactgtaaacattgacgtctccgatgttaacgacaacgcccccgtgttctcgcgtggtaattattcagtcattattcaggagaataaaccggtgggattttctgtgctgcagctggtggtcaccgatgaagacagctcccataatggaccacccttttttttcactattgtgacgggaaatgatgagaaagctttcgaggtgaacccacagggcgtcctactgacatcgagcgccatcaaacgcaaggagaaggatcactatttacttcaagtgaaggtcgcagataatggtaagcctcagctgtcttcactcacctatattgacatccgcgtgatcgaagaatcaatttatccgcctgccatactgcctcttgagattttcatcacaagctccggggaagagtacagcggaggagtgatcggaaaaatccacgccacggaccaagacgtatatgacaccctgacttactccctggacccccagatggacaacctgttctctgtctcctcaacaggcggcaagcttatcgcacacaagaagctggatatcgggcagtacctgctcaacgtcagcgtaacagacggcaaatttaccactgtcgccgatattaccgtccacataagacaagttactcaggaaatgctcaaccacactattgccatcaggttcgcgaatctcacacctgaggagttcgtgggcgactactggaggaatttccaaagggcgcttcggaatattctcggagtccgcaggaatgacatccaaatcgttagcctccagagctccgaaccccaccctcacctggacgtgctcctgtttgtagaaaagcctggcagcgctcaaattagcaccaaacagctgctgcacaagattaactcctccgtgacagacattgaagaaatcattggcgtccgcatcctgaacgtctttcagaaactctgcgccgggctcgactgcccgtggaagttctgtgatgaaaaagtctccgtggacgaatccgtgatgagtacccactctaccgctcgcctgtctttcgtcaccccaagacaccacagagctgccgtatgtctgtgtaaggaaggacgctgtccaccagtacatcacggttgcgaggatgacccttgcccagaaggaagcgagtgcgtctcggacccatgggaggaaaaacatacatgcgtgtgtcccagcgggcgctttggccagtgcccgggaagttctagtatgacactcactgggaattcatatgtaaagtatcggctgaccgaaaatgaaaataaactcgagatgaaattaactatgaggctgagaacatacagcacccatgccgtggtgatgtacgccagggggacggactactctattctcgagatccaccatggaaggctgcagtataaatttgattgcggcagcgggcctggtatagtcagtgtgcagtccatccaagttaatgacggacaatggcacgcagttgctttagaagtcaacggaaactacgccagactggtattggaccaagtgcacacggcaagcggcacggccccaggaacccttaaaacactcaacctggataactatgtcttcttcggcggccacatacgccagcaaggcacccgccatggccggtctccgcaagtgggcaacgggttcaggggctgcatggattccatttacctgaacgggcaggaactgccgctaaactccaagcccaggtcatatgctcacatagaggaaagcgtagatgtgtcccccggttgctttttgactgcgacagaagactgcgctagcaatccttgccaaaatggtggtgtttgtaatccctcgccagcggggggctattattgtaagtgctccgctctgtatataggcacacattgcgagatctcagttaacccctgttcatcaaaaccttgtctgtatggcggtacttgtgtcgtagacaacggaggattcgtgtgtcaatgtcgcgggctctacaccggtcagagatgccagcttagtccttactgcaaagacgagccttgtaaaaacggcggaacctgcttcgatagcttggacggagccgtatgtcagtgtgatagcgggtttcgaggggaaaggtgtcaatcagatatcgacgaatgctccggcaacccatgcctgcacggagcactatgcgaaaacactcatggcagttatcactgtaactgctcacatgaatacagaggccgacattgcgaggatgcagcccctaaccaatatgtctccacgccctggaatattgggctcgctgagggcattggtattgttgtgttcgttgctggtatctttctgctggtggtcgttttcgtgctgtgcagaaaaatgataagccgcaaaaagaagcatcaggcagaacctaaggacaagcatctaggccctgccacagctttcctccagaggccttactttgattcgaaactgaacaaaaatatttactccgacatacctccacaggtccctgtaaggccaatctcctacaccccctctatcccctctgattcccgcaataatcttgaccgtaactccttcgagggcagcgctatccccgagcaccccgagttcagcacattcaatcccgaatccgtccatgggcaccgaaaggcagttgctgtatgctccgtcgcacccaacctgccccctccgcccccaagcaacagcccgagtgactctgacagcatccagaaaccttcctgggactttgattacgatacgaaggtggttgatctggatccctgcctcagcaaaaaacccctggaggaaaaaccctcccaaccatactcagcacgcgagtctctatcagaggtgcagagcctctcttcatttcagagcgaaagttgtgacgacaacgggtaccattgggacacctcagactggatgccgtctgtaccactgccagacattcaggaattcccgaattacgaggttattgacgagcagacccccctctatagtgcagatccaaatgcgatcgataccgattactacccaggcggctacgacatcgaatcagattttcctcccccccccgaggattttcccgccgccgacgagctgcctcccctgccgcccgagtttagcaaccagttcgagagtattcacccaccgagggacatgcccgcggctggctcactgggatcctccagcaggaaccgtcagcgttttaacctgaatcagtacttacctaatttctaccccttagatatgagtgagccacagaccaagggaaccggggagaattcaacctgtcgtgaacctcatgccccataccctcctggctaccaacggcacttcgaagcccctgcagtggagagtatgccaatgtcagtatatgcttcaactgcaagctgctctgacgtaagcgcctgctgcgaggtagagtccgaggtgatgatgtctgactacgagtcgggggatgatgggcactttgaagaggttacaatccctcctctggattctcagcagcacacagaagtgtag

SEQ ID NO: 24148 - DNA, 13767 bp, synthetic construct
  misc_feature 1..13767: note = Description of Artificial Sequence: Synthetic coding sequence
  source 1..13767: mol_type = other DNA
atgggccggcacctggccctgctgctgctgctgctgctgctgttccaacactttggggatagcgatggctctcaacggcttgagcagacccctctccaatttacccacctagaatataatgtgacggttcaagaaaactccgctgcaaagacatacgttggacatccagtgaagatgggagtctacatcactcacccagcgtgggaggtgaggtataaaatagtgtcaggagatagtgagaatttgttcaaggcagaagaatacatcctgggggacttctgtttcttgcgcatcagaactaagggaggcaatactgccatccttaatagagaggtcaaggaccactacacactgatagtgaaggcattggagaagaatacgaatgtcgaggctcgcacgaaggtccgggtgcaggtgctagacactaacgacttacgtcccttgtttagtcccactagttactccgtctcactacccgagaatacagctattagaaccagcatcgccagggtaagcgctactgacgcagacatcgggactaacggggagttttattactcgttcaaagatcggacagacatgttcgccatccaccccacatcaggggtcatcgtgctgaccggacggctggattatcttgagaccaaactgtatgaaatggaaatcctggccgcggaccgcggaatgaaattgtatggttcttctggaattagctccatggccaagcttacggtccacattgaacaggccaacgaatgtgctcccgttatcacagcagtgacgttgagccctagcgaactcgacagagatccggcctatgccatcgtgacagtggacgactgcgaccagggcgcaaatggggatatcgccagcctgtccattgtggccggtgacctccttcagcagtttagaaccgttcggtcctttccgggctccaaagagtacaaggtaaaagcaatcgggggaatcgattgggatagtcatcctttcggatataacttaactttacaggctaaggataaggggactccaccccaattctcaagtgtgaaagtcatccacgtgacatccccccagttcaaggcggggcccgtcaagttcgagaaggacgtttaccgagctgaaatctccgagtttgccccaccaaatacccctgttgtgatggtcaaagcaataccagcctattctcacctccgatacgtcttcaagagcacaccaggcaaagcgaagttctctctgaactataacacgggccttataagtatcctggaacccgtgaagcgccagcaagccgctcactttgaactggaagtaactacttccgatcggaaagcctccacaaaagtgttagttaaagtcctgggtgcgaattcaaacccccctgagtttacacagactgcctacaaagcagccttcgacgagaatgttcctattgggaccaccgtgatgagcctctctgctgtggatcccgacgagggggaaaatggctacgtaacctatagcatcgcgaaccttaaccacgtgccattcgcaattgatcactttacaggagcggtgtcaacctcagaaaaccttgactatgaactgatgccaagggtatataccctaagaattcgcgctagcgattggggcctgccctacaggagagaagtagaggtgctcgccactataactcttaataatctgaatgacaacacccccctgtttgagaagattaattgtgaaggcactataccgagggatttgggagtgggagagcagatcactaccgtgtctgccattgatgccgacgagctccaattggtgcagtatcagattgaagccggtaatgagctggatttttttagtctcaacccgaatagcggggtgctgtctctgaaaagatctcttatggatggattgggagcaaaggtctcatttcactccttgaggatcactgctaccgacggggagaattttgctaccccgctgtatataaacattacagttgccgccagccataaactggtcaacctccagtgcgaagagactggagtcgctaagatgctggctgagaagctgctccaggccaacaagttgcacaaccagggtgaggtggaggacatcttcttcgattcccattcagtgaatgcacacattccacagtttcgttctactcttcctacgggcatccaggtgaaggagaaccagcctgtgggcagcagcgtcatattcatgaattcaactgatctggatacaggctttaacgggaagctggtgtacgcggtttccggggggaacgaggactcttgttttatgatcgatatggagacggggatgctaaagatcctttcaccactggaccgagagactaccgacaaatacaccttaaacatcaccgtgtacgatcttggtataccccaaaaggctgcgtggcgactcctgcacgtcgtcgtcgttgacgccaatgataatccaccagaatttctgcaagaaagttactttgtggaggtgagtgaagacaaggaggttcacagtgagataatacaagtggaagcaaccgacaaggatctagggccgaacggtcacgtgacatattcgatagtgaccgacaccgatacttttagtattgactcagtgactggtgtggtgaatattgcaaggcctctggatcgtgagctgcaacacgagcattccctcaaaatcgaagctagagatcaggctagggaggaaccccagctattcagcactgtcgtggtcaaagtgtctctggaagacgttaacgataaccctccaaccttcatcccccccaattatagagtcaaagtgagagaagacctccccgaaggaacggtgatcatgtggctcgaagcacatgacccggatctggggcaaagtggccaggtgagatacagcctattagaccacggagaggggaactttgatgtggacaagctgagcggggcagtgagaatagtgcaacagctggacttcgaaaagaaacaggtctacaatctcaccgttagggccaaggacaaaggtaaacctgtttctctctctagtacttgctacgtcgaagtggaggtggtcgatgtaaatgaaaaccttcatcctccagtgttcagtagctttgtggaaaaaggcaccgtaaaggaagatgccccagttgggtcattggttatgaccgtgtcggctcatgatgaggacgctcggagagacggggagatccgctactctatcagggacgggagtggggtcggtgtattcaagatcggtgaagaaactggtgtgatcgagacatctgaccgactggaccgcgaaagcacttcacattattggctgaccgtgttcgctacagatcagggggtagtcccactgtctagcttcatcgagatctacatcgaagtggaagatgtgaatgacaacgctccgcagacatcagaaccagtgtattatcccgagattatggaaaacagccccaaagatgtgtctgtggtccaaattgaagctttcgacccagactctagttccaacgataagttgatgtataagattacctctgggaatccacagggattcttttccattcacccaaagacgggtttgattacaacgaccagccgcaagctagaccgcgagcagcaggacgagcacatactggaggtgactgtcaccgacaatggcagtccacccaagagtactatcgctcgggtgattgtaaagattctggatgagaatgataataaaccacagtttttgcaaaaattttataaaatccgtctgcccgaacgtgagaagccagatagagaacgcaacgcgcggagagaaccactgtatcacgtaattgcgaccgacaaagatgagggacccaacgctgagatctcttacagcatcgaggacgggaacgagcatgggaagtttttcattgagccaaaaaccggggttgtgtcgtcaaaacggtttagtgcagcaggagaatatgatatcctcagcattaaggcagtggataacggacggccccaaaaaagctctacaactagactccatatcgagtggattagcaagcctaaaccaagcttggagccaatctcgtttgaggaatcgtttttcacgttcactgtgatggagtcagaccctgtggctcacatgattggcgtcatctccgtcgagccaccaggcatccccttatggtttgacatcactggcggcaattacgactcacattttgacgtcgacaaggggacaggaaccataatcgtagctaaacccttggatgcagaacaaaaatccaattacaacctcacggtggaggccaccgatgggacgaccacgattctgacccaggtgtttatcaaggtcatcgataccaatgatcacaggccccagttttccacatccaagtacgaggtcgtgattccggaagatacagcacccgaaactgagatccttcagatctctgcagtcgaccaggacgaaaagaacaagcttatttatacacttcagagctccagagacccattgtcattgaagaaattcagattagatcccgctactggtagtctttatactagcgaaaagttggaccacgaggccgttcatcaacatacactgaccgtaatggtgcgcgatcaggacgttcctgtcaaaagaaattttgccaggatcgttgtgaatgtttcagacaccaatgaccacgcaccctggtttaccgcctccagttacaaaggtagagtgtacgaaagtgcggccgtgggatccgtagtccttcaggtcactgcccttgataaggacaagggaaagaacgcagaagtgctgtattcaatagagtcaggtaatatcggcaattcattcatgatcgatccagtgctgggatccatcaaaaccgctaaagagctggacaggagcaaccaggccgaatatgacctgatggtgaaggccactgataagggttcacccccaatgagcgagataacatccgtgaggatatttgtaaccatcgcagacaatgcaagtccgaagttcacctccaaggaatacagtgtcgagctttcagaaacagtttccattggctcgtttgttggtatggtgacggctcactctcagagtagtgtggtttatgagattaaggacggaaacactggagatgccttcgacattaatccccattctggaacgattataacccaaaaggcactggactttgagacgctcccaatttatactctcatcattcaagggaccaacatggccggactatccactaataccacagttcttgttcacctccaggacgagaacgataacgcccctgtatttatgcaggctgagtatacaggcctgatctcagaaagtgccagtatcaatagtgtggtcttgaccgatagaaatgtgccacttgtgattcgggcagctgacgctgacaaagattcgaacgctctgcttgtctaccacatcgtggagccgtctgtgcatacatacttcgccattgactcgtctaccggcgcaatccacaccgtcctgagcctggactatgaagagacatctatctttcatttcaccgtgcaggtgcacgatatgggcacacccagactgtttgcagagtatgccgcaaacgttactgtgcacgtgattgatatcaacgactgcccccctgtgttcgcgaaaccattatacgaggcctcgctccttctccccacttacaagggagttaaggtcataacagtcaacgcaacagatgcagactcaagcgccttttcccagctcatctactccattactgagggtaacataggggagaagttttcaatggattacaaaacgggtgcccttaccgtgcagaataccacccaactgaggtccagatacgaattaaccgttcgggccagcgacggaagattcgcgggccttacaagcgttaagattaatgtaaaagaaagcaaggaatctcacttaaaattcacacaagacgtgtattccgccgtggtcaaggagaactctaccgaggccgagacgctggcggtgatcactgccatcggtaaccctataaatgagccactcttttatcatatactgaaccctgatcgccggtttaaaatttcaaggacttcgggtgttctgtccactaccggcacaccgttcgaccgtgagcagcaagaggcttttgatgttgtcgtcgaggtcaccgaggagcataaaccgtctgcagtcgcccatgttgtagtgaaggtgatcgttgaagatcagaacgacaatgctcccgtattcgtcaaccttccttactatgcggtcgtgaaggtggacacggaggtcgggcatgttatcagatatgtaaccgccgtggatagagatagcggacggaatggtgaagtccactactatttgaaagaacatcatgagcattttcagattggaccacttggagagattagtctcaaaaaacagttcgaactggacacactcaacaaagagtacctcgtcactgtcgttgccaaagacgggggtaatccagctttttctgcggaagtgatagtaccaatcacggtcatgaacaaggcaatgccagtgttcgaaaaaccgttttacagcgccgagattgccgagagtatccaggttcacagccctgtggtgcacgtgcaggccaactctccagagggactgaaggtgttttactccattactgacggcgatccattcagtcagttcaccatcaatttcaacacgggggttatcaacgttattgcgcctctggacttcgaggcacatcccgcctacaagctatcaattagggcaaccgactccttgactggggcccacgctgaagtgttcgtcgacataattgttgacgatatcaacgacaacccgcccgttttcgctcagcaatcctatgccgtcacacttagcgaggcatcagtgatcgggacatcagtcgtgcaggtgagggctacagattctgactccgagcccaacagagggatatcataccaaatgtttgggaatcatagcaagtcacacgaccacttccatgtcgattcgtctactggactgatatcgttattgcgtaccctggattacgagcagtccagacagcatactatctttgtccgggctgtcgatggcggaatgcccaccctaagttccgatgttattgtcaccgtcgatgtgacagatctgaacgacaatccacccctatttgaacagcagatctatgaagcgcgcattagtgagcatgcaccccatggtcatttcgtcacctgtgtgaaggcttatgatgcagatagctctgacatcgataaactgcagtacagcattctttctggaaatgatcacaagcattttgtgatcgatagtgcaactggtatcatcaccctgtctaacctacatcgccacgccctgaagcccttctattccctcaacctgagcgtcagcgacggagtgttccggtcatctactcaggtccatgtgactgtgatcggaggtaatctgcacagccccgcttttctgcaaaatgaatatgaggtggaattggccgaaaacgcccccctccataccctggtcatggaagtgaaaacgactgatggcgattccggaatctatgggcacgtcacctaccacatagtaaacgactttgctaaagacaggttctacatcaatgaacgtggtcagatatttacactcgaaaagctcgatcgggaaacccctgccgagaaagtaatcagcgtccgtctcatggcaaaggatgccggaggaaaagttgctttttgcactgttaatgtgatactgacggatgataatgataatgccccgcagtttcgcgctactaagtacgaagtcaacattgggtctagtgcagctaaaggtacgtcggtagtgaaggtgttggcaagcgacgccgatgagggaagcaacgccgacatcacatacgcaattgaggcggattcagaatctgtgaaggagaacctagagatcaataaactctcaggtgtcattaccaccaaggaatctctaatagggctggagaatgaatttttcaccttctttgttcgggctgtcgacaatggcagcccttctaaagagtcagtcgtgctggtgtacgttaaaattctccccccggaaatgcaactgcctaaatttagtgaacctttctacacatttacagtgtccgaagatgtccctatcggcacggagatcgaccttattagagctgaacactccggcacggtcttgtattctcttgtgaaaggaaatacacctgagtctaatagggatgaaagttttgtgatcgatcgccagtctgggaggctgaagctggaaaaatcgttggaccatgagacaaccaaatggtatcagttcagtatactcgcacggtgtacacaggacgaccacgaaatggtcgcatcagtggacgtgtcaattcaggttaaagatgccaatgacaattcgccagtctttgaatcatcaccttatgaggcgttcattgttgaaaatctgcccggtggctcccgtgtcatccagatccgcgcgtccgacgctgattccggcaccaatggacaagtgatgtacagcttagaccagagtcagagcgtagaggtcatcgaaagtttcgcaataaacatggagacgggttggattacaacactcaaggagctcgaccacgaaaagcgagacaattaccagattaaggtggtggcatcggatcacggagagaagatccagctgagctctacagcaatcgtcgatgtgactgtgactgatgttaacgactcaccgcctcgattcaccgccgagatctataaaggcacagtgtccgaagacgacccacaggggggcgtgatcgctattttgagcactactgatgcggattccgaggagattaatcggcaggtgacatacttcatcaccggcggagatccgctcggacaatttgccgtggaaacaatccagaatgagtggaaggtgtatgtgaaaaaacccctggatagagagaagcgagacaattacctcctcaccattactgccacggatggaaccttttccagtaaggctatcgtggaggtgaaagtgcttgatgctaacgacaatagccccgtctgtgagaaaaccctgtatagtgacaccattcccgaggacgtccttcccggcaaactgattatgcagatttcagctacagatgcagacattcgttccaatgccgagattacttataccctgctagggtccggggccgaaaagttcaagctgaaccccgatacgggagaattaaagacttcaaccccgctggacagagaggagcaggctgtctatcacctcctggtgagggccacagacggtggaggtagattttgtcaggcgagtatagtgctcaccttggaggacgtgaacgacaacgcacctgagttttccgctgacccctacgcaataaccgtgtttgagaacaccgagccaggaaccctgctaacaagagtacaggctacagatgcagatgcagggctgaatcgaaagatcctctattccctgattgattctgccgacggtcaattttccatcaatgagctatcagggataatccagctagagaagcctcttgatcgagaattgcaagctgtgtatactctcagtctcaaagcagttgaccaaggccttcctcgaaggctgacagctactgggaccgtaatcgtctctgtgctagacattaacgataacccccctgtgttcgaatatcgtgaatatggcgctactgtcagtgaggacatcctggtaggaaccgaagtcctgcaggtgtacgctgcttctcgggacattgaggcgaacgcggaaatcacatactccattatttccggaaacgaacacggaaagttctctatcgatagtaaaaccggggcggttttcattatcgaaaacttggactatgagtcaagccatgaatattatctcacagttgaggctaccgacgggggcactccctcgttgtcagacgttgctacagtgaacgtcaatgtgaccgatatcaatgacaacaccccggtgttttctcaggatacctacacgaccgtgatctcggaggacgctgtgctagagcagagcgtcatcaccgtcatggcagacgatgcagatgggccctccaactcccatattcactatagtatcattgatggcaaccagggctcctccttcacgatcgacccagtgcgcggcgaggtcaaggttactaagttgctggatcgtgaaaccattagcggctacacactcacagtgcaggcttcagacaatggatccccccccagggtgaatacgactacagtcaacatcgatgtgtcggatgtaaacgacaacgctccagtttttagcagggggaattactctgtgattattcaggaaaataagcccgtagggttcagcgtgctccagctggtagtgaccgacgaggattctagccacaacggaccaccattcttctttaccattgttaccggcaacgacgagaaggcttttgaggtgaatccacaaggggtgctgcttactagttccgcaattaaaaggaaagaaaaggatcattacctgctccaggttaaagtggctgacaacggtaaaccacagttgagctccttgacttatattgatatcagggtaattgaggaatcgatctacccacctgctattctgcctcttgaaatcttcatcacctcctccggagaggaatatagcggaggcgttatcggcaagattcatgcaaccgatcaggatgtgtatgacactttaacatactctctggacccgcaaatggacaacctgttttctgtgagctccaccggaggcaagctgatcgcccacaagaagctagatatcgggcagtatctgctaaatgtatccgtgactgacgggaaatttaccacagtggcagacatcacggtacacatccgccaggtgactcaggaaatgctgaatcacacaatcgccatacggttcgccaaccttacgccagaggaatttgtgggcgactattggaggaatttccagagagccctgagaaacattctgggcgtgcgacgtaacgacatccaaattgtgagtctgcagtcctccgagccccacccacacctggacgtgcttctgtttgtcgagaagcccggcagtgcacaaatctccacaaagcagcttcttcacaaaatcaactccagcgttaccgacattgaggaaatcattggcgtacggatcctaaatgtattccaaaaactgtgcgccggattggattgtccatggaagttttgcgacgaaaaggtgtctgtcgatgaatctgtgatgtccacccatagcacagctcgccttagcttcgtgactccgaggcaccaccgagcagctgtctgtctctgtaaggagggtcgctgccccccagtgcaccacggctgtgaagatgatccatgtccggaggggtccgagtgcgtgtcggacccatgggaggaaaagcacacatgcgtctgcccctctggtcggtttgggcagtgtccgggaagctcatctatgaccctaacagggaactcctacgtgaaataccgcctgacggaaaacgaaaataaactcgagatgaagcttacaatgcgcttgcgcacatattccacacacgcagttgtgatgtacgctcgaggaaccgactattccatcctagaaattcatcacggacgcctccagtataagttcgactgcgggtccggacccggtatcgtgagtgtccagtccatccaggttaatgatggacagtggcacgctgtggccttggaagtgaacggtaattacgccagactagtgctggatcaggtgcacacagcgtctgggacggctccaggcacactcaaaacactgaacttagacaattacgtgttctttggaggtcacattcgacagcagggaacccgccacggccggtcaccacaagtggggaatggcttcagggggtgtatggacagcatctatttgaacggccaagagctgccactgaatagcaaaccaagatcctacgcccacattgaggaatctgttgacgtgtcccccggttgctttttgactgcaacagaagactgcgctagtaacccttgccaaaacggaggcgtgtgcaacccctctccggccggcggttactattgtaagtgttccgctctgtatataggtacacactgtgagatttctgtgaatccatgtagcagcaaaccgtgtctctacggtggcacgtgcgtcgtggacaatggggggtttgtatgtcagtgcagagggctttacaccggccagaggtgtcagctctctccctactgtaaggatgagccttgcaaaaacggcggtacatgctttgatagtttggatggagcggtctgtcagtgcgatagcggattcaggggagagcggtgccaaagtgacattgacgagtgtagtggaaatccttgccttcacggagccctctgtgaaaatacacacggttcgtatcattgtaattgcagccacgagtatcgcggtcgccattgcgaagacgcagctccaaaccagtacgtatcaaccccttggaacattggcctggcggaaggcatcggcatagtagtcttcgtggccggcatcttcctgctcgtggttgttttcgtgttatgtcgcaaaatgataagccgaaagaaaaagcaccaggctgaacctaaagataagcatctgggcccagccacggctttcctgcaacgcccatactttgactcaaaacttaacaaaaacatctacagcgacatcccgcctcaggtgcctgtgcgtccaattagctataccccctctatcccgtcagacagccggaataatctggatcgaaattccttcgaaggctctgctatcccagaacatccagaatttagcacttttaaccccgagtccgtgcacggccaccgaaaagctgtggctgtgtgcagcgtcgcgccaaacctaccgcctcctcccccgagcaattcaccttcagatagtgattctattcagaagccttcttgggacttcgattacgataccaaagtagtcgacctagatccctgtctgtccaaaaagccgctggaagagaagcctagccaaccttacagtgcaagggagagcttgtccgaagtccaaagcctgagctcattccaatcagaaagctgcgacgacaatgggtatcactgggataccagtgactggatgccatccgtgccactccccgacatccaggagtttcctaattatgaggtcatcgacgagcaaacccccctctattcagccgaccccaacgccatcgatacagattactaccctggaggttacgacatcgagtccgacttcccaccaccacctgaagatttccccgctgccgacgaactcccaccactccctccagaattctccaatcaatttgaatctattcacccaccaagggacatgccagctgccgggagcctgggcagttctagcagaaaccgccagcgcttcaatctcaaccagtatctgcccaatttttaccctctagatatgtccgagccccagacaaaaggaactggagagaactcaacctgccgcgaacctcacgctccgtatccgccagggtaccaacgccactttgaggcaccggctgtagagagcatgccaatgtctgtgtatgccagcactgcaagctgtagcgacgtgtcagcttgctgtgaagtcgaatccgaagtcatgatgtcggactacgagagtggagatgacggccatttcgaggaggtgactatcccccccctcgacagtcagcagcatacggaagtctag

SEQ ID NO: 24149 - DNA, 1467 bp, synthetic construct
  misc_feature 1..1467: note = Description of Artificial Sequence: Synthetic coding sequence
  source 1..1467: mol_type = other DNA
atgggccggcacctggccctgctgctgctgctgctgctgctgttccaacatttcggcgacagtgacggatcccaaagactagaacagacccccctccagtttacacacctggagtataatgttactgtgcaggagaattccgcagccaagacctacgtcggacatcccgtgaagatgggtgtttacattacacacccagcctgggaagtaagatataagattgtgagcggagatagcgagaatctgttcaaggcagaagagtatatactgggcgacttttgcttcttaagaatccgaacaaagggaggtaacacagcaatcctgaatcgggaggtaaaggatcattacactctgatcgtcaaggccctagaaaaaaatactaacgtcgaagcacgcaccaaggttcgcgtgcaggtactggatactaatgacctaagacccctgttttctcccacatcttattcagtgtccctccccgaaaatacagccatacgcacgtctattgctcgggtgagtgcaacggatgccgacatagggaccaatggcgagttctattatagttttaaggatcgtaccgacatgttcgccattcaccctacctcaggggtaattgtgctgaccgggcgtctggactacctcgaaactaagttgtacgagatggagatcctggccgccgatcgggggatgaagctctatgggagcagtggaatctccagtatggcaaaactgaccgtgcatatcgaacaagccaatgaatgcgccccagtgattaccgccgtaactctcagtccttcagaactggatagggatcccgcctacgctattgtaaccgtggacgattgtgatcagggcgctaacggggatattgccagtctttccatcgtggcaggagatctcctgcagcagttcagaactgtgcgtagttttcctgggagcaaagaatacaaggtgaaggctatcggggggatcgactgggattcacaccctttcggatacaatttaaccctccaggctaaagataagggaaccccgcctcagtttagctcagtgaaagtgatccacgtgacaagccctcagtttaaggctgggcccgtaaaatttgagaaagacgtctatcgagcagaaattagcgaattcgccccccccaacactcctgtggtaatggttaaggccatccctgcctactctcacctccgttacgtgttcaaaagtacaccaggcaaagcaaaattctccctgaactacaacactggactgataagcatcctcgaacccgtcaagaggcagcaggccgcccacttcgagctagaggttacgaccagtgacaggaaggcgtctaccaaggttctggtaaaggtcttgggtgctaactccaatccgccggaatttacccaaacagcctataaagctgctttcgatgagaatgtcccaatcggtacgaccgttatgtccctgtctgccgtttag

SEQ ID NO: 24150 - DNA, 399 bp, synthetic construct
  misc_feature 1..399: note = Description of Artificial Sequence: Synthetic coding sequence
  source 1..399: mol_type = other DNA
atgtgcgacgccttcgtgggcacctggaagctggtgagcagcgagaattttgatgactacatgaaagaagtgggggtgggctttgcaactcgaaaggtggccggaatggccaaacccaatatgataatttccgtgaacggcgacgtcattacgatcaaatccgagtccacttttaagaataccgagatctcatttattctgggtcaagagttcgacgaagtaacagcagacgacagaaaagtgaagagtacaattacattggacgggggagtcctggtgcacgtgcagaagtgggacgggaaatctactaccatcaaaaggaaaagagaggatgacaaactggttgtcgagtgtgtcatgaaaggcgtgacctccacccgcgtgtacgagagagcctag

SEQ ID NO: 24151 - DNA, 7536 bp, synthetic construct
  misc_feature 1..7536: note = Description of Artificial Sequence: Synthetic coding sequence
  source 1..7536: mol_type = other DNA
atggaggaggtggtgatcgccggcatgagcggcaagctgcccgagagtgaaaacttgcaggagttctgggacaacctcattggcggagtcgacatggtgacagacgacgatcgcagatggaaggcgggcctctacggactccctaggcggtcggggaaactcaaggacctgtcccggttcgacgcctcattcttcggcgtccacccaaaacaggcacacacgatggatcctcaacttagactgttgctggaggtgacatatgaggccatcgtggacgggggaatcaaccccgactctctgcgcgggacccacacaggagtgtgggtgggggtgtccggctctgagacttccgaagccctgtcacgcgatcctgaaacattggtgggatacagcatggtcgggtgtcagcgagcgatgatggctaatagactgagcttcttctttgattttcgtggaccgtcaatcgcactggataccgcttgtagcagttcactgatggccctgcagaacgcctaccaggcgattcattcgggtcagtgtcccgcagccatcgtgggcgggatcaatgtactcctgaagcctaacacgagtgtccaattcctgcgcctgggtatgttatcaccggagggtacatgtaaagctttcgacacagctgggaacgggtattgcagaagcgaaggggtcgtggcagtgctgctgactaagaagagcctggcgcgtcgcgtatacgccacaatccttaatgccgggactaacaccgatgggtttaaggaacagggggtgactttcccatctggcgatattcaggaacagctgattcgtagtctgtatcagtccgccggtgtcgcgccagaatccttcgagtacatcgaagcacacggtactgggaccaaggttggcgatccacaggaactcaatggaataaccagagcgctgtgcgccactaggcaggaacctctgctcattggcagcacgaaaagcaacatggggcaccccgagcccgcctcaggcttagcagccctcgccaaagtgttactgagtttagagcacggcctctgggcaccaaacctgcactttcacagtcctaaccctgagattccggctctgcttgacggtaggcttcaggtcgtggaccaacctctccctgttcgggggggaaatgttggtattaatagcttcgggtttggcgggtcaaacgtccatataatccttaggccaaatacccagcctccacccgccccagctccgcacgccacattgcccaggcttctcagggcatccggacgcactcctgaggctgttcagaaattactcgaacaggggcttcggcacagccaggatctggcttttctgtccatgctgaacgatatcgcagctgtgcctgcaacagccatgccatttcgcggctatgccgtgctcgggggtgagcgcgggggacccgaagtgcagcaggtcccggctggagagcgtcctctctggttcatctgttcaggtatgggcacccaatggcggggaatggggctgtctctcatgagacttgatcggtttcgggatagcattcttagaagtgacgaagccgtgaaaccctttggcctgaaggtaagtcagctcctgttatccactgacgagtccacatttgacgacattgttcatagctttgtaagcctcacagccatccagatcggtcttatagacctgctctcctgtatgggcctccggcccgacggcattgtgggacattccttaggagaggtggcctgcggctatgccgacggctgtctcagccaggaggaagctgtgctggcagcctattggcgtgggcagtgcatcaaggaagctcacctgccccccggggccatggcagcagtggggctgtcctgggaggagtgcaagcagcggtgtccaccaggggtcgtcccagcctgtcacaactctaaagacacagtgacgatttctgggccacaagcccctgtcttcgagttcgtggagcagctaaggaaggagggggtgttcgccaaagaagtgcggacaggcgggatggccttccactcttatttcatggaagccatcgctcctcctctgcttcaggagctgaaaaaagtcatcagagaaccaaagccccgctctgcacggtggttgtctacatccatccccgaggcacaatggcacagctccttggccaggacgagctctgctgaatacaatgtgaacaacctagtaagtcctgtgctgttccaggaggctctttggcacgtgcccgaacacgccgtggtccttgaaatcgccccccatgctcttctgcaagcagtattgaaacgcggactgaaaccatcctgcacaatcattccactcatgaaaaaagaccaccgagataacctggaattcttcctggctggcataggacgattgcacctatcaggcattgatgcaaacccaaacgctctgttcccacccgtagaatttcctgcacctaggggcacgcctctgatttccccactgatcaagtgggatcattctctggcgtgggacgtccccgccgccgaagattttccaaacggtagcgggtcgccgtccgcggccatttacaacatcgacacctcgtccgagtcacccgaccactatttggtggatcatacactggatggacgcgtacttttcccagctactggatacctgagtatcgtttggaaaactctcgcaagggctctcggacttggcgtggagcagttgcccgtggtatttgaggacgtagtcttacaccaggccaccatactgccaaaaactgggacagtttcactcgaggtgaggctgctcgaagcctcacgggctttcgaagtgtccgagaacggtaacctcgtggtttccggaaaggtgtatcagtgggatgaccctgatcctaggttattcgaccacccagagtcgcccacgccgaaccctaccgagcccctcttcctggcccaagcagaggtgtacaaggaactccgactgcggggctatgactacggcccccattttcagggcatactcgaggcttcgctggaaggcgattctggcaggctgctttggaaggataattgggtgtctttcatggacactatgctgcagatgtcgattttagggagcgctaaacacggcctgtacctgcccacaagggtcactgccatccacatagaccctgcaacacatcggcagaagttgtatactctacaggacaaggcgcaggtggcagatgtggtggtttctagatggctgagagtcaccgtagccggtggcgtccacataagcggactgcatacagagtccgcgcctaggcgccaacaagagcagcaggtccctatcctggaaaaattttgctttaccccccacaccgaagagggttgtctgtccgagcgagcggcactgcaagaagagctccagctgtgtaagggcctggtgcaggccctccagacaaaagtgacacagcagggtcttaagatggtggttccaggcctcgatggtgcccagattccgcgggatcccagtcaacaggagctccccagactgctgagtgccgcttgcagactgcagctgaatggtaacctgcagctagagctggcacaggtactggcccaggagcggccaaaactccctgaggatccgcttctttctggtctcctggatagcccagccctgaaggcttgtcttgacactgccgtcgaaaacatgccaagtcttaagatgaaagtagttgaagtgctggctggacatggacatctgtatagccgaatcccaggcctgctgtctccacatcctctgcttcaactgtcttacaccgctactgatcggcatccgcaggccctagaggcagcacaagccgaactgcaacagcacgacgtggcacagggacagtgggaccccgccgatccagcaccatctgcactgggatctgcagacttgctggtttgtaattgcgcagtcgctgccttgggcgaccctgccagtgccctgtccaacatggtcgctgcccttcgggagggggggttccttctcctgcacacccttctgagggggcatcccctgggggacatcgtggcatttctgacttccacagaaccacagtacggtcagggcatcttgtcacaggatgcgtgggaatccctgttcagtcgggtctcacttcggctcgtgggcctgaagaagtccttctatggttccaccctgttcctgtgccgcaggccaacaccccaggactccccaatatttcttccggtggacgacactagcttccgctgggtggagtccctgaagggaatactcgcggatgaggactccagccggcccgtgtggctgaaggcaatcaactgtgccacgtccggagttgtgggactggtcaattgccttcgacgagaaccggggggaaataggctgagatgtgttctgctgtcgaatttgagctctacgtcccatgtcccggaagtggacccagggtctgctgaactgcagaaagtccttcagggcgatctagttatgaacgtatacagagatggagcctggggggctttcagacattttctgctggaggaggacaagcctgaagaaccaaccgcccacgcctttgtctccactttaaccagaggggaccttagttcaatccggtgggtgtgctcatctctgaggcacgcccagcccacgtgccccggagcgcagttatgtactgtatattatgcatctcttaacttcagggatattatgctcgccaccggaaaactgtcccctgacgctattcccggtaagtggacaagccaggacagcttgttaggaatggagttcagcggaagggacgcatctggcaagcgcgtgatgggccttgttccagctaaagggcttgccaccagcgttctcctcagtcccgattttctgtgggatgtgccatcgaattggactctagaggaggctgctagcgtgcccgttgtgtacagcacggcttactatgccttggtagtgcgggggagagttagacccggtgaaaccttacttatccacagcgggtcggggggtgtggggcaggccgccatcgcgatcgcgctctcccttggatgccgcgtgttcacgacggtaggcagtgccgagaagcgggcctatctacaggcgcgttttccccagttggattccacttctttcgcgaactcacgagacacttcatttgagcaacatgtcttatggcataccggtggaaaaggagtggatttggtgctgaattccctagcggaagagaagctgcaagcctctgtgcggtgtcttgcgacacacggaaggttcttggagatagggaaatttgatttgagccagaatcaccctctcgggatggcaattttccttaaaaatgtgactttccacggcgtactccttgatgccttcttcaacgaaagcagcgccgactggagggaggtttgggcattagtgcaggctggcattcgtgacggggttgttaggccccttaagtgcaccgttttccatggcgcccaagtagaggatgcatttcgctatatggctcaggggaagcatattggaaaagtagtggtgcaagtgctggcagaagagccggaagctgtacttaaaggagcaaagccaaaactgatgtctgccatctccaaaactttttgcccagcccacaagagctacatcatcgccggcgggctagggggtttcggactcgagctggcacagtggctcatccaacggggggtgcagaagcttgttctgacctcacgttccggaatacggaccgggtatcaagccaaacaggtcaggcgttggcgacgccagggcgtccaagtacaagtgtctacatccaacatttcaagtcttgagggtgcacgggggctcatcgcggaagctgcacagttaggtccagtcggcggcgtcttcaaccttgcagtcgttctgagggatggactcctggagaatcagactcctgaattctttcaggatgtgtgcaaaccaaagtattctggtacgctgaatctggaccgcgtaaccagagaagcatgtcccgagctggactactttgtggttttctcatccgtgtcttgtggtcgcggaaacgcaggacagagtaactacggtttcgcaaacagcgccatggaaaggatctgtgagaagcggcgccatgagggactgcctggcctggcagtgcaatggggtgccataggtgacgttggaatcctcgtcgagaccatgtctacaaacgacactatcgtcagcggcactcttcctcagcgcatggctagctgtctggaagtgctggatttgtttctcaaccagccccatatggtgctgagtagttttgttttggcagagaaagctgccgcgtatcgcgatagggactcacagcgggacttagtagaggccgttgcacacatcttgggcataagggaccttgcggcagtgaacctcgactctagcctggctgacctggggttggattctctcatgagtgtggaggttcgccagaccctggagcgggagctgaaccttgtgcttagcgtccgagaagtgaggcagcttaccctgaggaagctgcaggagttgagctctaaagctgatgaagcaagtgaactcgcctgtccaactcctaaggaagacggtcttgcacagcagcaaacgcagcttaatttacggtctttactggtgaaccccgagggccctacgctcatgcgtctaaattccgtgcagagtagtgaacgccctctgttcctcgtacatcccattgagggttctaccacggtctttcattcacttgcctctcgactgtcaatcccaacttacggtcttcagtgcacacgtgcggcccctctggattctatccacagcctagcagcgtattacattgattgcattaggcaggtgcaaccagagggcccttaccgcgttgcgggatactcatacggggcctgcgttgcttttgaaatgtgctcacagctgcaggcccaacagagtcccgcccctacacataattcgctgtttctgttcgacgggagtcctacttacgtattggcatatacgcagtcctaccgcgccaagttaaccccgggctgcgaggccgaggctgagaccgaagcaatttgtttcttcgtccaacagtttacggacatggaacataacagggtcttggaagctctcctacccctgaaaggccttgaggagagagtggccgccgcggtggacctgatcatcaagagccaccaagggctcgaccggcaggagctgtcttttgcagcaaggagcttttattacaaattacgagcagctgaacaatatacccccaaggccaagtaccacggaaacgtgatgctgctgcgggccaagacgggaggcgcctatggggaagacctgggagccgactacaacctgagtcaggtctgcgacgggaaggtctcagtgcacgtgatagaaggagatcaccggaccctcttagagggatcgggcctcgaatctataatcagcatcattcacagctccttggcagagccaagagtgagcgtgcgtgagggctag

SEQ ID NO: 24152 - DNA, 2502 bp, synthetic construct
  misc_feature 1..2502: note = Description of Artificial Sequence: Synthetic coding sequence
  source 1..2502: mol_type = other DNA
atgagcatcctgggcagcgccaagcacggcctgtacctgcccaccagagtgacagcaatccacattgatccagccacccatagacagaagctttacactctgcaggacaaagcccaggtggcggatgtggtcgtgtcaagatggcttcgggttaccgtggcaggcggagtgcacatttccgggttgcacaccgagtcagccccgcgaaggcaacaggagcaacaagtcccgatactggaaaaattctgtttcacccctcatacagaggaggggtgtctgtcggaacgcgctgcccttcaggaggagttgcagctgtgcaaaggcttggtccaggccctgcagaccaaggtaacgcagcagggcttaaaaatggtcgttcccggattagacggggcccagatccctcgcgacccatctcaacaggagctcccacgtctactgtccgcagcttgtaggcttcagctgaatgggaacttgcagttagagctggcccaggtgcttgctcaggagaggccaaaactcccagaagatccgttgctcagtggactgctcgattctcccgcgctgaaagcttgtcttgacactgcagtcgagaacatgccaagcctgaaaatgaaggttgtcgaggtgctggctgggcacggtcacctatattccagaatccccggactgttgagcccccaccccctgctccagctatcctatactgctacagaccgacatccccaggccttagaagcggctcaagccgaactccagcaacatgatgtggcacaggggcaatgggatcctgccgaccctgcacccagtgcgctgggctccgcagatctgctcgtgtgtaactgtgccgtggctgcgctgggcgatccagcctccgcactgtccaatatggtcgccgccctgagggaaggaggatttcttctgttacacacactcctccgcggccacccgctcggcgatatcgtggcttttctcacatctaccgaaccacagtatggtcaggggattctgtcccaggatgcctgggagtcactattctctagggtatctttgcgcttagttgggcttaaaaagagcttctacggatcgacgctctttctgtgccggcgaccgaccccccaagactcacctattttcctgccagtggatgatacaagctttcggtgggtagagtcgctcaaaggaattctggcagatgaggacagtagtcgccctgtgtggctgaaggcaattaactgtgctacctcaggtgtggtagggctggttaactgtcttcgacgagagcccggcgggaatcgcctgaggtgtgtcctgttgtccaaccttagcagcacgtcccacgttccggaagtcgacccggggtcggccgagctccagaaggtcctccagggggacctcgtcatgaatgtgtatagagatggcgcatggggggcattccggcactttctcctggaggaggataagcccgaggagcccactgcacacgccttcgtctcaaccctcaccagaggagatctgtcgtcaattagatgggtgtgcagttccctgagacacgcccagcctacctgcccaggggcacagttgtgtacagtctactatgcctccctgaattttcgggacattatgctcgccaccgggaaacttagtcccgacgccatacctgggaaatggacaagccaggatagtctgttgggaatggagtttagcggccgcgatgctagcgggaagcgcgtgatgggcttggtgccggcaaagggactggctactagcgttctcttgtctcctgactttttgtgggacgtgccaagcaattggacccttgaagaggccgcctccgttcccgtcgtgtatagtactgcatactacgcgctggttgtgagaggccgggtgcgccccggggagaccttgctgatacattccggcagcggaggggtggggcaggctgcgatagctattgccctaagcctcggatgcagggtgtttacaactgtgggttccgcagaaaagagagcctaccttcaggcgcgattcccgcagctagattccacttcatttgccaattcacgggatacatctttcgagcaacacgtactttggcacacaggcgggaagggtgtggaccttgttctgaattccctggcagaggagaagctccaggcgtccgtgagatgcctggccactcacgggcgctttctcgaaattggaaagttcgacctgagccagaatcacccgctcgggatggccatttttcttaagaacgtgacattccacggggtacttctggatgcattctttaacgagagcagtgccgattggcgcgaagtgtgggctctcgtacaggcaggaattagggacggggttgtgcgcccactcaagtgtactgttttccatggagctcaagtcgaggatgcgttcagatacatggctcaagctaaggccagccaagcatggccgtgctctggggccccaagtgccacatgggccttctggtggcgtaggtag

SEQ ID NO: 24153 - DNA, 1143 bp, synthetic construct
  misc_feature 1..1143: note = Description of Artificial Sequence: Synthetic coding sequence
  source 1..1143: mol_type = other DNA
atgatgttcagcggcttcaacgccgactacgaggccagcagcagcagatgctcttcagccagccctgcaggagatagcctctcctattatcatagcccagccgacagtttctccagcatggggtctcccgtaaacgcacaggacttctgcactgatctggccgtgtcctccgctaattttattcctaccgtcactgcgatctcgacctcgccagacctgcaatggctcgtacagcctgctctggtgagctctgttgcacctagtcagacaagagcacctcatccctttggagtgccagccccatccgcgggcgcttattcccgcgccggcgtggtgaaaactatgacgggcggacgggcccagtcaatcggacgacggggcaaagtagagcagctgtctcccgaggaggaagaaaagcgacgaattcggagggaacgcaataagatggccgctgcaaaatgtcgaaatagacggagggagcttaccgatacactccaggctgaaacagaccagttagaggatgagaagtccgccctgcagacagagattgccaatctgcttaaagagaaagaaaagctggagtttattctggccgcccaccgaccagcctgcaaaatcccagacgatctggggtttccggaggaaatgtcggtggcatccctggatctaacaggcggtttaccggaggttgccactcctgagagtgaggaggccttcacactgcccttgcttaacgatccagagcctaaaccctccgtcgagcccgtcaagtccatcagttctatggagctcaaaactgagccttttgatgactttctgttcccagctagtagccgaccaagtggctcggagacagctcggtctgtgccagacatggacctttccggctccttctacgcggcggattgggagcccttgcattctgggagcctgggcatgggcccgatggcaactgagttagagcctctgtgcacaccagtggtgacttgcaccccttcttgtaccgcttacacgtccagttttgtcttcacataccctgaagccgactccttcccatcttgcgccgctgcccaccgaaaaggatcttcatctaacgagccctccagcgactcactgagttcgcctaccttgttggcgttgtag

SEQ ID NO: 24154 - DNA, 966 bp, synthetic construct
  misc_feature 1..966: note = Description of Artificial Sequence: Synthetic coding sequence
  source 1..966: mol_type = other DNA
atggaggagggccagtacagcgagatcgaggagctgccccggcggcggtgttgtcggaggggaactcagattgttctgctgggcctcgttacagcagccctgtgggcaggtctgctaactcttttgctactgtggcactgggacacgacccaatcactgaaacagctagaagagagagcagcgcgaaacgtttctcaagtgtcaaaaaacctggagtcccaccacggagaccaaatggcccagaaaagccagtcaacccagatcagtcaagaactcgaggagctgcgggccgaacagcagagactgaagtcccaggacctggagctatcttggaacctgaatggactacaggccgacctgagctcctttaagtcccaggagctaaacgagcggaatgaggcttcggatctacttgagcgattacgtgaggaggtgaccaagctccggatggaactgcaggtgtccagcgggttcgtgtgtaatacatgtccggaaaagtggattaacttccagagaaagtgctattactttggaaaaggaacaaagcagtgggtacacgcccgttacgcctgtgacgatatggagggccagctggttagcatacactctccagaggaacaggacttccttacaaaacatgctagtcataccggctcatggatcggcttgaggaacttggatctgaaaggggaattcatctgggtcgatggttcccatgtcgactattctaactgggccccgggcgaacctacctccagaagccagggtgaagattgtgttatgatgaggggaagtggcaggtggaatgacgcattctgcgaccgcaagctgggcgcatgggtgtgtgaccggttggccacctgcacacctccagcctcggaggggagtgcagagtccatgggccccgactcccgcccagatcctgacggacggttgccaacaccttctgccccactgcattcttag

SEQ ID NO: 24155 - DNA, 963 bp, synthetic construct
  misc_feature 1..963: note = Description of Artificial Sequence: Synthetic coding sequence
  source 1..963: mol_type = other DNA
atgaacccccccagccaggagatcgaggagctgccccggcggcggtgctgccgcagaggaactcagatcgtcctgctgggtttagtgacagcagccctatgggcaggattactcacactgttgctgctgtggcactgggacaccacacagtccctgaagcagctcgaggagagggccgcaagaaacgtctctcaggtttctaagaatttggagtctcaccatggcgaccaaatggcacaaaagtcccagtccacccagatctctcaggaacttgaggaattaagagccgagcagcagaggctgaagagtcaagacctggaactatcgtggaacctgaatggtctccaagcagatctgagcagcttcaagtcccaggaactgaacgagaggaatgaagcatccgacctgctggaacgtctccgcgaggaagtgacgaagcttaggatggagctccaggtttcgagcggtttcgtgtgcaatacctgccccgaaaagtggatcaacttccaaagaaagtgctactatttcggtaagggaaccaagcagtgggtccatgcccgctatgcctgtgatgatatggagggccagctggtatcaatccactccccagaggaacaggactttctcactaagcacgcttctcataccggctcatggatcggtttaaggaatcttgatcttaaaggcgagtttatttgggtggatgggtctcacgtggattattctaattgggcgcccggagaacccacttcccgcagccaaggggaggactgtgttatgatgaggggaagcggtcgctggaatgatgcattttgtgaccgcaagctgggtgcttgggtatgtgacagactcgccacttgcacaccacccgccagtgaaggttcggctgagagcatgggccccgattcgcgaccagacccagacggccgcctgccgactccttcggccccgcttcatagctag

SEQ ID NO: 24156 - DNA, 1125 bp, synthetic construct
  misc_feature 1..1125: note = Description of Artificial Sequence: Synthetic coding sequence
  source 1..1125: mol_type = other DNA
atgtggttcctgaccaccctgctgctgtgggtgcccgtggacggccaggtggacaccacaaaggccgtgatcacactccagcctccttgggtaagtgtatttcaagaggaaacagttactctgcactgcgaagttttgcacctgcctggctcatccagtactcaatggtttctgaacggaacagctacccagacgtcaaccccgtcctatcgtattacttccgcctccgtgaatgatagtggcgagtaccgatgccagcgcggattgagcggtaggagcgatcccatccaactcgagattcataggggttggctgctgttgcaagtgtcctccagagtcttcaccgaaggagagcctctggcactgcggtgccacgcctggaaggataagctggtgtacaacgtactttattatcgcaacgggaaggcattcaaattcttccactggaatagtaacctgaccatcttgaagacaaatatctcccataacggcacttatcactgtagtggaatgggtaaacatcggtacacgtcagccggcatctccgtgaccgtaaaagaactgtttccagcccccgtgcttaacgccagcgtgaccagcccactgcttgagggtaacctggtgacgctttcctgtgagaccaagttgttactccaaaggccggggctccaattgtactttagcttttacatgggcagcaagacccttcgcggaaggaacacatctagcgaataccagatcctcaccgcccggcgcgaggacagtggcctctactggtgtgaagcagctacggaggatggaaatgtgctgaagagatctcccgagttggagttgcaagtgctgggtctgcagctgcctacccccgtgtggtttcacgtgttgttttatctggcagtcgggataatgttcctggtcaatacagtactctgggtaaccattagaaaagagctgaaacgtaagaaaaaatgggatctggaaattagcctggatagtggccatgagaagaaagtaatctcgtcactccaagaggacaggcacctggaagaggaattaaaatgtcaggaacagaaggaagaacagctgcaggaaggcgtccacaggaaggaacctcaaggcgctacttag

SEQ ID NO: 24157 - DNA, 723 bp, synthetic construct
  misc_feature 1..723: note = Description of Artificial Sequence: Synthetic coding sequence
  source 1..723: mol_type = other DNA
atgtggttcctgaccaccctgctgctgtggggctggctgctgctgcaggtcagctcccgcgtgtttacagagggagagcccttagccttgaggtgtcatgcttggaaggacaagctcgtctacaatgtcctttactaccgcaacggtaaagccttcaaattttttcactggaactctaatctgacgatcctgaagacgaatatctcacacaacggaacataccactgtagtggtatggggaaacataggtacacttcagccgggattagcgtgaccgtgaaagaattgttccctgcacccgtgctcaatgcgtctgttacatcaccgctcctcgagggcaatttggtgaccctaagctgcgaaactaagctgctcctccagcgtcctggtttgcagctgtatttcagtttttacatgggatcaaagacactgcgaggtagaaacacttcaagcgagtaccagatcttaacggcaagacgcgaggacagtgggctctactggtgcgaagccgctacagaagacggtaatgtgctaaagagatctcccgagctggaactccaggtactcggcttgcagttgcctacaccagtttggttccacgttctgttctatctggccgtgggcatcatgtttctggtcaatacagtcttatgggtgacaattcggaaagagctcaaacgcaaaaaaaagtgggatttggagatttcgctggactccggctag

SEQ ID NO: 24158 - DNA, 2469 bp, synthetic construct
  misc_feature 1..2469: note = Description of Artificial Sequence: Synthetic coding sequence
  source 1..2469: mol_type = other DNA
atgggcttcagcagcgagctgtgcagcccccagggccacggcgtgctgcagcagatgcaggaggccgagttacgtctgctagaggggatgcggaaatggatggcgcaacgggtgaagtcagatcgcgagtatgctggactgctgcatcacatgtccttacaggatagcggcggccagtcacgcgccatcagtcctgatagtccaatctcccagtcttgggcagaaattactagccaaaccgagggtctttcacgattactgaggcaacatgctgaagacttgaattcaggaccactcagtaaactgtccctgctgattagggagagacagcagcttcgaaagacatattcagagcaatggcagcagcttcagcaggaactcacaaagactcactcgcaggatatcgaaaagctcaagtcacagtaccgcgcactggccagggacagcgcccaggctaagagaaagtaccaggaagcatccaaggacaaagaccgcgacaaagcaaaggataagtacgtgaggagcttgtggaaactgttcgctcaccataacagatatgtgctaggcgtcagggctgcccagctccaccatcagcatcatcatcagctgctattgcctggcctgttaagaagtcttcaggatctgcacgaggaaatggcctgcattctcaaggagattctgcaggagtacctggaaatttcatctctggtacaagacgaggtcgtcgcaatccatagagaaatggcagctgcggccgcacgaattcaacccgaggcagaataccaaggcttcttacgccagtatggaagtgctcccgatgttccaccatgtgttacctttgacgaatctcttttggaggagggcgagccactggaaccaggcgaactgcagctgaacgaattgactgtggagtcggtccagcacaccctgacaagcgttactgacgagctggcagtggctacagaaatggtgtttcgccggcaagagatggtgactcagctgcagcaggaattgcgcaatgaggaggaaaatactcacccaagggagcgagtccagctgttaggcaaacggcaggtgctacaggaggcactgcaaggcctgcaggtagcactgtgctcccaggctaaactgcaagctcagcaagagctcctgcaaacaaaattggagcacttgggtccaggtgaaccacctcccgtgctcctcctacaggacgatcgccactctacatcttcaagtgagcaggagcgcgaggggggaagaacacctacgcttgagattttgaagtcgcatatctcgggcatctttcgtcctaaattcagcctgcctccgcccctacagcttatccccgaagtgcagaagccccttcacgagcagctgtggtaccatggagctatcccaagagccgaggttgccgagttgctggttcactccggggatttcctggtccgggagtctcaggggaaacaggagtacgttttgagcgtcctttgggatgggctcccacggcattttatcatccagtccctggataacttgtaccgccttgaaggggaggggttcccttccatccccctgctgatcgatcatctgctgtccacgcaacaacccctgacgaagaagtccggagtggtactgcatagggctgtgccaaaagacaaatgggtgctaaatcacgaggatctggtcctgggggagcagatcggcaggggaaactttggagaggtcttctctgggcgcctccgcgcggacaacacactagtggctgttaaatcctgccgcgaaacactgccgcccgacctcaaggccaaatttctccaggaagctaggatcctgaaacagtattcgcatcccaatatcgtgcgcttgatcggtgtctgcacccagaagcagcctatttatattgtgatggagttagtgcaaggcggcgactttctaacattcctgaggactgagggggctagactccgagtcaaaacactcctccagatggtcggggacgccgccgcaggtatggaatacttggagtcaaagtgctgcattcaccgtgatctggccgcccggaattgcctggtgacagaaaaaaatgttctgaagatcagcgacttcggcatgtcaagggaagaggcggacggggtgtatgccgcttctggcggcctgagacaggtccccgttaaatggacagccccggaagccttgaactatgggcgctattcttcagagtcggatgtctggagtttcggaatcctgttgtgggagaccttctctttgggcgcaagtccatacccaaacctgtcgaatcaacagacacgggaatttgtggagaagggagggagactcccatgtcccgaactgtgtccagacgctgtgttcagactgatggagcagtgttgggcttatgagcccggtcagcgcccttccttttccacaatctatcaagagttgcaatccatccgaaaacgccacaggtag

SEQ ID NO: 24159 - DNA, 2295 bp, synthetic construct
  misc_feature 1..2295: note = Description of Artificial Sequence: Synthetic coding sequence
  source 1..2295: mol_type = other DNA
atgggcttcagcagcgagctgtgcagcccccagggccacggcgtgctgcagcaaatgcaagaggccgagctgagattactggagggcatgagaaaatggatggcacagagggtcaaatcagaccgcgagtacgccggactgttacaccacatgtctttacaggacagcggaggacaaagtagagcaatctcacctgatagccccatttcccaaacgcacagccaggatatcgagaagttgaaatcccaatatagagcgttagccagggactctgctcaggctaagcgaaagtaccaggaagcaagcaaggataaggatagggataaagccaaggacaaatacgtgagaagtctgtggaaactgttcgctcaccacaatagatatgtgctgggcgtccgcgcggcgcagctccatcaccagcatcaccaccaactgctgctgccgggccttcttcggtctctccaggacttgcatgaggaaatggcctgtatcttgaaggagatcctgcaagagtacttggaaatttctagtttagtgcaggatgaagtcgtggccattcaccgtgagatggcggctgccgcggctcgcatccagcccgaggccgaataccaagggtttctaaggcagtatggcagcgctcctgatgtacccccatgcgtaacattcgacgagtccctgctcgaggagggcgagcccctggaacccggggaactacaactgaatgaattgactgtggagtccgttcagcacactctgacttctgttaccgacgaattggcggtcgcgacagaaatggtcttccgaagacaggagatggtaacccaacttcagcaagagttacgcaatgaagaggaaaacactcaccctagggaacgggtccagctcctgggaaagcgtcaggtccttcaagaggccctacagggactccaagtggctttgtgcagccaggctaagctccaggcccagcaggagctgcttcagacaaagttggaacatctcggtcctggtgagcctccacctgtgttgctcttgcaggacgacaggcacagcacctcatcttccgagcaggaaagggaaggaggcaggacccctactcttgaaatcctaaagtcccacatcagtggcatttttcgtccgaagttctctttaccacctccactccagttaatccctgaggtgcaaaaacctctgcatgaacaattatggtatcacggagcaatccctagggccgaggtagcagagctgcttgtgcactcgggggacttcctcgtgcgcgagtcccagggaaagcaggaatacgtattaagtgtgctgtgggatgggctgccgaggcatttcataattcagagtctggataacctgtaccgcttggagggcgaaggattccccagcatacccctcctcatcgatcatctgctcagtactcagcaaccattgaccaagaagagtggagtggtgctgcatcgcgctgtcccaaaagacaaatgggttctcaaccacgaagacttagttttgggagaacagatcggccggggcaatttcggtgaggtcttctcagggagactccgggcagataacacacttgtcgcggtgaagtcctgtcgggagactcttcccccagacttaaaggcgaaattcctgcaggaagcgaggattctgaagcagtactcacaccctaacattgtgcgtctcatcggcgtctgtacccagaagcagcctatctatatcgtgatggagctggttcaaggcggggatttcctgaccttcctgcgaacagaaggagccagactcagagtgaaaacactgctccaaatggtgggcgatgctgccgcaggtatggagtatctggagtctaagtgctgtatccatcgcgacctcgctgccagaaactgtctggtcacagagaagaatgtgctaaagattagcgattttggaatgtcccgagaggaggccgacggggtctacgctgcatcaggaggacttagacaggtaccggtgaaatggaccgcgcctgaggccctcaactatgggcgatatagttccgaatccgacgtttggtcatttggcatactactatgggagactttctccctgggcgcgtctccttatcctaatctgagcaaccaacaaacaagagagtttgtggagaagggaggacggctcccatgtcccgaactctgtcccgatgcagtgtttcgtcttatggaacaatgctgggcctacgagcccggacagcggccttctttctccactatctaccaggagctccagagcatcagaaaacgccaccgttag

SEQ ID NO: 24160 - DNA, 2046 bp, synthetic construct
  misc_feature 1..2046: note = Description of Artificial Sequence: Synthetic coding sequence
  source 1..2046: mol_type = other DNA
atgggcttcagcagcgagctgtgcagcccccagggccacggcgtgcttcagcagatgcaggaggcagagctcagactgctcgaaggcatgcgaaaatggatggcccagcgcgttaaaagcgatcgcgaatatgcaggtcttctccaccacatgtctcttcaagattcaggggggcagtctagagcaataagtcctgattctcccataagtcaaacgcacagccaggacattgagaagctcaagagccaatatagagccctcgctcgagattccgcacaggctaaacgtaagtaccaagaggcttccaaagataaagatcgcgacaaagcaaaagataaatacgttcgatccctttggaagctgttcgcccatcacaatcgctacgtgttaggcgtacgagctgcccagctgcatcatcagcaccaccatcaattactgctgcccgggctgttgcgctcactacaggatctgcacgaagaaatggcctgcatcctgaaggaaattctgcaggagtacctcgaaatatcatccctcgtgcaggatgaggtggtcgcaatccatagagaaatggccgccgccgccgcacggatacaaccagaggcagaataccaaggcttcctacggcagtatgggtctgcaccagacgtgcccccttgtgtgaccttcgatgagtccctcctagaagaaggcgagccactggagccaggtgagcttcagctgaacgagctcacggtggaatccgtgcagcacaccttgacctccgtgactgatgagctcgccgtggccaccgaaatggtctttagacgtcaagaaatggtcacgcagctgcagcaggaactgagaaacgaggaagagaacacccatccgcgggagagggtgcagctccttggaaaacggcaggtccttcaagaggccctgcagggactacaggtggcactgtgttcacaggcaaagctccaggcccagcaggagctgcttcagacaaagctcgaacacctcgggcccggcgagccgcctccggttctattgctgcaagacgatagacacagcacttctagctcggaacaggaaagagaaggcggtcgcacccctacactggagatcctcaagagccacatatcaggcatcttcagaccaaagttctccaatctctatcggctggagggtgaggggtttcctagcatccctctgctgattgaccacctactttcgacgcagcagccccttacaaagaagtctggcgttgtcctgcaccgtgcagtgccgaaggacaagtgggttttaaaccacgaagacttggtgctgggggagcaaattggccgaggaaatttcggcgaagttttttcaggccgcctccgagcagacaataccttggtggccgtcaagagctgtcgggaaacattaccacctgatttaaaagcaaaattcttgcaggaggcccgttccagcccatcgacgtcctcctggagtctctgccgtggatcctctcccccagccggaggagattttctgacttttttgcggactgaaggagcccggctgagagtcaagaccctgctgcagatggtcggtgacgccgccgccggaatggagtaccttgaatcaaaatgctgtattcacagggatctcgcagcaaggaactgcttagttacagaaaaaaatgtcttaaagattagtgatttcgggatgagcagagaggaggcagacggagtgtatgctgcctctggaggactgaggcaggttcccgtaaaatggaccgcacccgaggccctcaactacggaagatacagttcggagagcgacgtctggagtttcggcattctgctgtgggaaacattttccctgggggcctccccctaccccaatcttagcaaccaacaaacccgagagtttgtagaaaagggaggcagattgccttgtcctgagctgtgtcccgatgccgttttccgattgatggaacagtgctgggcgtacgagccaggccagagaccctctttcagcacaatttaccaggagctgcagtctatcagaaaaagacaccgatag

SEQ ID NO: 24161 - DNA, 2085 bp, synthetic construct
  misc_feature 1..2085: note = Description of Artificial Sequence: Synthetic coding sequence
  source 1..2085: mol_type = other DNA
atgggcttcagcagcgagctgtgcagcccccagggccacggcgtgttgcagcagatgcaggaggcagaacttaggctactggaaggcatgagaaagtggatggcccagcgtgttaagtcagaccgcgagtacgcagggctgttgcaccacatgagcctgcaggattccggaggccagtccagagcgatctcccctgacagccctatctctcagacgcattctcaggacattgagaaacttaaaagccagtacagagccttggccagagatagtgcccaagccaagaggaaatatcaagaggcctctaaagataaagatcgggacaaggctaaggacaaatacgttcgatcgctctggaaattgtttgcccatcacaaccgctacgtgttgggcgtgcgcgcggcgcagctgcatcatcagcaccatcatcagctgctgctccccggacttctaaggtcactccaagatctgcacgaagagatggcctgcatcctcaaggagatacttcaagagtaccttgagattagcagtctcgtgcaggatgaggtggtggccattcatcgcgagatggcagcagctgccgccaggatacaacctgaggcagagtaccaaggattcctccggcaatatgggtctgcaccagatgttccaccctgcgtcacttttgacgagagtctacttgaggaaggcgagcccctggaacccggggaattgcagctgaacgaactgactgtcgaatctgtgcagcatactctcacttcagtaaccgatgaactggccgtggccacagaaatggtcttccgacgccaagaaatggttactcagcttcagcaggagctgcgcaatgaggaggagaacacccatccccgggagagagttcagttgctagggaagagacaggtgctgcaggaggccctgcagggactgcaggtggccctttgctcccaagctaagttgcaggctcagcaggagcttctgcagaccaagcttgagcacttagggcccggagagccaccacctgtcttgctgctgcaagatgaccggcacagcaccagttcttcagagcaagagcgggaaggcggccgcactcccaccctcgagatactcaaatcccatatcagcggcatatttcgtccaaaattctctaatctataccgcttggaaggcgagggatttccctccattccactacttattgatcacctgctgtcaacacagcagccactaacaaagaagtccggcgtagtgttgcaccgtgctgtacctaaggacaagtgggtcctcaatcacgaagaccttgtgctcggagaacagatcgggagaggtaattttggggaggtgttttcagggcgccttcgggcagataacacccttgttgccgtcaaatcctgcagggaaaccctgcccccggaccttaaagccaagtttctgcaggaggccaggatcttaaagcaatatagccacccaaacattgtgcgcctgataggcgtctgcactcagaaacagccgatctacatagttatggaactagtgcaagggggcgacttcctgacttttctgcggactgagggtgctcgcctgcgggttaagacccttctgcaaatggtgggtgacgctgccgcagggatggaatatttggagtccaaatgctgtattcaccgcgacttggccgccagaaattgcctggttacagaaaaaaatgtccttaagatttctgacttcggtatgtctagagaagaggctgatggcgtttacgcagccagcggtggcctgcgccaggtccccgtgaaatggaccgcacccgaagccctgaactatggcagatacagtagcgagtccgatgtctggagctttggcatcctgctctgggagactttctccctgggtgcatccccctatcctaatctgagcaatcagcagacgcgcgaattcgtagaaaagggtgggagactgccttgtccagagctttgtccagacgccgtgtttcgactgatggagcagtgctgggcctacgagccagggcagagacctagctttagcactatctatcaagagctccaaagcatccgtaagaggcatagatag

SEQ ID NO: 24162 - DNA, 129 bp, synthetic construct
  misc_feature 1..129: note = Description of Artificial Sequence: Synthetic coding sequence
  source 1..129: mol_type = other DNA
atgggcttcagcagcgagctgtgcagcccccagggccacggcgtgctccagcaaatgcaagaggccgagctccgactcctcgaggggatgcggaagtggatggcgcaaagggtaaagtctgatcgctag

SEQ ID NO: 24163 - DNA, 348 bp, synthetic construct
  misc_feature 1..348: note = Description of Artificial Sequence: Synthetic coding sequence
  source 1..348: mol_type = other DNA
atgggcttcagcagcgagctgtgcagcccccagggccacggcgtgctacagcagatgcaggaagccgagctgagactgctcgagggaatgagaaagtggatggctcagcgggtgaagagcgatcgcgagtatgctgggctcctgcaccacatgtccctacaggatagtggtgggcaatccagagccatttcacccgacagccctatctcacagagctgggctgagatcaccagccagaccgaggggctttctagactcctgcgccagcacgccgaggacctgaactcagggcccctgtcaaagttgagcctgctgatcagggagagacaacagctgcggaaaacttag

SEQ ID NO: 24164 - DNA, 2259 bp, synthetic construct
  misc_feature 1..2259: note = Description of Artificial Sequence: Synthetic coding sequence
  source 1..2259: mol_type = other DNA
atgggcttcagcagcgagctgtgcagcccccagggccacggcgtgcttcaacagatgcaggaggctgaacttaggctgctggagggcatgcggaaatggatggcccagcgagtcaagagcgatagagagtacgccgggcttctacaccacatgtctctccaggactcaggcgggcagtcccgggctatcagtcctgactcaccgatcagccaaagctgggctgagatcacatcccagaccgaggggttatcccgcctcctgcggcagcatgcagaggatttgaactctggtcctctctcaaagctttcccttttaatcagggagcgccagcagttaagaaaaacgtattcagaacaatggcagcagctgcagcaggagttgacaaaaacacacagccaagatatagaaaagttaaagtcacagtaccgagcactcgcccgcgactccgcacaggcaaaaagaaagtatcaagaagcaagtaaggataaagatcgcgataaagctaaggataagtacgttcgcagcctttggaagctgtttgcccaccacaatcgctatgtgctgggtgtgcgcgccgcacagttgcaccaccaacatcaccaccagttgttactaccaggactgcttcgctccttgcaagaccttcatgaggaaatggcttgcatactcaaggagattctccaggaatacctggaaatctcctccttggtacaggacgaagttgtggcaatccacagggagatggccgccgcggccgcacgcattcagccagaagcggaataccaaggatttctccgccagtacggctctgcaccggacgttccaccatgcgtcacgttcgatgagtctctgctggaggagggagagccgcttgagcctggcgaactgcaattgaatgaattaaccgtcgaaagcgtgcagcacaccctcacctctgtgaccgatgagctggctgtggctactgaaatggtgttccggcgccaggagatggttacccagctgcaacaagagttgcggaacgaagaggaaaacacacatccacgggaacgggttcaactcctaggtaaacgtcaagtgctgcaggaagcccttcagggccttcaggttgccctgtgtagtcaggcaaaactgcaagcccaacaggaactgctgcaaaccaaactcgagcacctcggacctggtgaacctcctccagtccttctgctgcaggatgaccgtcactcaaccagtagtagcgagcaggaacgcgaagggggaaggactccaaccctggaaattttgaagtcccacatttccgggatctttcgccccaagttcagtaacctgtaccgcttggaaggcgaggggtttccaagcatccccctgctaatcgaccacctattgtctactcaacagccactgaccaagaagtctggagtcgtgctccatcgagcagtccccaaggataagtgggtgctgaatcacgaagacctcgttctgggcgaacaaataggacggggcaattttggtgaagtcttttccggtcgcttgcgggccgacaatacccttgtggccgtgaagtcttgcagagagaccctgccacccgacttaaaagcaaagttcctgcaggaggcgcggatcttgaagcagtactctcatccaaacatcgtgcgactgataggcgtatgtacccagaaacagcccatctatatcgtcatggaactggtgcaggggggagatttcctcacattcctccgaacggagggagcaagactcagagtaaagactctgctacaaatggtaggtgatgctgctgccgggatggagtatctggagtcaaagtgttgcatccaccgcgacctagctgccaggaactgtttggttactgaaaagaacgtgctgaagatttcagactttggtatgagtagggaagaggctgacggcgtctacgccgctagcggcggcctccggcaggtgcccgtcaagtggaccgctccggaagccctcaattatggtagatacagctctgagtcggatgtgtggtccttcggcattcttctgtgggagactttttctctgggcgcatccccttatccaaacttgtctaatcaacaaacacgggaattcgtcgagaagggaggtcggcttccgtgtcctgaactgtgtccggacgctgtctttcgacttatggaacagtgctgggcatacgagcctggccagagaccgtcatttagcactatctaccaggagctgcagagcatacggaaacggcaccgttag

SEQ ID NO: 24165 - DNA, 2085 bp, synthetic construct
  misc_feature 1..2085: note = Description of Artificial Sequence: Synthetic coding sequence
  source 1..2085: mol_type = other DNA
atgggcttcagcagcgagctgtgcagcccccagggccacggcgtgctgcaacagatgcaagaagctgaactgaggctcctggagggcatgaggaaatggatggctcagagggtgaagtcagatcgggagtatgctgggctactccatcacatgagccttcaggattcagggggccagtcgagggctataagccccgattctccaatctcacaaacacactcccaggacatcgagaaattaaaatcgcaatacagagcattggcaagagatagcgcacaagctaaaaggaagtaccaagaagcttctaaggataaagatcgagacaaagctaaggacaaatatgtccggtccctgtggaaactttttgcccatcacaatcgttatgtgctaggagtacgcgccgctcaactacaccaccagcaccaccatcagctgctcctccccgggttactcaggtcactgcaggatctccacgaagaaatggcctgtatactcaaggagattttgcaagaatacctcgaaattagctctctggtgcaggacgaagtggtggcaattcaccgagaaatggctgcagccgccgctcgaatacaaccagaagcagagtaccaggggttcctgcgccaatacgggtctgcccctgatgttcccccctgcgtgacctttgacgagagcctcttggaagagggagagcccctggagcccggagagttgcaactcaacgaactcactgtagaatctgtgcagcatacattgacgtctgtcaccgacgaactggccgtggctacggagatggtgtttaggcggcaggaaatggttacacagctgcagcaggagctcagaaacgaggaggagaatactcatcctcgggaaagggttcagctcctgggcaagcgccaggtgctgcaggaagctctgcagggactgcaagttgccctctgctcccaagctaaactacaagcgcagcaggagctgttacagactaaactcgagcacctggggccgggcgagccacctcccgtccttctcctgcaggatgacagacatagcacatcctcttctgagcaggagagggagggcggtagaacaccgaccctcgagattttgaagtcccacatttcagggatctttcgtcctaagttttctaatctataccggcttgagggcgagggattccccagcattccactgctgattgatcacttactcagcactcagcagcccttaacgaaaaagagcggagttgtgctgcaccgggctgtcccaaaggacaagtgggttttaaatcacgaggatttagtcttgggcgaacaaattggacgggggaacttcggggaagtgtttagcgggagactgagagccgacaacaccctcgtggctgtgaagtcatgccgtgaaactttaccccctgacctgaaagccaaatttctacaggaggctagaatcctgaagcagtactcgcaccctaatatcgtcagactgatcggagtgtgcacccagaaacaaccaatatatatcgtgatggagcttgttcaaggaggcgatttccttacttttctgaggaccgaaggtgctagactgcgggtgaagactctgttgcagatggtgggagatgcggcggctggaatggagtatttagagagtaaatgctgcattcatcgggacctcgccgcccggaattgtctggtgacagagaagaacgtgctcaagatatctgatttcggcatgtcgcgcgaggaagctgacggggtgtacgctgctagcggcggcctgcgccaggtgcccgtgaagtggacggctcccgaggctctcaattacgggaggtactcctccgagagtgacgtttggagtttcggtattcttttgtgggagacatttagcctgggcgcttccccctacccaaatctaagtaaccagcagacccgcgagtttgtggagaagggaggacggcttccctgtcccgagttgtgcccggacgctgtcttccgcctgatggagcagtgttgggcttacgaaccaggtcagcgaccaagtttctcaactatctaccaagaacttcagtccattcgcaaaaggcaccgctag

SEQ ID NO: 24166 - DNA, 444 bp, synthetic construct
  misc_feature 1..444: note = Description of Artificial Sequence: Synthetic coding sequence
  source 1..444: mol_type = other DNA
atgggcttcagcagcgagctgtgcagcccccagggccacggcgtgctccaacaaatgcaggaggcggagttacgtcttctcgaggggatgcggaagtggatggcccagcgggttaaaagtgacagggagtacgcaggcttattacaccatatgtctcttcaagacagcggtggtcagagcagagcaatctctcctgatagtcctatctctcagtcctgggccgagataacaagccaaaccgaagggctaagccgacttttacggcagcacgcagaggatctgaatagcggtcctctgtccaaattatccctcctgatcagggaaaggcagcaactgcggaagacatatagcgagcaatggcagcagctgcaacaagaactcaccaaaacacatagccaggacatcgagaagttgaagtcccagtaccgcgccttggccagatag

SEQ ID NO: 24167 - DNA, 1638 bp, synthetic construct
  misc_feature 1..1638: note = Description of Artificial Sequence: Synthetic coding sequence
  source 1..1638: mol_type = other DNA
atgggcttcagcagcgagctgtgcagcccccagggccacggcgtgctccagcaaatgcaagaagcagagctgcgtcttctggaaggcatgcgcaaatggatggctcagcgagttaaaagcgatagggaatatgcggggctcttgcaccatatgtctctgcaggacagtggcggacaatctagggcaattagtcctgatagcccgatctcgcaatcatgggcagaaataaccagtcagacagaaggtctatccagactcctcaggcagcatgctgaggatctgaactctggaccacttagcaaactgtcgcttctgattcgggagaggcagcaacttaggaagacttactccgagcagtggcaacagctgcaacaggagctcactaagacccatagccaggacatcgaaaaactcaagtcacaatatcgagcccttgcaagggacagtgcccaggccaaacgcaaataccaggaggccagtaaggacaaagaccgcgataaggcgaaagataagtacgtccgtagcctgtggaagcttttcgcacaccataataggtatgttcttggggtaagggctgcccagctgcaccatcaacaccatcaccagctcctattgccgggactactccgctccttgcaggacttgcatgaggaaatggcgtgtatccttaaggaaattctccaggaatatctggaaataagctctctagttcaggacgaggtggtcgctattcacagagaaatggctgccgccgccgcccgcatccagcccgaggccgagtaccagggctttttacggcagtacggcagtgcccctgatgtacccccttgtgtgacgttcgacgaatctctgcttgaggagggcgagccccttgaacctggtgaattgcaacttaacgaacttactgttgagtcagtgcaacatactctgacctccgtgaccgatgagctcgccgtggctaccgaaatggtgttcaggcgacaggagatggtcacacagctacaacaggagcttagaaatgaggaggaaaacactcatccgcgagagcgcgtgcagctgctgggaaaaaggcaggtgttacaagaagcactgcagggtctccaagtcgcgctgtgttcccaggccaagctccaagcccagcaggagctgctccagaccaagttggagcatctgggaccgggcgaacccccccccgtgctgcttctgcaagatgacaggcacagcacctcctccagcgagcaagaaagggaaggcggccgcacacctactctagagatactcaagtcccacatcagcggtatcttccgaccaaaattctccttgcccccaccactgcagttaataccagaggtgcaaaaacctttgcacgagcagctgtggtatcatggagccatcccacgggcagaagtggccgagctgctggtccatagcggcgattttctggtgcgcgaatcccaaggaaagcaggaatacgtgcttagcgtgctgtgggacgggttaccgaggcacttcattatccaagcccatgcgcctagtgaatggcgtcttttgacacccgggccactaccctgccggacatgcaccgattggaagggcaaggctttcctggcttttctgtgctcgagcaccacttactag

SEQ ID NO: 24168 - DNA, 366 bp, synthetic construct
  misc_feature 1..366: note = Description of Artificial Sequence: Synthetic coding sequence
  source 1..366: mol_type = other DNA
atgggcttcagcagcgagctgtgcagcccccagggccacggcgtgctgcagcagatgcaggaagccgagcttcgactcctggaaggtatgcgtaagtggatggcgcagagggtaaaatctgatagagaatacgctgggttactgcatcacatgagtctccaggattccggcgggcagtcccgagccatcagccctgacagcccaatttcacaagtcggtctgtacgggacactggtcggcgcaggatgcatctgtttgctgctgcctctgctcggagccttatggggctcaggctggcggtctggtcgtccaatgctgggaagccactgtgcccccctgccagcctcccctatttgcgccgtatag

SEQ ID NO: 24169 - DNA, 510 bp, synthetic construct
  misc_feature 1..510: note = Description of Artificial Sequence: Synthetic coding sequence
  source 1..510: mol_type = other DNA
atgggcttcagcagcgagctgtgcagcccccagggccacggcgtgctgcagcagatgcaggaagctgagctcaggctactggaaggcatgagaaaatggatggcacagagggtaaagtccgaccgtgagtacgcgggcctgctgcaccacatgagtctgcaggacagcggcggccagagtagggcgatttctccagacagcccgataagtcagagctgggccgaaattacatcacagaccgaggggctatcccggctcttgagacagcatgctgaggatttaaacagcggcccactttcaaaactctctctacttattagagagcgtcagcagctaagaaaaacatactctgagcaatggcagcagctccagcaagaactgacaaagactcactctcaagacatcgaaaagcttaaatcgcagtacagggccttagcgcgagactctgcacaggccaaaaggaaatatcaggaagcctccaaagacaaagatcgcgataaagccaaatag

SEQ ID NO: 24170 - DNA, 2283 bp, synthetic construct
  misc_feature 1..2283: note = Description of Artificial Sequence: Synthetic coding sequence
  source 1..2283: mol_type = other DNA
atgaagacctgggtgaagatcgtgttcggcgtggccaccagcgccgtgttggctcttctcgtcatgtgtatcgtacttaggcctagccgtgttcataactcggaggagaatactatgagggctttaactctgaaagatatcctcaacggaacgttttcctataagacgtttttccctaactggattagcgggcaggagtatctgcaccagagcgcagataataacattgtattgtacaacatagagactggacagagctatacaatcttgtccaacaggactatgaaatcagtaaacgcaagcaactatggactttcccctgataggcagtttgtctatctcgaatcggattattctaagctatggcggtacagctatactgctacctattacatttacgatttatctaatggggagttcgttaggggaaacgagctccctcggcctattcagtatctctgttggtcacctgtggggagcaaattagcctacgtttatcagaataatatataccttaaacaacgaccaggggacccaccctttcagatcacatttaacggccgagaaaataaaatctttaacgggatccctgactgggtctatgaagaggagatgctagccactaagtatgcactatggtggagtcccaacggtaagttcctggcctatgccgagtttaatgataccgatatccccgtgatcgcctactcctactacggagatgaacagtaccccaggacaataaatattccctatcctaaggctggggccaagaatccagtcgttcgtatttttattatcgacaccacatatcccgcctacgtggggccccaggaggtgcccgtgcccgcgatgatagcttcatccgactattacttttcctggttaacttgggtgaccgacgagagggtgtgcctgcagtggctgaagcgagtccagaatgtgagcgtgcttagcatttgcgacttcagagaagactggcagacgtgggactgcccaaaaacccaggaacatatagaggaatcaagaaccggctgggcagggggatttttcgttagtaccccagttttctcttacgacgcaatcagctactacaagattttttccgacaaggatggatacaagcatattcattatattaaagacacggttgaaaacgccatccaaataacgtctggcaaatgggaggctatcaatattttcagggtcacacaggactctttgttttattccagcaatgagttcgaggagtaccctgggcgccggaacatctatagaatatcaatcggaagctacccccccagcaagaagtgcgtgacttgtcacctgcggaaagagcgctgccaatactataccgcttccttcagtgactatgccaagtactatgctttagtgtgctacgggccaggtattccgatctccacattgcatgatgggcggacggaccaggagatcaagattttagaggagaataaagagcttgaaaatgctctgaagaatatccagttgcctaaggaggagataaaaaaattagaggtggatgagatcacattgtggtataagatgatcttaccaccccaatttgatcgctccaaaaaatatccactgcttatccaggtctacggaggtccctgtagtcaaagcgtgcgatccgtattcgcagtcaattggatcagctatctggcctctaaagaagggatggtaatagcattggttgacggcagaggcacagcctttcagggcgacaagcttctttacgctgtgtaccggaagctgggcgtgtatgaggttgaggaccaaattacagcagtgcgcaaatttattgagatggggtttattgacgaaaagcggatcgcaatatggggctggtcctacggcggatatgtgtcctccctggccctggctagcggcactggcttatttaaatgcgggatagccgtggcccccgtaagttcgtgggagtattacgcctcagtgtacacagagagattcatgggcctccccactaaggacgacaacctagagcattataagaattctactgtgatggcccgcgccgagtatttcaggaatgtggattacctactcatccatggcaccgcagacgataatgtccacttccagaactccgcccagattgcaaaagcgctggtcaacgcccaggtggattttcaggccatgtggtactccgatcagaatcacgggctctcaggactctccaccaaccatctttacactcacatgacccactttttgaagcaatgtttctccctgtctgactag

SEQ ID NO: 24171 - DNA, 2208 bp, synthetic construct
  misc_feature 1..2208: note = Description of Artificial Sequence: Synthetic coding sequence
  source 1..2208: mol_type = other DNA
atgaagacctgggtgaagatcgtgttcggcgtggccaccagcgccgtgttggcactactggttatgtgcatcgtgctgcgcccctctagagtgcacaattccgaggagaacacaatgagggccctcacactgaaagatattctgaacggaacattttcatacaaaacattttttccaaattggatctcaggccaggagtacctacatcaatctgctgacaacaatatagtcctttataatattgaaaccggacagtcatatacaatcctgtctaatagaacaatgctgtggcggtatagttacacagctacatattacatatacgatctctccaatggagagttcgttcgaggaaacgagctgccaaggcccattcagtatctctgttggtcccccgtcgggagcaagcttgcttacgtgtatcagaataacatatacctgaagcagcgtcctggcgacccacccttccagattacattcaacggccgcgagaacaaaatctttaacggaatacccgactgggtgtatgaagaggaaatgcttgctactaagtatgctctgtggtggagcccaaatgggaaattcctcgcatatgcggaatttaatgataccgacatccccgttatagcgtattcatactacggggatgaacagtaccctaggaccataaacattccatacccgaaagctggtgctaagaaccctgtggtgagaatattcatcatagacaccacttaccccgcatacgttgggccacaggaagttcccgttccagcaatgattgcttcaagtgactactacttttcctggctcacctgggttacagacgaacgggtctgcttgcaatggctgaagcgcgtccagaatgtttccgtattgtccatctgcgatttccgggaggactggcagacctgggactgccccaagacgcaggagcacatcgaggagtcacgaaccggatgggctgggggatttttcgtcagcactccagtgttctcgtacgacgcaatttcttattacaaaattttttccgacaaagatggatacaagcatattcattacatcaaggacacagttgaaaacgccattcagatcaccagtggcaagtgggaagcaatcaacattttccgcgtcacacaggattcgctgttctatagcagtaacgagttcgaggaataccctgggagacggaacatttacaggatatctatcggtagctacccaccaagcaagaaatgtgtgacatgtcacttaagaaaagaaaggtgtcagtactataccgcgtctttctcagattacgctaagtactacgctttagtgtgctacgggcccggaatccctataagcaccttgcatgatgggcgcacagatcaagagataaaaatcttggaggaaaataaggagcttgagaacgctctgaagaacatccaactgcccaaggaggaaatcaaaaaactggaagtagatgagattactctctggtataagatgatactgcccccccaatttgaccgaagcaaaaagtaccctctgctgatacaggtgtacggcgggccatgttcccaatctgtgcgtagtgtattcgccgtgaactggatttcttaccttgccagcaaggaggggatggtgatagctttggtggatgggagaggaaccgctttccagggcgataagctgctgtacgcggtgtatcgtaaactgggagtatatgaagtggaggaccagattacagccgtgcgtaaatttatcgagatggggttcatcgacgaaaagcgaatagcaatatggggctggagctatggtggctacgtgtcaagcctagccttggcatcgggtaccggcctctttaagtgcggaatcgccgtggcgcccgtcagctcttgggaatattatgcatccgtctacaccgaacggttcatggggctgccgaccaaggacgataacctggaacactataaaaactcaacagtaatggcgcgggctgaatactttaggaatgttgattacctcttgatacacggcaccgccgacgataacgtgcattttcaaaatagtgcccagatcgctaaagcccttgtgaatgcgcaggtggatttccaggccatgtggtatagcgaccagaaccacggcctgtcgggacttagcacaaatcatctgtacactcacatgacccacttcctaaagcagtgcttttctcttagcgattag

SEQ ID NO: 24172 - DNA, 468 bp, synthetic construct
  misc_feature 1..468: note = Description of Artificial Sequence: Synthetic coding sequence
  source 1..468: mol_type = other DNA
atggccgagggcgagatcaccaccttcaccgccctgaccgagaagttcaacctcccccctggtaactacaagaaacccaaattactatactgctccaatggcggtcatttcttgcggatcttgcctgatggaacggtggacggcacgagagaccgaagtgatcagcatatacaactgcagctttccgccgagtcagttggggaggtgtacatcaaatcgacggaaacagggcaatatttggccatggataccgatggtctgctatacggttcccagacaccaaacgaggaatgcctgttcttggaaagactcgaggagaatcactacaatacatacatctccaaaaagcatgccgaaaagaactggtttgtgggtctcaaaaagaacgggagttgcaaaagaggtcctcggacacactacggtcagaaagccatcctgtttctccctctgcccgtatcctctgactag

SEQ ID NO: 24173 - DNA, 468 bp, synthetic construct
  misc_feature 1..468: note = Description of Artificial Sequence: Synthetic coding sequence
  source 1..468: mol_type = other DNA
atggccgagggcgagatcaccaccttcaccgccctgaccgagaagtttaatcttcctccaggcaactacaaaaaacctaaacttctgtattgcagtaatggagggcacttccttagaatcctgcctgatggaacagtggatgggactcgcgatcgttccgaccaacatattcaactccagctcagcgcagaatctgtaggtgaagtgtacatcaagtcaacagagacgggccagtatctggccatggacactgatggtctgctgtacggcagccagaccccaaacgaggagtgcctgttcttagagcgcttagaagaaaaccactacaacacctatatctctaaaaagcatgccgaaaagaactggttcgtcggcctgaaaaagaatgggtcttgcaaacgggggccccgaactcactacggccagaaggccatcctttttctgcctctcccggtctcctctgattag

SEQ ID NO: 24174 - DNA, 468 bp, synthetic construct
  misc_feature 1..468: note = Description of Artificial Sequence: Synthetic coding sequence
  source 1..468: mol_type = other DNA
atggccgagggcgagatcaccaccttcaccgccctgaccgagaagttcaatcttcccccgggcaactacaaaaagcctaagctgctgtactgctccaatggagggcactttctgcgaattcttcctgatggtaccgttgatggcactcgtgatcggagtgaccagcatatccaactccagttgagcgccgaatcagtgggcgaggtgtacatcaagtctactgagacgggccaatacctggccatggataccgatgggctgctgtacgggtcccagactccgaacgaagagtgtctgttcctggagaggctggaagagaaccattataacacttacataagtaaaaaacatgctgagaaaaattggttcgtgggtctgaagaagaatgggtcttgcaagcgagggcccaggacgcattacgggcaaaaggccatcctgttcttacccctgccagtgtcatccgactag

SEQ ID NO: 24175 - DNA, 177 bp, synthetic construct
  misc_feature 1..177: note = Description of Artificial Sequence: Synthetic coding sequence
  source 1..177: mol_type = other DNA
atggccgagggcgagatcaccaccttcaccgccctgaccgagaagtttaatttgcctccgggcaactacaagaaacccaaactgctgtactgttctaatggcggacacttcctgagaattctcccagatgggacggtggatggcacccgcgataggtcggaccagcacatccagtag

SEQ ID NO: 24176 - DNA, 126 bp, synthetic construct
  misc_feature 1..126: note = Description of Artificial Sequence: Synthetic coding sequence
  source 1..126: mol_type = other DNA
atggccgagggcgagatcaccaccttcaccgccctgaccgagaagttcaatctgcctccgggcaactataagaagcccaagctgctatattgtagcaatggggggcacttccttagaattttgtag

SEQ ID NO: 24177 - DNA, 468 bp, synthetic construct
  misc_feature 1..468: note = Description of Artificial Sequence: Synthetic coding sequence
  source 1..468: mol_type = other DNA
atggccgagggcgagatcaccaccttcaccgccctgaccgagaagtttaatctgccccccggtaattataagaaaccaaaattgctctattgctcgaacggaggtcacttcttgagaatcttacccgacggcaccgttgatgggacaagggacaggagcgaccaacacatccagctgcagctcagcgcagaatctgtcggcgaggtgtacataaagtctaccgagaccggtcaatatttagcaatggacacagacgggttgttatatgggtctcagactcctaatgaagagtgcctgttcctcgagcgactggaagaaaaccattataacacttacataagcaagaagcacgccgaaaagaattggttcgtagggctgaaaaaaaacggtagctgcaagcgcgggccacggacccactacggacaaaaggccatattattcctgcccctccccgtgtccagcgactag

SEQ ID NO: 24178 - DNA, 468 bp, synthetic construct
  misc_feature 1..468: note = Description of Artificial Sequence: Synthetic coding sequence
  source 1..468: mol_type = other DNA
atggccgagggcgagatcaccaccttcaccgccctgaccgagaagttcaacttgccacccgggaactacaagaaacctaagcttctctattgttccaacggcggacatttcctgcgtattcttccggatggtacagtggatggaacccgcgatcggtccgaccaacacatccaactgcagctaagcgcagaatctgtgggcgaagtttatataaagagtacggaaactggccaatacctcgctatggataccgacggtttgctatacggctcacagacccccaacgaggaatgtctcttcctcgaacggcttgaagaaaaccactacaatacctatatttctaagaagcacgctgaaaagaattggttcgtgggactcaaaaaaaatggctcatgcaaaagggggcctcggacccattacggtcagaaggccatcttgtttctgccactgcccgtttcatccgattag

SEQ ID NO: 24179 - DNA, 183 bp, synthetic construct
  misc_feature 1..183: note = Description of Artificial Sequence: Synthetic coding sequence
  source 1..183: mol_type = other DNA
atggccgagggcgagatcaccaccttcaccgccctgaccgagaagttcaatcttcctccaggcaactataagaaacccaaattgctctactgttctaatggtggacacttccttagaatacttcccgatgggaccgtcgacggcacgcgtgacaggagtgatcaacatacagacacaaagtag

SEQ ID NO: 24180 - DNA, 627 bp, synthetic construct
  misc_feature 1..627: note = Description of Artificial Sequence: Synthetic coding sequence
  source 1..627: mol_type = other DNA
atgtggaagtggatcctgacccactgcgccagcgccttcccccacctgccgggctgttgctgctgctgttttttgctcctgttcttggtgtcctccgttcccgtgacttgccaggcactcggccaagatatggtcagccccgaggctacaaactcttcgtcctcatccttctcgtcaccatcctccgctggtcgccatgtgcggtcctacaatcacttgcagggagacgtgagatggaggaagcttttttccttcacgaaatattttctgaagatcgaaaagaatgggaaagtgagcggaaccaagaaggaaaattgcccatattctatcctggaaattacttcagtggagatcggagtcgtggccgtgaaggccattaactctaactattaccttgcaatgaacaaaaagggcaagctttacggttccaaggagttcaataacgactgcaaattgaaggagcgcatcgaggaaaatggttataacacctacgctagcttcaattggcaacacaatggacggcagatgtatgtagctttaaacggcaaaggcgccccgagaagaggacagaaaacacgtcggaaaaatactagcgcacatttcttgcctatggttgtgcattcttag

SEQ ID NO: 24181 - DNA, 201 bp, synthetic construct
  misc_feature 1..201: note = Description of Artificial Sequence: Synthetic coding sequence
  source 1..201: mol_type = other DNA
atgtggaagtggatcctgacccactgcgccagcgccttcccccacctgccagggtgttgttgttgctgcttcctgctgctcttcctggtgagctctgtccccgtgacttgtcaggcattgggacaggacatggtgtcgcctgaggcgacgaatagttcttcgtcctcattctctagcccttcctccgcagggcgacattag

SEQ ID NO: 24182 - DNA, 867 bp, synthetic construct
  misc_feature 1..867: note = Description of Artificial Sequence: Synthetic coding sequence
  source 1..867: mol_type = other DNA
ctggtgggcgtgggcggcggcgacgtggaggacgtgaccccccggcccggcggctgccagatttcaggtaggggagcaagggggtgtaacggcatccctggcgcagccgcatgggaagccgctctgccgagacgcaggcccaggagacacccatccgtcaatcctagaagtcgcgcagccggctccccacggacaaggggccgacgaacggaggagaggccctccgggtcaaggctcggcgatagagggagaggaagggccctaccaggcggcagattgggagggcggggcagagggagggctcccgaacgcgtgggcggtagaggcagaggaagggggacggccgcgcctcgcgccgcacctgcagcaaggggctctcggcctggaccagcagggactatggccgctggctctatcacaactctaccagctctcccggaggacggtggatcaggggcatttccacctggccattttaaggaccctaaaagactttattgtaagaacggcggtttctttctccggatccatcctgatggccgcgttgacggtgtgagagaaaagagtgaccctcatattaaactgcaattgcaagccgaggaacggggcgtggtcagcatcaaaggtgtgtgtgccaatcgctacttggctatgaaagaagatggtcggcttcttgcgagcaaatgcgtgaccgatgagtgtttttttttcgagaggctggaaagcaacaattacaacacgtatcggtcacgcaaatacacatcttggtatgtggcccttaaacgcacaggtcaatacaaattggggtctaagacaggccctggccagaaggcaattctttttttgcctatgtcagccaagtcctag

SEQ ID NO: 24183 - DNA, 585 bp, synthetic construct
  misc_feature 1..585: note = Description of Artificial Sequence: Synthetic coding sequence
  source 1..585: mol_type = other DNA
atgcacaagtggatcctgacctggatcctgcccaccctgctgtacaggtcatgcttccacataatatgcttagtcggaaccatttctcttgcctgcaacgatatgacaccagaacagatggccactaacgttaactgtagcagtccagaaagacacacccggagttatgattatatggaaggaggtgatatcagagtacgccggctcttttgtcgaacccagtggtatctacggatcgacaaacggggcaaggtgaagggtacccaggaaatgaagaacaactacaacataatggaaattaggacggtggcggtaggcatcgtggcaatcaagggggtggagagtgaattttatcttgccatgaacaaggaaggtaaattgtacgccaaaaaggagtgtaacgaagactgcaactttaaagagctcatcctagaaaaccattataacacgtatgcctcagcgaaatggactcataacggcggcgagatgttcgttgctctgaaccagaaaggtattcccgtccggggaaagaaaaccaagaaggagcagaaaaccgctcactttctgccaatggctatcacatag

SEQ ID NO: 24184 - DNA, 585 bp, synthetic construct
  misc_feature 1..585: note = Description of Artificial Sequence: Synthetic coding sequence
  source 1..585: mol_type = other DNA
atgcacaagtggatcctgacctggatcctgcccaccctgctgtaccgcagctgctttcatatcatctgcctagtggggactatctctttggcctgcaacgatatgacccccgagcaaatggctactaacgtcaactgttccagcccagaacgtcatactaggagctacgactacatggaagggggagacatccgggtcagaaggttattctgccggactcagtggtacctgaggatagataaacgggggaaggtcaaaggcactcaagaaatgaagaataactacaatatcatggagatcaggactgtggctgttggcatcgtagccatcaaaggggttgaatccgaattctacttggcgatgaacaaagaaggcaagctatacgcaaaaaaagagtgcaatgaagattgcaacttcaaggaactcattctcgaaaatcattacaacacatatgcgtctgcaaaatggacccacaacggcggggagatgtttgtggccctgaaccagaaaggaattccagtgaggggcaagaaaacgaagaaagaacagaaaaccgctcactttctccccatggcaataacatag

SEQ ID NO: 24185 - DNA, 705 bp, synthetic construct
  misc_feature 1..705: note = Description of Artificial Sequence: Synthetic coding sequence
  source 1..705: mol_type = other DNA
atgaagatctgcagcctgaccctgctgagcttcctgctgctggccgcccaagtgttactggtggaaggtaaaaagaaggtgaaaaacggtcttcactcgaaggtggtgagcgagcaaaaggacaccttggggaatacccagattaaacagaaatcccggccaggaaataagggtaaattcgtgaccaaggaccaggccaattgcagatgggcagctaccgagcaagaggaagggatttccctgaaggtggaatgcacccagcttgaccacgagttttcatgcgtgtttgctggtaaccccacctcatgcctcaaactcaaggacgaacgcgtctactggaaacaggtcgctcgcaacctgagatcccagaaggatatctgtcgctatagcaaaacagccgtgaaaactagagtgtgccgcaaggatttccccgaatctagcctgaaactagtgtcgtcaacgttgtttggcaataccaaaccaagaaaggagaaaacggaaatgtctccacgggagcatatcaaggggaaggagaccaccccatcttcattggcggttactcagaccatggccaccaaagctcccgaatgcgtcgaggaccccgatatggcaaaccagcggaagaccgctctcgaattctgcggcgagacttggagtagtctgtgtacatttttcctctcaatcgtgcaggatacaagctgctag

SEQ ID NO: 24186 - DNA, 705 bp, synthetic construct
  misc_feature 1..705: note = Description of Artificial Sequence: Synthetic coding sequence
  source 1..705: mol_type = other DNA
atgaagatctgcagcctgaccctgctgagcttcctgctgctggccgcccaggtgctgctggtggagggaaagaagaaggtcaaaaatgggctgcacagcaaggtcgtctcggagcagaaagacacactcggcaatacgcagattaagcaaaagtcccgaccaggtaacaagggaaagtttgtaacgaaggaccaagcaaattgccggtgggccgctacagagcaggaggaagggatctcccttaaggtggaatgtacccagctggatcacgagttttcatgtgtcttcgccggcaacccaacctcatgtctaaagttgaaggacgagcgcgtttactggaagcaggtggcgaggaacctgcgatctcaaaaggacatatgcaggtactcgaaaaccgccgtgaaaacaagagtgtgcagaaaagactttcctgagagctctctgaaacttgtgtccagtaccctcttcgggaacactaagccccgaaaggaaaagacagaaatgagtccccgcgagcacattaagggtaaggagaccactccaagctctctcgccgtgactcagacaatggccactaaagcgccagagtgcgtggaagatccagatatggcaaaccagaggaaaaccgcgttagaattctgtggtgaaacctggagctccttgtgcacattctttttatcaatcgtgcaggataccagttgttag

SEQ ID NO: 24187 - DNA, 2421 bp, synthetic construct
  misc_feature 1..2421: note = Description of Artificial Sequence: Synthetic coding sequence
  source 1..2421: mol_type = other DNA
atgggcgcccccgcctgcgccctggccctgtgcgtggccgtggccattgtggcaggagcttcctccgagtctctcgggactgaacagcgcgtagtgggccgagccgctgaggttcctggtccagaacccggtcagcaggaacagctggtgtttggcagtggcgacgctgtcgagctgtcttgtccaccgcccggaggcgggcccatggggccaaccgtttgggtgaaggacggaactggcctcgtccctagcgagcgagtactggtgggaccccagcggctccaagtcctgaatgcctcacatgaggactccggcgcttattcctgccggcagagactcacacaacgggtcctgtgccacttcagcgtgcgcgtaactgatgcccccagcagtggcgatgacgaggatggggaggacgaagccgaagatactggcgtggatacgggggctccgtactggacaaggccggagcgcatggacaagaagctactggcggtgcccgctgctaacaccgtccggttccgctgtcctgctgcgggaaacccgacacctagcatcagttggctgaagaatggccgcgaattccggggcgaacacagaatagggggcataaaactgcgccaccagcagtggtccctcgtgatggaatcagtagtgcccagtgatcgcggcaactacacctgcgtggtcgagaacaagttcggaagcattcggcagacatataccctcgatgtacttgaaaggtccccccacaggcctatcctccaggcgggattgccagcaaatcagaccgcggtgctcggatctgatgtggagtttcattgtaaagtgtatagcgacgcgcagccacatatacagtggctcaagcatgtggaagtgaacggtagtaaggtgggcccagatgggacaccctacgtcacggtgctgaaaacggcaggtgcaaacacgactgataaagagctggaggtattatcactgcacaacgtaactttcgaagacgctggcgagtacacatgcctggcgggcaattccatcggattttcccaccactcagcttggctggtggttctcccggcagaagaggagcttgtggaggcggatgaagccggctcggtttatgctggcatactgtcatacggcgttggctttttcctgttcattctggtagtagccgctgtcactttgtgtaggttgagatcaccccctaaaaaaggcttagggtctccaactgtccacaagatttcccgcttccctttgaaaagacaggttagccttgaatctaacgcctcaatgagctccaacactcccctggtgcggattgcccgcttgtcgagcggcgaaggtcctactcttgcgaatgtgagcgagctagagctgcccgcagacccaaagtgggagttatcccgagctaggctgacgctgggcaaaccgctgggagagggctgtttcgggcaggtggtcatggccgaagcaataggcatcgacaaagaccgcgccgccaagcccgtgacggtagcagttaagatgctcaaggatgatgccacggacaaggacttgagtgatctggtgtccgaaatggaaatgatgaagatgatcgggaaacacaaaaacatcattaatctgctgggggcctgtacacagggaggtccgctgtacgtcctcgtagagtatgccgcaaaaggcaatctacgcgagtttctccgcgcccgtcgaccccccgggcttgattactcatttgatacatgtaaaccaccagaggaacagctcacattcaaggacttggtaagttgcgcataccaggtggccaggggcatggaatatcttgctagtcaaaaatgtattcatcgtgacttggccgctcggaacgtactggtcacagaagacaacgtgatgaagatagccgactttgggctcgcccgtgatgtgcacaatttagactattacaaaaaaacaaccaatggtcggcttccggttaagtggatggccccggaggctctatttgatcgcgtgtacacccatcagagtgacgtgtggtctttcggcgttctcctgtgggagattttcactctgggaggctctccgtatccaggcatccctgttgaggagctgttcaaacttctcaaggaggggcaccgaatggacaagcccgccaactgcacacatgatctttacatgataatgcgggagtgctggcacgcagctccgtcacaacggcccacttttaagcagctcgtagaggatttggaccgagtgcttacggttacctcaaccgacgagtacttagacctttccgctccatttgagcagtattctcccggaggacaagacaccccatcttcatcctctagtggagacgattccgtctttgcgcatgacctgctgcccccggccccccccagtagcggcggctccagaacgtag

SEQ ID NO: 24188 - DNA, 513 bp, synthetic construct
  misc_feature 1..513: note = Description of Artificial Sequence: Synthetic coding sequence
  source 1..513: mol_type = other DNA
gagtacctggacctgagcgcccccttcgagcagtacagccccggcgggcaggacacaccttcctcctcttcctctggtgatgactcagttttcgcccacgatctactcgccacagggcctcagcagtgtgaaggttccttagccgcccatccagcagccggagctcagccattgccgggaatgagactgtcagccgatggggaaactgctacacaatcgttcggcctgtgcgtgtgtgtgtgcgtgtgtgtgtgttgtacatccgcttgtgcctgtgttcgcgcccacttagcctcccgatgtcggggcacactgggggttccggccgcagtgcaacgctcaccagattggtgctgttctaccgaagggcccctgttctggggggaccctgttcagaatgtgagtgggccgactagatgggaccccggacagggagccggccccgacatgaggcccctgccactgcaccatggaacctcacagggtctggggccatcgcacacccagtcgtag

SEQ ID NO: 24189 - DNA, 2427 bp, synthetic construct
  misc_feature 1..2427: note = Description of Artificial Sequence: Synthetic coding sequence
  source 1..2427: mol_type = other DNA
atgggcgcccccgcctgcgccctggccctgtgcgtggccgtggccatcgtagctggagctagcagcgaaagcctgggtaccgagcagcgagtagtgggccgggccgcggaggtgccaggtcccgagccggggcagcaggagcagctcgtgtttggatctggcgacgccgtcgagctctcttgtccacctcccggtggaggtcccatggggccaactgtgtgggtaaaggacggaactggcctggttcctagtgaacgggtgctggtgggcccccaacgactgcaggtgctgaatgcatcacacgaggattccggggcttactcctgtagacagagattgacacagcgtgttctgtgccatttctccgtgagagtcaccgacgcaccatcgtcaggcgatgatgaagacggagaggacgaagcggaggatacgggagtagatacaggagcaccatattggacgagacctgaaagaatggacaagaagctcctggcagttccggccgctaacaccgttagattcagatgccctgccgccggcaatcccacaccctcaatttcctggctgaaaaacggacgagagttccgaggagagcatagaataggggggattaagctgagacaccaacagtggtcgcttgtgatggagtccgtggtcccaagtgatcgggggaattatacctgtgttgtcgaaaacaagtttgggtcaattcggcaaacctataccctggatgtcctggaaaggtccccccataggcctatcctgcaggcggggttgcccgcaaaccaaacagctgtactgggatccgacgtggaattccactgcaaggtgtatagcgacgcacagccccatatccagtggctcaaacacgtcgaggtgaacgggtcaaaagtaggcccagacggcaccccttatgtgacagtgctgaaaagttggataagtgagtcagtcgaagccgatgtacggctccggctagcaaatgtgagcgaacgagacggcggggaatatctgtgcagggccacgaactttattggagttgcagagaaagccttctggctctctgtgcatggcccacgcgctgccgaggaagaactggtagaggccgacgaagccgggagtgtgtacgcgggtatcctgtcatatggagtgggctttttcctgttcatcctggtggtggcagcagttaccctgtgtcgcctgcgctcgccaccaaaaaagggtctcggaagtccgaccgtccataagatttcacggtttcccctcaagaggcaggtgagtctggaatcgaacgcctctatgtccagtaacacaccccttgttagaatagcgcgcctctcctctggggaaggcccaactcttgctaatgtgagcgaactggagcttcccgcggatccaaaatgggaactgtcaagggcgcgcctgacactcgggaagcccctgggggagggttgtttcggccaggtggtgatggctgaggccatcggaattgataaagatcgggctgccaagcctgtgaccgtcgcagttaagatgctgaaggatgacgccaccgataaagacctcagcgacttagtgtccgaaatggagatgatgaagatgatcggaaagcacaagaatattatcaaccttctgggtgcttgcactcaaggagggccactgtatgtgcttgtcgaatacgcagctaaggggaatttacgagaatttcttcgggctagacgaccccctgggctggattatagtttcgacacctgtaagcccccagaagaacagctgactttcaaggatctggtgtcttgtgcctaccaggtcgctaggggcatggagtatctggctagccagaaatgcatccatagggacctcgctgcccgtaatgtccttgtaaccgaggacaacgtcatgaaaatcgctgacttcgggctagctagagatgtccacaaccttgactattacaagaagaccaccaacggccgcttacctgtgaagtggatggcccccgaggcgctcttcgatagggtctacacccaccagtcagacgtctggtcatttggtgtcttgttatgggaaatattcaccctgggcggctcaccataccctgggattccggttgaggagctgtttaagttactcaaagagggccaccgcatggacaagcccgcaaactgtactcacgacctgtacatgattatgagggagtgttggcatgctgctccctctcaacgccctactttcaaacaactggtcgaggacttggacagggtcctgaccgtcacttccaccgacgaatacctggacctgtcagcgccctttgagcagtatagtccgggtggccaggacacgccctctagtagctcttccggcgatgacagcgtcttcgcacacgacttgctcccacccgctccaccttcgagtggaggctcccgcacatag

SEQ ID NO: 24190 - DNA, 2085 bp, synthetic construct
  misc_feature 1..2085: note = Description of Artificial Sequence: Synthetic coding sequence
  source 1..2085: mol_type = other DNA
atgggcgcccccgcctgcgccctggccctgtgcgtggccgtggccattgtagccggggcctcttcagagagcctgggcacagagcagagggttgtgggacgggccgcagaagtgcccggacctgagcccggtcaacaagagcagctagtttttgggagcggcgatgccgtggagctgtcctgcccccctcccggaggtggacctatgggcccgactgtttgggttaaggacggaactggcctggtgccgtcagagcgggtgctggttggcccccagagactacaagtcctgaacgcatcccatgaggattcgggggcttattcatgcagacagcggctaacacaacgcgtgctttgtcatttttcagtgagggtgaccgacgcccctagctccggagacgacgaagacggcgaggatgaggcggaggatacaggcgtggacaccggcgcaccctattggacccgacctgagagaatggacaaaaagctcctagctgttccagcagctaacactgtgcggtttcgctgccctgcagcaggcaatccaaccccctcaatttcctggttaaagaacggacgagagttccgcggcgaacataggattggcgggataaaactgcgtcatcagcagtggtcactggtgatggagagcgtagtgcccagtgaccggggaaactatacatgtgttgttgagaacaagtttggatccatacggcagacgtatacccttgacgttcttgagcggtcccctcatagacccatccttcaggccgggttacctgctaaccaaactgccgtgcttggaagcgacgtggagttccattgcaaagtctactccgacgcacagccccatatccagtggttaaaacacgtcgaggtcaatggatctaaggtcggccctgacggtaccccatatgttacggtgttgaaggtgagtcttgaatccaacgctagtatgtccagcaacaccccactcgtacgcatcgccaggctatcctctggcgagggccctactcttgccaatgtcagcgaattagagctgcctgctgatcccaagtgggaactctcacgggcaaggctgaccctgggtaagcctttgggggaagggtgcttcggtcaggtggtgatggccgaggccataggcatcgataaagaccgggcagctaagcccgtgacggtggcagttaagatgcttaaggacgatgccacagataaggatctttcagatctggtgagtgaaatggaaatgatgaagatgataggtaagcataagaacatcattaacctcctgggggcctgcacccagggtggtcctttgtacgttctggtggagtacgcagcgaaaggtaacctgagagagttccttcgggctagacggcctcccggactggactacagttttgatacttgtaaaccaccagaggaacagctgacattcaaggacctggtgtcctgcgcctatcaggtcgcaaggggcatggagtacctcgctagccaaaaatgcattcaccgcgatttagcggccaggaacgtgttggtgaccgaggacaatgtaatgaaaattgccgacttcgggctggcccgtgatgtgcacaatctagactactacaagaagaccactaacgggcgactgcctgtgaaatggatggcccccgaagcgctgttcgacagagtctatactcaccaatccgacgtttggagtttcggcgtcttgctttgggaaatatttacactgggtggaagcccttacccaggcatccctgtcgaagagctattcaaacttttgaaggaaggacaccggatggataagcctgctaactgcacacacgacctatatatgattatgagagagtgttggcatgccgcaccgtcacagcgacccacctttaaacagctggtggaggatttggacagggtactgacagttacttcaactgacgagtacttagacctcagcgctccattcgaacagtattctcccggcggtcaggacaccccttcctcttcttcaagtggagacgattctgtatttgcgcatgacctcctaccccctgctccccctagcagcgggggttccagaacttag

SEQ ID NO: 24191 - DNA, 2421 bp, synthetic construct
  misc_feature 1..2421: note = Description of Artificial Sequence: Synthetic coding sequence
  source 1..2421: mol_type = other DNA
atgggcgcccccgcctgcgccctggccctgtgcgtggccgtggccattgtggccggcgcttcctccgaatcactggggaccgagcagcgcgtggtcggtcgagctgcggaggtgcccggacctgagcccggacaacaggagcagcttgtgtttggctctggcgacgcagttgagcttagctgccctcctccaggtggcggacccatgggccctactgtgtgggtgaaggatggcaccggtctggtaccctcagagcgcgtcctcgtaggcccgcaacgcctacaggtgctgaacgcatcacatgaggatagtggagcctattcttgtcgacaaagactgacccagagagtgctctgccacttcagtgtcagggtgaccgatgctccaagcagtggcgatgacgaagacggagaagacgaagccgaggacaccggcgtcgatacaggcgctccctactggactagacctgaaagaatggataagaagctgttggctgtgccagcggccaataccgtgcgctttcgatgtcctgccgcgggaaatccaacccccagcatctcttggcttaaaaacgggagagagtttcggggggagcataggattggcgggattaagcttcgacaccagcagtggtccttggtaatggagtccgtggtcccaagcgaccgggggaattatacatgtgtggtcgagaacaagtttgggagcatccggcagacatacacactggacgtgctggaaagatccccccacaggccaattttgcaggccggcctaccggcaaatcagaccgcggtcttaggaagtgatgtggaatttcactgcaaggtctactcggacgcgcagccacacattcagtggctgaagcatgtagaggtcaatggatccaaggtcggcccagatggtacgccctacgtgaccgttctcaagacggctggtgccaatacgaccgacaaggaactggaggttctgtcactccacaatgtgacattcgaagatgcaggagaatatacgtgccttgctggcaattccatcggcttttcgcatcactctgcctggcttgtcgtccttcctgccgaagaggaactcgtcgaagccgatgaggccggcagcgtttacgctggcatactaagttatggagtcggtttcttcctgtttattcttgtggtggcagctgtgaccctatgtcggctacgaagcccccccaagaagggcttggggtctccaaccgttcacaagatttctagattcccactcaaacgccaggtctctctggaaagcaacgcttcaatgagctcaaatactccgttggttcgtatcgcccgccttagttcaggggaaggaccgaccctcgccaacgttagtgaactggaattgccggcagatccaaaatgggaactgagccgagcccggcttacactcggcaaaccactaggggagggctgcttcggtcaggtggtgatggctgaggcgatcgggatcgataaggatagggcagcaaagccggtcaccgtagccgtcaagatgctgaaagacgacgccaccgacaaggatctgagtgatctcgttagtgagatggaaatgatgaaaatgatcggcaagcacaagaacatcatcaatctgctgggggcatgtacgcagggaggccctttgtatgtgctggtagaatacgcagcaaaggggaacttacgcgagttcctgagagcaagacgccccccaggccttgactactccttcgatacttgcaagccgccagaggagcagctgacatttaaggacctggtaagttgcgcctaccaggtggccaggggcatggaatacctcgcctcacaaaagtgtatccaccgcgacctggctgctaggaatgtgctggtaaccgaagataatgtgatgaaaatcgccgattttggcctggctcgtgatgtgcacaacctggattactacaaaaaaactaccaacgggagactgccagtcaagtggatggcccctgaagctctgttcgaccgggtgtacactcaccagagcgatgtttggtcttttggcgtgctcctgtgggaaatctttacactcggcggttctccatatcctggcattcccgtggaagagctctttaagctgctcaaagagggacatcgcatggacaaacccgccaactgcacccacgacctatatatgatcatgcgggagtgctggcatgccgctccctcgcagcgcccgaccttcaaacagctggtcgaggacctggaccgggtcctgacggtgacttccactgacgagtatctcgacctatctgcacccttcgagcagtactcacctggcggccaggacacaccctcttcatcttcatcgggcgacgattccgtattcgcccacgacttacttccacccgctccacctagctctggaggaagtcggacctag

SEQ ID NO: 24192 - DNA, 2379 bp, synthetic construct
  misc_feature 1..2379: note = Description of Artificial Sequence: Synthetic coding sequence
  source 1..2379: mol_type = other DNA
atgggcgcccccgcctgcgccctggccctgtgcgtggccgtggccattgtggccggtgcgagttcagagtccctgggcacagagcagagggtggtcggtagggcggcggaggtgccgggtccagaacccggccaacaggagcaattggtgttcggctcaggcgatgccgtggaattatcctgcccgccacccggtggcggccccatgggacctacggtgtgggtcaaagacggcaccggcttggtgccctccgagcgggtgttggtggggccccagcgactgcaggtgctcaatgcttcccacgaggactctggtgcctactcctgccgacagcgcctgacacaaagagtcctgtgccacttcagcgtgcgggtgaccgatgcaccaagctccggggatgacgaagatggggaagacgaggccgaggacacgggagttgatacaggggctccatattggacaaggccggaaagaatggataaaaaacttctggccgtccctgcggcaaataccgtgcgctttaggtgccctgcagccggaaaccccacgcccagtataagctggcttaagaatgggcgcgaatttagaggcgagcaccgcatcggaggtatcaagcttcggcatcagcagtggagcttggttatggagtcagtagtgccaagcgatcgtgggaactatacctgtgttgtggaaaataaattcggctccatccgccagacttacacacttgacgttttggaaagatccccacatcgtcccattttgcaggccggtctccccgccaaccagaccgctgtgctggggtctgacgtggaatttcactgcaaggtgtactcagacgcacaacctcatattcagtggttgaagcatgtggaagttaatgggtcgaaggtcggcccggacggcacaccatacgtgacagtgttgaagactgccggggcgaacactacagacaaagaacttgaagtactgtcactgcacaatgtcactttcgaggacgctggtgagtatacatgcttggccggaaactctattgggtttagccatcactcggcctggttggtggtgttgccggccgaagaggagttggtagaagctgacgaggctggtagcgtctatgccggcattttaagttatggagtaggcttctttctcttcatcctcgtcgtggcggccgtcactctctgccgcctccgctcacctcccaagaaggggctggggtctcccacggtgcataagattagcaggttccctttgaagcggcagcaggtttcactggagagtaacgcatctatgtcctcaaataccccgctggtgaggatcgctcgcctgagctccggtgagggcccaactttggccaacgttagcgaactggagctgcctgcagaccccaaatgggaactgtctcgtgccagactcacactgggtaagcctttgggggagggatgcttcggacaggttgtgatggcagaagcaatcgggattgacaaggaccgagcagccaaacccgtaactgtggcagtgaagatgctcaaagacgacgctaccgataaggatctcagtgacctcgtcagcgagatggagatgatgaaaatgataggtaagcacaaaaatattatcaacctgcttggagcctgtacccaaggcgggcctttatacgtccttgtcgaatacgctgctaaggggaatctgagggagttcctgagagcgagaagaccacctggccttgattatagcttcgacacttgtaagccccccgaagagcagctgaccttcaaggacctggtttcttgtgcctaccaagtggctcgtggcatggaatatttggcaagtcagaaatgcattcaccgtgacctcgctgccaggaacgtcctggtgactgaggacaacgtcatgaagatcgctgactttgggcttgcccgcgacgtgcataatttggattactataaaaaaaccacaaatctggtactttggggacctgcacttggagacctgcacgcaggggggctacccgtccctagacacccttgtggtggcgccttgcaggctgctgaagggggaccaccccacgggcaggcccggcaactccacacaagacctgttcacgaccatgcaggggtgctggcatgtcgagctttgccagaggcgcatctgcaggccgccgggggtgggccaggtccatgcccttaccgggatgtgcacagacgcgtccccggcccggttggagctttcagggctgtgctgcccgggtggcctggccatccccagctgcaattgctaagaggtagattgcgagtgtgccccagacccgctgcacctggcccgacgcagcagtgggggttggcggacgttaaagggcactggtcccccactatgtag

SEQ ID NO: 24193 - DNA, 2409 bp, synthetic construct
  misc_feature 1..2409: note = Description of Artificial Sequence: Synthetic coding sequence
  source 1..2409: mol_type = other DNA
atgcggctgctgctggccctgctgggcgtgctgctgagcgtgcccggtccacccgtgttgagtcttgaagcttctgaggaagtagagctggagccctgcctggcgccaagcctggaacaacaggaacaggaacttactgttgcccttggccagcccgtgcgcttatgttgcggaagagccgaacgaggcggacattggtataaagagggctctaggttggcccctgccgggcgtgtgaggggctggcgtggaagactcgaaatcgcttcctttctgccagaggacgctggcagatacctgtgcctggcgagaggatcaatgatcgtcctgcagaacctgacgctgattactggggactccctaacatctagcaatgacgatgaagacccgaaaagccaccgcgacccaagcaataggcattcctacccgcagcaagctccatactggactcacccacagaggatggagaagaagctgcatgctgtgccagcggggaacactgttaagttcagatgccccgccgctggtaaccccactcctaccatccgctggctgaaagacggtcaggccttccatggggagaacaggatcggcggaatacggttacggcaccagcattggagcctcgtgatggaaagtgtggttcccagtgatcggggtacctacacatgcctcgttgaaaacgcagtgggaagtattaggtacaactatctcctcgacgtgctggagcgctctccacacaggcctatactgcaagcaggcttgcctgcgaatactacagctgtggtcggtagcgatgttgagcttctgtgtaaggtctatagtgacgcccaaccccacattcagtggctgaagcatattgtcatcaacggtagttcttttggggcagatggttttccatatgtgcaggtgcttaaaactgctgatatcaattccagtgaggttgaagtactatacctccgcaatgtatcggctgaggacgccggtgagtacacctgcttggctggaaattctattgggctatcttaccaatcagcatggctcaccgtacttccagaagaagatccgacttggaccgcagctgccccggaggccaggtatacagatattatcctctacgcgtcgggtagcctcgccttagcagtgctcctcctgttagcaggtttgtatcggggacaagcactgcacggtaggcacccgagaccacctgcaaccgttcaaaagctgtctcgcttcccgttggccaggcagttctcgctggaatctggtagctctggcaagtccagttcttccctggttcgcggcgtgcggctgtcaagtagtgggcccgccctgttagcaggcctggtctctcttgatctcccactggatcccctgtgggagttccctagagataggctcgtattgggcaagccattgggcgaaggctgcttcgggcaggttgtgagagcggaagcttttggcatggacccagcccggcccgaccaggccagtacagttgccgtaaagatgctcaaagacaacgcatctgacaaggacctggccgacctggtctcggagatggaggtaatgaaactgatcggacgccacaaaaacatcatcaacctgctgggggtgtgtacgcaggagggaccattgtacgtaattgtcgagtgtgccgcaaaaggtaatttgagggagtttctgagggcccgccgcccacccggtcctgacctgtctcctgacggtccaagaagtagcgaggggcccctgagttttcctgtgctggtcagctgtgcgtaccaggtggcgcgaggcatgcagtacttggagtctcgtaaatgcatccatcgcgatctggccgcccgcaatgtcctggttaccgaggacaatgttatgaagatcgcggatttcgggcttgcaaggggcgttcaccatatagactactataagaagacatccaacggcaggcttcccgtgaagtggatggcacctgaagctctattcgatcgggtctatacacaccaatctgatgtgtggtcatttggaatcctgttatgggaaattttcactctgggtgggtccccctatcccggcatccctgttgaagaattattcagcctcctgagggagggccacagaatggatagacctccacactgtccgcctgagttgtacggcttgatgagagagtgttggcacgccgcccccagccagaggccaactttcaagcagctggttgaagccttggataaagttttgttagccgtgtccgaggaatacctagaccttcgtttaacgtttggaccctattctcctagcgggggagacgcatcttccacatgttcttcctctgactcagtattttcccacgatccactgcccctgggctcgagcagctttccatttggcagcggtgtccagacttag

SEQ ID NO: 24194 - DNA, 2289 bp, synthetic construct
  misc_feature 1..2289: note = Description of Artificial Sequence: Synthetic coding sequence
  source 1..2289: mol_type = other DNA
atgcggctgctgctggccctgctgggcgtgctgctgagcgtgcccggcccccctgtgctgtcattggaagcaagcgaagaggtggagctcgagccatgcctggccccgagccttgaacagcaggaacaagagctaacggtcgcccttggtcaacctgtgagattgtgttgtggcagggcagagcgaggaggccactggtacaaagagggctccagactcgcccctgcaggcagagtccggggctggaggggccggcttgaaatcgctagtttcctccccgaagacgccggacggtatctgtgtctggcccggggctctatgattgtcctccaaaatttgacactgattacgggggattcactgactagttcaaacgacgatgaggaccctaagagccatcgtgatccaagtaataggcacagctacccgcagcaggctccctattggacccacccacagaggatggagaaaaagctgcatgcggttccagccggcaatacggtgaaattccggtgtccagcagcaggcaatcctaccccaactatccggtggcttaaggatggtcaggcgttccatggggaaaaccggataggaggaatcaggttacggcaccagcactggagtttggtcatggaatctgtcgtgccatcggaccgaggcacatacacatgtttggtggagaacgccgtcggcagcataagatacaattacctgctggatgttttggaacgctcacctcaccgcccgatcttgcaggcaggactcccagcgaacacgactgccgttgttggatccgatgtagagctgttgtgtaaagtgtactccgacgcacagcctcacatccagtggctcaaacacattgtaattaacggttctagttttggcgcagatggattcccctacgtgcaagtgctgaaaaccgcagacatcaattcaagcgaagtcgaggttctttacctaaggaacgtctcagccgaggatgctggtgaatacacgtgcctagcagggaattcaataggcctcagctaccagtcagcctggcttaccgttttgcctgggaccggtcgcattcctcacctcacctgcgattctctcaccccagcaggacgaaccaaatctccaaccttgcagtttagccttgaatccgggtccagcggcaaaagcagctccagcctcgtgagaggagtaaggctctcaagcagcggccccgcgctcctggccggccttgtttcactggacctgccgctcgaccccctgtgggaattcccaagggatcggctcgtgttggggaagcctttgggcgaagggtgttttggtcaggtcgttcgcgccgaagcatttgggatggatccggcacgccccgaccaggcctcgacggtggctgttaagatgctgaaggataatgcctccgataaggatctcgccgatcttgtgagtgaaatggaggtgatgaaactaattggccggcataagaacattatcaatctcctgggggtgtgtacccaggaggggcccttgtatgtcatcgtagagtgcgctgccaagggcaatctcagggaatttctgagagcaaggcgtcccccagggccggacttgagccccgacggtccacggagcagtgagggaccattatccttcccggtgcttgtgtcctgcgcatatcaggtcgcacgaggcatgcagtatctggagagccgcaagtgcatccatagggacctggccgctcgtaacgtgctcgtgactgaggacaacgttatgaagattgctgatttcggcttggcaagaggagtgcatcatattgactactataaaaagacaagtaacggcagattgcctgtaaagtggatggccccagaagcactctttgacagggtgtatacccaccagtctgatgtgtggtccttcgggattcttctgtgggagatattcaccctgggcggaagcccctatcccggaattccagttgaggaactgttttccctgctgcgggagggtcatcggatggacaggcctcctcactgtcctcctgaactctacggactcatgagagagtgctggcacgctgccccatcccagagacctactttcaagcagctggtggaagccttggataaagtgctccttgcagtgagcgaagagtaccttgaccttcgcttgacttttggcccttactcaccctccgggggcgacgctagctccacatgctctagttctgactctgtcttttctcatgatcctctgcccttaggcagctcctcatttccgttcgggtctggtgttcagacgtag

SEQ ID NO: 24195 - DNA, 3093 bp, synthetic construct
  misc_feature 1..3093: note = Description of Artificial Sequence: Synthetic coding sequence
  source 1..3093: mol_type = other DNA
ccctgcatgtggcaccagcagcacgtgccctgcgtgtgcgtgtgcccctacgtgtgcgtctgtatgagagtgtgcgtgtgcgtctgctggccccttagctgcgctcttaacgccgtgtgtgttacctgtccaaagagcgtggctttcgccttgggcgtcgctagtgctgcgtgcgggtgcgtgggcgtgaaagaatggtggctgcttcagcacgccctgcagtctgcatgtgccctgcatgtgaggtgcgttttgtgcactcaggaggcagctagcgacggagccgcgggatctgccgacctctgtcctctcccgaccgaaccgtgtctggctcctagtctggaacaacaggaacaggaactcaccgtcgcactgggccagcccgtgcgattatgctgcggcagagctgaacgggggggtcattggtacaaagagggtagccggctcgcacccgcggggcgggtacggggctggagaggccgactggagattgcttccttcctccctgaggacgccggcaggtatctgtgcttagccagaggatccatgatcgtgctccagaatctgaccttgataactggagattcccccccagccaccatgatgcgcaccccttcccctataggcactcctaggatcggcacggtcacaccaagtaaggttagccggtccccccggacttgtgtccctgccgcagcacaccttattaccgagaaaaggaggcccgtgtgggagcatacagtgatattgggagcttttccatgccccccagccccctattggacccacccgcagcgcatggagaagaagctccacgctgtccccgcaggaaatactgtcaaatttagatgtccggctgctgggaacccaactcccaccatccgatggcttaaagacggtcaggcgtttcacggtgagaaccggataggtggaatccgcctccgtcaccagcactggagcctggtcatggagtccgtggtcccatcagaccgcggaacatacacatgcttggtcgagaatgcagtgggatccatccgatataattatttgctagatgtgttggaaaggagcccacaccgacctatcctgcaggctggcctgcccgcaaataccacagccgttgttggctccgatgtggagctgctgtgcaaagtatattccgatgctcagccacacatccagtggctgaaacatattgtgatcaatgggagctcctttggggctgacggattcccgtacgtccaagtgctaaagacagcagatataaatagtagcgaagtggaggttctctatttgcgcaacgtgtccgctgaagacgcaggagagtacacatgtctggccgggaatagtataggtctgtcctatcaaagcgcatggctgaccgtcctccccggcgagcatctcaagggacaggagatgctgcgcgatgctcccctgggccagcagtggggcctgtggcctgtgggctggtccgtcagtgtgggtctgtggggattggcctggggggccgtctgtgggtttgtgggcctgtcctgtatgacggcaccgttgtgtctcagcacccgcggtcgcccgtgcgataggctgctccgatgtggttgcctaggactcggcatcaccaccgcgagttctgtgtgtgtccccacatatgtggggtcttgggagggcctaggttgtactgggcgtcctgtgtcccccttgacatcactgtcagtctgcgtgtgcccttgcgctcgagcggaggaagaccctacctggaccgccgcggcccccgaggcaagatatactgacatcatcctgtacgccagcgggtccttggccttagcggtactgctgctgcttgccgggttgtatcgcggacaagcactgcatggccgccaccctagaccgccagccacagtgcagaaactgagccgctttcctctggcaagacagttcagtctggagagtgggagctcaggaaagtcgagctcctccctggtccgaggggtccgactcagcagcagcggccctgccttgctggctgggctcgtctcattggacctcccgctcgacccgctctgggaattccctcgcgaccgcttagtactgggaaaacccctcggagaggggtgttttggacaggtggtcagagcagaggcgtttgggatggatcctgctcgccccgaccaggccagcactgtggcggtaaaaatgcttaaggataatgcgagcgacaaagatctagcggacctggtttcagaaatggaggtgatgaagctaataggcaggcataagaatattattaacttgctcggcgtttgtacccaggaaggacccctgtacgtgattgtggaatgtgccgccaaggggaacctacgcgagtttctgagagcccggagacctccgggcccggacctatcacctgatggcccccggtcgtccgaggggccactgtcatttccagtgctggtctcttgtgcttatcaggtggcccgcggcatgcagtacctggagagccgaaaatgtattcatcgcgatctggcagcgcgcaacgtactagtgaccgaggacaacgttatgaagattgccgattttgggctggcacgtggggtgcaccatatagactactacaaaaagacttcaaatggtagactccctgtgaagtggatggcaccggaagccctttttgaccgcgtctacacacaccagagcgacgtttggtcctttggcatccttctgtgggaaattttcaccttgggagggagcccttaccctgggatcccagtcgaggagcttttctccctccttcgcgaagggcataggatggataggcccccccattgtccacctgagctctacgggctcatgcgggagtgctggcacgctgcccccagtcaacggccaactttcaagcagctggttgaagcgttggacaaggtgctgctggccgtgtcagaggaatacctggatctgcgtctcaccttcggcccttatagcccctctggtggagacgcctcaagtacttgttcttcctcagacagtgtgttttctcacgaccctctcccactcgggagctcatcattccccttcggctctggagtgcagacatag

SEQ ID NO: 24196 - DNA, 2289 bp, synthetic construct
  misc_feature 1..2289: note = Description of Artificial Sequence: Synthetic coding sequence
  source 1..2289: mol_type = other DNA
atgcggctgctgctggccctgctgggcgtgctgctgagcgtgcccggacctcccgtccttagccttgaggcttccgaggaggtcgagttggagccttgcctggcaccatctctcgaacagcaagagcaggagcttaccgtagcactggggcagcccgtcaggttgtgctgtggaagagcggagcgaggaggacattggtataaagaaggatcccgcctggcgccagccggaagggttaggggttggcgtggacgacttgagattgccagttttctccccgaagatgccggaaggtacctctgcctcgctagggggtccatgatcgtgctccaaaatctgactctgattaccggagactccctgacgagttccaatgatgacgaggatcccaaaagtcatagggacccctcaaataggcactcgtatccgcagcaggctccatactggacccacccgcagcggatggagaaaaaactgcacgcggtacctgccggcaataccgtgaagttcagatgccccgccgctgggaacccaacacctaccataagatggcttaaggatgggcaagctttccatggggaaaatcgaattggagggatccggctgcgacaccagcactggtcccttgtgatggaaagtgtcgtaccctccgaccggggcacatatacctgcctggtggaaaacgcagtggggtccatcaggtataattacttattggacgtgctggaaaggtccccacataggcctattctccaggccgggctgcccgcgaacacaaccgcagtggtcggcagcgatgtggaactactgtgtaaggtttattccgatgcgcagccacacatccaatggctgaagcatatcgtgattaatggatcatcctttggagccgacgggtttccatacgtgcaggttcttaagacagccgatatcaactccagtgaagtcgaggtgctttatctccggaatgtttctgcagaggatgctggggaatatacctgtctggctggcaacagcattgggctttcctaccagtcggcatggctcaccgtgctgccaggaactggccgcatcccgcacctaacatgcgattctttaacgcccgcaggtcggactaaaagcccgactcttcagttttctctggagagtgggagttcaggtaaatccagctcttctctggttagaggggttcgcctgtcatcatccgggcccgcgctgcttgccggacttgtgtccctggatctgcccctggatcccttatgggagtttccgcgggaccggctggtgttaggaaagcccctgggcgaagggtgcttcggtcaggtggtgagagccgaagcctttggtatggatccggccaggccagaccaagcttctactgtcgcagtgaagatgctaaaggataatgcctcagataaggacctggccgacctggtttctgagatggaggtgatgaagttaataggccgacacaagaacataattaacctcctgggcgtatgcacccaggagggccccctgtacgttattgttgagtgtgcggccaaaggaaatttacgtgagtttttacgagctcgtcggcctccgggcccggatctgagccccgacggcccaaggtcctccgaaggcccactgagttttcctgtgctagtgagctgcgcttaccaggtagcccgcgggatgcagtaccttgagagcaggaagtgtatccacagagatctggctgcccggaatgtcctggtgacagaagataatgtaatgaagattgctgactttggcctcgctcggggggtgcaccatattgactactacaagaagacctcaaacggccggctgcccgttaagtggatggccccggaggccctttttgaccgggtgtatacccaccaaagcgatgtgtggtccttcgggattttgctctgggaaatcttcactctgggtggttccccgtaccctgggattcccgtcgaggaactcttcagtcttttgagggaggggcacagaatggatagaccgcctcactgtccacccgaactctacgggctgatgagagaatgctggcatgctgctcctagccagcgacctacctttaaacagcttgtggaggccctggacaaggtactgctcgctgtttccgaagagtatctggatttgaggttgacatttgggccatactccccaagtggcggagacgcctcctccacatgctcatcctctgacagtgtctttagccacgatcccctaccgttgggttccagttcatttcctttcggctctggcgtacagacttag

SEQ ID NO: 24197 - DNA, 2409 bp, synthetic construct
  misc_feature 1..2409: note = Description of Artificial Sequence: Synthetic coding sequence
  source 1..2409: mol_type = other DNA
atgcggctgctgctggccctgctgggcgtgctgctgagcgtgcccggccctcctgtgctcagtctcgaggctagcgaggaggtagagctggagccttgtttggcaccttctctggagcagcaggagcaagagcttaccgtggccttgggccagcctgtgagactgtgctgtggaagggcagaacgtggcggccactggtataaggaaggctcacggctcgcaccagctggaagagtgcgcgggtggcgagggcggttagagatcgcatcattcctgcccgaggatgcgggtagatacctttgcctggccagaggctccatgattgttctgcagaatcttactctgataactggcgactcgttgaccagtagcaatgacgacgaagatccgaagtctcatcgggatccttccaataggcactcctatccccaacaagccccctactggacgcacccacaacggatggagaaaaagctacatgcagtccctgccgggaacactgttaaattccgatgtcccgccgctggtaatccaacacccaccatcagatggttgaaggatggccaggccttccacggcgagaacagaattgggggcatccgcctgcggcaccaacattggtcccttgtaatggagtcagtcgtaccaagcgatcgtgggacatatacatgccttgtggagaacgcggttggtagcatacgctataactacctgttagacgtattggagcggagcccccaccgtccaatcctacaggcgggtctgccggctaataccactgcagtggtcggtagcgacgttgagctgctttgcaaggtctattcagatgcacagccgcacatccaatggctcaagcacatcgttattaatggaagctcgtttggtgccgacggctttccttatgtccaagttttaaagaccgcagacattaacagttcagaagttgaagtcctctaccttagaaatgtcagcgccgaggacgccggcgaatacacatgcttggccggaaattcaatcggacttagctatcagagtgcatggctgaccgtgctgcctgaggaggatcccacatggacagccgccgcccctgaagcacgatatacagatatcattctttacgccagcggttctcttgctctcgccgtactactgctgttggccggtctgtatcgcggccaggctttgcacggacgacatccccgaccgcctgctacagtgcagaaactgtctcgattccctttagcccgacagtttagcctggagtccgggtctagcgggaagagttcaagctccctggtgagaggtgtgcggctctcatcctccggccccgcgcttctggcaggtctggtgtcgctggatctgccgctcgaccctctttgggagtttccacgagacaggctcgtgcttgggaagccgctgggcgaaggctgctttggtcaggtggtgagagcagaggcgttcggcatggatccagcgcgccccgaccaggcctctacggtggcagttaagatgttaaaggataacgcatctgacaaggacttagctgatctcgtaagcgaaatggaagtgatgaagcttatcgggcgtcataaaaatataatcaatctcttgggagtatgtactcaagaagggccattgtacgtgatcgtggagtgtgcagctaagggcaacctcagagagtttctccgcgcaaggcgccctcccgggccggatctctctccagatggaccccggtcatccgaaggaccactgtcctttcccgtacttgtgagttgtgcctatcaggtggcaaggggtatgcagtacctcgaatcccggaagtgtattcatcgggatctcgcagctcgcaatgtgctcgtaacagaagacaatgtaatgaagatcgccgatttcggcctggcacggggcgtccaccacattgattactataaaaagacgtcaaacggcaggctgccagtgaagtggatggctcccgaggcactgtttgaccgcgtgtatacacaccagtcagatgtatggagttttggtattttgttgtgggagattttcaccctggggggatccccctaccccggcattccagtggaggagctgttttctctgctgagagaaggacatcgcatggataggccaccacactgcccccctgagctttatggcctcatgagggaatgctggcacgctgcccccagccagcggcccactttcaaacaactggtcgaagcgctagataaggtgctccttgcagtgagtgaagaatacctggacctcagactgacatttggaccttatagtccgagtggtggtgacgcctcttcaacttgttccagcagtgattcagtgtttagccacgaccccttgccgctcggatccagctcattcccgttcggcagtggcgtgcagacatag

SEQ ID NO: 24198 - DNA, 606 bp, synthetic construct
  misc_feature 1..606: note = Description of Artificial Sequence: Synthetic coding sequence
  source 1..606: mol_type = other DNA
atgcggctgctgctggccctgctgggcgtgctgctgagcgtgcccggcccacctgtcttgtctcttgaagcctctgaggaggtcgagcttgagccatgccttgcaccttcattagagcagcaggagcaggaactcactgtcgccctcgggcagcccgtgcgactgtgctgtgggcgggccgagagaggtggccattggtacaaggaagggtcgcgtctggcaccagctggccgggtgcgcgggtggaggggtcgtctggagatcgcctcttttctgcctgaggatgctggtaggtatctgtgcctggctaggggatcaatgatagtgctgcagaacttgactctgattaccggcgatagtctaacttccagcaatgacgatgaggatcccaagtcccatcgggaccctagcaatcgtcattcttacccccagcaggcgccatactggacccatcctcagcgcatggaaaagaagttgcacgcagtaccagccggaaatacagtaaagtttaggtgtccagcggccggcaacccgacacctactattcgctggctcaaggatggccaggcatttcacggggaaaataggattggggggataagatag

SEQ ID NO: 24199 - DNA, 264 bp, synthetic construct
  misc_feature 1..264: note = Description of Artificial Sequence: Synthetic coding sequence
  source 1..264: mol_type = other DNA
atgcggctgctgctggccctgctgggcgtgctgctgagcgtgcccgggcctccagtgctgtcgctggaggctagtgaggaagtcgagctggagccctgcctcgccccctcactggagcagcaggagcaggagctgactgtggccttgggtcagccggtaagattatgttgcggacgggctgagagaggtggtcactggtacaaggaagggagtaggttggcgccggccggcagggtgcgaggatggcgaggccgtttggagtag

SEQ ID NO: 24200 - DNA, 327 bp, synthetic construct
  misc_feature 1..327: note = Description of Artificial Sequence: Synthetic coding sequence
  source 1..327: mol_type = other DNA
atgcggctgctgctggccctgctgggcgtgctgctgagcgtgcccggacccccagtgctgtctctggaggcctcagaggaggttgaattagaaccatgcctggccccctccctcgaacagcaagagcaggaactcacagtcgcactgggacagcccgtgcggctgtgttgtggaagggcggaacgtggcggtcattggtataaagagggatcacgtcttgcaccagctgggcgcgtgcggggatggcgtgggagactcgagattgcaagctttctcccagaggatgcgggaagatatctctgccttgcaaggggtagtatgatttag

SEQ ID NO: 24201 - DNA, 345 bp, synthetic construct
  misc_feature 1..345: note = Description of Artificial Sequence: Synthetic coding sequence
  source 1..345: mol_type = other DNA
atgcggctgctgctggccctgctgggcgtgctgctgagcgtgcccggtccgccagtactatctctagaggcctctgaggaggtcgaactggaaccgtgtttagccccttccttggagcagcaggagcaggagctgacagtagctctcgggcagccagtccgcctgtgctgcggaagggcggagcgaggcggccactggtacaaagagggaagtagattggctcctgccggtagagtgagagggtggagagggagacttgagatcgcaagcttcctgcccgaggatgccggacgctatctgtgcctggcccggggctctatgatcgtgctacaaaatttgacctag

SEQ ID NO: 24202 - DNA, 7164 bp, synthetic construct
  misc_feature 1..7164: note = Description of Artificial Sequence: Synthetic coding sequence
  source 1..7164: mol_type = other DNA
atgctgcggggccccggccccggcctgctgctgctggccgtgcagtgcctggggacggctgttcccagtactggcgcatccaaaagtaaacgccaggcacagcagatggtccagccccagtctcccgtggcagtcagtcaaagtaagcccggttgctatgacaatggaaagcattatcagatcaatcagcagtgggaacgaacatatctcggcaacgccctggtctgtacctgttatggtggctctcgtggatttaactgtgagtcaaagccggaagcagaagaaacgtgctttgacaaatatacaggaaacacatacagagtgggagacacatacgagagacctaaggatagcatgatatgggactgtacatgcatcggagcgggccgcggccgcatttcttgtaccattgctaacagatgtcacgaaggaggacagtcttacaagatcggagacacctggcgcagaccccatgaaactggcggttacatgctggaatgtgtgtgtctggggaacggcaagggagaatggacatgtaagccaatcgctgaaaagtgtttcgaccacgccgccggaacctcctatgttgtcggcgagacatgggaaaagccctaccaggggtggatgatggtggactgcacctgcttgggagagggtagcggacgaatcacttgcacaagcagaaatcgctgtaacgaccaggacacccggacctcgtatcgcatcggagacacctggtctaagaaggacaatcggggaaacctcctgcaatgcatttgtaccggcaacggacggggcgaatggaagtgtgagcgccatacaagtgtgcagactacaagctccggatccggtcctttcaccgatgtgagggcagctgtctatcagccccagcctcaccctcagcctccaccctacgggcattgtgttaccgattctggcgtcgtatatagtgtagggatgcaatggctcaagacacagggaaacaaacagatgctctgtacctgcttgggaaacggggtcagctgccaggagactgccgtgactcagacctacggcggcaattccaacggtgaaccttgtgtgctgcccttcacctacaacggacggaccttttactcctgcacaacagaggggagacaggacggccacctctggtgtagcaccacatccaactatgagcaggatcagaagtacagcttctgtacagaccacacagtcctcgtgcaaacacgaggtggcaacagtaacggagcactgtgtcactttcccttcctgtataacaaccataattacacagattgcaccagcgaagggcgccgggataatatgaagtggtgcggaacaacgcagaactacgacgctgaccaaaagtttgggttctgtccgatggccgctcatgaagagatttgtaccacaaacgaaggtgtgatgtatcgcatcggtgatcaatgggataagcagcatgatatgggccatatgatgaggtgcacatgcgtcggtaatggaagaggggaatggacatgcatcgcatatagtcagctgagagaccagtgcatcgtcgacgacattacctataatgtgaacgacacgtttcataaacgacatgaggagggtcatatgcttaactgtacttgcttcggccaagggagaggccgttggaagtgcgatcccgtggaccaatgccaggactccgagactggcacattttaccagattggggactcatgggagaagtacgtgcacggcgtaaggtatcaatgttattgttatggccgaggcattggcgagtggcactgccagcccctgcagacttacccctcctctagcggtccggtcgaggtgtttatcactgaaacgccctcccagcctaactcacatcccatccagtggaatgccccacagccatctcatattagtaaatacattttaagatggagaccaaaaaacagcgtgggaaggtggaaagaagccacgattccaggtcacttgaattcttacaccattaaaggactcaaacctggggtagtctatgagggccagctgatcagcatccagcagtacggccaccaggaggtgaccaggtttgatttcaccacaacctctacttctactcccgttaccagcaacaccgtcaccggagaaaccactccatttagcccacttgttgccacctcggagagcgtcaccgagattaccgcttctagtttcgtggtaagctgggtgtccgctagtgatacagtgagtggctttcgtgtcgaatatgagctctccgaggagggggatgagccccagtacctggacctaccaagcaccgcgacaagtgtcaatattcccgatcttctgccaggacggaaatatattgtcaacgtgtatcaaatttcggaagacggcgagcagagcctgattctgtccacttcccagacgacggcccccgatgcccctccagacacgacggtggatcaggtcgacgacacaagtatcgttgtcaggtggtccagacctcaagcccctataacggggtacaggattgtctactcaccctccgtggagggctctagcaccgagctgaacctgcccgagacagcaaactctgtgacactaagcgatcttcagccaggggtccaatacaacataacaatctatgcggtagaggaaaatcaggaatccactcccgtggtcattcaacaggagacaacgggaaccccaaggagcgacactgtgccttccccgcgggatttacagtttgtcgaagttaccgacgtgaaagtcactataatgtggacaccccccgagagcgccgttaccgggtatcgggtagacgtgattcctgtcaacctgccaggggaacatggtcagcgcttaccaatttcccgcaatacatttgctgaggtgactggcttgtcgcctggagtcacctactattttaaagtcttcgctgtttcgcacggtagggagagtaaacctctcacagcccagcagaccactaaactggacgctcccactaacttgcaattcgtcaacgagacggactcaaccgtgttagttaggtggacccctccccgcgctcaaatcacaggctaccgactgactgtggggcttactagacgcggccagccccggcagtacaacgtcggtccatctgtcagcaagtatccgctgagaaacctgcagccagccagtgagtacaccgtcagtttagtggccatcaaaggaaatcaggaatcccccaaggctacaggggtgtttactaccttacagccgggcagttcaatcccaccctacaacaccgaggttaccgagaccacaattgtcatcacatggactcctgcacctcgaatcgggtttaaacttggagtacggcccagccaggggggtgaggcaccacgcgaggtaacaagcgattcgggttcaatcgtggtctctggactgacccctggcgttgagtacgtgtataccattcaggtgctccgtgacggccaagaacgggatgctccaatcgtgaataaagtagtcaccccactgagcccacctacaaacctgcacctggaggctaatccagacacgggggtattgaccgtgtcctgggaacgttccactaccccagatatcacaggctaccgcattacgactacaccaaccaacggccagcagggcaatagtctggaagaggtggtccatgcagaccaatcatcatgtacgttcgacaatctgtcaccaggtttggagtacaacgtctcggtttacacagtcaaggacgacaaggagtcagtaccaatttctgatactattattcccgaggtgccccaactaacggacctgtcgttcgtggatataaccgactccagcattggattacgctggactccacttaactctagcacaattattggatatagaatcaccgttgtggcggcaggtgaaggcattccaatctttgaggatttcgtggattcttcagtcggatactacactgtgacgggcctagagcctggcatcgattacgacatttccgtgatcacactcataaatggcggcgaatccgctcccacaaccttaactcaacaaacagccgtgcctccccccacggacctcaggttcttcagtgacatcactgcaaactccttcaccgtgcactggattgccccccgggcaacgatcacaggttaccgcattcgacatcaccctgaacacttttctgggcgtccccgggaggatcgcgtgccacattcgcggaattcgatcaccctgacaaatctgacacctggaactgaatacgtggtttccattgtggcactgaacgggcgggaagaaagtccgctcctgatcggccagcaatccaccgtcagtgatgtgccaagggatctggaagtggttgccgctacacccactagcttgctcatctcctgggatgcgcccgcagtgaccgtgcgctactaccgcataacctacggggagaccggagggaacagccctgttcaggaatttaccgttcccggcagcaagtccacagctactatctccggcctgaagcccggcgtcgactacaccattactgtctacgctgtgacaggtagaggagactcaccggctagctccaaaccaatatccatcaattacaggacagaaatagataaacctagccagatgcaggtgaccgatgtacaggacaatagcattagcgtgaagtggctccctagcagctcccccgtcacggggtatcgtgtcacaactacgccaaaaaatggacccggtccgaccaaaaccaagactgccgggcctgaccagaccgagatgacaatagagggcttgcagccgacagtggaatacgtggtgtcagtgtatgcccagaacccctccggggagagccagcccttagtgcagaccgccgttacaaacatagaccgacctaaaggtctggcgtttacggatgttgatgtggactccattaagattgcatgggagagtcctcagggtcaggtttctcgttatagggtcacgtactcctctcccgaggacgggatccacgagctctttcctgccccagacggcgaggaggacactgcagaattgcagggtttgaggcctggttccgaatacaccgtgagcgtggttgcattacacgatgacatggagtctcagcctctgatcgggacacagagtactgcaattcctgcccctacagacctgaagtttacccaggtgacccccacctctctgtctgcacaatggacgcctccgaacgtccaattgactggctacagggtgcgggtgactccaaaggagaagacgggaccaatgaaggaaatcaatcttgctcccgattcctccagtgtggttgtttccggacttatggttgccacaaagtacgaagtgagcgtctacgccctgaaagacacacttacatcgaggcccgctcagggagttgtgacgacccttgaaaatgtgtcccctccccggagggcccgcgtcaccgacgcgaccgagaccaccatcacaatcagctggcggacaaaaaccgagaccataaccgggttccaggtggacgccgtaccggctaacggccagacccctatccagcggaccattaaacctgatgtcaggagttatacaatcaccgggctccaacctgggacagattataaaatatatctctataccttgaacgacaacgcccggtcgtcaccagtggttattgatgcctccaccgctatagatgccccatccaacctcagattcctggctactactcctaactccctgctggtgtcgtggcagcccccgagagcaaggattaccggttacatcatcaaatacgagaagcccggaagcccccctagagaagtggtccccaggcccagacccggcgtgactgaagccaccattaccggtttggaacctggaactgagtataccatctatgtcattgccctcaaaaacaaccagaagtctgagcctctcatcggaagaaagaaaacagatgagcttccccagctcgttaccctgccccaccctaatctgcacggtccagaaatcctggacgtgccatctactgtgcagaagacccctttcgttacccacccgggctatgatactgggaatgggatccagctgccaggtacctctggtcagcaacctagtgtaggccagcagatgatcttcgaagaacacggcttcagaagaactacaccccccacaaccgccacccctattcgtcacagacccaggccttatcccccaaatgtcggagaggagatccagattggtcacatccctcgagaggacgtggattaccacctatacccgcatgggccaggtctgaatcctaatgcttctactggacaggaagccttgagccagacaactattagctgggcaccattccaggacacctccgagtacataattagctgccacccagtcgggaccgacgaagaacctctgcagtttcgagtacctggaacctctacaagtgccacactgaccggcctgactcgcggcgcgacctataatgttatagtggaggctctcaaggaccagcaacgacataaggtgcgggaagaagttgtgactgttggtaactccgtcaacgaggggctgaaccaacccacagacgactcctgctttgacccctacacggtgtcccactatgcggtaggggatgagtgggagagaatgtctgaaagtggctttaagctgctctgtcagtgccttggctttggctctgggcactttcgctgcgacagctcccgatggtgccatgacaacggtgtgaattacaagatcggtgaaaagtgggaccgccaaggggaaaacggacaaatgatgagctgtacgtgtctggggaacggcaagggagagttcaaatgcgatcctcacgaggccacatgctacgacgatgggaaaacataccacgtgggagagcaatggcagaaggagtatttgggagccatttgctcctgtacttgcttcggcggacagagggggtggcggtgtgacaactgccggaggcccggcggcgagcctagccctgagggcacaaccggccaatcttacaaccaatattctcagagatatcaccagaggaccaacacaaacgtgaactgtcccatcgagtgttttatgccactggatgttcaggcagatagagaagattctcgagaatag

SEQ ID NO: 24203 - DNA, 7341 bp, synthetic construct
  misc_feature 1..7341: note = Description of Artificial Sequence: Synthetic coding sequence
  source 1..7341: mol_type = other DNA
atgctgcggggccccggccccggcctgctgctgctggccgtgcagtgcctcggcactgcagtgccaagcactggagcttcaaagagcaagaggcaagcacagcagatggtccagccccagtccccagtggctgtgagccaaagcaagcccggctgttacgacaatggtaaacactatcaaattaatcagcagtgggagaggacatatttaggcaacgccctcgtatgtacctgttatggcggaagccgaggcttcaattgtgagtctaagccggaggccgaagagacttgttttgacaagtatacgggtaacacttatagagtgggagatacctacgagcgccccaaagactcaatgatttgggattgtacctgcatcggcgctggacgaggacggattagttgcaccatcgccaataggtgtcacgagggcggccagtcttataagattggcgatacttggagaagaccccacgagaccggtggctatatgttggaatgcgtctgcctgggtaatggtaagggcgagtggacctgcaagcccattgcagagaaatgctttgatcatgccgccgggacctcatacgtcgtgggggagacatgggaaaagccgtatcaaggttggatgatggtcgactgcacttgcttgggtgagggtagcggccgaatcacttgtacatcacggaaccgttgcaacgaccaggacaccagaacctcttaccgcatcggcgacacttggtctaaaaaagataatcggggaaaccttctgcagtgcatatgtacgggaaacgggcggggagagtggaaatgtgaacggcacaccagcgtccagactacatcaagtggatccggcccctttacagatgtgcgagccgctgtttaccagcctcaaccccacccacagcctccaccatacggccactgtgtaacagactctggcgtcgtttactcggtcggaatgcagtggttgaaaacccagggtaataaacagatgctgtgtacttgtttaggcaacggagtgtcttgtcaagagaccgccgttacccagacatatggcggcaacagcaatggcgagccatgcgtcctgccctttacatataatggtaggacattttactcctgcaccactgaagggagacaggatggccacctgtggtgctcaactaccagcaattacgaacaggatcagaagtacagcttttgtacggaccacacagtgctggtgcagactcggggaggtaattcaaacggtgctctttgccactttccgtttctctataacaaccataactataccgattgtactagcgaaggtcgtcgggataacatgaaatggtgcggcacaactcagaactacgacgctgatcagaaatttgggttttgcccaatggcagcacacgaggagatctgtaccacgaacgagggcgttatgtacaggattggcgaccagtgggacaagcagcatgatatgggccatatgatgcgctgcacatgcgtaggcaatggacgtggcgaatggacttgcatcgcctacagtcaactgagagatcagtgtattgtggacgatattacttataatgtgaatgacacctttcacaagcggcacgaagagggccacatgctgaactgcacctgtttcggtcagggccgcggaaggtggaagtgtgatccagtcgaccaatgccaggattcagagactgggaccttttatcagatcggggatagctgggagaaatatgtgcacggtgtgaggtaccagtgttattgttacggaagaggtataggcgaatggcattgccaacctctgcaaacatacccttcatcctccggccccgttgaggtttttataaccgagaccccatcacagcccaactcccaccctattcagtggaacgcgcctcagcctagccatatctcgaagtacattttaagatggagacccaagaacagtgtaggacgatggaaggaggctactattccagggcatttgaactcctataccatcaaaggactcaagccaggggtggtctacgagggacaactcatttctattcaacagtatggccatcaagaagtgacccgattcgattttactacaactagtacctccacgcctgtgacctccaacaccgttacaggcgagacgacaccgttttcccctttggtggccacaagcgagagcgtgacggaaatcaccgccagttcgttcgtagtgagttgggtttcagctagcgacacagtttccggtttccgggtggagtacgagttgagtgaagagggcgatgagccccagtatctagacttgccttccactgcaaccagcgtgaatattccagacctgttgcccgggagaaagtatatcgttaacgtttatcagatttccgaagacggtgagcagtcgcttattctgagcacctcacagactactgcgcccgacgctccaccggataccacggtggaccaggttgacgacacatctatcgtcgtacgttggagtaggcctcaggccccgatcacgggctacaggatcgtgtatagcccatccgtggagggctctagcaccgagttgaacctgcccgagactgctaatagcgtcactcttagcgatctgcaaccgggagttcaatacaacatcaccatttacgcagttgaagagaatcaagagtcaaccccagtcgtgattcagcaggagacaactggaaccccaaggtcagacaccgtgccttctccaagagatttgcagttcgttgaggttaccgacgtgaaggtgaccatcatgtggacaccaccggaatccgcggtaactgggtatcgcgtggatgttatcccggtgaatttaccaggagaacacggtcaacggctccctatctctagaaatacgttcgctgaagtgaccggactgtcaccaggcgtaacatactatttcaaagtgtttgctgtgtcgcatggccgtgagtccaagccccttaccgcacagcagacaaccaagctggatgcccccactaacctgcaatttgtcaatgagactgactccactgtgttggtacgatggactccaccaagagcccagataactggctaccgccttacggtgggcctgacccggcggggacagcctagacagtacaatgtggggccttcggtgtcaaagtatccactaaggaacctgcagcctgcttcagaatataccgtgtcactggtggcaattaaaggtaatcaggagagcccaaaagcgacgggagtgttcacaactctgcagcccggaagctccattcctccttataacacagaggtaaccgagactacgatcgtgataacttggacacccgctccaaggataggcttcaagctgggcgtgaggccaagccagggaggagaagccccccgcgaagtgacatctgacagcgggagcattgttgtcagcggccttaccccaggggtggaatacgtgtacaccatccaggtgctcagggatgggcaggaacgagacgcccccatcgtcaacaaagtggtcacacccctgagtccccctaccaacctccacctggaagcgaaccccgacaccggagtactgacggttagctgggagcgtagtaccaccccagacattaccggatacaggataactactacccccacgaatggacaacagggtaacagtctggaagaggtagtgcatgctgatcaaagctcttgcaccttcgacaatttgtctccaggcctggagtacaatgtgtccgtatatactgtgaaggacgataaggaaagcgttcctattagcgatacaattattccggaggtccctcagctcacagacctgagtttcgtggacattaccgactccagcattggattaagatggactcctttgaatagcagtaccatcattggctaccgtattaccgtggtcgccgccggcgaaggaattcccatcttcgaagattttgttgacagctccgtgggctactacacagtaacaggtctggagcctgggatcgattacgacatctctgtcataactctgatcaacgggggcgaaagtgccccgaccacattaacacaacagacagcggtcccacctcccaccgatctccggttcacaaatattggtccagatacgatgagagtgacatgggctccacctccctcaatcgacttgaccaatttccttgtgagatacagtccggtcaaaaatgaagaggatgtcgcggagcttagtatttctccatctgataatgccgttgtcctcaccaaccttcttcctggtaccgaatatgtggttagcgtctcgtctgtttacgaacagcacgagagtacaccgttacgggggcgacaaaaaaccggacttgattcccccacagggattgatttcagtgacatcacagcaaatagtttcacagtgcattggattgctcctcgggccactatcactggctatcggattcgccatcacccggagcatttctccggcaggccgcgcgaagacagggtgccccactcccgcaatagtatcaccttaactaacttgactcccgggacggagtatgtcgtgagtattgtggcactgaacggccgagaggaatcccctctgctgattggtcagcagtccaccgtgtctgacgtgcccagagacctggaggtagttgccgccactccaaccagcctgctgattagctgggacgctcctgctgtgacagtgcgatactacaggataacctacggtgaaaccgggggcaacagtccggtccaagaattcaccgtcccaggatcaaagtcaacagctacaatctccggattgaaacccggagtggactatacgattaccgtgtatgctgtgactgggcgtggggacagcccggctagttcaaaaccaattagtattaactaccgaacagaaattgataaaccatcccagatgcaggtgacggacgtccaggataattctattagcgtcaagtggctgccatcctcaagtcctgtgactggatatcgcgtaactacaacaccaaaaaacggtcctgggcccacaaagacaaagacagccggtcctgaccaaaccgaaatgacaatcgagggactacagccgacggtggagtacgtagtttccgtatacgcgcaaaatccatccggtgagtcccagcctctggtccaaaccgcagtcactaatattgatcgccccaaaggtcttgctttcacagacgtagacgtggactcaatcaagatcgcatgggaatcccctcaggggcaggtgagcagatatagggtgacctacagctcacccgaagacggcatccatgagctgtttcccgctcccgacggagaggaggatactgccgaacttcagggcttgaggcccggatcagagtatacagtttccgtggtggcactccatgacgacatggaatctcagccactgatcggcactcagtcaacagctatccccgcaccaaccgacctgaagttcacacaggtgactcctacgagcctttcagcacaatggacccccccaaacgttcaattaacgggctatagggtccgcgtgacacccaaggagaaaacaggccctatgaaggagatcaacctggcaccagacagttcaagcgttgtcgtctctggactaatggttgctactaagtacgaagtgagcgtgtatgccctgaaagacacactcacatcccgacctgcacagggagtagtaactactctcgaaaacgtcagccccccacggagagcacgcgttacagatgccaccgaaactacaataactatttcttggcggactaaaactgagacaattaccgggtttcaagttgatgctgtgcccgccaacggccagactcctatacaaagaacaattaaaccagatgtccgcagctatactattacagggctgcagccgggaactgattacaaaatatacttgtacacactgaatgacaacgctaggtcttcccccgtagttatcgacgctagtaccgccatcgacgctccatctaatctccggttcctcgctaccacccctaattcattgctcgtaagctggcagcctcccagggcaaggattaccggatacattatcaaatacgagaagccaggatcaccgcctcgcgaagtcgtgccgaggcccaggccaggcgttacagaagcaacaattaccggcttagagccgggtacagaatatactatctacgttattgctctgaaaaataatcagaagtccgagccactgattggacgcaagaagaccgatgagttgcctcaactggtgaccttacctcatccaaatttgcatggcccggagatcctggacgtcccctccactgtacagaaaaccccattcgtaacccaccccggctacgacactggtaacgggatccagttgccgggcacctcagggcaacagcctagtgtaggacagcaaatgatctttgaagagcatggatttcggcgcaccacccctcctaccacagccacccccataaggcatcgaccaagaccctacccacctaatgtgggacaggaagcacttagccagacaaccatctcatgggcacccttccaggacacttccgaatatatcattagctgccatcctgtcggcaccgacgaggaacccttacagtttcgagtacccggcaccagcacctctgccactctaacgggcttgacaaggggagctacttacaatgtcattgtcgaggccctgaaggaccaacagcggcacaaggtgagggaggaggtggtgactgtgggaaatagtgtcaatgagggtcttaatcagccaacagatgacagctgctttgatccatatacagtttcacattacgccgtgggtgacgagtgggagaggatgtcagagtctggatttaagctactgtgtcaatgcctgggcttcggtagtggccattttcgctgcgattcatcccgatggtgtcatgataacggggtgaactataaaattggcgaaaagtgggatcgccagggagaaaacggacagatgatgtcctgtacttgtctcgggaacggaaagggcgaatttaaatgtgaccctcacgaggctacatgctatgatgacggcaaaacataccatgtcggtgagcagtggcagaaagaataccttggggccatctgcagttgcacctgtttcggagggcagcgcggatggaggtgcgataattgccgtcgaccaggcggagaaccctcccctgaaggaactacgggccagtcttataaccagtacagtcaacgttaccaccagaggacgaacaccaatgtaaactgccctattgaatgctttatgccactggatgtgcaggcagatcgagaggatagcagggaatag

SEQ ID NO: 24204 - DNA, 7068 bp, synthetic construct
  misc_feature 1..7068: note = Description of Artificial Sequence: Synthetic coding sequence
  source 1..7068: mol_type = other DNA
atgctgcggggccccggccccggcctgctgctgctggccgtgcagtgcttgggcactgccgtgcctagtacaggcgcgtccaaatcaaagcggcaggcccagcaaatggttcagcctcagagcccagtggccgtttcccagtcgaagcctgggtgctacgacaacggaaagcattatcagattaatcagcaatgggaaaggacatacttggggaacgctctcgtgtgcacatgttatggaggttcgagggggtttaactgtgaatccaaaccagaggccgaggagacctgctttgataagtacacaggaaatacctacagggtcggagatacatacgagagaccaaaggactcgatgatctgggactgcacttgcattggagcagggaggggtaggatatcttgtactatcgcgaaccgatgccatgagggaggacagtcgtacaaaattggcgacacctggcgcaggccacacgaaactggcggctatatgctagaatgcgtctgtctcggtaatgggaaaggcgagtggacctgcaaaccaattgctgagaagtgttttgaccatgctgctgggactagttacgtggtaggagagacatgggaaaagccataccaggggtggatgatggtggattgtacttgcttgggtgaagggtcaggtcgcataacctgcacatctcgaaatcgctgcaatgaccaagatacaaggacgagctatcggattggggacacatggagcaagaaggacaaccgcggcaatcttcttcagtgcatctgtacaggaaatgggcgcggcgagtggaaatgtgagagacatacaagcgtccagacaacatcctcaggctctggcccctttaccgatgtacgggccgccgtctatcaaccccagccccacccgcagccaccaccttacgggcactgcgtcacggattccggcgtggtctatagcgttgggatgcagtggctgaagacacagggaaacaaacaaatgctctgtacatgcctaggaaacggtgtatcatgccaggaaactgcagtgacccagacgtatgggggaaattctaatggtgaaccgtgcgtgctgccttttacctataatggaaggacattctacagctgcacaacagaaggccgacaggacgggcacctttggtgcagtactaccagtaattatgaacaggatcagaagtacagcttctgcactgatcacacagtactggtgcagacacgtggggggaactcgaacggagctctatgtcactttcccttcctgtacaacaaccataactatacagactgtacatctgaaggcaggcgggacaacatgaagtggtgtggcacgacccaaaactacgacgccgaccaaaaattcggcttttgtcctatggccgcccacgaagagatttgcaccactaacgaaggtgtaatgtaccgcatcggcgatcagtgggataagcaacacgacatgggccatatgatgagatgtacgtgtgtgggaaatgggcgcggcgagtggacctgcattgcctactcccagctgcgggaccaatgcattgtggacgacatcacttacaacgtgaacgatacttttcacaagagacacgaggaaggtcacatgctgaattgtacctgctttgggcaggggagaggtcggtggaaatgtgatccagttgaccagtgtcaggacagcgaaacgggaacattttaccagattggggactcatgggagaagtacgttcacggtgtgaggtaccaatgttattgctacgggcgcggcattggcgagtggcactgccagccattgcaaacctacccaagctctagcgggcccgtggaagtgttcatcactgaaaccccttcccagcccaactcacatcctatacagtggaatgccccccagccctcccacattagtaagtatatcttgagatggcgccctaaaaacagtgtgggcagatggaaggaagcgaccattcctgggcacctcaactcctatactataaaggggctcaaacctggcgtagtgtacgaggggcagctcattagcatccagcagtatggccaccaagaagtgaccaggttcgattttactacaacctccacttccacaccagtgaccagcaataccgttacaggagagacaacgcccttttcacctttagttgctaccagtgagtccgtcaccgagattacagccagctctttcgtcgtgtcctgggtgagcgctagcgacaccgtaagcggtttccgcgtggaatacgaactgtctgaggaaggagatgaacctcagtatctggatctaccatcaactgctacttccgtcaacattccagatttactgcccggcaggaaatatatcgtcaacgtttaccaaatctctgaggatggggagcaaagcttgatattaagtacaagccagaccactgctccagatgctcccccagataccacagtcgatcaggttgacgatacaagcatagtagtgcggtggagtcgcccccaggccccgataaccggctaccgcattgtctattctccatctgtggagggttcatcgaccgagctgaatttacctgaaacagcaaatagtgtgacactgtctgatttacagccaggggtgcaatacaacattacaatttatgctgtcgaggaaaaccaggagtctaccccagttgtgattcagcaggagaccaccggaacccccagatccgatacagtgccatctccccgggatctgcagtttgttgaagtgacagatgtgaaggtgaccattatgtggacaccgcctgagtctgcagtgacgggctatcgggtggacgtgatacctgtcaacttgccaggtgagcatgggcaaaggctgcccatctcccgtaataccttcgctgaggtgacaggattaagcccgggagtcacttactacttcaaggtcttcgctgtctcccacggccgagagtctaaaccgctgactgcccagcagactaccaagcttgatgcccctaccaatctacaattcgtgaatgagactgatagtactgtgctcgttcggtggacaccccctcgggcgcagattacaggttatagactcacagtcggtttgactcggagaggtcagccacgccagtacaacgtggggccttccgttagcaaataccctctgagaaaccttcaaccggcctctgagtacactgtgagccttgtggcaataaagggcaatcaagaatcccctaaggcaactggtgtgttcacaactctgcagcctggatcttctattcctccatataacacagaggtgaccgaaacaacgatcgtgattacgtggacaccggctccgagaattggattcaagctgggcgttaggccgagtcagggcggtgaggccccccgcgaagtgacctccgacagtggttctatcgtagtgtccggcctcactccgggcgtggagtatgtatataccattcaggtactcagagacggccaggaacgggatgcgccaatcgtcaataaggtggtcactccactgtcaccacccacaaatctgcacctggaagcaaatccagacactggagtgctgaccgtcagttgggaaaggtcaaccacgcctgatatcacaggctatagaataaccaccacccctacaaatggccagcaaggaaactcacttgaagaggtagttcacgcggaccagagctcttgcacttttgacaatctgagtcctggcctggagtataacgtgtccgtgtatactgtgaaagatgataaggaaagcgtcccaatctccgacacaatcatccccgccgtaccccccccaactgatctgagattcaccaatattgggcctgacactatgcgcgtgacttgggcccctccaccctctattgacctcaccaattttcttgttcggtactcccccgtgaaaaatgaagaggatgtcgcagaattgtcgatctccccatcggacaacgcagttgtccttactaatttgctgcctggaactgagtatgtggtgtccgtgtccagcgtgtatgagcaacatgagtccactccactgagaggccggcagaaaaccggcctcgacagccccaccggcatcgactttagcgacattaccgcaaactcgtttaccgtgcactggatcgcacccagagcaacgatcactggctatcgtatccggcaccaccccgaacacttttctgggcgacctagggaggaccgggtgccccactctcgaaatagcattacccttaccaacctgacccctggcactgagtatgtggtctctattgtcgcactgaacggacgcgaagagtccccacttttgatcggacagcaaagtaccgtgtccgatgtgccgagggacctagaggtagtggctgctactcctacaagtctcctgatcagttgggacgcccctgcggtgaccgtccggtactacaggatcacttatggagagaccggaggcaactcccctgtgcaggagttcactgttcccggcagtaaatcaaccgcaacaatctccggcctcaaaccgggtgtcgattatacgattacagtatacgcagttacgggccggggggactcccccgcatcatccaaaccgatctcgattaactacaggaccgagatagataaaccttctcagatgcaggttacagacgtccaggataattctatcagtgttaaatggcttcctagctctagtcccgtcaccggctatagggtaaccaccactcccaagaacggcccaggcccaaccaaaactaaaacagcggggccggaccagaccgaaatgactattgagggccttcagccaaccgtggaatacgtcgtctcagtgtacgcccaaaacccttctggcgagtcccagccgctggttcaaacagctgtgacaaacatcgataggcctaaaggccttgcttttacggatgtggatgtggattcaatcaaaattgcctgggagtctcctcagggccaagttagccgatatcgggtgacgtattcgtctcctgaagatgggattcacgagctatttcctgccccagatggcgaagaggacacggctgaactccagggcctgcggcccgggtcagagtataccgtctcggtggtggccctgcacgacgacatggaaagccagcccctaattggcacgcagtcaaccgctattcctgcgcccacagatctgaagtttacccaggtgacacctacctctttgtccgcacaatggacgccgcctaacgtccaactcactgggtacagagtcagagtgacacccaaagaaaagactggcccaatgaaggagatcaacctcgccccagattccagttcagtggttgtgagtggcctaatggtggccacaaaatacgaggtgtctgtgtatgcactaaaagatacacttaccagccgccctgcgcaaggtgtggtgactacactcgaaaatgtttctcccccaaggcgcgccagagtcaccgacgcaacggaaacaactatcactatctcctggcggacgaaaaccgaaacaatcacagggttccaagttgacgccgtacccgcaaatggtcaaacccccatacaacggaccatcaaacctgacgtgaggtcctatactattaccggtctccaaccaggcacagactataagatctacttatataccctgaatgacaatgcccggagtagcccggtggtcattgacgcttcgacagctatcgatgcaccttcgaatttgagatttcttgctaccacgcctaatagtctgcttgtcagttggcagcctcctagagcccgcattaccgggtatatcatcaaatacgagaaacctggatcacctccccgggaggtagtcccccggccaaggcccggggttactgaggcaaccatcactggcctagaacccgggactgagtatacgatctacgtaatagccctgaagaataatcagaagtctgaacccctgatcggaaggaagaaaaccgatgagttaccacaactcgttactctgcctcaccccaatttacacgggccggagatacttgacgtcccgagcaccgtgcaaaaaactccatttgtcacccacccaggttacgacacgggcaacggaatccaattgcccgggaccagcggacagcaaccttcggtaggacaacagatgatttttgaggagcatgggttcagacgcaccactccacccacaactgctacaccaattcgacacagaccaagaccctatcctcccaatgtcggccaggaagctcttagccaaaccactatttcctgggctcccttccaggatactagcgaatacatcataagttgtcacccagttggcacagatgaagaaccgctccagttcagagtccctggcacttcaacaagtgcgaccctgacaggcctcacccgcggagccacatataatgtcatcgtggaggctctgaaggaccaacaacgccacaaagtcagagaggaggtggtgactgtaggtaatagcgtgaacgagggtttgaatcagccaaccgatgactcttgtttcgatccatatacggtatcccattatgctgtgggagacgaatgggaacggatgtctgagtccgggttcaaattgctttgccagtgcctaggcttcggctcgggtcacttcagatgcgactcatctagatggtgccatgacaacggggtcaactacaagatcggcgagaaatgggataggcaaggtgagaacgggcaaatgatgtcctgtacttgcttgggtaatggaaagggcgagtttaaatgcgaccctcatgaagccacatgctacgacgacggtaagacctaccacgtcggcgaacagtggcagaaggaatatttaggcgccatttgtagttgcacttgcttcggaggacagcgggggtggcggtgtgacaactgcaggcgcccagggggcgagccctcccctgagggcacaacgggtcaatcttacaaccagtactcgcagcggtaccatcagcgtaccaacacaaacgtcaattgtcccatagagtgctttatgccccttgatgtgcaggctgaccgggaagatagccgggaatag

SEQ ID NO: 24205 - DNA, 6555 bp, synthetic construct
  misc_feature 1..6555: note = Description of Artificial Sequence: Synthetic coding sequence
  source 1..6555: mol_type = other DNA
atgctgcggggccccggccccggcctgctgctgctggccgtgcagtgcctggggaccgccgttccttctactggagcctcaaaatccaaacggcaagcacagcagatggtgcaaccccagtccccagtggctgtaagtcagagcaaacctggatgttacgacaatggcaagcactaccagataaatcaacagtgggagaggacctacttgggaaatgcacttgtctgcacgtgttacggcggctcacggggtttcaactgtgaatctaagccggaggcggaggaaacttgttttgataaatacactgggaatacctatcgggtcggagacacatatgagcgccctaaagactccatgatttgggattgtacctgtatcggagctggacgaggccggatcagctgcacgattgccaaccggtgtcatgagggcggtcagtcctacaagattggggacacctggcgtcggcctcacgaaaccggaggctatatgcttgaatgcgtgtgtttggggaatggcaaaggagaatggacctgtaaacctattgccgagaaatgtttcgaccacgcggctggaacatcctacgtggtgggtgagacctgggagaagccctaccaaggttggatgatggtggactgtacctgcttgggcgaggggagcggtaggatcacatgtactagccgcaaccgctgcaacgaccaggatacccgaacatcctaccggataggtgatacttggtctaagaaagacaatcgggggaacctcctgcagtgtatctgtaccgggaacgggcgtggtgaatggaagtgtgaaaggcacacctccgttcaaaccacatctagtgggtccgggcctttcaccgacgtccgcgctgccgtataccagcctcagccgcatccccagcccccgccttacggccactgtgtgactgattcaggggtggtgtacagcgttggtatgcagtggctcaagacccagggcaataaacagatgctttgcacatgtttagggaatggagtaagttgccaagagacagcagtaacgcagacctacggtggcaattctaatggggagccatgtgttctgcctttcacctacaatggtcggactttctacagctgtaccacagaggggagacaggacggccatctgtggtgcagtactacatccaactatgagcaagaccagaaatattctttctgtacagatcataccgttttagtccaaacccggggggggaacagcaatggtgccctgtgccatttcccgtttctgtacaacaaccacaactataccgattgcacaagtgaaggtaggcgtgacaatatgaagtggtgcggtacaactcagaactacgatgcggaccagaagttcggtttctgccctatggccgctcacgaggagatttgcactaccaacgagggcgtgatgtatcgcatcggtgatcagtgggacaagcaacacgatatgggccatatgatgcgatgtacttgtgtgggcaatgggcggggggagtggacatgcatcgcctactctcagctgcgggatcagtgcattgtagacgatataacatacaacgtcaatgatacttttcacaagaggcacgaggaaggccacatgcttaactgtacttgcttcggccagggacgggggcgatggaagtgcgaccctgttgaccagtgccaagactctgagaccggtacattctatcaaatcggagattcatgggagaagtatgtgcacggagtgcggtatcaatgctattgttacggtcgcggtatcggagaatggcactgtcagcctttacagacctatccgagcagctctgggcctgtggaggtgtttatcacggaaacgccctcccagccgaatagccaccccatccaatggaacgcaccccaaccgtctcatattagcaagtatattctccggtggcgcccaaaaaacagcgtcggacgctggaaggaggcaacaattcctggccacctcaatagttatacaataaagggtcttaagcctggtgtggtatacgaggggcagctcatttccattcaacagtacggccaccaggaggtcactcgcttcgatttcaccactacttcgacctcaactccagtaacaagcaatacagtaaccggagagaccactcctttttctcccctggtggctacaagtgaatccgtgacagagatcactgcgagctcatttgttgtctcctgggtcagcgctagtgacaccgtgtcaggcttccgagttgagtatgaactctccgaggagggcgatgagccgcagtacctcgatctgccctcaaccgccactagcgtcaatatccctgatctcctgcccggacgaaaatatattgtgaatgtatatcaaatttccgaggatggagagcaatcgcttatcttgtccacttctcagaccaccgcaccggacgctccaccggacactacagtcgaccaggtagatgacaccagcattgtggtgaggtggtccaggccgcaggccccaatcactgggtatcgtattgtgtatagcccttcagtcgaaggatccagcaccgaactaaatttaccagagacagctaatagcgtgacactgtcggatctccagccaggtgtgcagtataatatcactatctatgctgttgaggaaaaccaagagtcaacgcctgtagtcattcagcaagaaacaacgggcaccccccggagcgatacggtgccgagcccgagggaccttcagttcgtggaagttaccgacgttaaggtgacgatcatgtggactcctcctgagtcagctgtgactgggtatcgtgtagatgtgattccagtcaatctgccgggggaacatgggcaaagactcccaatttctaggaatacgttcgcggaagtgactggtctgtctcccggagtcacttactattttaaggtgttcgctgtttcacatggccgcgaatcaaagcctttgaccgcccagcagacaactaagctggacgctccaaccaatttgcagttcgtaaatgaaacagactccactgtgctggttcggtggacaccgccaagggcccaaatcacaggttatcgactgaccgttgggctgactcggcgggggcaacctaggcagtataacgtgggaccatccgtttctaaatatcctttgcgaaatctccagcctgctagtgaatacactgtaagtcttgtggccattaagggtaatcaggagagccccaaggccacaggggtgtttacgacactgcaaccaggatccagtatccctccgtacaataccgaggtgaccgaaacaactattgtaatcacatggacacccgccccccgtatcgggttcaagttgggcgtcagacccagccagggcggggaggccccacgcgaggtcacaagcgattctggatctattgtggtgtccggtttaacacctggggtcgaatacgtgtacaccatacaagttctgcgggacggtcaggaacgtgatgcacctatagttaataaagtcgtgacaccactgagcccccctaccaatctccatcttgaagccaatcccgatacaggagtgcttaccgtgtcatgggagagaagtactactcctgatataaccggctatagaattacaactacccccacaaacggccagcaagggaattccctcgaagaagtggtgcacgcagaccagagctcttgtacattcgacaacctatcccccggtttggagtacaacgtgagtgtgtatactgtgaaagacgataaggagtctgtgcccatctctgatacaatcatcccagccgtcccgcctcctacagacctccgcttcactaatatagggcctgatacaatgagggtgacatgggccccgccccctagcatcgatctgacgaacttcctggtccgctattcacctgtcaagaatgaagaggacgtagcagagctcagtatttcacctagtgataacgcagtggttctgaccaatctgttacccggaacagagtacgtcgtctctgtgtcttcggtttacgagcagcacgaatctactcccctgaggggcagacagaaaaccggcctggattcccctaccggcatcgacttctccgatatcactgcaaacagtttcaccgtgcattggattgcccccagggcgactattactgggtatcggatccgccatcatcctgaacatttctctggcagacctcgggaggaccgtgttccccactcacgcaatagcatcaccctgactaatctgaccccgggcaccgaatacgtcgtgagtatcgtggctctgaacggcagggaagaaagtcctttacttattggtcagcaatccaccgtgagcgacgttccacgcgatctggaggtggttgccgctacccccacgtcacttcttatctcttgggatgcgccagccgttacagtgagatattatcgcatcacgtacggagaaaccggtggcaactcacctgttcaggagttcactgtgccggggagcaaatcaacagctacaatctccggcctcaagccaggcgtggactatactataactgtgtatgctgtcacggggaggggggactcaccagcttcctcgaagcctatttccattaattatcgcaccgaaatagacaagccttcccagatgcaagtgacagatgtgcaggacaacagtattagtgtcaaatggctcccctccagttcgcctgtgacgggctatagagtgaccactacgcccaaaaacggacctgggcccaccaagacaaagacagccgggccagaccagactgaaatgacaatcgagggcttgcaacccaccgtggaatatgtggtctctgtctacgcacaaaacccgtccggagagtcccagcccctggtacagactgcggtgactaacatcgatcgccctaaaggacttgccttcaccgatgttgatgtcgactctattaagatcgcttgggaatccccacaaggccaggttagtcgatatcgggtaacttacagttcacccgaggacggaattcacgagctctttcccgcccccgatggggaagaggacacggctgaacttcaggggctccgccccggtagcgagtatactgtgagtgtggtcgcactgcatgatgacatggagtctcaacctttgatcgggactcagtctaccgccattcctgccccgacggacctgaagttcacgcaggttacccctacctcattgtcagcacaatggaccccccccaatgttcagttaactgggtatcgcgtgcgggtcactcccaaagagaaaactggtcctatgaaggaaattaacctggcccctgactccagcagcgtagtcgtgagcgggcttatggtcgccacaaagtacgaggtgagtgtgtatgcactgaaagacactctgaccagtcggcccgctcagggagtggtgaccacactggagaatgtgagcccacctcgcagggcccgggtgactgatgctactgaaaccaccattacgatctcctggcggaccaagactgaaaccatcacaggattccaggtcgacgccgtgcctgccaatggccagacccctatccagaggaccatcaagccagacgtgagatcatacacaatcaccggattgcaacccggcacggactacaaaatatatttatataccctcaatgataatgctaggagctcccccgtcgtaatcgacgccagtactgccatagatgctccgtctaacctgagatttttggccaccaccccaaatagcctgctggtgagctggcagcctcccagggcgaggatcaccggctacatcatcaaatacgaaaaaccagggtcccctccccgggaagtcgtgccaaggcctcgtcctggtgtgactgaggccactatcaccggcctagaacccggtacagagtatactatttatgtcatcgccctgaagaacaaccagaaatccgaaccgcttattggtcgcaagaaaaccgttaacgagggactcaaccaacctaccgatgacagctgcttcgatccttataccgtttcccactacgccgttggcgacgaatgggagaggatgtccgaatccggttttaaattactgtgccaatgtctaggatttggatcagggcatttccggtgcgactcttcacgctggtgccacgacaacggcgtgaactataagatcggtgaaaagtgggacaggcagggtgaaaacggacagatgatgtcctgcacctgcctcggaaacggaaaaggggaattcaaatgcgacccccacgaggccacatgttatgacgacggaaagacatatcatgtgggcgaacagtggcagaaggaatacctgggtgcaatctgtagctgcacgtgcttcggaggacagagggggtggcgctgtgataattgtagaagacccggcggggaaccgtccccagaaggtacaaccggccagtcctacaatcagtatagccaaaggtaccatcagcgtaccaacacgaatgttaactgtcccatcgaatgtttcatgccgctggatgtgcaggcagatcgggaggattcacgcgaatag

SEQ ID NO: 24206 - DNA, 6636 bp, synthetic construct
  misc_feature 1..6636: note = Description of Artificial Sequence: Synthetic coding sequence
  source 1..6636: mol_type = other DNA
atgctgcggggccccggccccggcctgctgctgctggccgtgcagtgcctgggaaccgccgtaccatctacgggtgcatccaaaagtaagcgccaggcccagcagatggtgcagcctcagtcacctgtggcggtgtctcaaagtaaacctggatgttatgacaatggcaagcactaccaaatcaatcagcagtgggagcggacgtatctcggtaatgccctcgtttgcacttgctacgggggatcaaggggctttaactgtgagtccaagcctgaagctgaggagacttgtttcgacaagtacactgggaacacctatagagtgggcgacacgtatgagaggccaaaggacagcatgatatgggattgcacatgtatcggggcgggccggggtaggatctcctgcacaattgcaaataggtgccatgaggggggccagtcttacaagattggtgacacttggcgcaggccccatgagaccggcggttatatgttggagtgcgtctgcctgggaaatggtaagggcgaatggacatgtaagcccattgccgaaaagtgcttcgaccacgccgccggcacgtcctatgtggttggtgagacctgggaaaagccctaccaggggtggatgatggttgattgcacctgcctcggcgaagggtctggtcggatcacctgtacgtcccgtaatcgatgtaacgatcaggacacaagaacctcctaccgtatcggggatacctggtctaaaaaagacaacagagggaacctgctgcaatgtatctgcacaggcaatgggagaggtgaatggaaatgtgagcgacataccagcgtgcagacaaccagcagcggatcaggaccattcacggacgtgagggccgctgtataccagcctcagcctcatccacagcctcctccatatggacattgcgttactgacagtggggtagtttactccgtggggatgcagtggcttaagacacagggcaataaacagatgctatgcacatgtctagggaatggagtcagttgtcaggagaccgccgtgacccagacttatggcgggaactccaatggcgaaccttgcgttttgccatttacatacaatggtcgtaccttttactcttgcactaccgaggggcgtcaggatggacacctgtggtgtagcactacaagcaactatgagcaagatcaaaagtattccttctgtactgaccacaccgtgctagtccagacacgcggaggcaacagtaacggggcgctctgccatttccccttcctctataacaatcataactacacagattgcacctcagaaggaaggcgagacaacatgaaatggtgtgggaccacccaaaactacgacgccgaccagaagttcgggttctgtcctatggccgcacatgaggagatctgtaccaccaacgagggagtaatgtatcgaatcggagatcaatgggataaacagcacgatatggggcatatgatgagatgtacttgtgtgggtaatgggcgcggtgagtggacatgtattgcctattcccagctgcgcgaccagtgtatcgtggacgacatcacatacaatgtcaatgacacatttcacaagagacacgaggagggccacatgctgaactgcacatgttttggtcaggggcggggtcgctggaaatgcgatcctgtcgatcagtgtcaagactctgagactgggacgttttatcaaataggagactcatgggaaaagtacgtgcacggagtgcggtatcaatgctattgctatggacgaggaataggcgagtggcactgtcaacccttgcagacatacccatcctcctcgggccccgtggaagtgttcatcaccgaaacacctagtcagcccaattctcaccctatccagtggaacgctccacagccttcgcacatctccaagtacatactcaggtggcggcccaaaaattccgtcggccggtggaaggaagcgacaatcccagggcatctcaactcctatacaattaaaggactgaaaccaggagtagtgtacgagggccagctgatctccattcagcagtatgggcatcaggaagtgacacgcttcgacttcactaccacctctacatccactcctgtgacctcgaataccgtcaccggcgaaactacccctttctcgccactggtggccacttcagaaagtgtcaccgaaattaccgctagctcattcgtagtaagctgggtgagcgcctctgataccgttagtggatttagagtggagtacgagttgagcgaagaaggggatgagccccagtacttggacctgccatctacagcaacatctgtgaacatcccagatcttctgcccggtcgcaagtatattgtaaacgtgtaccagatttcagaagatggagaacagtctctgattttatccacctcccagacaactgctccagatgcacctcccgacaccacagtcgaccaggtcgacgacacatcgatcgtcgtgagatggtcccgaccacaagctccaatcactggctatagaattgtgtatagtccatctgttgagggaagctccacagaactcaacctcccagaaaccgccaactctgtgactctttctgaccttcagcctggcgtacaatataatatcacaatatacgcagtcgaagaaaaccaagagtctacccccgtcgtgatacagcaggaaaccactggcaccccgcggagcgatactgtgccatcccccagagacctgcagttcgtggaggtgactgatgtcaaggtaactatcatgtggaccccacccgagtccgcggtcacgggataccgggtcgatgtcattcctgtgaatctgccgggagagcacggtcagcggctgccaatcagccgcaatacttttgccgaggtgacagggttgtctccgggcgttacctactattttaaggtgttcgccgtctcccacggcagggagtctaagcccctgacagcgcagcagactactaagctagatgcaccaacaaatcttcagttcgtgaacgagacggattctacggtgttggttcgctggacaccgcctcgcgctcagattacgggctatagactcaccgtggggctgactcgcagaggccaacccagacaatataacgtaggtccatctgtatccaagtatccactgcggaatctccaacccgcgagtgagtacaccgtttccctggtggctattaagggtaatcaggagtcccccaaggcaaccggggtatttactactctccaaccaggaagcagtatcccaccatacaacaccgaagtgaccgagacaaccatcgtgattacgtggaccccagcgccaaggataggctttaagctcggtgtgcgcccttctcagggcggggaggccccccgtgaggtgacatctgactccggaagcattgttgttagcggcctcacaccgggggtggaatatgtctacactatccaggtgttacgtgatgggcaggaacgggatgcacctatcgttaataaggtggtgacgcctctgagtccacccactaacctgcacctagaagctaatcccgacaccggcgtgctcactgtctcttgggagagatctactaccccagatatcactggctaccggatcacaactacacccacaaatgggcaacagggcaactcacttgaggaggtggtacacgcagatcagagttcctgcaccttcgacaatctgagtcccgggctcgaatataacgtgtccgtgtatacagtaaaagatgacaaagagagtgtgcctatcagcgacaccataattcctgctgtgcccccacccaccgacttgcgcttcaccaacattgggcccgatactatgcgtgtgacatgggcacctcccccttccatcgacctcactaacttcctcgtgcgatactcgcctgtgaaaaatgaggaggacgtagccgaactctctatcagtccttccgataacgcggttgtgttgaccaatctgcttcctggaactgagtacgtagtctctgtgagcagcgtgtacgaacagcacgagtctaccccactgcgcgggcgacagaagaccgggctcgacagtccaactgggattgactttagtgacattaccgccaactccttcacagtccactggatcgcgccacgggcgactatcactggatataggattagacaccaccctgaacatttctccggaagacctagggaggaccgagtccctcactccagaaatagcattacacttacgaatctcacacccggtaccgaatacgtagtgtcgatcgtggcgcttaacggcagggaggaaagcccccttttaatcgggcagcagtctaccgtttcggacgtacctcgtgatttagaggtcgtcgcggctacgcccacatctttgttgatcagctgggatgcacctgcagtcaccgtgcgctactaccgcattacatacggcgagacgggcggaaactctcccgtgcaggagtttacggtgcccggcagcaagtccaccgcgactattagtggcctcaaaccaggcgtggactatacgataacagtttacgccgtgaccggcaggggagattcccctgcgagtagcaaaccgatcagtatcaattaccggacagagattgacaagccatcccagatgcaggtgacagatgtgcaagacaattccatctccgtcaaatggctgccaagcagctctcctgtgaccggctacagggtaaccactaccccaaaaaatggccctggccctaccaagacaaagacagcagggccggaccagaccgagatgactattgaaggacttcagcccacggtggagtacgtggtcagtgtgtacgcccagaacccatccggagaaagccagcccctcgtccaaaccgccgtgaccaacatagacaggccgaaggggctggcattcaccgacgtggacgttgatagtataaaaatcgcgtgggagagtccacaggggcaggtctctagataccgggtaacctactcttctcccgaggacgggatccacgaattgttccccgcccctgatggcgaagaagatacggccgaacttcaaggactccgccccgggtctgaatacaccgttagtgtcgtggcactccatgatgacatggagtcccaaccactgatcggcacccaatccacagcaatcccagcccccaccgatctgaaattcacccaggtaactcccacttccctgtccgcgcaatggaccccccctaatgtgcagctgacgggttacagggtcagagtaacgccgaaggagaagactgggccaatgaaagaaataaacctggctcccgatagcagctccgttgtagtgagtggcctgatggtcgccactaagtacgaggtgtccgtgtacgctctaaaggacaccctcacgtcccgtcctgcccagggtgtggtgacaaccctcgagaacgtctccccaccacgccgagcgcgggtgaccgatgctactgagaccactatcactatttcctggcggacaaaaacggaaaccataacaggttttcaggttgatgccgtcccagctaatgggcaaaccccaattcaacgcacgattaaaccagatgtgcgttcatacactataaccgggctgcagcccgggaccgattacaaaatttatctgtacacactgaacgacaacgcccggtcctccccggtcgtgatcgacgccagcaccgccatcgacgcccccagtaacctgcgcttcctcgcaacgacgcctaacagcctgctggtaagttggcaacctcctcgggcacgtatcacagggtatattattaagtacgaaaaaccagggagccccccccgggaggtagtgccaagacccagacccggcgttaccgaggccacaatcacaggactggagccaggcacagagtataccatttacgttatagccctgaagaacaaccagaagtctgagccactaatcggtcgaaaaaagaccgggcaagaggctctttctcagactacaattagttgggcaccttttcaggacacgtccgagtatatcatttcttgccaccctgttgggaccgacgaagagcctcttcagtttagagtccccggaacctctacaagcgcaaccctgacaggattgaccagaggcgccacatacaatgtgatcgtagaggcactgaaggatcagcaacggcataaagtgcgtgaggaagtagtgaccgtgggcaattcgggatggtgccatgataacggagtgaactacaaaatcggcgaaaagtgggaccgccagggggaaaacggtcagatgatgtcatgtacttgtctgggaaacggcaagggcgagttcaagtgcgaccctcacgaggcgacgtgttacgatgacggcaaaacttatcatgtgggtgaacagtggcaaaaggagtacctcggggccatttgttcttgtacctgctttggcggccagcgcggatggcgatgcgataattgccggcgccccgggggcgagccaagtcccgaggggacaacaggccagtcttacaaccagtatagccagcgctatcaccagcgtaccaacacaaatgtgaactgtcctatcgagtgttttatgccacttgatgtccaagccgacagggaagattcccgcgaatag

SEQ ID NO: 24207 - DNA, 7434 bp, synthetic construct
  misc_feature 1..7434: note = Description of Artificial Sequence: Synthetic coding sequence
  source 1..7434: mol_type = other DNA
atgctgcggggccccggccccggcctgctgctgctggccgtgcagtgcctgggtacagccgtgccaagcacgggagcgtctaaatccaaacgccaggcccaacagatggtgcaaccacagtccccagtcgccgtttcgcagtccaaacctggatgctatgataacggcaagcattaccagattaaccaacagtgggaaagaacatacctgggcaatgcactggtctgtacatgttatggcgggagccgcgggtttaattgtgaaagcaagccagaggcagaagaaacctgcttcgacaagtacaccggcaacacatacagagtcggagacacatacgaacgaccaaaggactccatgatctgggactgtacctgcattggggccggccgcgggaggatctcttgtaccattgctaaccggtgtcacgagggaggtcagtcctataagatcggcgatacatggcgccgtccacatgagaccggaggatatatgttagagtgcgtatgtctggggaatggcaaaggggagtggacctgcaagcccatagccgaaaaatgtttcgatcacgctgccggtacctcttatgttgttggagagacatgggagaaaccttaccaaggctggatgatggtagattgcacatgcctgggtgagggaagcggcaggattacttgtacgagccgaaaccggtgcaatgatcaagatacgcgaactagctatcggattggagatacttggtctaaaaaagacaatcgcgggaacctgttacaatgtatctgcacagggaacggtagaggagaatggaaatgtgagcgacataccagcgtccagactacctcaagtggctccggaccttttaccgatgttagagccgcagtttatcagccgcaacctcatccacaacctcccccatatggtcactgtgttactgattcaggggtggtctattccgtcgggatgcagtggctgaaaactcaggggaacaagcaaatgctttgtacctgcctgggaaatggagtttcttgtcaggaaactgctgtgacacagacttatgggggaaacagcaacggagagccgtgtgtgctccccttcacctacaatggacggaccttttactcatgtactacagaaggcaggcaggatggacacctttggtgttctacaacttcgaactacgaacaggaccaaaagtatagcttctgcactgatcacacagtgctggtacagacacggggaggcaacagtaacggggcactgtgccattttcctttcctgtataacaatcataactacacagactgtacatccgagggccgacgcgacaatatgaagtggtgcggtaccacacagaactatgacgccgatcaaaagttcggcttttgtcccatggccgcccatgaagagatttgcacaaccaacgagggcgtgatgtacagaatcggcgaccagtgggataaacagcacgacatgggacacatgatgaggtgcacatgtgtcggaaacggtaggggcgagtggacttgtatcgcttactcccagttaagggaccagtgcatcgttgatgatattacttataatgtcaacgacaccttccacaagcgccacgaagaaggacatatgctgaattgtacgtgttttggccagggccggggtcgttggaaatgtgaccccgtggatcagtgccaggacagcgaaactgggacattttaccagatcggagatagttgggaaaagtatgtccatggtgttagataccagtgttactgctacgggcgtggaattggagagtggcactgccagccgctacaaacgtaccccagttcctctggtccagtggaagtcttcattacagagaccccttcgcagccgaatagccatcccatacagtggaatgcacctcaaccctcacacatcagcaaatacatcttgaggtggaggcccaagaattcagtaggcaggtggaaagaagcgaccattccgggacatctgaactcgtacacaattaaaggccttaagccaggcgtggtgtatgaaggccagctcatctcaattcagcaatacggccatcaggaggtgacccgatttgattttaccaccacatccacatctacaccagtgaccagcaacaccgtgaccggagagactacacccttctctcctctcgtggctacctccgagtcagtcaccgaaatcacagcatcttccttcgtggtcagctgggtgtccgcctcagacactgtaagcggcttccgggtggagtacgaactgagcgaagagggggacgagccgcaatacttagatctcccttccactgccacatcggttaacatccccgatctactcccaggtcgcaagtacatagtgaatgtctaccagatcagcgaagacggagaacagtctctgattctgtctaccagtcagacgaccgccccggacgctcctcccgacactaccgtggatcaggtggacgatacatccatagtcgttcgctggagtagaccgcaagcccccatcaccgggtacagaattgtatattccccgtccgttgaaggcagcagtacagaactgaatctgcccgagactgctaattcagtcaccctctccgacctgcaacctggcgtgcagtataacatcactatttatgccgttgaggagaatcaggagtccacccccgtggtcatccagcaggagacaaccggcacaccgcgcagcgacaccgtgcctagtccaagggacctgcagttcgtagaagtgactgatgtcaaggtgacaattatgtggacacccccagagagcgcagtgaccggctaccgagttgacgtaattcccgtcaatctgcccggggagcacggacagagactccccatctcgcgaaatactttcgctgaggtcacgggcttgagtccaggcgtgacttactatttcaaagttttcgcggtgtcgcatggtcgcgagagtaaacctcttactgctcagcaaacgactaaacttgacgccccaaccaacctgcagttcgttaatgagactgattccacggttctggtgcgatggacccccccgagggcccagattaccggctataggctcacagttgggctaactagaaggggtcagcctagacagtataacgtaggaccatccgtcagtaagtatccactcaggaacctgcagccggcctctgagtatacagtgtccctggtggctattaaaggcaatcaggaaagtcctaaggccacaggggttttcacgacactccagcctggatcgtccatccccccctataacaccgaggttactgagaccaccatagtgataacttggacaccggcccctcggatcggttttaaactgggcgtgcgaccctctcagggcggcgaagcaccccgggaggtcacgagtgattcaggcagtattgtggtgtcgggcctaacacccggcgttgagtacgtttataccatccaggtgttgcgagacgggcaagagagggatgcaccaatcgttaacaaggtggtcactccactctctccacccaccaacctgcacctggaggccaatcccgatacaggggtgctcactgttagctgggagcggagtaccactccagacattaccggctaccggattacaacgacacctacaaatggtcagcagggtaacagcttggaggaagttgtgcatgccgatcagtcctcttgcacatttgacaacctttctccaggcctggaatacaacgtgtctgtttatactgtgaaagacgacaaggagtcagttccgatttcagatacaattatcccagaggtgccacagctgaccgacctctcatttgtggacataaccgattctagtattggcctccggtggacacctcttaattcgagcaccattatcggctatagaatcacggtggtagccgctggagaaggaattcccatattcgaagactttgttgattctagcgtggggtactacaccgtgacgggactggaacccgggatcgactacgacatttccgtcattaccctgatcaacggaggggagagcgcaccaacgactctaactcagcagaccgctgtcccacccccaaccgacctgcggttcacgaatatcggacccgataccatgcgagttacatgggctcctcccccctccattgatttgacaaacttcttggtccggtattccccggtcaagaatgaggaagacgttgccgaacttagcatttccccatcggacaacgccgtggttctgaccaacctgttgcctgggacagaatacgtcgtgagcgtgtcttcagtatatgaacagcatgagtctacccccctaagaggacggcagaagacaggcctggatagtcccactggcatagatttcagcgatatcactgcgaatagtttcacggtccattggatcgccccaagggcaaccataacaggatacaggattaggcaccatcccgaacatttctccggacggccgagagaagatcgagttccccatagcagaaattcgattaccctgacaaacttaacccctggaaccgagtacgtggtgagtatcgttgctctgaatggcagagaagaatctcccctgctaattggtcaacagagcaccgtcagtgacgtcccccgagatctggaggtggtggcagcaactcctacgagtctgctgataagctgggatgcgcctgcagtcaccgtacgttattaccggatcacttatggagaaaccggcggcaattcccctgtgcaagagttcacagtgcccgggagcaaatccacggcaaccatctccggcctgaaacctggcgtagactatacgattaccgtatacgccgtgactggccgaggagacagccctgcctctagtaaacccataagcattaactatcgcactgaaatcgacaaacctagtcagatgcaggtgactgatgtccaggataactcgatatctgttaagtggctgccctcttcttccccggttaccggctaccgggttactactacgccaaagaacgggccaggccctacgaaaacaaagacggcgggtccagaccaaacggagatgacgatcgaaggacttcaacctactgtggaatatgttgtttctgtgtatgcccaaaatcccagtggcgagtcccagccacttgttcagactgctgttacgaacatcgacaggccgaaaggactggcctttaccgacgtcgacgtagactctattaaaattgcctgggagtcgccacagggacaggtgtcccgctacagagtgacatatagctcccccgaggatggcatccacgaattatttcctgcccctgatggcgaggaggatactgcagaactccaggggttaaggcccggatcagaatacactgtcagcgtggttgccctgcatgatgacatggaaagtcaaccgcttatcgggacccagagcactgctattcccgcacctactgacctgaaatttacccaggtgacacctacaagcctcagtgcccaatggactcctcctaatgtccagctgaccgggtaccgagtccgggtgacccccaaagagaagactggaccgatgaaagaaattaacctcgccccagattcctccagcgtggtagtgagcgggctcatggttgctaccaaatacgaagtttccgtctacgccttgaaagatacactaacatccaggcctgcacagggagtggtgaccaccttagagaacgtctcacccccccgcagagccagagtgacagacgcgacagaaaccaccatcaccattagttggagaacaaaaacggaaacgattactggtttccaggtagacgccgtgccagcaaacggccagactccgatacagaggacaatcaagcctgacgtgaggtcctacacgatcacagggctgcagccgggaaccgactataagatttacctgtacaccctaaacgataacgcaaggtcatcccccgttgtcatagatgctagtactgcgatagacgccccgagtaacctgcggtttcttgctaccacacccaactctttactcgtttcctggcaaccacctcgagcacgaatcaccgggtacattataaagtacgaaaaacccggctctcccccaagagaggttgtgcccagacctaggccaggggtgacagaagccacaatcaccggtctggagccaggcaccgagtacaccatctatgtcattgccctgaagaacaatcaaaagagtgagcctttgatcggcaggaagaagacagatgaattgccacagttggtaactctcccacacccaaacttacatgggcctgagattcttgacgtaccgagtactgtgcaaaaaactccatttgtcacccatcctggctacgacaccggaaacggcatccagcttcctgggacctccggacaacagccgtctgtgggccagcagatgatattcgaagagcatggatttagacggaccacaccacctactacagcaacgccgattagacacaggccgagaccttatccacctaacgtgggggaggagattcagattgggcacatcccccgggaagacgtcgattaccacctctaccctcacgggcccggtttgaaccccaacgcttcaacaggccaggaggctttatcacagaccacaatttcatgggccccctttcaggataccagtgagtacatcatctcctgccacccagtgggcacagatgaagaaccgctgcagttccgagtgccaggaacttctacgtcagccaccctgacaggtctgacaaggggtgccacgtataatgtgattgtggaggccctaaaggaccagcagcgtcataaagtgcgcgaggaggtcgttactgtgggcaactccgttaatgaaggactgaaccagccaaccgatgactcctgcttcgacccatataccgtcagtcactacgctgtaggggacgagtgggaaaggatgtcagaatcaggcttcaaactcttgtgccagtgcctaggtttcggatctggccatttccgatgcgactctagccggtggtgtcacgacaatggcgtgaactacaaaattggagagaaatgggaccggcagggggagaatgggcagatgatgtcctgcacttgcctgggcaacggcaaaggcgagttcaagtgcgacccacacgaagcaacctgctatgacgatgggaagacttatcacgtcggcgagcagtggcagaaagaatacctcggcgctatatgctcgtgcacctgcttcgggggacagcgcggttggcgctgcgacaactgtcgccggcctggtggagagccatctcccgaggggacaaccgggcagtcctacaaccagtacagccaacggtaccaccagaggaccaacacgaacgtaaactgcccgatagagtgcttcatgcctctcgatgtgcaagccgacagagaggatagccgggaatag

SEQ ID NO: 24208 - DNA, 6891 bp, synthetic construct
  misc_feature 1..6891: note = Description of Artificial Sequence: Synthetic coding sequence
  source 1..6891: mol_type = other DNA
atgctgcggggccccggccccggcctgctgctgctggccgtgcagtgtctggggactgccgtgccatcaaccggggcgagcaagtctaagcggcaagcgcaacaaatggtccagccccagtctcctgtggccgtttctcagtctaaacctggttgttatgataacggtaagcactaccagattaaccagcagtgggagaggacctatttagggaacgcgctcgtttgcacgtgctacggcggctctcgcgggtttaactgtgaaagcaaaccagaagccgaggagacctgtttcgacaagtacactggaaatacataccgagttggggacacatatgagcgtcccaaagactctatgatctgggattgtacctgtattggcgctggacgggggcggatttcatgcaccatcgccaatcgatgtcatgagggcgggcagagctacaaaattggcgacacatggcgcagacctcatgagacaggtggttatatgctcgagtgcgtatgcctgggcaatggaaagggggagtggacgtgtaagcctatagctgagaagtgttttgaccatgccgctggcaccagctacgtcgtgggagagacatgggaaaagccttaccagggatggatgatggttgattgcacttgtctgggcgagggctcaggccgaatcacgtgcacatctaggaacagatgtaatgaccaggatacccgcacaagctacagaattggcgacacttggagtaaaaaagacaacagaggtaatctcctccaatgtatctgcaccggaaacggtcgtggggaatggaaatgcgaacgccatacgagtgtccagactacttcatcgggctcaggccccttcacagatgtaagagctgccgtctaccaaccacagccacacccacagccccccccttacgggcactgcgttacagacagtggcgtcgtgtattctgtgggaatgcagtggctaaagacccagggaaacaaacaaatgctgtgcacatgcctgggcaatggcgtgagctgtcaggagactgccgtaacccagacgtacggtgggaattctaacggcgaaccttgtgtcctgccattcacctacaacgggcgcaccttttatagttgcaccactgaaggccgccaggatgggcacctatggtgttcaacgaccagtaactatgagcaggaccagaaatactcattttgcaccgatcatacggttctggtgcaaacgcgcggtgggaactcaaacggcgccctatgtcattttccctttctgtacaataaccacaattacacagattgcacaagcgaggggcgccgcgataatatgaaatggtgcgggaccacccagaactatgacgccgaccaaaagtttggattttgcccgatggccgcccatgaggagatttgtacaacaaacgagggtgtgatgtaccgaatcggcgatcagtgggacaaacagcatgatatgggccacatgatgagatgtacatgcgtgggaaatggaagaggcgagtggacttgtatcgcttacagtcagctgagagaccagtgtatcgttgatgacattacttacaatgtcaatgatacattccacaaacggcatgaagagggtcatatgctgaactgtacctgtttcgggcaggggcgaggaaggtggaaatgcgaccccgttgaccaatgtcaagactctgagaccggaactttctatcaaataggtgattcttgggagaaatacgtccatggagtccgatatcagtgctactgctacggccgaggtattggcgaatggcactgtcaaccattacaaacttatccatcgtcaagcgggcccgttgaggtattcatcacggagacacctagtcagcctaattctcatcctattcagtggaacgccccccagccttcacatatttctaaatacatccttaggtggcgcccgaagaattccgtggggcggtggaaagaggctactattccaggtcatctgaactcttacacaattaagggtctgaagccaggcgtggtctatgagggtcagctgatatcaattcagcagtacggccatcaggaggtgacccggttcgactttacaacaaccagcacttctacgccagtcacttccaatacagttacaggagaaactaccccatttagccctcttgtcgctacatccgagtcggtcactgagattaccgcttcctctttcgttgtctcctgggtgtccgcctctgacaccgtgtccgggttccgcgttgaatatgagctaagcgaagagggcgatgagccccagtatctggacctcccctccacagcaacgagcgtgaatattcctgacctcctacctgggagaaagtatatcgtcaatgtctatcagatttcagaggatggcgagcaatccctgatcctgtcaacttctcagacaaccgctccagatgctcccccggacacaaccgtagaccaagtagatgacacttccatagtcgtccgctggtctaggcctcaagccccaataacaggttataggatcgtctacagccccagcgtggagggctcgagtaccgaactgaatcttccagaaaccgcaaacagtgtgactctcagtgatctgcagcccggggttcagtataacatcactatctatgccgtggaggaaaatcaagagtccacgccagtagtcatacaacaggagactactgggacccctcggtccgacaccgttcctagccccagagacttacagttcgtggaagtgactgacgttaaggtgacgataatgtggaccccccccgaaagtgccgtgacagggtacagagtggacgtgattcctgtgaatcttcccggggaacacggccaaaggctccctatcagccggaacacctttgccgaagtgaccggattatctcctggcgtcacttactacttcaaggtcttcgctgttagtcacggccgcgagagcaaaccacttaccgcacagcaaacaacgaaactggatgcacctaccaatctccagtttgtgaatgagaccgactccaccgttctcgtgaggtggacccctccaagggcgcagatcactgggtacaggctcaccgtgggattaacacggagagggcagcctcgccagtataatgttggacccagtgtgagcaagtaccccctacgcaatctgcagccagcaagtgagtacacagtatcactagtggctatcaaaggcaaccaggaatctccaaaagccaccggcgtgtttacaactctccagccaggaagctctatcccgccctataacaccgaggtgaccgagaccacaattgtcattacatggaccccagcccctagaatcggatttaagctgggcgtgcgaccctcccagggcggcgaggcccctagagaagtcaccagtgattcagggagcatagttgtttctggattgactccgggagttgagtacgtttacactatccaggtgttaagggacggtcaggaacgagatgctccaattgtgaacaaagttgtgacaccactcagtccacccactaatctccatttagaggccaatcccgacacaggggtgcttaccgtgtcctgggagagaagcacaacccctgatataaccggataccgtatcacaacaacacctacaaatggtcaacaaggcaactctttggaggaggtggtgcatgcggaccagagctcgtgcactttcgataatctgagcccgggtctcgagtacaatgtttcagtctacacagtcaaggatgataaggagtcagttccaatctcagacaccattattcccgccgtaccacccccgactgacctcaggttcaccaacataggtcccgatacaatgagagtgacatgggctccacctccatctatcgacctgacaaatttcctggttcgctactctcctgtaaagaatgaggaggatgtcgccgagttgtcgatcagtccctctgacaacgctgtggtgctcacgaatctcctccctggtactgagtacgtagtatcagtgagctccgtttatgagcagcacgagtcaactccactcagagggagacagaagacaggcctcgacagcccaaccggcattgacttcagcgacattacagcgaacagctttacggtccactggatcgcacccagagcaacgattaccgggtatcggattcgccaccatcctgagcatttttccgggcggcccagagaggacagagtgcctcacagtaggaattcgatcacactgacaaacctgacgccaggcactgaatacgtcgtgtcaattgtggccctgaacggacgggaagaatccccattgttaatcggccagcaaagtactgtttcggatgtgccaagggatcttgaggtggttgccgccacgccgacatcattgctcatcagttgggatgcacctgccgtgaccgtacggtattaccgaattacctacggcgaaaccgggggaaactcccccgttcaggaattcaccgtgccaggttcaaagtcaacagccaccatcagcggactcaagcccggcgtggactacaccatcacagtgtatgccgtaactgggcgcggggattcccctgcatcttcgaaaccaataagtatcaactatcgcacagaaatcgacaaacccagtcagatgcaggtgaccgacgtacaggacaacagcatttctgtaaagtggctgccatctagctcccccgttaccggttatagagtgacaactacccccaaaaatggtccaggtccgacaaagactaagaccgccggacctgaccagacagagatgactatcgaaggcctacagccgaccgtagagtacgttgtatcagtctacgcccagaatcccagcggagaaagtcagccgctggtgcagactgctgtaacaacaatccctgcaccaacggacctgaagttcactcaagtcaccccaacgtctctctccgcccagtggacaccaccaaacgttcagctgacaggttaccgtgtgcgcgtcacgcccaaagaaaaaaccggccccatgaaagagataaacctggcaccggacagctcctcggtggttgtgtccggattgatggtcgcgacaaaatacgaggtaagcgtttacgccctgaaggacacgcttaccagccggccagcacagggggttgttacaacgctcgaaaacgtttcccctccacgccgggctagggtgaccgacgcaactgagaccacaataacaataagctggagaactaagacagaaaccatcaccggctttcaggtggacgccgtgccagccaacggccaaacacctatccagcggactatcaaaccagatgttcgcagctacacaataacagggctgcagccaggtaccgattacaagatctacctctatacgctgaatgacaatgctaggtcctctcctgtggtcattgatgcgtcaactgcaattgacgccccttctaacctgagattccttgcaacgacccccaatagcctgctggttagctggcaacctccaagagctcggatcacgggatacattatcaaatacgagaagcccggcagccctccgcgggaggtagtgcctcggcctcgaccaggcgtcacagaggctaccatcactggactagagcctggcactgagtacacaatttatgtcatcgctctgaagaacaatcaaaagtctgaacctctgattggccggaagaagactgatgaactcccacagttggtgactctcccccatccgaacttgcatgggcccgagatactcgacgtaccgtccaccgtccaaaagacaccatttgtcacccatccagggtatgacacaggaaacgggatacagctgccggggactagtggccaacagcccagcgtggggcagcaaatgatattcgaagaacatggatttcgcagaacaacaccacctaccacagccactcccatacgtcacaggcccaggccctaccctcctaatgtaggcgaagaaattcaaattggccatataccacgagaagacgtggattaccacctgtacccacacgggcccggcctgaaccccaatgctagcaccgggcaggaagcccttagccagacaaccattagttgggccccattccaagatacaagtgaatatatcatatcatgtcaccccgtagggactgatgaagagcccctgcaattccgggtgcctgggacctccacctccgcaacattgactgggttgacccgaggcgccacttacaacgttatagtcgaggcgttgaaagaccagcagagacacaaagtgagggaggaggtggtgactgttggcaacagcgtgaatgaggggctcaaccagccaacagacgattcctgtttcgacccgtatacagtgtcccactacgcggtgggagacgaatgggagcgaatgagtgaatcggggtttaagttgttatgccagtgccttggcttcggctctggtcactttcggtgcgacagcagccggtggtgccatgacaacggggtgaattataaaatcggggaaaaatgggaccgtcaaggagagaacggacagatgatgtcatgtacctgtctgggcaacggaaagggtgagttcaaatgtgacccgcacgaggccacatgctacgacgacggtaagacatatcatgtgggtgagcagtggcagaaggagtacctgggggcgatttgctcatgcacatgcttcggcggacagcgtgggtggcggtgcgacaattgccgacgccctggcggtgagccctctcccgaggggacaactggtcagagctataaccaatacagccagcggtaccaccagcgtactaataccaatgtgaattgtcctatcgagtgcttcatgccgctggatgtccaggccgatcgggaagactctagagagtag

SEQ ID NO: 24209 - DNA, 6096 bp, synthetic construct
  misc_feature 1..6096: note = Description of Artificial Sequence: Synthetic coding sequence
  source 1..6096: mol_type = other DNA
atgctgcggggccccggccccggcctgctgctgctggccgtgcagtgcctgggaaccgcagttcccagtactggcgcctcgaaatctaagaggcaggctcagcaaatggtgcaacctcagagccctgtggccgtgagtcagtctaaacccgggtgctacgataatggcaaacattaccagatcaatcaacagtgggagcgcacttaccttgggaacgccctggtctgtacctgctatggaggcagccgggggttcaattgcgagagcaagccagaggctgaagaaacgtgcttcgacaagtatactggcaatacataccgcgtgggtgatacctatgagagacccaaagactctatgatctgggactgcacttgtattggagccggccggggtagaatttcctgcaccatcgcaaaccggtgtcacgagggcggccaaagctacaagatcggagacacctggagacgtcctcatgagacaggaggctatatgttagagtgcgtttgcttagggaatggtaaaggcgagtggacttgcaagcccatagccgaaaagtgcttcgaccatgccgccggcacaagctatgtggtgggcgaaacatgggagaagccttatcagggttggatgatggtggactgtacttgtttaggtgaaggatctgggaggatcacatgcacatcccgaaataggtgtaacgatcaagacacaagaaccagctatagaatcggggatacttggagcaagaaggataaccgtggaaacctcctgcagtgtatatgcaccggtaacgggagaggtgagtggaaatgtgagaggcacacgtctgtccagaccacttcgagtgggtctgggcccttcactgatgtgcgcgctgctgtctaccagccgcagccacatccccagccccctccatacggtcactgtgtcaccgacagtggggtcgtgtactcagtggggatgcagtggttgaagacacagggcaataaacagatgttatgtacatgtctgggaaacggggtgtcttgtcaggagacggctgtgacccagacctacggcggaaattctaatggtgaaccttgtgttttaccatttacctataacggccgaaccttctactcctgcacaaccgagggacgtcaggatggacacctgtggtgttccaccacctctaactacgaacaggaccaaaagtactcattctgtaccgatcataccgtgttggtgcaaactcggggagggaatagcaatggagccctatgtcactttccgttcttgtataacaaccataactacaccgattgcacaagcgagggcaggagggataacatgaagtggtgcggcaccacccagaactacgacgctgatcagaaattcggtttttgccctatggcagcccatgaagagatttgcaccactaatgagggcgttatgtaccgcattggcgaccagtgggacaaacagcacgacatgggtcacatgatgcggtgcacatgtgtgggtaatggaaggggcgaatggacatgcatagcatattcccagctgcgggatcagtgcatcgttgacgatatcacatataacgttaacgataccttccataagcggcacgaggagggacacatgctgaattgtacttgcttcggacaggggaggggccgctggaaatgtgatcctgttgaccagtgtcaggatagtgaaactgggaccttctatcaaattggggactcatgggagaagtacgtgcatggagtgcgctatcaatgctattgctacggccggggaatcggagagtggcattgccaacctctgcagacttacccatcatctagcggacccgtggaagtattcattacagagacccctagccagccaaattctcatcccatccaatggaatgcccctcagcctagtcatatctctaagtatattttgcggtggaggccgaaaaattccgtgggcaggtggaaggaggcaaccatcccaggccatttaaatagctacacaattaaagggcttaaacccggagttgtttatgagggacagctgatttcaattcagcagtacggacatcaggaggttactaggttcgacttcactactactagtacaagtacgcctgtgacctctaatacggtgaccggagaaacgacaccatttagccctttggtcgctactagcgagtctgtgacagagatcacagcgagttcttttgttgtcagttgggtgtcagctagcgacaccgtgagtgggttcagagtcgagtatgaactctctgaggaaggggatgagccacagtatctcgacttgccttcgacagcgacgagcgtgaatattcccgaccttctgccaggacgaaaatacatagttaatgtctaccaaatttcagaggatggagagcagtccttaattctaagtacctctcaaactaccgcccccgacgccccacccgatacgacagtggaccaggttgacgacactagcatcgtggtgaggtggtctcggccacaggccccaatcacaggttatcggattgtctacagtcctagcgtggagggcagctcaactgaactgaatttgcctgaaactgccaacagcgtaaccctgtccgaccttcaacctggggtgcaatacaacatcactatttacgcagtagaggaaaatcaggaatcaaccccagtggtaatacaacaggaaactactgggaccccccgttcagacacggtacctagcccacgcgacctccagtttgttgaggttaccgacgtcaaggtgacaataatgtggaccccccctgagtctgctgttactggctaccgggtcgatgtgatccctgttaacctgccaggagagcatgggcagaggttgcctatctcccgaaatactttcgccgaggtcacgggtctgtctccaggggtcacctactattttaaggtttttgctgtatcccatggccgcgagtccaagccactgacagctcagcagaccaccaagctggatgcgccaaccaacttgcagttcgtcaatgaaactgacagcaccgttctcgtccgatggacccctcctcgggcacaaatcacaggatatcgcctgactgtcggcctgaccaggcgtggccagccccgacaatacaacgtcggcccttccgtcagtaaataccccttacggaacctgcagccagcatccgagtacacagtttctctcgtcgctattaaggggaaccaggaatcccctaaggcaaccggcgtcttcactaccttacagcctggctcctcgatccccccttataatactgaggtcactgaaaccactatcgtcatcacgtggaccccagcgccccggattggcttcaaactgggcgtgcggccatctcagggtggtgaggcgcctagagaagtgacgtcggattccgggtcaatcgtggtgtccggactcacgcccggagtcgagtatgtgtataccatccaggtattacgtgatggccaggagagggacgctccaattgtgaacaaggtcgtgacacctctcagcccccccacgaacctccatctcgaagcaaacccggataccggcgtgcttacagtgagctgggagcgctccaccactccagatatcaccggataccgcattacgactaccccgaccaacgggcagcaagggaacagcttggaagaggtggtccatgctgaccagagtagttgtacttttgacaatttgtctccagggttggagtacaacgtctcggtctatactgtcaaggacgacaaggaaagcgtgcccatcagcgacacaataatcccggcagtccctccgccgaccgatctgaggttcacaaatatcggacccgatacaatgcgagtgacctgggccccaccaccgtccattgacctgacgaattttttggtccggtatagtcccgttaagaatgaagaagatgtggccgaactgtctatcagcccgagtgacaatgccgttgtactgaccaaccttcttcctggtacagagtacgtggttagtgtctcctcagtatatgaacaacatgaatcaactccacttcgaggccggcagaaaaccggtctcgattccccaaccggtatcgacttctcggacattacagcaaattcatttaccgtgcattggattgctccccgcgcgaccatcacgggatatagaattcggcaccaccctgagcatttttccggccgcccccgggaagaccgggtgccccacagtaggaattcaatcactctgacaaacttaactcctggtactgagtacgtggttagcattgtagctctaaatggccgtgaggaatctccactccttatcggacagcagagcactgtcagcgacgttccccgcgaccttgaggtggtggcagcgactccaactagtctgcttatttcatgggatgctccagcagtgaccgtgcggtattaccgtataacttacggggaaaccggagggaattcacctgtgcaggagttcacagtccccggaagtaaatcaacagcaacaatctccggactgaagcccggagttgactacaccatcactgtctatgcggtgactggcagaggcgactctcccgcaagcagcaaaccaattagtatcaactaccgtacggagattgataaaccgtcccagatgcaggtgactgacgtacaggacaacagcatctccgttaagtggcttccttcctcatcgccggtcacaggataccgggtaaccactacacccaagaacggtcccgggcccaccaaaaccaaaactgccggtcccgaccaaacagagatgacgatcgagggactgcagcccaccgtagagtacgtagtgagtgtctatgctcagaacccaagtggcgagagtcagcctctggtgcagaccgctgtcacaaacatcgatagaccaaaaggcctggcatttacggacgtagatgttgattccattaaaattgcctgggaatctccacaagggcaggtgtctcgataccgagtcacttattcgagcccggaggacgggattcatgaactcttccccgctcctgacggcgaggaggacactgcagagttgcaggggctgcggccaggcagtgagtatacagtgtccgttgttgctctccatgacgatatggaatcacaacctctcattgggactcagtctactgccatcccagccccaactgacctgaaatttacacaagtaactcccacttcgctgtctgcccaatggactccacccaatgtccagctcacagggtacagagtgcgcgtgactccaaaagaaaagaccggccccatgaaggaaattaacctggctccagactcctcgagtgtggtggtatcaggccttatggtggctactaagtatgaggtctccgtgtatgcacttaaagatacactgacatcacgccccgcccaaggagtcgtgaccactcttgagaatgtgagccctccccggcgagctagagttaccgatgccacagagaccaccatcactatatcttggagaacaaaaaccgagaccatcactgggtttcaagttgacgcagtgcctgccaatgggcagacccccattcagcggacgatcaaaccagacgtgaggtcctacaccataaccggcttacagcctggaaccgactataaaatatatctctacacactcaacgacaacgctcgctctagccccgtcgtcatcgatgcatcaacagcaattgacgctccttccaaccttcggtttctggcgactactccaaactctctccttgtgtcatggcaacccccaagagcgagaattacaggctacatcattaagtacgaaaaacctgggtcccccccccgggaggtggtcccacgtcctagaccaggtgtgactgaggccaccatcacaggcctagaacccgggaccgagtacactatatacgtgattgcattaaaaaacaaccagaagtctgaaccccttattggtcggaaaaagacaggacaggaggcgttgagccaaaccacaatctcttgggctccattccaggacacgtcagaatatataatcagctgtcatccagtcggcaccgatgaggaacccttacagtctacaaaagcatag

SEQ ID NO: 24210 - DNA, 6531 bp, synthetic construct
  misc_feature 1..6531: note = Description of Artificial Sequence: Synthetic coding sequence
  source 1..6531: mol_type = other DNA
atgctgcggggccccggccccggcctgctgctgctggccgtgcagtgcctgggtacagctgttccgagcaccggcgcctcaaaaagtaagcgacaggcgcagcaaatggtgcaaccccagtctcccgtcgctgtctctcaatccaaacccggatgctatgataatggcaagcactaccagatcaaccagcaatgggagcggacctatctcgggaatgccctggtctgtacatgttacggaggatcccgtggatttaattgtgaatctaaacctgaggcagaagaaacatgcttcgataagtataccgggaacacatatagagtgggggatacatacgagagaccaaaggacagcatgatctgggactgcacctgcatcggcgctggaagggggagaatctcttgtactatcgcaaaccgctgtcatgagggtggccagagctacaaaattggagatacatggcggcgccctcacgagactggcggttacatgctggagtgtgtttgcttggggaacgggaagggcgagtggacgtgcaagccgatcgctgagaaatgttttgatcacgctgctggcacctcatacgtagttggagagacatgggaaaagccctaccagggttggatgatggtcgactgcacctgtttgggcgagggctcaggacgaattacctgtacctcacggaaccggtgtaacgatcaggacacacgtaccagctaccggatcggcgatacatggagcaaaaaggacaataggggtaatctgctgcagtgtatctgcaccggcaatggacggggagagtggaaatgcgaacggcatacaagcgtacagacgacatcttccggcagcgggccatttaccgatgttcgtgcagccgtgtatcagccacagcctcatccccagcctcctccatacgggcattgcgtgactgactccggggtagtgtatagcgtcggaatgcagtggctgaagacgcagggtaacaagcagatgctctgtacgtgtcttggaaacggggtcagttgtcaggagacagccgtgacccagacctatggcgggaattccaacggcgagccgtgcgttttacccttcacatacaatggacgaactttctactcatgtaccactgaggggcgccaggacggtcatttgtggtgttcaacaacaagcaattacgagcaagaccagaaatactctttctgcactgatcacaccgtgttagtgcagaccaggggagggaatagcaatggggcgttgtgtcattttccatttctgtacaataaccacaattatacagattgtacttctgagggcaggcgcgataacatgaagtggtgtggcacaactcaaaactatgacgccgaccagaagtttggtttctgccctatggctgcccatgaagaaatatgcacgaccaatgagggagtcatgtatagaatcggggatcagtgggacaagcagcacgatatggggcatatgatgcgctgcacctgcgtggggaatggcagaggcgaatggacctgtatagcgtacagccagctcagggaccagtgtatagtggatgacattacttataacgtcaacgatactttccacaagcgccacgaagagggacacatgctcaactgtacttgctttggacagggccggggtaggtggaagtgtgaccccgtcgatcagtgccaggatagtgagaccggcacattctaccaaatcggggactcttgggagaaatacgtccacggggttcggtatcagtgctactgctatggccgagggataggcgagtggcattgtcagcctctccagacttacccaagcagctctggcccagtcgaggtttttattacggagaccccctctcagcccaactcccaccccatccagtggaatgctcctcagccttcgcatattagcaaatatattctcaggtggaggcccaagaattccgtcgggcgttggaaagaggcaactatacccggccacctaaattcatacacgatcaaaggtctcaagcccggggtggtgtatgagggacaactgatcagcatccagcaatatggacatcaagaggtgacgagattcgattttacgacgacttcaacatctactcctgtcacttcaaatacagtgacaggcgaaacaaccccgtttagccccttagtggctacctcggagtcggtaaccgaaataacggctagcagttttgttgtctcgtgggtcagcgcatcggatactgtctctgggtttagggtggagtacgaactctctgaagaaggtgatgaaccccaatacctcgatctgcctagcactgccacttcggtaaacatacctgacctgctgcctgggcgcaaatatatcgtgaatgtgtatcagatctcagaagacggggaacagtccctaatcctctccacttcacagactactgctcctgatgctccaccagatacaacagtagaccaggtggacgatacgtcaatagtagtccggtggtcccggcctcaggctccaatcaccgggtatcggatagtgtattctccctctgtggaaggatcatctacagagctcaatttgcccgagactgccaacagcgttaccttgtctgacctgcagccgggtgtccaatataatataactatatacgctgtggaagagaaccaagagagcacacctgtggttatccagcaagagacaacagggacccctagatcagacacggtcccgtcacctcgggatctgcaatttgtggaggtgactgatgttaaagtcactattatgtggactcctccagagagcgccgttactgggtacagagtcgacgtgattcccgtgaacctgcccggggagcatgggcagcgcctccccataagccgcaacacctttgcggaggtgactgggcttagccccggcgtgacatattacttcaaagtgttcgcagtctcacatggtcgcgagagcaagcccctcacagctcaacaaacaactaaactcgatgctccaaccaacctgcaatttgtgaatgagacagactctactgtgctcgtgagatggacccctccaagagctcagatcactgggtatagattgactgttgggcttactaggcgcggccagccgagacaatacaacgtgggacctagtgtctcgaagtatccccttaggaatctccagcccgcatccgaatatacggtgagcctggtggccatcaagggtaaccaagagtccccaaaggcaacaggcgtgtttactactctgcagccggggagctctatccctccttacaatacggaggtgacggaaactaccatagtaataacgtggaccccagccccccggatcgggttcaaactgggtgtccgcccgtcccagggaggagaggcccctcgggaggtgacatccgatagcggcagtatagtcgtgtctgggctgaccccaggggtggagtacgtctacacgatccaggtgctgcgcgacgggcaggaacgcgacgcgccgattgtgaataaggtggtgactcctctttctcccccaactaaccttcatctggaggctaatcctgacaccggagtattgaccgtgtcttgggaacggtcgactacacccgatattaccggatatcggatcaccacaactccaaccaacggacagcaggggaactccctggaagaagtggtccatgccgatcagtccagctgtacttttgacaacctgagcccgggcctggagtataacgtgtcagtgtacacagtaaaggatgacaaggaaagtgtgccaatctctgacaccatcataccagccgtgcccccaccaaccgatctccgattcacaaatatcgggcccgatactatgcgcgtcacatgggcaccgccgccctctatcgatctgacgaactttctagtccggtactcacccgtcaaaaacgaagaggacgtcgccgaactgtccatttctccatctgacaatgccgtggtcttaaccaatttactgccaggcacagagtacgtggtatctgtctcttcggtctatgagcaacacgagagcacccccctgcgcggccggcagaagaccgggttggattcccctacagggattgacttttccgatataaccgctaacagttttaccgtccactggatcgcccccagagcaaccattacgggatataggatccggcatcatccagaacacttctccggccgaccccgggaagaccgcgtaccacacagtcggaatagcattaccctgacaaacctgacaccgggcaccgagtacgtcgtgtcaattgttgccctcaacggccgagaggagagcccacttctgataggccagcaatcgacagtttcagacgtgcctagagatctggaagtggttgcggctacacccacttccttgttaatctcctgggatgcccctgctgtaacagttcgctactatcgcatcacctatggagagactggcggaaactcacctgtgcaagagtttaccgtgcccggtagcaagtccacggctaccatctcaggccttaagccgggtgtggactatacgatcacggtatacgcggtgaccggccgcggggattcccctgccagctccaaacctataagcattaactatagaacagaaattgacaaaccttctcagatgcaggtgactgacgtgcaggacaactctatcagtgtgaaatggcttccttccagtagtcccgtcacgggctaccgtgttacaaccactcccaagaacggcccgggtcccactaaaactaaaaccgccggcccagatcagactgaaatgaccatagaaggacttcagccgacggtagaatatgtagtaagtgtgtatgcccagaatccatctggcgagtcccaaccattggtccagactgccgtgaccaccatccctgcgccaacagatctgaagtttacccaagttacccctacgagtctcagtgcgcagtggactcctcccaacgtgcagctcacaggatatagagtgcgcgtgactcctaaagagaagaccggtccgatgaaggaaatcaaccttgcgcctgactcaagctctgttgtcgtgagtggactgatggtcgcaactaaatatgaagtgagcgtgtatgcccttaaagatacattaacctccagaccggcccagggcgtggtcaccaccctcgagaatgtatcaccaccgcggagagctcgggtgactgacgccaccgaaactacaatcactataagctggcgcacaaaaacagagacaatcacaggttttcaagtagatgcagtccccgctaatgggcaaaccccaatccagcgtacaatcaagccggacgtccggagttacactattaccgggttacagccagggaccgactacaagatctatctatacactctcaacgacaacgcgaggagctcaccagtggtgattgacgcttccacggccatcgacgccccaagcaacctgcggttcctggcgactacacccaattcccttttggtgtcctggcagccccctagggctcggatcaccgggtacatcattaagtatgagaagcccggtagtcccccacgagaggttgttccaaggccaaggcctggagtgactgaggctaccatcaccggattggagcctggtactgagtataccatctacgtaatcgcattgaagaacaaccagaaatcggagcccctgatcgggaggaaaaagacgggccaagaggctctcagccagaccactatcagctgggcgccattccaggatactagtgagtacatcatctcctgtcaccctgtcggtaccgatgaggaaccattgcaattcagagtgcccggtacttctacctcagccaccctgactggtttaactaggggggccacttacaatgttattgtggaagcactcaaggaccagcagaggcataaagtgagagaagaggtggtgactgtaggcaacagcgtgaacgagggcctgaatcagcccacagatgattcttgtttcgacccttatacagtgagccactatgcagtaggcgatgaatgggagagaatgtccgaatcaggttttaagctgctctgccagtgtcttgggttcggttctgggcactttagatgtgacagctcaagatggtgtcacgacaacggtgttaattacaagataggtgaaaaatgggatcgccagggcgagaacggccagatgatgagctgcacctgtttgggcaacggaaagggtgaattcaaatgcgatccacatgaagccacctgttacgatgacggtaaaacctatcacgttggagagcagtggcagaaagaatatttgggggctatttgctcttgcacctgttttggtgggcagcggggctggcggtgcgataactgcaggaggcctggcggagagcccagtccagaaggtaccaccggtcaatcctataatcaatattcccaaaggtatcaccaacgcactaataccaatgtgaactgccccatcgagtgcttcatgccactggacgtgcaggcagacagggaggacagccgggagtag

SEQ ID NO: 24211 - DNA, 7161 bp, synthetic construct
  misc_feature 1..7161: note = Description of Artificial Sequence: Synthetic coding sequence
  source 1..7161: mol_type = other DNA
atgctgcggggccccggccccggcctgctgctgctggccgtgcagtgtctcggtactgctgtgccgagcacaggggcttcgaagtcaaaaaggcaagcccagcagatggtgcagccgcagagccccgtcgcagtgagccagagcaagcctggatgctatgataatgggaagcattaccagattaaccagcagtgggagaggacctacttgggaaatgccctggtctgtacatgttacggaggctcaagaggattcaattgtgagagcaagccagaggcagaggagacgtgttttgacaaatatactggtaacacataccgggtgggggacacctatgagagaccaaaggattccatgatctgggactgtacttgcatcggggccggcagaggcagaattagttgcacgatagcaaatagatgccacgagggagggcagtcctacaagataggcgacacatggcggcgaccacatgagaccggtggatatatgttggaatgtgtttgtcttgggaacggaaagggagaatggacctgtaaaccaatcgccgagaaatgctttgatcacgctgcaggcacctcctacgttgttggtgaaacttgggagaaaccataccaggggtggatgatggtcgactgtacctgcctgggagaggggtctggccggatcacctgcacctcccgcaataggtgcaatgatcaagatacacgcacatcttaccgcattggcgacacatggagcaagaaggacaataggggtaacctactgcagtgtatatgcacaggaaatgggagaggtgagtggaagtgcgaacggcacacctctgttcagacgacctccagtgggtccggtccattcaccgacgtccgtgcggctgtgtaccagccccagccccatccgcagccgcccccctatggccattgtgtgacggactctggcgtggtttattcagtaggaatgcagtggcttaaaactcagggaaataagcagatgctgtgtacgtgtttgggcaatggcgtttcctgccaagaaactgcagtaacccagacatacggagggaattccaatggtgaaccttgtgtgctcccattcacatataatggccgtaccttctactcttgcaccacagaagggcgacaagacgggcacctatggtgttcaactacaagcaattatgagcaagatcagaaatatagcttctgcacagatcatactgtgttagtccagactcggggtggcaactctaacggcgctctgtgtcactttcccttcctctacaataatcacaactatacagactgtacctccgagggtagacgggacaatatgaaatggtgcggtaccacccagaattacgacgccgaccagaaatttggattttgccccatggccgcccatgaggagatttgcaccaccaatgaaggcgtaatgtataggatcggagaccagtgggacaaacaacatgacatggggcatatgatgcgatgtacatgcgttggtaacggtagaggcgaatggacatgtatcgcctattcccagctcagggaccagtgtattgttgacgacatcacgtataacgtgaacgacacgttccacaagaggcacgaagaagggcatatgctcaactgtacttgtttcgggcaggggagagggcgctggaagtgtgatccggtcgaccagtgtcaggactcggagactggcacattttaccagatcggtgactcctgggagaaatatgtgcatggtgtacgttatcaatgctactgttatggccgaggcatcggagaatggcattgtcagcccctccaaacctatccttcctcaagcggccctgtggaggtatttataaccgagacccctagtcaacctaactcccatcctattcaatggaatgctccccagccttcccacatttcaaaatacattctcaggtggcgccccaagaactcagtaggccgatggaaagaagccacaatcccgggccacttgaactcctacaccattaaagggctgaagccgggagtcgtctacgagggtcaactgatttccattcagcagtatgggcaccaggaagtgaccagattcgattttacaacaacatcaacttcgacaccagtcacatcgaatacagtgaccggcgaaaccactccgtttagtccactagtggcaacgagcgagagcgtcacagaaatcacggcgtcttcgtttgtcgtgagctgggtgagcgccagtgacaccgtatctgggttccgcgtggagtacgagttatcagaagagggagatgaaccacagtacctcgatctcccttctacagcaacgtccgtcaacatccccgatctgctgccaggccggaaatacatcgtcaacgtgtatcagatctcagaggatggggaacaatccttaattctttccactagtcagaccacagcgcctgacgcaccaccggatacaaccgtcgatcaagtggatgatactagtatagtggtgcggtggtcccgcccacaggctccgatcaccggttacagaattgtatactccccctcagtagaagggtcaagtactgaactcaaccttcctgagacagccaacagcgtcacactgagcgacctgcagcccggcgtgcagtacaatattacaatttatgccgtcgaagagaaccaagagtccacacccgtggtaattcagcaggagacaaccggcactcctcgttcagataccgttcctagcccccgtgacctgcagtttgtggaagtgaccgatgtgaaggtgaccataatgtggactcccccagagagtgcagtcaccgggtatcgtgttgacgtgatacctgtgaacttgcctggagaacacggccagagactgccaatctcccggaatacatttgcagaagtcacaggcctttctcccggggtgacatactactttaaagtgtttgctgtctcccacggcagggaatccaaacctctcaccgcacaacagacaaccaaactggacgcaccaacaaacctgcagttcgtcaatgaaacagattctacagtgctcgtgcggtggactcctcctagagcccaaattacaggctacaggcttacggtcggactgacgcggcggggccagccacgacaatacaatgtgggtccctcggtgagtaagtacccactgagaaatcttcagcctgcttctgagtacactgtgtctctggtggccattaagggcaatcaagagtccccaaaagccacaggagtgtttacaactctacagccaggatcctccattccgccttacaataccgaggtgactgagaccacaatcgtgattacctggactcccgctccccgcattgggtttaaattgggggtgagaccttcccaggggggtgaggctccacgggaagtgacatcggatagtgggtccatcgttgtgagtggcctgacccccggtgtcgaatacgtgtatactatccaggtgctaagggatgggcaagagcgggacgctcccatcgtgaacaaggtagtgacaccactgtcaccgccaacaaaccttcatcttgaagccaatcctgacacaggagtactgactgtgtcctgggagaggtcaacaactcctgacatcacaggctatagaattactactacccccacaaacgggcaacagggtaactcactcgaagaagtcgttcacgccgatcagtcaagctgcacattcgataacttgagcccaggcttggagtacaacgtttcagtttataccgtgaaggatgacaaggagtccgtccccatttccgatacaatcatccccgctgtgccccccccaaccgatcttagatttacaaatatcggccccgacacgatgcgagtcacgtgggcccctcctccgagtatagacctgacaaattttctggttcgctactccccggtcaaaaatgaggaagacgtcgctgaactttccatcagtccaagcgacaatgcagtcgtgcttactaatctgctccctggcacggaatacgtggtgtcagtgagctcagtgtatgaacagcacgagagtacgccactgagagggcgacagaaaactgggcttgacagccctacaggcatagacttttctgatatcactgccaatagttttactgtgcattggattgcaccaagagcgaccatcaccggctaccggataaggcaccatccagagcacttttccggacgaccgagagaagacagagttccccacagcagaaattctataacactcaccaatctaacacccggaaccgagtacgtcgtcagcattgtggctctcaacgggcgagaagagtcaccccttctgattgggcagcagagcacggtgagcgatgtccccagagatctggaggtggtcgctgcaacccctaccagtctgctcatttcatgggatgcaccagccgtaaccgtgcgttattatagaatcacttacggtgagaccggcgggaattcacctgtgcaagagttcaccgtccccgggagcaagtccaccgccacaatctcagggcttaagcccggtgttgactacaccattacagtgtatgccgttaccggtcgcggcgattctcctgctagttctaagccaatctcgatcaattaccgtacagaaatcgataagccgagccagatgcaggtgaccgatgtccaggacaactcaatcagtgtgaagtggctgccatctagctctcccgtcacaggttacagggtcactacaaccccaaagaacgggcccggccctaccaagaccaaaaccgctggacctgatcagactgagatgacgatcgaaggcctgcagccgacagttgaatatgtggtgagcgtctacgcacaaaacccttccggcgagtcccagccgttggtccagacagctgtgaccaatatagatcggcccaagggactggctttcacggacgtagacgtggactcgataaaaatcgcctgggagtcacctcagggccaggtgtcgaggtatagagttacctattcctctcccgaagatggcatacatgaactcttccccgcaccagatggcgaggaagatacggcggagctgcaggggcttcgacccggctccgaatacacagtctcggtggttgctctgcatgacgatatggaaagccagccactcattgggacacagagcacggccatcccggctcctaccgaccttaaatttacccaggtaacacctaccagcctgagtgcgcaatggaccccacctaatgtccagttgactgggtatagagtccgtgtgactcctaaggaaaagacagggcccatgaaagagattaacctggctcccgacagcagctctgtggtggtttcaggcctcatggttgcgacaaagtacgaggtgagtgtatatgccttaaaggacactctgacgtcgcgccctgctcaaggcgtcgtgactacactagagaatgtctctcccccgcgacgtgcacgcgttacagatgccacggagaccacaatcactatttcctggcgaaccaagacagagacaataaccgggttccaagtggacgccgttcccgcaaacgggcagacacctatccaacggacaatcaaacccgacgtgcggtcctacacgattacaggtctccagcccggcactgactacaaaatctatctctacaccctgaacgacaatgcaaggtcatcccctgtggttatcgatgcatcgactgcaattgatgcgccctcaaaccttaggttcctggccacaacccccaatagcctactggtcagttggcagccccccagagcccgcatcacggggtacattattaaatatgagaagccggggagcccgcccagagaggtcgtcccccggcctaggccaggcgtaacagaagccactataacaggattggagcctggaactgaatataccatctacgtcatagccctgaaaaataaccagaagagcgagccacttattgggaggaagaaaaccgacgagttgcctcaactggtaactctgccccacccaaacttacacgggcctgaaattctagatgtcccctctaccgtgcagaaaacaccatttgtaacgcaccctggctatgataccgggaacggaatccagctccccggaacatccggtcagcagccctcagtggggcaacagatgatcttcgaagaacacggcttcaggcgcaccaccccaccaactaccgctacccctatccgccataggcctcgaccctatccacctaacgtgggcgaagagatccagatcggacatatccccagggaggatgtcgattaccatctctaccctcacgggccgggactcaatccaaacgcttctactggccaggaagccctgtctcaaacaacgatcagctgggcccctttccaggacacctccgagtatattatttcttgtcaccccgtgggaaccgatgaggaacctctccagttcagagtgcccggaacaagcaccagcgccacactgactgggctgacacggggtgcaacctacaacgtaatagtagaagccctcaaggaccagcagcgccacaaggtgagggaggaggtggtgacggtgggaaactcagtgaacgaaggactcaatcaacccacagacgattcctgcttcgatccctacaccgtgtcccactacgctgtgggggatgaatgggagagaatgtcagaatctggcttcaaactgctatgccagtgccttggcttcggaagcggccattttcgctgtgacagttcacgttggtgtcacgataatggcgtgaactataaaatcggcgaaaaatgggaccgccagggggaaaatggccagatgatgtcatgtacatgtctaggaaacggcaagggcgagttcaagtgcgacccgcatgaagctacctgctacgacgatggcaaaacctaccacgtaggggagcagtggcagaaggagtatctgggagcgatctgctcatgcacctgtttcggcggtcaaagaggatggcgatgtgataactgtcgtcggcccggcggagagccaagcccagaaggaaccactgggcagagctataaccagtacagtcagcgctaccaccagaggaccaataccaacgtcaattgtcctattgagtgcttcatgcctctagatgtccaggcagaccgggaggatagtcgtgagtag

SEQ ID NO: 24212 - DNA, 6723 bp, synthetic construct
  misc_feature 1..6723: note = Description of Artificial Sequence: Synthetic coding sequence
  source 1..6723: mol_type = other DNA
atgctgcggggccccggccccggcctgctgctgctggccgtgcagtgcctgggtacggccgtgcccagcaccggtgcttccaagtcaaaaagacaggcgcagcaaatggtgcagccccagtcccccgtcgccgtaagccagagtaaaccaggatgttatgacaatggcaagcattaccagataaatcagcagtgggagagaacatacttgggcaatgccttagtttgtacttgctacgggggatctcggggattcaattgtgaatcaaagcctgaagccgaagaaacttgctttgacaaatacaccggcaatacatatagggtgggagacacctacgagaggcctaaggactcaatgatctgggattgcacatgcattggcgcaggtcggggaaggatcagctgtaccattgccaaccgttgtcacgaaggcgggcaaagttataaaattggagacacctggaggcggcctcacgaaaccggtgggtatatgttggaatgcgtttgtctgggaaacggaaagggcgaatggacttgcaaacccatagcggagaaatgttttgaccatgctgccggaacttcctacgtggtcggtgaaacatgggagaaaccttaccagggatggatgatggtcgactgtacttgcctgggagaggggagcggtcggatcacctgtacttcccggaacagatgcaatgaccaggacacaagaacttcttatcggattggggacacatggtcgaaaaaggacaatcgtggcaacctgttacaatgtatttgtaccggcaacggtcgcggcgagtggaaatgtgaacgccacacaagtgtccagactactagctctggcagcggccccttcactgacgtgagggcagctgtttaccagcctcagcctcacccgcaaccccctccctatggacattgtgtgaccgatagtggggtggtgtactctgttggcatgcaatggctgaaaactcagggcaataagcagatgctctgtacctgcctaggcaatggagtttcttgccaggagaccgccgtgacacaaacgtacggaggcaatagtaacggcgaaccttgtgttctccccttcacctacaatggccggacattttatagctgtaccaccgaaggtcgacaggatggccacctgtggtgttctaccacgtccaactacgagcaggaccaaaagtattccttttgcactgaccatactgtccttgtccaaacaagggggggcaatagcaatggagcactgtgccacttcccctttctatataataatcacaactacacagactgtacttccgagggacggcgtgacaatatgaaatggtgtggcacgacgcaaaactacgacgccgatcagaaattcggcttttgcccgatggcagctcacgaggaaatctgcacgacaaacgagggcgtgatgtataggataggcgaccaatgggacaagcagcacgacatgggtcacatgatgagatgcacctgcgtcgggaatggcagaggcgagtggacttgcatagcatattctcagcttagggatcagtgtatagtggatgacatcacatacaatgtaaacgacactttccacaagaggcatgaggaaggacacatgttgaattgtacctgtttcggacagggccgcggacgatggaagtgtgatcctgtggatcagtgccaggactccgaaaccgggactttttaccagatcggagatagctgggaaaaatacgtgcacggcgtgcgctatcaatgttattgttacgggcgtggcatcggggagtggcattgtcagccactgcagacctatccctcatctagcggccccgtcgaggtcttcatcacggagaccccgagccagccaaattctcacccgattcaatggaatgcgccacagccttcacatatctctaagtacatactaagatggcggcctaaaaactctgttggccggtggaaggaggccacaatccccggtcacctgaacagttatactatcaaggggctaaaaccaggggttgtgtacgaaggtcagctcatttccatacagcagtatgggcaccaggaggttacccggtttgacttcacaactacttccacttctaccccagtgacttcaaataccgtaactggcgaaaccaccccattttcacccctggtggctacaagtgagagtgtaacagaaatcacagcttctagttttgttgtcagctgggtgtcggcgtctgacaccgttagcggttttagggtcgaatacgagctgtctgaggagggcgacgagccacaataccttgatctcccatccaccgccacctcagtcaacattccagatctgctgccagggcggaagtacattgttaatgtctatcagatttccgaggacggggaacaatccctcatcctgtctacgtcccagactacagcccctgacgcccctccggatactacagtagatcaggtggatgacaccagcatcgtggtccggtggtcacgcccacaggcccccattaccgggtaccggatagtgtacagcccttccgtagagggctccagtacggagctgaaccttcctgaaacagcgaatagcgtgaccctgtccgatttgcaacccggcgtacaatacaacatcacaatttatgccgtagaggaaaatcaggagagcacccccgttgtgatccagcaagagaccacaggaacccctaggagcgatacagtccccagcccccgggacctacaatttgtcgaggtgacagatgttaaagtgacaataatgtggaccccaccagagtctgcagtaacgggatatcgggtcgatgtcatcccagtcaacctcccgggggaacatggccagaggctccccatttcccgtaacacttttgcagaagtcactggccttagtcctggagtcacatactacttcaaggtgtttgccgtgtcgcatgggcgggagtctaaacctttgaccgcacagcaaaccaccaagctcgacgcacccactaacttacagttcgtgaacgaaactgacagtacggtgttggttcggtggaccccacccagggctcaaatcaccggctatagactgacagtgggactcacaagacgtggccaaccccgtcagtataatgtgggcccctccgtttccaaataccccctccggaatctgcaacccgccagcgagtacaccgtctctctcgtcgccattaaaggaaatcaggagtcacctaaagcaaccggcgtcttcaccactttacagcccggctcaagcattccgccgtacaacaccgaggtgaccgagactactatcgtcataacctggacccccgcaccccggattggattcaaactaggggtgagaccctctcagggtggagaggctcccagagaggtgacctccgatagcggatcaattgtcgtgagcggcctcaccccaggtgtggaatatgtctatactatccaggtgttgagggacggccaggagcgggatgctccaatcgtgaataaggtggtgactccccttagtcccccaaccaacctacacttggaggcaaacccggatactggggtacttaccgtgagctgggaacggagtacaactcctgatattacgggctatcggatcacgacaacgcctaccaacggacaacagggcaatagcctcgaggaggtggtgcacgccgatcagagctcctgtacctttgacaatctgagccctggtttagagtataacgtgtctgtgtatacagtcaaagacgacaaggagtcagtcccaatttctgatacgataatcccggcagttcctccaccgaccgacctgaggtttactaacatcggccctgacaccatgcgagtgacttgggcccctcccccttccatcgatctgacaaattttttggtacgatattcccccgtgaaaaacgaggaggacgtggcagaactttcgatctcaccctcggataatgctgtggtgctcaccaatctgctcccgggaaccgagtacgtcgttagcgttagcagtgtatacgagcaacacgagagcacacctctccgtggcaggcagaaaaccggactggactcaccaacgggcatagatttttcagacataacggcaaattcttttacagtgcactggattgcccccagagcaactattaccgggtaccgaatccgacaccatccagaacatttcagtggacgaccacgcgaggatcgagttccccactcgcgaaactcaattaccctgactaatctgacacctggaacagagtacgttgtcagcatcgtggctctgaacggccgtgaagaaagccctctcctcattgggcagcaaagcacagtgtctgacgtgccccgtgacctcgaagtcgtggccgccaccccaacatcattgctgatctcgtgggatgctcctgctgttaccgttcgctattaccgaattacgtatggtgaaactggaggcaacagcccggtgcaggaatttacggtccctggaagcaaatctacagctaccatttcgggcttaaaacccggggtggattatacaatcacagtgtatgctgtgactggacgaggtgatagtcccgcaagctctaagcccatctcaataaattatcgaacggagattgataaacctagccaaatgcaagtgaccgacgttcaggataattctatcagcgtcaagtggctgccttcctctagccctgtaactgggtatcgcgtgactaccacccccaagaatggaccaggtcccaccaaaacaaaaacagccggccctgaccagacagaaatgactattgaggggctgcagcctaccgtagaatacgtagtgagcgtgtacgctcaaaatccttcgggcgagtctcaacccctcgtgcagacagccgtcaccacaatccccgccccaaccgatttaaaattcacgcaagttactccaacatcactttccgcccagtggacacccccaaacgtacagctgacaggttaccgcgtacgagtaacaccgaaggagaagacagggcccatgaaagaaattaatttggccccagacagctcctctgtggtcgtgtctggacttatggtcgccaccaagtatgaggtaagtgtctatgctctcaaggatactttgacaagcagacccgcgcagggggtggtcaccaccctggagaacgtctcccctcctcgacgtgctagagtgaccgacgcaaccgagaccactatcaccataagttggaggactaagacagaaaccatcaccggattccaggtggacgcggttcccgctaacggccaaaccccaattcagagaacaattaaacctgatgtccggagctacaccattactggcctgcagcctgggaccgactacaagatttacctgtacaccctgaacgataacgctagaagctcccctgtggtgatcgacgcatccaccgctatagacgctccttccaatctccgcttcttggccacaactcccaatagcttgctcgttagttggcagccaccccgcgcccgcattacagggtatattataaagtacgaaaagcctggctccccaccccgagaggtcgtgccccggccaagaccaggtgtcaccgaggctactattaccgggctggaaccagggacggagtacactatttacgttatcgcattgaagaataaccagaagagcgagccccttatcggacggaagaaaacagtacaaaagaccccttttgtcactcacccaggctacgatacaggcaacggtatccagttgcccggcacatctgggcagcagccgtctgtggggcagcagatgatctttgaagaacacggtttcagaagaaccacaccgccaaccacggccacccccatcaggcatcggcctaggccctaccctcccaacgtcgggcaagaagccttgtctcagaccacaattagttgggccccattccaagatacttcagagtacataatttcctgccatccagtgggaacggatgaggagcccctgcagttccgggttccaggtacgagtacatctgcaactttgaccggtctgaccagaggcgccacatacaacgttatcgtagaggccctaaaggaccagcagaggcataaagtgcgcgaggaggttgttactgtgggtaactcagtcaacgagggactcaaccagcccaccgacgatagctgttttgacccatatactgtgtcacactacgccgtcggagatgagtgggagagaatgtcagaatccggattcaaactcctgtgtcaatgtttgggcttcgggagcggacatttccgatgtgatagttcacgttggtgccacgataatggagtgaattataagattggagagaaatgggacaggcagggtgagaatggacaaatgatgagctgtacctgcttgggaaatggaaaaggagaatttaaatgcgatccccacgaagcgacctgctacgatgacggcaaaacctatcacgtaggcgagcagtggcagaaggagtacctgggcgcgatctgctcctgcacgtgttttggaggtcaacgtggttggcgatgcgataactgccgcagacccggcggcgagccatctcccgaaggaacgactgggcagagctacaatcagtactcacaaagatatcaccagcggactaataccaacgtgaactgccccatcgagtgctttatgcctctagatgtgcaggccgatcgggaggactcccgagagtag

SEQ ID NO: 24213 - DNA, 1974 bp, synthetic construct
  misc_feature 1..1974: note = Description of Artificial Sequence: Synthetic coding sequence
  source 1..1974: mol_type = other DNA
atgctgcggggccccggccccggcctgctgctgctggccgtgcagtgtctcggtactgctgttcccagcaccggcgctagcaagtcaaagaggcaagcccaacagatggttcaaccacagagtcccgtggccgtgtcccagtccaagccagggtgctatgacaacggcaaacactatcagatcaaccaacagtgggagcggacctacttggggaatgccctagtgtgcacatgctacggcggctccagagggtttaactgcgagagtaagccagaagccgaggagacatgcttcgataagtacaccggcaatacttatcgggtcggagatacatatgagcggccgaaggactccatgatctgggactgtacgtgcatcggcgcagggcggggcagaataagttgcactattgccaatagatgccacgagggcggtcaatcctataagatcggagacacctggcggaggccccacgagacaggaggctatatgttagagtgtgtgtgtctggggaacggaaaaggagaatggacatgtaagccaatcgcagaaaaatgtttcgaccatgccgcaggaacttcgtacgttgttggcgaaacatgggaaaagccctaccaggggtggatgatggtggattgcacatgtttaggtgaaggcagcggccgaattacgtgtactagcagaaataggtgcaacgaccaggatacgcgcactagttaccgcataggagacacatggagtaaaaaagataatagagggaacctgttacagtgtatatgcacaggaaacggacgaggcgagtggaaatgcgaaaggcacacttcagtgcagaccaccagctccggcagcgggcccttcacagacgtccgcgctgccgtgtatcagccccagcctcatccacagccgccaccttatgggcactgtgttactgatagcggcgtggtgtattctgttggcatgcaatggctcaagacacagggaaacaaacaaatgctctgcacatgtctcggtaatggtgtaagctgtcaggaaaccgccgtcacgcagacctatggtgggaatagcaatggcgagccctgcgtgctccctttcacatataacgggagaactttctactcctgtactacggaaggacggcaggacggtcatctctggtgttcaacaacatccaattatgaacaggatcaaaaatactccttctgtaccgaccacactgtgctcgtccagaccagaggtggcaactcgaatggggcgctttgtcattttccctttctgtataataatcataactatacggactgtacgtccgaaggacggagagataatatgaagtggtgtgggacaactcaaaattatgacgccgatcagaaattcggattttgtcctatggctgcccatgaggagatttgcaccacgaacgagggagtgatgtatcgaatcggggatcagtgggacaagcagcacgacatgggacatatgatgcggtgtacttgtgtggggaacggtcgtggcgaatggacctgtattgcttatagtcagctacgcgatcagtgtattgtggacgatataacatataatgtgaatgatacctttcacaagcgccacgaagaaggccacatgctcaattgcacttgtttcggtcaggggcgaggccggtggaagtgtgatcctgtcgaccagtgtcaggactcagaaacaggaactttctatcagattggtgacagttgggagaagtatgtgcacggagtccgttaccaatgttactgctacggccgtggcattggcgagtggcattgccagcccctgcagacataccctagcagttccggacctgtggaggtgttcataactgaaaccccctcccagcctaactcacaccctattcagtggaacgcgcctcagccttcacacatctctaaatatattctgaggtggcgcccagtgtccatccccccccggaacctcggttattag

SEQ ID NO: 24214 - DNA, 6804 bp, synthetic construct
  misc_feature 1..6804: note = Description of Artificial Sequence: Synthetic coding sequence
  source 1..6804: mol_type = other DNA
atgctgcggggccccggccccggcctgctgctgctggccgtgcagtgcctcgggaccgctgtacctagcacaggtgcatctaaaagcaagcggcaggcacagcaaatggttcagcctcaaagtccggtagctgtcagccagagtaaacctgggtgttacgacaatggaaagcactatcagatcaaccagcagtgggaacgcacatacctcggcaatgccctcgtttgcacctgctatggcggcagtagaggatttaattgtgaaagtaaacccgaggccgaagagacatgtttcgataagtatactggaaatacttatcgggtgggtgacacctatgaaagaccaaaagatagtatgatttgggactgcacctgcataggggccggccgcggtcggatcagctgcacaattgccaataggtgccacgaaggtgggcaaagctataagatcggagacacgtggcggcggcctcatgagactggtggctacatgctggagtgcgtctgcctggggaatggaaagggtgaatggacctgcaaaccgatcgctgaaaaatgttttgaccacgccgccgggaccagctacgtggtgggagagacttgggaaaaaccctatcagggctggatgatggttgactgtacctgtctcggagagggaagcggaaggatcacgtgcacttcacgaaaccgctgcaatgatcaggacaccagaacgtcatatcgcattggcgacacatggagcaagaaagacaatagaggcaatctgttgcagtgcatctgcacaggcaatggaagaggcgagtggaaatgtgagcggcacacttcagtccaaacaacctcatcgggcagcgggccatttaccgatgtaagggctgcagtctatcagccacaaccccacccgcagccccctccctacggccattgcgtgactgatagcggtgtggtgtacagcgtgggcatgcagtggctgaagactcaggggaataagcagatgttatgcacgtgtttaggcaatggggtgtcttgtcaggaaaccgcagtgacccaaacatatgggggaaacagcaatggcgagccgtgtgtgctaccgttcacatataatggaaggactttttattcgtgtactaccgaaggaagacaggacggccacctttggtgcagtactaccagtaactatgaacaagatcagaaatattcattctgcaccgatcacacggtcctagtccagactagaggcggaaatagcaatggcgccctatgccattttcccttcttgtacaacaaccacaattacacagattgcaccagcgagggtcgcagagacaacatgaagtggtgcggaactactcagaattacgacgccgaccagaaattcggcttttgccccatggcggcacacgaggagatttgcaccactaacgaaggggtaatgtaccgaatcggggatcagtgggataaacagcacgatatggggcacatgatgcggtgcacctgcgtcgggaatgggcgcggagaatggacatgcatagcttacagtcagctgcgggaccagtgtatcgtggacgacataacttataatgtgaatgacacatttcataaacgacatgaggaggggcatatgctaaactgcacctgtttcggtcaggggcgtgggcgatggaaatgtgaccctgtggaccagtgtcaggactccgaaacagggaccttctaccagattggcgacagctgggaaaaatacgtgcatggagttcgctaccagtgctactgctacgggcggggtattggtgagtggcactgccaaccgctgcagacatacccaagctcgagcggccccgttgaggtgttcattacagaaactccgtctcagccaaacagccacccgatccaatggaatgcacctcagccttctcatatttctaagtatatcctcaggtggagacccaagaattccgtgggtcgctggaaagaagccacaattcctggccaccttaattcgtacactatcaagggactgaaacccggggtggtgtacgaaggacaactcatctctatccaacaatatggtcaccaagaggttacacgcttcgattttacgaccaccagtacatccactcctgtaacttctaacacagtgacaggggagactacaccattttcccccctggtcgccactagtgaaagcgtcactgagattacagcctcgagcttcgtggtgtcttgggtctccgcaagtgataccgttagtggctttagggtggagtacgagctgtccgaagaaggagacgagcctcagtacctggaccttccgtccacagctacttctgttaacatcccagacttgctgcctggtagaaagtacattgtgaatgtatatcagattagcgaggacggagagcaatccctgattttatctacttctcaaacgactgcgccagacgccccacctgatacaactgttgatcaggttgatgacacttcaatcgttgtgcgttggagcaggccacaggctccaataacgggctatagaatcgtatacagtcccagtgttgagggttccagcacggagttgaatttaccagagactgccaacagcgtgaccctttccgatctccagccaggcgttcaatacaacattactatttacgccgtcgaagagaatcaggagtcgacccccgtggtaattcaacaggagaccacaggaactccgcgcagtgacaccgttcccagccctagggatcttcagttcgtagaagtgaccgatgtgaaagtgaccatcatgtggactccaccagagagcgcggtgacgggctatcgggttgatgtaattcccgtcaacctaccaggggagcatggccagcgcctcccaatttcaaggaacacgtttgctgaggttacaggactcagccctggcgtgacgtactactttaaggtgttcgccgtctcccacgggcgggaatccaagcccctgacggctcagcagaccactaagctggatgcccctactaacttgcagttcgtgaacgaaacagacagtaccgttctcgtgcgttggacccctcctagagcacagattaccggataccggttgactgtaggactcacccgcaggggtcaacccagacagtacaatgtagggcctagcgtttccaagtatccactgagaaacttacagcccgcaagcgagtatacagtgtccctggtcgccatcaaggggaaccaagaatcacctaaagctactggcgtgtttacaactctccaacccggctcttcaatccccccatacaatacagaggttaccgagacaactatcgttattacgtggacccccgctccaagaatcgggttcaaactcggagtacgcccaagccagggcggagaggctccacgtgaagtcacttctgattccggctcaatagttgtgagtggactgacacctggagtagagtacgtgtacactatccaggtactccgggacgggcaagagagggatgcaccaattgtgaataaagtcgtaacaccactctcccccccgactaacttacaccttgaagctaatccagacacaggtgtgctaacagtgtcatgggagcggtccacaactccagatatcacaggatatagaatcacaaccactccaaccaacggacagcagggtaacagtctggaagaagtcgtgcatgctgaccagtctagttgcaccttcgataatctgagccctggactagaatacaacgtttctgtctataccgtgaaagacgataaagagtcggtaccgatcagcgacacaatcatcccagaagttccacagctaaccgaccttagctttgtcgatatcacagattcctctattggactcaggtggacacctttgaacagctccacgattatcggttaccgcattaccgtggtagctgccggcgagggtattcccattttcgaagacttcgtggatagcagcgttggatattatactgtgactggccttgaaccaggtattgactacgacattagcgtgataacactgataaatgggggggagagtgcgcccaccaccctcacccagcaaacagctgttccacccccgacagacttgcggttcactaacattggaccggacacaatgcgggtgacctgggcacctccaccttctatcgacctcaccaacttcctcgtgcggtattccccagtgaagaatgaggaagacgttgccgagctgtcaatctccccttcagataatgcagtcgtgctcactaaccttctgcctggtaccgagtatgtagtgtccgtcagctccgtttatgaacagcatgagtccacgcccctcagagggagacagaagactggcttggatagcccaaccggaatagatttctccgatattactgcaaatagctttactgtacactggatcgcccctcgcgccacgatcactggctacagaattagacatcacccagagcatttctccggcaggccccgggaggaccgggttccccacagccgaaactccattacattgactaatttaactcccggaacggagtacgtggtgtctatcgtggccctaaatggtcgggaagagagtcctctactgattggccagcagtcaacagtctccgacgtccctagagatttggaggtcgtcgcagccactcctacatccctgctgattagctgggatgctcccgctgttaccgttcggtattacagaattacatacggggaaaccgggggcaactcgcccgtgcaggaattcaccgtgcccggaagcaagtccaccgctactatctctggcctcaagcccggagttgattataccatcacagtctacgctgtgacaggtcggggggattccccagcctcatccaagccaatttcaattaattaccgcaccgaaatcgataagccaagtcagatgcaggtgacggacgtgcaggacaacagcatctccgttaagtggctgccatccagtagtccagttactggttaccgggtcaccacaactccgaagaacgggcctgggcctacaaaaaccaaaactgcaggccccgatcagaccgagatgacgatcgaaggtcttcagccaactgtggaatacgtcgtttccgtttatgcgcaaaatcccagcggagagagccagcccctagtgcagactgccgttacaacgatccccgcgcctaccgatctcaaatttacacaggtcaccccgacatccctatcagcacaatggacacccccgaacgtgcagctcaccgggtatagagttagagttaccccaaaggagaagaccggtcccatgaaagagatcaatctggctcccgactcatcttcggtggtcgttagcggcctgatggtggcgacaaaatacgaggtgagtgtttacgccctgaaggataccctgacgtcacgccctgctcaaggcgttgtcactaccttagaaaacgtatctcctcccaggcgcgcgagagtgaccgacgccaccgagaccactatcaccatttcgtggcgcacaaagactgagacaattaccggtttccaggtggatgccgttcctgccaacgggcagacgccaattcagcggactattaagcccgacgtgcgtagctatacaataactggactccagccaggcactgattacaagatctacctgtacacactcaacgacaacgccagatcctccccagtcgttatcgatgcttctacggctatagatgctcctagtaacttacggtttctggctacaacacccaattcactgcttgtctcatggcaaccaccaagagcccgaattactggctacattatcaagtatgaaaagccgggatctcctccacgggaagttgtgccccggcctcgccccggggtgacggaggcgaccataacagggctggaacctggaaccgaatacaccatttatgtgatcgctctcaagaacaaccagaagtccgaaccgctgatcggccgcaagaagaccggccaagaagccctttcccaaacaaccatttcgtgggccccattccaggatacatcagaatatatcatttcatgtcatcccgtcggaactgatgaagaaccattgcagtttcgcgtccctggtacctccacctccgcgactcttaccggacttactaggggcgccacatacaacgttatcgtggaggcccttaaagatcagcagagacacaaggtacgggaggaagtcgtgacagtgggcaactccgtcaacgaaggtcttaaccaacccactgacgactcctgcttcgacccttacactgtctcccactacgcagtcggcgacgagtgggagagaatgtcagagtcaggctttaagctgctgtgtcagtgtctgggcttcggcagcgggcattttcgatgcgacagtagccggtggtgtcatgataatggtgtgaactacaaaattggagagaaatgggacagacaaggcgaaaatggtcagatgatgagttgcacctgccttgggaacggcaagggcgaatttaagtgtgatccacatgaggctacttgttacgatgacggcaaaacatatcatgtgggtgaacagtggcagaaggaatacctcggggctatttgctcctgtacctgcttcggagggcagcgcgggtggaggtgcgataattgtcgacgaccaggtggtgagcccagtcctgagggcacaaccgggcaatcctacaatcagtactctcaaagataccaccagcgaactaatacaaacgtgaactgtcccatcgagtgcttcatgcccttggatgtccaggctgatagagaggatagccgagaatag

SEQ ID NO: 24215 - DNA, 6798 bp, synthetic construct
  misc_feature 1..6798: note = Description of Artificial Sequence: Synthetic coding sequence
  source 1..6798: mol_type = other DNA
atgctgcggggccccggccccggcctgctgctgctggccgtgcagtgtcttggcaccgcggtgccttctaccggtgctagtaaatctaaaagacaggcacagcaaatggttcagccacagtccccggttgctgtgagtcagtcaaagccaggatgttacgataacgggaagcattaccagatcaaccagcagtgggaacggacgtatctgggaaatgctctggtgtgtacctgctatggcggttcacggggctttaattgtgagagcaaacccgaagcggaggaaacttgcttcgacaagtacaccggcaacacgtatagagtcggggatacgtacgaacgccctaaagactcgatgatctgggattgtacctgcatcggcgccggcaggggcagaatcagctgtacaattgcaaacagatgccacgagggcggccaaagctataaaattggggacacctggagaaggccccacgaaaccggaggctacatgctcgaatgcgtgtgtttggggaatggtaagggcgagtggacatgtaagccgatcgcagagaagtgcttcgatcacgccgctggaactagctacgttgtaggggagacatgggaaaagccttatcaagggtggatgatggtggactgtacgtgcctgggagagggttcaggtaggatcacctgcactagccgtaaccggtgtaacgaccaggataccagaacttcttacagaattggggacacatggtcaaagaaagataaccgtggcaacctactccaatgtatctgcacaggcaatgggaggggtgagtggaaatgtgaacggcacactagcgtgcagaccacctcctctggttctgggccattcacagacgtgagagcggcagtgtaccagccacaaccacatccccagcctccaccctatggccactgtgtcactgactccggagtggtctatagtgttggtatgcagtggctcaagactcaggggaacaagcagatgctctgtacatgtctgggtaacggcgtaagctgtcaggagactgccgtgactcagacttatggcggcaattcaaatggtgagccctgcgtgttaccattcacctataatggccgcaccttttactcctgcactactgagggtaggcaggatgggcacctgtggtgttctactaccagcaattatgaacaggaccagaagtattccttctgcaccgatcatacggtcctggtgcagacccgcggagggaatagtaatggagcgctctgtcatttcccattcctgtacaataatcacaattacactgactgcacctctgaaggcagacgtgacaatatgaagtggtgcggtactacccaaaactacgatgccgatcagaaattcgggttctgccccatggccgcacatgaggaaatatgcacgaccaatgagggtgttatgtatcgtattggcgatcagtgggataaacaacatgacatgggtcacatgatgaggtgcacatgcgtcggaaacgggagaggggagtggacatgtattgcttattctcagctgcgggatcagtgtatagtggacgacataacctataatgtaaacgatacgtttcataaaagacacgaggaaggtcacatgctcaactgcacctgctttggtcaaggcaggggccgatggaagtgcgaccccgttgaccagtgtcaagacagcgagacggggactttctaccaaattggcgacagttgggagaaatacgtgcatggagtgagataccagtgttactgttatggccgcggcattggagagtggcattgccagccactgcaaacatacccctctagttcaggaccagtcgaggtgttcatcaccgaaacaccctcccagccaaacagtcatcccattcagtggaatgccccacaaccgagtcatatcagcaagtacatcctcagatggcggcccaagaactctgtgggaagatggaaggaagccaccattcctggtcacttaaactcttacacaatcaagggcctcaaaccgggtgtggtatacgaggggcagctcatctcaatacagcagtacggtcaccaggaggtaaccagattcgactttacaaccactagtacatctacccccgtgaccagcaatacggtgactggcgaaaccactcccttttcaccattggtggcaacatccgagtcagtgacagagatcactgcctcttcgtttgttgtgtcgtgggtgagtgccagcgataccgtgtctggcttccgggtggagtacgagctgagtgaagagggtgacgagcctcagtaccttgacctgccaagcacagccacatccgtcaacatcccagatctgctccctgggagaaagtacatcgtgaacgtataccagatctctgaagacggggagcagagcttgattctgtccacgagccagaccaccgctcctgacgctccgccggacactacagtagaccaagtggacgacacgagtattgtggtcaggtggtcccgcccccaagctccaatcactggatatcgtattgtctacagtcccagcgtggagggcagtagcaccgagctgaatctgcctgaaactgccaatagcgtgactctctctgacctccaacctggggttcaatacaacattacgatctacgcggtggaagagaatcaggaaagtacccccgttgtgatccagcaagagactacaggcactcctcgatctgacacagtgccctcaccaagggatctgcagtttgtcgaggttaccgatgtgaaagtcactattatgtggacgcctccagaatcggctgttaccggttacagggtggatgtcatccctgtcaatctccctggagagcacggacagaggcttcctatcagccgaaatactttcgcagaggtgactggcctttctccaggcgtaacctattattttaaagtattcgctgtgtctcatgggagagaaagcaagcctctgactgcccagcaaactaccaagctggatgcaccaaccaacctgcaatttgtgaacgagaccgattcaacagtgttggtgcggtggacaccacctcgggcgcagataacagggtacagactcactgtagggctcacccgccgcggccagccaagacagtacaatgtcggcccgtcagtctccaagtatccattacggaacctgcagccggcctccgaatatactgtgtctctcgtcgctattaaggggaaccaggaatcccctaaagctaccggagtgtttacaacgctgcaacccggcagctccattccaccttataataccgaagtcaccgaaacaaccattgtcatcacctggactcccgcaccccggattgggtttaaactgggcgtcaggcctagccagggaggcgaggcaccccgggaagtcacctccgattctggctcgattgtggtatcgggcctgacacccggagtggagtatgtgtatacaattcaggtgcttagagatggacaggaaagagatgcgccaatagttaacaaggtcgttactcccctgtcaccccctaccaatctgcatctagaggctaatccggacactggcgtcttgacggtgagctgggagagaagtacgacacccgacatcactggctaccggataaccactaccccaacaaatgggcagcagggaaacagtctcgaggaggtggtgcacgctgaccagagttcttgcacgtttgacaacctctctcctgggctggaatataacgtgagcgtgtacaccgtgaaggatgacaaagagtcggttcctattagcgataccatcattcctgcagtccctccaccaacggatctgcgcttcaccaatatagggcctgatactatgagagtaacctgggcgcctcctccctcaattgatctgactaatttcctggtgcgctactcccctgtgaagaacgaggaagatgtcgccgagctcagtattagtccttccgacaacgcagttgttctaacgaacctgctgccaggcacagaatatgttgtctctgtcagcagcgtgtatgagcagcatgagagcacacctcttagaggtcggcagaaaaccgggctggattctcccactggtattgatttcagtgacatcacagccaacagcttcactgtccactggatcgccccaagagccacaattaccggataccgaatcagacaccatccggaacacttctccggccggccgagagaagacagggtgccgcattctagaaactccatcacactcacaaatttaacaccgggaacagagtacgtggtgtccatcgttgctctcaacggccgcgaagagtcacctcttctcatcggccagcagtctaccgtctctgatgtacctcgggatttggaggtggttgctgccactcctactagcctgctgataagttgggacgccccagcagtgactgtgcgatactatcggatcacctacggagagacaggcggcaactcccctgtccaggagttcacagtgccagggtcgaagtctacagcaaccatcagcggactcaaaccaggcgtggactacacaataactgtgtatgctgtgactggcagaggtgattctcccgcaagctctaagccgattagcattaactatcgtacggagatcgataagccatcccagatgcaagttacagatgtgcaggataactctatcagtgtgaaatggcttccatcatcttcacctgtgactggttatagggtgacaacaacacctaaaaacggacccggcccgaccaagacgaagactgctggtcccgatcagacagaaatgaccatcgagggcctacagcccactgtggagtacgtcgtgtcagtttacgcacagaatccgtccggcgagtcacagccacttgtccagacggccgttaccacaattccagctccgaccgatctcaagttcacccaggtcacaccaactagtttatcggcccagtggactcccccgaatgtgcaactgactgggtatcgggtcagggttactcccaaggagaaaacgggtcccatgaaagagattaacctcgctccggattctagctcagtggtggtatccggcctgatggtagccacaaaatatgaagtatcagtgtacgctctaaaggacactctaactagccgccctgcacagggggttgtgacgactcttgagaatgtatctccgccgagacgagcacgagttaccgatgccaccgaaaccactatcactattagctggaggactaagactgaaaccattaccggtttccaggtggacgctgtccccgctaatggccagacgcctattcagcggactattaaacccgacgtcaggtcttacactatcaccggcctgcaaccagggactgattacaagatctatctgtacaccctcaatgacaatgctagatcatcgcctgtggtaatcgacgccagtactgctatagatgcgccctcaaacctacgctttctcgcaacaactcccaacagcctcctcgtcagctggcaacctccacgcgccaggataaccggctacattattaagtatgaaaagcctgggtccccccctcgggaggtggtcccaaggccaaggcccggagtcaccgaagccacgatcacagggttggagcccggaacagagtacaccatttacgttatcgccttaaagaacaatcagaagagcgagcccctgattggaaggaagaaaacagatgaactaccacaactggttactcttccacacccaaatctccatgggcccgaaatactggatgtcccctctacagtgcagaaaacacctttcgtgacacaccccggctacgataccgggaatggaatccaactccctgggacttccggacagcagccatctgtaggtcaacagatgattttcgaggagcacggattccgtcggactactcccccgaccactgcaaccccaatccgccacaggccgaggccctatccgcctaacgtgggccaggaagctctgtcccagaccacaatttcttgggccccttttcaggatactagcgaatatattattagctgccatcctgtgggcactgacgaggagccactccagtttagagtccccggaacttcaacgagtgccacactgactggtctgacgaggggagctacgtacaacgtcatcgttgaagccctgaaagaccagcagcgacacaaggttcgcgaggaagttgtaaccgtaggcaattctgtgaacgaggggttaaaccaacctacggatgatagctgtttcgatccatacaccgtgtctcactacgccgtgggagacgaatgggaacggatgagtgagtcagggtttaaacttctgtgccagtgtctgggcttcggcagcggccactttaggtgcgattcctcacggtggtgtcatgataacggagtgaattacaaaattggcgagaagtgggataggcaaggggagaacggccagatgatgagctgtacgtgcctcgggaacggtaaaggagagtttaagtgcgaccctcacgaggctacctgctatgatgatggcaagacatatcacgtgggtgaacagtggcaaaaggaataccttggcgcaatttgcagctgtacttgtttcggcgggcaacgcggttggaggtgcgacaactgcagacggcccgggggcgagccttcccctgagggtactaccggccaaagctacaaccaatattctcagaggtaccaccaacgcacaaataccaacgtcaattgtcctattgaatgtttcatgcctcttgacgtgcaagcagatcgggaagacagccgggagtag

SEQ ID NO: 24216 - DNA, 6993 bp, synthetic construct
  misc_feature 1..6993: note = Description of Artificial Sequence: Synthetic coding sequence
  source 1..6993: mol_type = other DNA
atgctgcggggccccggccccggcctgctgctgctggccgtgcagtgtttagggacagctgttcctagtaccggagcctccaagtctaagcgccaagcccagcagatggtgcagccacagtcccctgtcgctgtttcacaaagtaagccaggttgttatgacaatggcaaacattaccagataaaccaacaatgggagagaacttacttagggaacgccctcgtgtgcacgtgttacggcggcagccgcgggttcaattgtgaaagcaaaccggaagccgaggagacatgttttgataagtacacaggcaacacatatagggtgggcgatacctacgaaaggccgaaagacagcatgatttgggattgcacatgtatcggagcaggacgcggccggatctcttgcaccatcgctaatcgctgccatgagggagggcagagttacaagatcggagatacgtggcggcggccgcatgaaaccggtggttatatgctagaatgcgtgtgcttaggaaatggcaagggggagtggacatgcaagccaatagcggaaaagtgcttcgatcacgccgccggcacttcttacgtggtgggggaaacatgggagaaaccctaccagggctggatgatggtggactgcacctgcctgggggaaggttccggccgtatcacttgtacatccaggaaccgctgtaacgaccaggataccaggacctcataccggataggtgatacgtggtccaagaaggataatagggggaatttgctacaatgtatctgcacagggaatggccgcggcgagtggaaatgcgaaaggcacacctcagttcagacaacaagcagcgggtctggaccattcactgacgtgcgggctgctgtttaccagccacagccacaccctcagcccccaccatacgggcactgtgtcactgatagtggagtggtctactctgtgggaatgcaatggttgaagactcaggggaacaagcaaatgctgtgcacatgtcttggcaatggggtgtcctgtcaagaaaccgccgtgacacaaacttatggcggcaattccaacggggagccatgtgtcttgcccttcacttataatggaaggaccttctatagttgtactacagagggcaggcaggatgggcatctttggtgctctaccaccagcaactacgagcaagatcagaagtacagtttttgcactgatcatactgttctcgtccagactcggggggggaacagtaatggcgcgttgtgccatttcccctttttatataataatcacaattatacagactgcacttctgaaggaaggcgggacaacatgaagtggtgcggcactacacagaattacgatgccgatcagaaattcggtttctgtcccatggcagcacatgaggagatttgtactactaacgagggcgttatgtacagaataggtgaccagtgggataaacaacacgacatgggacacatgatgaggtgtacctgtgtgggaaatggtaggggagagtggacatgtatcgcatactcccagcttcgagaccagtgcattgtggacgatataacctacaacgtaaatgataccttccacaaaagacacgaggaagggcatatgctgaactgcacctgtttcgggcaggggcgggggcgatggaagtgcgacccggtggaccagtgtcaggatagcgaaacaggaacattttaccagattggagactcttgggagaagtatgttcacggtgtgaggtatcagtgttattgctatgggagaggcatcggtgagtggcactgccagccactgcagacatatcctagcagctctggccccgttgaggtcttcatcaccgagacgccatcccagcctaattcacaccccattcaatggaacgccccacaaccttcgcacatcagtaaatacatcctcagatggcgcccaaagaattctgttgggcgatggaaggaggcaaccattccaggacaccttaactcctataccatcaaaggactcaagcccggtgtagtttacgagggccaactcatctcaattcagcagtatgggcaccaggaggtgactagattcgatttcaccacaacaagtacaagtactcctgttacttctaatacagtgaccggagaaaccaccccgtttagccctttagtcgcgactagcgaatccgtgactgagattactgcctcctccttcgtcgtgtcttgggtctccgcgtcggatactgtctccggctttcgcgtggagtacgaactcagtgaggaaggtgacgaaccacagtacctggatctaccctctactgcaacatctgttaacatacccgatctgctgccaggacgcaagtatatcgtgaacgtctatcagatttccgaggacggagaacagagcttgatactgagtaccagtcagacgacggctccagacgcgccacctgatacgaccgtggatcaagtggatgatacatctatcgtggtccggtggagtagaccacaggctccaattaccggataccgtatcgtgtatagccccagtgttgagggttcctccactgagctgaacctgcctgagacagcaaatagcgtgaccctgtccgatttacaacccggtgttcaatataatataacaatttacgccgttgaggagaatcaggaaagtaccccggtggttatccagcaggagacaactggaactccccgatctgataccgtcccgtctccacgcgacttacagtttgttgaagtgacggacgtgaaggtcactatcatgtggactcctcctgagagcgccgtaacagggtatcgcgtggatgtaatcccagttaacctacccggtgaacatggtcagaggctccccatatcgcggaacactttcgccgaggttaccggcctgtcccctggggttacctattactttaaagtttttgcagtctcgcacggccgtgaatctaaaccactgaccgcccagcagaccacaaagcttgacgccccaactaacttgcagttcgtgaatgagaccgacagcaccgtcctggtgcgttggactccaccacgcgcccagatcacggggtataggctaacagtgggactcacgcgtcggggccaaccccgacagtacaatgtcggaccttctgtgagcaagtaccctctgcgcaatctccagccggccagcgaatacacagtttccctagtagcgatcaagggtaatcaggaatccccaaaagctacaggcgtgtttactacccttcagcctgggtcctctattccaccatacaacacagaggtcacagagaccaccattgtgatcacgtggacgcctgccccccggattggttttaaactcggtgtcaggcctagccaaggcggggaagcccctcgggaagtcacatctgactctggcagcattgttgtcagcggattgacaccaggggtagaatacgtttacaccatccaggtgctccgggatggacaggagagggacgcaccaatcgtgaacaaagtcgtcactccactttctccccctactaacctccacctggaggcgaaccccgacaccggcgttttgactgtttcctgggagcgctccacaacccccgacatcaccggctaccgcattacgaccacacctacaaatgggcagcagggcaactcattagaggaggtagtccacgccgaccagagctcttgtacatttgacaacctgtcccccgggcttgagtacaacgtgtctgtgtacaccgtcaaggacgataaagaatctgtgcctattagtgacaccatcattccggccgttccacctcccacggacctccgtttcactaatatcggccctgacacaatgcgggtgacatgggcgcctcctccctctattgacctgactaactttctcgtcaggtacagcccagtcaagaacgaagaagatgtggccgagctgtctatatccccttcggataatgccgtcgtgcttaccaacctgctcccaggaacggaatatgttgtgagtgtatcaagtgtgtacgagcagcacgagagtactcctctgagagggcgccagaaaaccggccttgattcacctacgggcatcgattttagcgatattaccgccaatagctttacagtgcattggatagcaccacgggctactattacggggtatcgcatcaggcatcatcccgagcatttttccgggcgtccacgcgaagaccgcgtacctcattctaggaacagcatcacattaacaaacctgactcccggcacggagtacgtggtttctatcgttgctctgaatggtagagaggagagtccactgctgattggccagcagtccacagtgtcagatgttccccgggacctggaggtagtcgctgctacacccaccagtctgctaattagttgggacgcacccgctgtgacagtgaggtattatcgtatcacatacggtgaaacgggcggcaacagccccgtacaagagttcaccgttccggggagtaagagcacagcaactatcagcggcctgaagcctggggtggattacactatcactgtatacgctgtgacaggacgtggtgacagcccagccagtagtaagcctatctctatcaactatcgaaccgaaatcgacaaaccctcccaaatgcaggtgaccgatgtgcaggacaactccatatcagtgaaatggctaccaagtagctctccagtcaccggatatcgtgttacaacgacacctaaaaatggacccggacccactaaaactaagacagcaggccctgaccagacagagatgacaatcgaggggctccagccgactgtcgagtacgtcgtgtcagtctatgctcagaatccttcaggagagtcgcagccccttgttcagaccgccgttacaaatatcgatcggcctaaaggcttggcgtttacagacgttgatgttgattcaatcaagattgcctgggaatcccctcagggccaggtcagtcggtatagagttacatactcatctcccgaagatggaatccatgaactgttccctgcaccagatggagaggaggataccgccgaactgcagggcttacggccgggcagtgagtatacggtcagtgtcgtggccttacatgatgacatggagagtcaacctctcatcggcactcaatcaactgcaattccagcacccacagacctcaagtttacacaggtcacacccacgtccctgagtgcacagtggacccctccaaacgtccagctgaccggatatagagtaagagtgacgcccaaagagaagactgggccaatgaaagagattaacctagccccagacagcagcagtgtggtcgtgagcggcctgatggtcgcgaccaagtatgaggtatccgtgtacgccctgaaagacaccctgacaagtagacccgcccagggagtggtcacaactttagagaatgtcagcccccctcggcgggcaagagtgacagacgccactgagaccaccatcaccatcagctggagaaccaagacggaaacaatcaccggatttcaggtggatgcagtcccggctaatgggcagacgccgatccagagaacgattaaacccgatgtgagatcatatactatcaccgggcttcaaccagggaccgactacaagatctacctgtatacattaaacgacaatgcgcgctccagcccagtggtgatcgacgcttccacagctatagatgctcccagcaacctgaggtttttagccacaacacctaactccctcctcgtgtcctggcagccccctagagcccgaatcacgggttacataattaagtacgaaaagcccggctcacctccccgggaagtggtgcctcgcccaagacctggggtaactgaggccaccataaccggtcttgagcccggcaccgagtacacaatatatgtgatcgctctgaagaacaaccaaaagagcgagcccctgatcggccgcaagaagacagtgcagaagactccattcgtaactcacccgggctatgataccgggaacggcattcagctcccaggtacaagcggccagcagcctagcgtaggccagcagatgatctttgaggaacacggctttcgccggacaactcctccaactaccgctaccccaatccggcaccgtcccaggccatatccacctaatgtgggacaggaggcactatctcaaaccacgatctcctgggctcccttccaggataccagtgaatacattatatcttgtcatcctgttgggacagatgaagagcccctccagttcagggtacccgggacatctacatctgctacgctgaccggcctcaccaggggggcaacctacaacgtgattgttgaggccctcaaggatcagcagcgtcacaaagtgagggaagaggtggtcacagtgggaaattccgtgaatgaaggactcaaccagcccaccgatgattcctgcttcgatccctatactgtctcgcactacgccgtgggagacgagtgggagcgaatgtccgaatcggggttcaaattgctgtgtcaatgcttgggcttcggcagcggtcattttagatgcgactcatcacggtggtgccacgataacggggttaactacaaaattggcgaaaaatgggatcggcaaggagagaatgggcagatgatgtcatgtacgtgcctcggaaacggcaagggggaatttaaatgcgatccacatgaggctacgtgttacgatgatggtaagacttaccacgtgggagagcagtggcagaaggagtacttgggggcaatctgttcatgtacctgtttcggcggccaacgcgggtggcggtgcgataactgtaggcgacccggcggcgaaccctcacctgaggggaccactggccagagctacaaccagtactcccaacgataccaccagagaaccaacaccaatgtgaactgccccatcgagtgttttatgcctctagatgttcaggctgatcgtgaggatagccgggagtag

SEQ ID NO: 24217 - DNA, 3312 bp, synthetic construct
  misc_feature 1..3312: note = Description of Artificial Sequence: Synthetic coding sequence
  source 1..3312: mol_type = other DNA
ctgcggtggacccccctgaacagcagcaccatcatcggctaccggattaccgttgtggctgctggggaaggcattccaatattcgaagatttcgttgattcttctgtgggctattatacagtcacagggctcgaaccggggatcgattacgatatatctgttataacactgataaatggcggggaaagcgcacccaccactttgacccagcagacagcggtgccgcctccaaccgatctgcggtttacaaacatcggaccggacaccatgcgcgttacctgggctcctccccctagcatcgacctcacaaacttcctggtgcgatactcgccggttaagaacgaagaagatgtggccgaactctcgatctcaccctccgacaacgcggtggttttgacaaacctgttgccgggaactgagtacgtggtctctgtctcgagtgtatatgaacagcacgaaagtacaccactcaggggtcggcagaagacaggccttgacagccccacgggaattgacttctctgatattaccgcaaacagcttcaccgtgcattggatcgctccgcgcgctaccatcacagggtacaggataaggcaccatccagaacattttagtggccgcccaagggaggatcgggtcccacattctcgaaatagcataaccttaacaaatttgacccctggaactgagtacgttgtctcaatcgtggctcttaacggcagagaggaaagcccgttgttgataggacagcagagcactgtgagcgacgtgcctcgagatctagaggtggttgctgcaacacccacatctctgctgatttcgtgggatgcacccgccgtcaccgttagatattacagaatcacctacggcgaaacaggtggtaactcacccgtacaggaatttactgtcccaggcagtaaatcaaccgccaccatctcgggtcttaagccaggcgttgattacacgatcaccgtctatgccgtgacgggtcgtggcgactccccagccagctcgaagccaatttccattaactatcgcacagagattgataagccctctcagatgcaggtgacggatgttcaggacaattccatatcagttaagtggctgccctcgtcctcaccagtcacagggtatcgggtgaccactacccccaaaaatggacctggccctacaaagaccaaaactgccggccccgatcagacggaaatgaccatagaagggctccagcctacagtggagtatgtggtaagtgtgtacgctcagaatccctcaggagaatcacaacccttggttcagaccgcagtcacgaccattcctgcacccacagatcttaagttcactcaggtcacacctacctccctctcagcccaatggacaccaccaaacgttcagcttaccggatatagagtcagggttactccaaaggaaaagactggtcctatgaaagaaattaacctggcgcccgattcctctagcgtcgtcgtctccgggctcatggtggctaccaaatatgaagtctcagtgtacgcattgaaagacaccctcacaagtcgcccggctcagggagtggttacaacccttgaaaacgtgagtcctcccagacgggcccgtgtgaccgatgccactgagaccacaataacaatatcttggaggacaaagacagaaactataacaggattccaggtggatgctgtccccgctaatgggcagacaccaattcaaagaacaattaaaccggacgtaagaagctatactataacaggcctccagcccggcacagactacaagatctacctctacaccctgaacgacaacgcgcgatcctccccagttgtgatagatgcatccacagcaattgacgccccatctaacctgagattcctggctactacaccaaatagcctactggtctcctggcagcctccccgggctcggatcaccggctacatcatcaagtatgaaaaacccggctcacctcctagagaagttgtgccccggccacggcccggggtgacagaggccaccataaccggtctcgagcccggtaccgaatatacaatttatgtgatagccctcaaaaacaaccagaaatcggagccgctgatagggcgaaaaaaaaccgacgagctaccccagctggtcacactgccacaccccaacttacatggacctgagatactggacgtacccagcacggtccagaagaccccatttgtcactcatcctggatatgatacgggaaatggcatccagctaccagggacatctggccagcaaccaagcgttgggcagcagatgatctttgaggaacacggattccgtcgcactactccacctaccacggcaacccccattaggcacaggccaagaccttacccaccaaatgtcggggaagagatccagatcggccacatccctagagaagacgtggactaccatctttaccctcatggacctgggttgaatcccaacgctagcactggccaagaggccctgtctcaaacgacaatctcctgggcgcctttccaggacactagtgaatacatcatctcttgccacccagtgggaactgacgaggagcctctgcagttcagggtaccgggtaccagcaccagtgccaccctcaccgggctcacacgaggagctacttataatgtgatcgtcgaggccttaaaagatcagcagcgacacaaggtgcgagaggaggtcgttacggttggcaactccgtcaacgaaggcctgaaccagcccaccgatgattcttgcttcgatccctacaccgtttcacactacgctgtcggagatgaatgggagaggatgagcgagtctggatttaaactgctttgccagtgcttggggtttggctcagggcacttccgatgtgacagttcccggtggtgccacgacaacggggtgaattacaagatcggcgaaaaatgggatagacagggcgaaaatgggcagatgatgtcttgcacctgtctaggaaacgggaaaggtgaatttaaatgtgaccctcacgaagcaacatgctacgacgacgggaagacgtaccacgttggggaacaatggcagaaggagtatctgggagccatctgcagttgtacttgttttggaggacagcgcggctggaggtgcgacaattgcaggcggcccggaggggagcccagccccgaaggtaccaccggccaatcctacaatcagtactcccagcgctaccaccagcgtaccaacactaatgtgaattgtcccatagaatgtttcatgcccttggacgtgcaggcagacagagaggactccagggagtag

SEQ ID NO: 24218 - DNA, 312 bp, synthetic construct
  misc_feature 1..312: note = Description of Artificial Sequence: Synthetic coding sequence
  source 1..312: mol_type = other DNA
atgcccgtgagcgtgagcagcggccggaccttccccaagcggggccagacttgcgttgtccactacaccggcatgctggaggatggtaagaagttcgattcctccagagaccgcaataaaccgttcaagtttatgcttggcaaacaggaagtgatccgaggatgggaggagggggtggcacagatgtctgtgggtcagcgagcaaaacttacaatctcccctgattatgcctacggcgctaccgggcatcccggcattataccccctcatgcaacactggttttcgatgtcgagttgctgaagctggagtag

SEQ ID NO: 24219 - DNA, 327 bp, synthetic construct
  misc_feature 1..327: note = Description of Artificial Sequence: Synthetic coding sequence
  source 1..327: mol_type = other DNA
atgggcgtgcaggtggagaccatcagccccggcgacggccggacctttcctaaacgtggccagacctgtgtagtccactacaccggtatgctggaggatggtaaaaaattcgactcctctcgggacaggaacaagcccttcaagtttatgctgggcaagcaggaagtcatacggggatgggaggagggcgtcgctcagatgagtgtgggtcagcgcgctaagctgaccatcagccctgattatgcgtacggtgctaccgggcaccctgggatcataccccctcacgcaactttagtgttcgatgtggaattgcttaaacttgaatag

SEQ ID NO: 24220 - DNA, 312 bp, synthetic construct
  misc_feature 1..312: note = Description of Artificial Sequence: Synthetic coding sequence
  source 1..312: mol_type = other DNA
atgcccgtgagcgtgagcagcggccggaccttccccaagcggggccaaacctgcgtcgtgcattacaccgggatgcttgaagatgggaagaagttcgacagcagtagagacagaaacaaaccttttaaattcatgctcgggaagcaggaggtgatccgcggttgggaagaaggtgtggcacagatgtctgtggggcaacgcgctaagttgacaatctcccctgattatgcatatggagctactggacatccgggtatcatcccaccccacgctactctagtctttgatgtcgaactcttgaaattagaatag

SEQ ID NO: 24221 - DNA, 327 bp, synthetic construct
  misc_feature 1..327: note = Description of Artificial Sequence: Synthetic coding sequence
  source 1..327: mol_type = other DNA
atgggcgtgcaggtggagaccatcagccccggcgacggccggaccttccctaaaaggggtcagacatgcgtcgtgcattacaccggcatgctggaggacggcaaaaagttcgattcaagccgagacagaaacaaaccattcaaattcatgttgggaaagcaggaggttatcagaggctgggaagaaggcgtggctcagatgagtgtggggcagcgcgccaagctgactatctcaccagactacgcttacggagcgactggccaccccggcatcatcccccctcacgctacgctcgtttttgatgtcgagctgctgaagctggaatag

SEQ ID NO: 24222 - DNA, 279 bp, synthetic construct
  misc_feature 1..279: note = Description of Artificial Sequence: Synthetic coding sequence
  source 1..279: mol_type = other DNA
atgggcgtgcaggtggagaccatcagccccggcgacggcatgctggaggatgggaagaagtttgactcctctcgcgataggaataagccattcaagttcatgctgggcaagcaggaagtcataagaggctgggaggaaggcgtggcccagatgagtgtcgggcaacgtgctaaactgacaataagccctgactatgcttatggggcgaccgggcatcctggtatcatcccccctcatgctaccttggtttttgacgttgaactgctgaaactggaatag

SEQ ID NO: 24223 - DNA, 1143 bp, synthetic construct
  misc_feature 1..1143: note = Description of Artificial Sequence: Synthetic coding sequence
  source 1..1143: mol_type = other DNA
atgggcatccagggcctggccaagctgatcgccgacgtggccccctctgcaattcgagagaacgatatcaagtcttatttcggtcggaaggtggcaatcgatgcttctatgtctatataccagtttctcatcgcggtgagacagggaggtgatgtactccagaacgaggaaggagagacaaccagccatcttatgggcatgttttataggaccatcagaatgatggaaaacggaataaaacctgtttatgtatttgacgggaagcctccccagctgaagagcggagaactcgcaaagcggagcgagcggagggctgaagcggaaaagcaactgcaacaggctcaggcagcgggagcggagcaagaagtagagaagttcacgaaacgattagtcaaggttaccaaacagcacaatgacgagtgtaaacacctgctgagcctaatgggtattccttacctggacgctccctcagaagccgaggccagctgcgctgcccttgtgaaagccggcaaagtgtacgcggccgcaacagaggacatggactgtctgacgttcggcagccccgtgctaatgcgtcacctcactgcgtctgaggccaagaaactacccatccaggagtttcatttaagccggatcctgcaagaactgggactaaatcaggaacagttcgttgacttatgtatcctgctcggaagtgactactgtgagtccattaggggaataggtcccaaaagggccgttgatttgatccagaaacataagagtatagaagaaatagtccgtcggctggaccccaacaagtatcccgtcccggagaactggctccataaagaggcgcatcaacttttcctcgagcctgaggtcctcgatccggagagcgtggagctgaaatggtcagagcctaatgaggaagagctgatcaaattcatgtgtggcgaaaagcagtttagcgaggagcgtatacgcagcggtgttaagaggctctccaagagccgccagggttcgacacaaggccggctcgacgacttcttcaaagtcaccgggagtctcagtagcgccaaacgtaaggaacccgaaccaaagggcagcaccaagaaaaaggctaaaacaggtgccgccggtaagttcaagcggggaaagtag

SEQ ID NO: 24224 - DNA, 498 bp, synthetic construct
  misc_feature 1..498: note = Description of Artificial Sequence: Synthetic coding sequence
  source 1..498: mol_type = other DNA
atgggcatccagggcctggccaagctgatcgccgacgtggccccctccgctattcgggagaacgacattaagagctattttggcaggaaggtggctatagacgcatccatgagcatttaccagttcctaattgcagttagacagggtggagatgtattgcagaacgaggagggagagaccacctctcaccttatgggtatgttctatcggaccatccggatgatggagaatgggattaagcccgtttacgtgttcgatggaaagccacctcagttaaaatccggcgaattggcaaaacgctctgaacgtagggcagaggctgagaagcaactccagcaggctcaggccgcgggtgccgagcaagaggtcgagaagtttactaagcgcttggtgaaggtgacgaaacagcacaatgatgagtgtaaacacctcctgtcactcatggggatcccatacctcgacgctccctctgaagccgaggcatcttgtgcggcctag

SEQ ID NO: 24225 - DNA, 4017 bp, synthetic construct
  misc_feature 1..4017: note = Description of Artificial Sequence: Synthetic coding sequence
  source 1..4017: mol_type = other DNA
atggtgagctactgggacaccggcgtgctgctgtgcgccctgctgagttgtctgctgcttacaggatcttcttcgggatctaagctgaaagaccccgagctgtcactcaaaggcacacagcacattatgcaagcaggacagacgttgcacttgcaatgccgaggcgaagcagcccataaatggagcctgccagaaatggtgtccaaggagagcgaacggctctctatcaccaagtccgcatgtggccggaacggtaagcaattttgttccactttgaccctgaacacggcccaggccaaccacacggggttttacagttgcaaatatctggccgtgcccaccagcaaaaaaaaagagactgaaagtgcaatatacatttttatcagcgataccgggcgcccatttgttgagatgtacagtgagattcccgaaataatccatatgaccgaaggaagggaactggtcatcccgtgcagggtcaccagtccgaatataacagtgactctcaagaaatttcccttggataccctcatcccagatggaaagagaataatctgggactctcggaagggctttatcatctctaatgccacctacaaagagataggcctcctcacctgtgaagcgacagtcaatggacatctgtataagacaaactaccttacccatcgccagacaaatacaatcatagatgtgcagattagcaccccccgccctgtcaaattgctgcgtgggcacaccctggtcctcaactgcaccgcaactactcccctcaatactagagtccagatgacatggtcctaccctgatgagaaaaataagcgggctagtgtaagaagacgaatcgatcagtctaatagccacgctaacatcttctacagcgtgctgaccatcgataaaatgcagaacaaggacaaaggactctatacctgccgagtcagatccgggccatcattcaaatcggttaatacgtctgtgcatatttatgacaaggcgtttataactgtgaagcataggaagcagcaagtgctggagactgtggcaggcaagagaagttacagactctccatgaaggtcaaggcgttcccctcccctgaagtggtgtggctgaaggatggtctccccgccaccgagaagtctgctcgctatctgacgcgaggctatagcctgattatcaaagacgtgactgaagaagacgctgggaactatactatactgctgtcgatcaagcagagtaacgtcttcaagaacttgactgccaccctgatcgtgaatgtcaaaccacagatctatgagaaggcagttagttccttccccgacccagccctctacccactcgggtctcgccagattttgacctgcacggcatatgggataccgcagccaacaattaaatggttttggcatccttgtaatcataatcacagcgaggcacggtgcgacttctgcagtaacaatgaagagagttttattctggacgctgattcgaatatgggtaatagaattgagtctattacccagaggatggccatcatagagggaaaaaacaagatggcatctacactcgttgtcgccgatagtagaataagcggaatatatatctgcatagctagcaacaaggtcggcaccgtggggcgtaatataagcttctacatcacggatgtgcctaacgggttccacgtaaatctggaaaaaatgcctaccgaaggggaggatctcaagttgagttgtaccgtgaataagttcctgtatcgtgacgtgacgtggatcctcttaaggaccgtcaacaataggacaatgcattacagtatctctaagcaaaagatggccattactaaggaacactccattacgctgaatctgacgatcatgaatgtatctcttcaggactcaggaacctatgcctgcagagcaagaaatgtatacaccggagaggagatccttcaaaaaaaagagattacaattcgagaccaggaggccccctatttactgcgtaatctctccgaccataccgtggccatatcatcctccaccactctcgactgccacgccaacggagtacctgaaccccagattacttggtttaaaaacaatcacaagatacaacaggagcctgggataattttggggcctggaagctctacactgttcatcgaaagggtgactgaagaagatgagggagtgtatcattgtaaagctaccaaccagaaaggcagtgtcgaatctagcgcatacctgactgttcaaggaaccagcgataagtcaaacttggaattgattaccctcacttgcacatgtgttgcggcaacgctcttttggctgctgctgaccctcttcatcaggaagatgaagcggagctccagcgaaattaaaaccgattatctgtccattataatggacccagacgaggtccctcttgacgagcagtgtgagcgcctgccctatgatgcctccaaatgggaattcgccagagaaagacttaaactgggcaaaagtttggggcgaggcgcctttggcaaagtcgtgcaggcttccgccttcggcataaaaaagtctcccacctgtcgaacagttgcagtgaaaatgctgaaggagggggctaccgctagcgagtacaaggctcttatgactgaactgaagatcctgacacacatcggccaccatctgaacgtggtgaacctccttggtgcatgcaccaaacaggggggacctcttatggttattgttgaatactgtaagtacggaaacctgtccaattatctcaagagtaaaagggacctgtttttcctgaacaaggacgcagccctgcacatggaaccaaagaaagaaaagatggagcctggcctggagcagggtaagaaacctagactggattccgtgacttccagcgagtcctttgcctcttctgggttccaagaggataagtcactctcggatgtggaggaagaagaggactccgacggattctataaggaacccatcacaatggaggaccttatttcatactcatttcaggtcgcacgcggaatggagttcctgagttctcgcaaatgcattcaccgcgatctggctgcgcggaacatactcctaagcgagaacaacgttgtgaagatctgtgattttggcctcgccagagatatttacaagaatccagattacgttcggaagggggacaccagactacctctaaaatggatggcccctgagtccatttttgataagatatatagcaccaagtcagacgtctggtcctatggggtgctgctctgggaaattttctctcttggcggctctccttaccctggagtgcagatggacgaggacttctgttcgaggctaagggagggcatgcgaatgcgagcccccgaatactctacacccgagatctatcagataatgctggattgttggcacagggaccctaaagaacgcccccggttcgccgagcttgtcgaaaagttaggggatcttttgcaggctaacgtgcagcaagacggcaaggactacatccccataaacgccatactgaccggaaattccggttttacttattctacaccggcttttagcgaagatttttttaaagaatccatttccgcaccaaaattcaatagcggaagctccgacgacgtgcgctacgtgaacgcgttcaagtttatgagccttgaaaggatcaagacatttgaggagttgctgcccaacgccacttcaatgttcgatgactaccaaggtgattcctcgacgttgctggcatctccgatgctgaagaggtttacatggactgatagcaagccaaaggctagccttaaaatagatctgagggtgacctcaaagagcaaagaaagcggactttccgacgttagtaggccatccttttgccatagttcttgcgggcatgtttccgaggggaagcgcaggtttacttatgaccatgcggaactagaaaggaagatcgcttgttgcagcccacctcctgactacaatagcgtcgtgttgtactccacacctccaatctag

SEQ ID NO: 24226 - DNA, 531 bp, synthetic construct
  misc_feature 1..531: note = Description of Artificial Sequence: Synthetic coding sequence
  source 1..531: mol_type = other DNA
atggtgagctactgggacaccggcgtgctgctgtgcgccctgctgtcctgtctgctgctgactggtagttctagcggctccaaactcaaggaccctgaattgtcacttaaagggacgcagcacatcatgcaggccggtcagaccctacatctgcagtgccgcggcgaagctgcgcacaaatggagtctccccgagatggtgtcaaaggagtcagagcggttgtccattactaaatccgcctgtggcagaaatgggaagcagttttgtagcacattgactctgaacaccgcacaagcaaatcataccggattttacagttgcaagtacttagcagtgcccacctcaaaaaaaaaggagacagagagtgctatatatatcttcattagcgacaccggacgtcctttcgttgagatgtattcagagatcccggaaattatccacatgaccgagggacgagagttggtgatcccatgccgggtcacatccccaaacataactgtcactctaaagaagaagaataaacgcgcctag

SEQ ID NO: 24227 - DNA, 1626 bp, synthetic construct
  misc_feature 1..1626: note = Description of Artificial Sequence: Synthetic coding sequence
  source 1..1626: mol_type = other DNA
atggtgagctactgggacaccggcgtgctgctgtgcgccctgctgagttgcttactgctgacaggatcttcatccggatctaaactgaaggaccctgagttgtccctgaaaggtactcagcacattatgcaagctggccagacactgcatcttcagtgtcgcggagaggcggcacacaagtggtcgctgcccgagatggtgtcgaaggaaagcgaacggttgagcataactaagtccgcttgcgggcgaaatggcaagcagttctgctctacattaaccctgaacaccgcacaagctaatcacacggggttctattcatgtaagtatctcgctgtgcccactagcaaaaagaaagagacagagagtgctatttatatctttatcagtgacaccggcagaccttttgtggagatgtattctgaaattcctgagattatccatatgactgaggggcgggagctggttataccctgccgcgtcactagccctaatattacagtgaccctgaagaagttccctctggatacactgatccccgacggtaaaagaatcatttgggacagtagaaaaggcttcatcattagtaatgccacgtacaaggagatagggctgttgacgtgcgaagcgaccgtcaatggccacctctataaaaccaactacctaacacacagacagaccaatacgatcatcgacgtgcagattagtacccctcggcctgtaaagttactcagaggccatactctggttttgaactgcaccgccaccacaccgttgaataccagggttcagatgacctggtcttatcccgacgagaagaacaagagagctagtgttcgtcggcggatagaccagagtaattctcatgccaatatattttactctgtcctcaccatcgacaagatgcagaataaagataaaggactgtacacttgcagagtcagatcgggtcctagttttaagagcgtgaacacctcagtacatatttatgacaaggcgttcattaccgtgaagcacaggaagcaacaggtgcttgaaacggtggccggaaagcggtcataccgcttgagtatgaaagtaaaagcatttcccagcccagaggtggtttggctgaaagacggcctgccggccacagaaaagagcgctcggtatctgactcgtggttacagcctgatcatcaaggacgtcaccgaggaggacgccggaaactataccatcctgctttccataaagcagagcaatgtcttcaagaatctcaccgccaccctcatcgtcaacgtaaaaccccagatatatgaaaaagccgtatccagcttccccgacccagcactttatccgctagggtcccggcagattctcacgtgtacggcctacggcattcctcagcctacaataaaatggttctggcatccttgtaaccacaaccactctgaggctcgctgtgacttctgctctaacaacgaggaatccttcatcttggatgcagatagcaacatggggaatagaatcgaatctattacccagcggatggcaattattgagggcaagaacaaactgccccccgccaatagttcttttatgttgccccctactagcttcagctcaaattatttccattttctaccatag

SEQ ID NO: 24228 - DNA, 1671 bp, synthetic construct
  misc_feature 1..1671: note = Description of Artificial Sequence: Synthetic coding sequence
  source 1..1671: mol_type = other DNA
atgaagcggagcagcagcgagatcaagaccgactacctgagcatcatcatggacccagatgaagtaccgctcgacgagcaatgcgagagactcccctatgatgcatcgaagtgggagttcgccagggagcgcctgaaactgggcaagagtctaggtaggggggctttcggcaaggtggttcaagcttctgccttcgggattaaaaagtccccgacatgtcgaaccgtggctgtgaaaatgctgaaggaaggggctacggccagtgaatacaaggctctcatgacggaactgaagatattaacacacatcggtcaccatctcaacgtcgtgaacctcttgggagcttgcactaaacagggaggtcccctgatggtgattgtggagtactgcaagtacggcaatcttagcaattacctgaaatccaagagagatctgttttttttaaacaaggacgccgcactgcatatggagcccaaaaaagagaagatggaacccggcctggagcaaggtaaaaaacccaggctggacagcgtgaccagcagtgagtcttttgctagctctggatttcaggaggataaatccttgtccgatgtcgaggaagaagaagattccgacgggttttacaaagagcctataacaatggaggacctgattagctatagcttccaggttgcccgcgggatggagtttctctcctctaggaagtgcatccacagggacctcgcagctagaaatatcctactcagcgagaataacgtagtgaagatctgtgacttcggccttgcacgggacatttacaagaatcctgattatgtccgaaaaggcgacacccgtctccccctcaaatggatggcccccgaaagcattttcgataaaatctattcgacaaagtctgacgtgtggagttatggcgtcctcctgtgggagattttttctcttggaggctccccatatcccggggtgcagatggatgaagatttctgttccaggcttcgcgagggaatgaggatgagagccccggagtattccacccccgagatatatcaaatcatgctagattgttggcacagagatcccaaagagcgaccccgctttgccgaactggtggaaaagttgggcgatctcctgcaggctaacgtacagcaggatggcaaggactacatcccaatcaatgccatcttgactggtaatagcggatttacttattcaactccagcattttctgaagacttctttaaggagtctatttcggcgccaaagttcaactcagggtcttccgacgacgtgcgctatgtgaatgcctttaagtttatgtccctcgagagaatcaagacctttgaggagcttctcccaaacgcgacctctatgttcgacgattatcagggcgactcttcgaccttgttagcctctcctatgctgaagaggttcacttggaccgacagcaagccaaaggcatccctgaagatcgacctgcgcgttacttccaagtcgaaagaaagcggtctttctgacgtaagcaggcccagtttctgtcacagttcttgtggacacgtctcagagggcaagcgacgcttcacttatgatcacgccgaactggaaaggaagattgcatgctgcagtccccctcccgactacaattccgttgtgctgtactccacaccgcccatctag

SEQ ID NO: 24229 - DNA, 45 bp, synthetic construct; identical to SEQ ID NO: 10765
  misc_feature 1..45: note = Description of Artificial Sequence: Synthetic coding sequence
  source 1..45: mol_type = other DNA

SEQ ID NO: 24230 - DNA, 2202 bp, synthetic construct
  misc_feature 1..2202: note = Description of Artificial Sequence: Synthetic coding sequence
  source 1..2202: mol_type = other DNA
atggtgagctactgggacaccggcgtgctgctgtgcgccctgctgagttgtttgcttctgactggcagcagttctggttctaagcttaaagaccccgagttaagtctgaagggaacccaacacatcatgcaggcaggccagacactgcacctccagtgcagaggcgaagccgcccacaaatggtccctgcccgaaatggtcagtaaagagtcagaaaggctttctattacaaaatctgcttgtggacgcaacggcaagcagttctgtagtaccctcacacttaataccgcccaggcaaatcacactggattttactcatgcaaatacctggctgtgcccacaagtaaaaagaaagagacggaaagtgccatctatatattcatcagcgataccggtagaccatttgttgagatgtactctgagatcccggagataattcatatgacggaggggagggaattggtcatcccatgcagagttacgtccccaaatataacagttacactaaagaagtttccgctcgatacgctgattccagatgggaaacgcatcatctgggactctcggaaaggattcatcatttcaaatgccacgtacaaggaaattggcctactgacctgtgaggcaaccgtaaatggtcacctgtataagacaaattatctcacccaccgccagacaaacacaattatcgatgtacagatctctactccacgccccgtgaaactgctgagagggcatactttggtactgaactgtacagcaaccacacctctcaatactcgcgtacaaatgacctggtcctacccagatgagaaaaacaagcgggcgagtgtcaggcggcggatcgaccagtccaattcacacgcaaacattttctactctgttctgaccattgacaaaatgcagaacaaagacaaaggactttatacttgcagagtccgcagcggtccctcatttaaaagcgtcaacacatcagtccacatctatgacaaagcctttataaccgtcaagcaccggaagcaacaagtgcttgagacggtcgccggaaagcgatcataccgcctgtcaatgaaggtgaaggccttcccatcacccgaagtcgtctggctcaaagacggtctgccagccacagagaaatccgcacgatatcttacaagagggtactctctgataatcaaggacgttaccgaagaagatgccggcaattataccatcttgctgtccattaaacaatccaatgtgtttaagaacctgacagcgactttgattgtcaatgttaaaccacagatttatgaaaaagccgtctcttcctttccagacccggcactttatccactggggtccaggcagattctgacctgcactgcttacggcattcctcaaccaacgatcaagtggttttggcacccgtgtaaccataaccacagcgaggccaggtgtgatttctgctctaataatgaggaatcattcatcttagatgccgatagcaacatgggtaacagaatcgaatctatcacccagaggatggctatcattgaaggcaaaaataaaatggcttctaccctcgttgtggcggattcaagaatatccgggatctacatctgtatagcttcaaacaaagtggggaccgtgggccggaacatttcattttacattacggatgttcccaatggattccacgtgaacctggagaaaatgcccacagagggcgaagatctgaagctctcctgcactgtgaacaaattcctgtatagagacgtcacttggattttgctcaggactgtcaacaaccggactatgcattactcaatctccaaacagaagatggccattacaaaggagcacagtatcactctcaaccttactatcatgaacgtgtccctgcaggactccggcacctatgcttgtagggcacgtaatgtgtacacaggtgaagagatattgcagaaaaaagaaatcacgatccgagaccaggaagccccgtatctgctgcgcaatcttagcgatcacaccgtggccatttcttcttctacaacactcgattgtcatgctaacggagtgcccgagccacaaatcacatggttcaaaaacaaccacaagattcagcaggaaccagagctgtacacaagtacatctcctagttccagttccagttcacccctgtcttccagttcctcctccagtagttcaagcagtagctag

SEQ ID NO: 24231 - DNA, 1086 bp, synthetic construct
  misc_feature 1..1086: note = Description of Artificial Sequence: Synthetic coding sequence
  source 1..1086: mol_type = other DNA
atgaacagcgacctgctggtggacagcgacggcttctacaaggagcccatcactatggaggacctcattagctactcgttccaagtagcccggggcatggaatttctttccagtaggaagtgcatccatagagacctggccgcacgcaatatactgctgagcgaaaacaacgttgtcaaaatttgcgatttcgggctggctagggatatatataagaatcccgactacgtcaggaaaggggacactcgtcttccgcttaaatggatggctcctgaaagtatatttgataagatatactcaaccaagtccgacgtgtggagctatggtgtcctcctgtgggaaatttttagtttagggggatccccttaccctggggtgcagatggatgaggatttttgcagccgtctgagggagggcatgaggatgcgggcaccagaatacagcacaccagagatctaccagatcatgctcgactgttggcatagagacccaaaggagagacctcgattcgcagagctcgtagaaaaattaggcgatttgcttcaagcaaacgtacaacaggacggtaaagactatataccgatcaacgccattctgacaggcaactcagggtttacttactccacgcctgcatttagcgaggatttttttaaggagagtattagtgctccaaaattcaactccgggagttcggacgatgttagatacgtgaatgccttcaaattcatgtccctggaacgcatcaagacgttcgaagaattattgccaaatgctaccagtatgtttgacgactaccagggagattccagcacgttactagcatccccaatgctcaagaggtttacctggactgattcaaagcctaaggcgtctctcaaaatcgacctacgggtgaccagcaagtctaaggagtcaggtctgtcagacgttagcaggccctcattttgccatagttcatgtggccatgttagcgaaggaaagcgacgtttcacgtacgatcacgcagagctagaaaggaaaatcgcgtgctgttcacctcctccggattataactccgttgtgctgtattctaccccgcccatctag

SEQ ID NO: 24232 - DNA, 75 bp, synthetic construct
  misc_feature 1..75: note = Description of Artificial Sequence: Synthetic coding sequence
  source 1..75: mol_type = other DNA
ctgccccccgccaacagcagcttcatgctgccccccaccagcttctcctctaactatttccattttctgccctag

SEQ ID NO: 24233 - DNA, 1062 bp, synthetic construct
  misc_feature 1..1062: note = Description of Artificial Sequence: Synthetic coding sequence
  source 1..1062: mol_type = other DNA
atggagctgaccgagctgctgctggtggtgatgctgctgctgaccgccaggctgacattatcatcacctgcgccgcctgcctgcgacttgagagtgctgtctaagttgctgcgggactcccacgttctgcacagccgcctctcccaatgtcctgaggttcacccccttccaacccccgtgctactgcctgccgtggactttagtctgggagaatggaagacacagatggaggaaacgaaggcacaggatatcttaggcgccgtgaccctcctgctggagggagtgatggccgcccgaggccaactcggtccaacttgcctgtcctcactgctcggccagctgagcggccaagtccgcttgctccttggggctctccagagtctgctcgggacgcagctccccccccagggtcgaaccactgcccataaggatcctaatgccatttttctgtcatttcagcatcttctgagaggtaaagtcagattcctgatgttggttggtggcagcacactgtgcgtgaggcgggccccgcctaccacggccgttcctagtcggacctccctggtgctcacgttgaatgagctaccaaatcgtacatcagggctccttgaaacaaatttcaccgccagcgctagaactacaggcagcggcctcctcaaatggcagcagggttttagagctaaaatccccggactgttgaatcagacctcccgctccctcgaccagatcccaggttacctgaataggatacatgagctcttgaatggaactagaggtctgtttccagggccaagtagacggacactgggagcccctgacatctcttctggaacttcagatacggggagcctcccgccaaatcttcagcccggctattctccctctcctacgcaccccccaaccggacagtacacattattcccgctgcctccgaccctaccaaccccagtggtccagctccaccccctactcccagatccttcagcccccaccccgacacctacgtcccccctgctgaacacctcatacactcactcacagaatcttagtcaggaagggtag

SEQ ID NO: 24234 - DNA, 537 bp, synthetic construct
  misc_feature 1..537: note = Description of Artificial Sequence: Synthetic coding sequence
  source 1..537: mol_type = other DNA
atgaccgtgctggcccccgcctggagccccaccacctacctgctgctcctgctgctgctcagcagtggcctctcaggcacccaagactgttcttttcagcattcaccaattagttcagattttgctgtgaaaattcgggagcttagcgactatctgctccaggactatccagtcaccgtcgctagtaatctgcaggatgaagaattgtgcggcggactgtggcgcctcgtgttagctcagcgttggatggagcggctcaagacagtggccggttcaaagatgcagggcctgctggagcgggtgaacacagaaatccactttgtgaccaaatgtgcctttcagcctcccccatcatgcttgcggttcgtccaaacaaacatttcaaggctgttacaggaaacgtcagagcaactggtcgctctgaaaccatggatcactcgtcagaacttttctaggtgtctcgaactccagtgccagccagttgaaaccgtctttcatcgagtctctcaggacggcctggacctactgacttcgtag

SEQ ID NO: 24235 - DNA, 708 bp, synthetic construct
  misc_feature 1..708: note = Description of Artificial Sequence: Synthetic coding sequence
  source 1..708: mol_type = other DNA
atgaccgtgctggcccccgcctggagccccaccacctacctgctgcttttactcctcctgtcttcaggtctgagcggcacccaggattgtagctttcaacactctccaatcagctccgattttgccgtgaagatcagagagctgagtgattacctcctgcaagactatcccgtgacagttgcgtcaaatctgcaggacgaagaactttgcggggggctctggaggctggtgcttgctcaaagatggatggagcgactcaaaaccgtcgcgggctcaaagatgcaggggctcctggagagagtcaacaccgagatccacttcgtgaccaagtgtgcattccagcctcccccttcatgtctccgcttcgtgcagaccaacatcagtaggctcctccaagaaacatcagaacaactggtggctctaaaaccctggatcactcgccagaacttctctagatgtcttgagctgcaatgccagcctgattcatccacccttcctcctccatggagtccgcggcccttggaggcaactgcccccacagctccccagcctccattgctgttgctcctccttctccctgttggcttactcttgctggccgccgcatggtgtctgcattggcagcgaacccgtagaaggaccccgagaccaggcgagcaggtgcctcctgtgcccagtcctcaggacctccttcttgttgaacattag

SEQ ID NO: 24236 - DNA, 4092 bp, synthetic construct
  misc_feature 1..4092: note = Description of Artificial Sequence: Synthetic coding sequence
  source 1..4092: mol_type = other DNA
atgcagcggggcgccgccctgtgcctgcggctgtggctgtgcctgggactgctggatggactagtctctggatactccatgaccccaccgacgctgaatatcacggaagagtcccacgtgattgacactggggacagcctaagtatctcttgccgtggacagcatcccctggagtgggcttggcccggggctcaggaagcaccagccaccggcgataaggattccgaggacacaggcgtggttcgagactgtgaaggaacagacgcgcgaccgtattgtaaggtcctgttactccacgaggttcatgcgaatgatacagggtcctacgtgtgctactataaatatattaaagctcgtattgaaggcaccactgccgcaagctcttacgtgtttgtcagggactttgagcagccatttatcaacaagcccgataccctgctggtgaataggaaagatgcgatgtgggttccctgcctggtctccatccctggacttaacgtgactttaaggtctcaatccagcgtcctgtggcctgatggccaggaggtggtgtgggacgaccgccgtggcatgctagtgtcaacgcccctcttacatgatgctctgtatctgcagtgcgagacaacctggggagatcaggactttctgtctaatccatttctggttcacatcactggcaacgagctgtatgatatccagctgctgccaaggaaaagcctcgaactacttgttggagagaaactcgttctgaactgcactgtgtgggctgaatttaactctggtgtgacttttgattgggactatcctggtaaacaggccgagcgcgggaaatgggtgccggagaggaggagtcagcagacccataccgaattatcaagtattctgactatccacaacgtatcccaacacgacttgggcagttacgtttgcaaggcaaacaacggcattcaacggttccgcgagagcacagaggtgatcgtgcatgagaaccccttcatctcagtagagtggcttaagggccccattcttgaagccaccgctggggatgaactcgtgaagttacctgtgaagttagccgcttacccccccccagagtttcaatggtacaaagatgggaaagctttatcaggccggcatagccctcacgcactggtccttaaggaggttacggaagcatctactgggacatataccctcgctctctggaatagtgcagctggcttaaggaggaatatctccctagagctagttgttaatgtacctcctcagatccatgagaaagaggcttcctccccatccatctacagtaggcactcccggcaagccctgacctgtactgcctatggggtgcccttgccactgagtatccagtggcactggaggccttggaccccatgcaaaatgttcgctcagcgatccctcaggcggagacaacaacaggatctgatgccccaatgtcgtgactggagagccgtcactacacaggatgcggtgaatcctattgagagtctggacacttggaccgaattcgtcgaagggaaaaataaaaccgtctctaagctagtgatccagaatgctaatgtgtcggctatgtacaaatgtgtggtgtctaataaagttgggcaggatgaacgtctgatttatttctacgtaaccaccatcccagatgggttcacaatcgagtcaaaaccttcggaagaactgttggaagggcagcctgtcctgctgtcctgccaggccgattcttataagtacgagcacctccggtggtacaggctgaacctgagcacacttcacgatgcgcacggaaatccactcctgctggactgtaagaatgtccacctttttgccaccccccttgccgcttctctagaggaggtggcgccgggcgcacgccacgcaacactgagcctctcaataccccgggttgccccagaacacgaggggcattacgtatgcgaggtccaagaccggaggagtcatgataagcactgtcacaagaaatacctgagtgttcaggccctcgaagcccctcgcctcactcagaatctgactgacctgcttgtcaatgtcagcgactccctggagatgcagtgtctcgtcgcaggtgcccacgcgccgtctattgtctggtacaaagatgaacggctccttgaagaaaagtctggagttgacctggccgattccaaccagaaattatcaatccagcgggtgcgggaagaggatgcgggacggtacctgtgcagtgtttgtaacgctaaaggatgtgtcaattctagtgccagtgtagctgtcgagggttccgaggacaagggctctatggaaatagtgatcttggtgggtacaggagtcattgctgtgttcttctgggttctgctcttgctgattttctgcaacatgcgccggcccgcccacgctgacattaagacaggctacctgtccataatcatggacccgggagaagtcccactggaagaacagtgtgagtacctgtcttacgacgcctcgcagtgggaattcccacgagagcggttacatctcggacgtgtgctggggtacggcgccttcggaaaagtcgtggaggcatccgcattcgggatccataagggatcctcatgtgacactgtagctgtcaagatgttgaaggagggcgccaccgcaagcgaacaccgagcactgatgagtgagctgaagatcctgatccacattggcaatcacctcaacgtagtgaacctccttggtgcctgcaccaagccccaaggccctttgatggtgatcgtcgaattttgtaaatatggaaacctctccaatttcctcagggccaaaagggatgcattttcaccttgcgctgagaaaagcccagaacaacgaggacggttccgggccatggtggagctcgcacgacttgacaggaggaggccgggatcctctgatcgtgtgctattcgctcggttcagcaaaactgaaggaggggccagaagggcatctcctgaccaggaggcggaagatttatggctatccccacttacaatggaggacctggtatgttactcgttccaagtcgctcgcggtatggaatttctggccagtcgcaagtgtatacaccgcgatttagctgcacgaaacattctcctgagcgaaagcgacgttgtgaagatctgtgactttggcctagctcgtgatatctataaggatcccgactatgtgcggaagggttccgctcgcctgcctctgaagtggatggcccccgagtccatctttgataaggtgtatacaacccagtccgacgtctggtcgttcggggtgctgctctgggaaatattcagtcttggcgcctccccctaccctggtgtgcagattaacgaggaattctgccagcgcttgagagacgggactcggatgcgggctccagaactcgcaactccggcgattcgccgtatcatgctcaattgttggtccggagatccaaaagccaggccagctttctccgagctggttgagatccttggggacctgcttcagggtagaggcttgcaggaagaagaggaggtttgtatggctccgcgcagcagccagtcctctgaggaaggaagcttcagtcaggtgagtaccatggctctgcacattgctcaagctgacgcagaagattctccaccttcgctgcaacggcatagcctcgccgccagatattataattgggtcagcttcccaggctgtcttgcccgaggcgccgagacgagaggctcttccaggatgaagacctttgaggaatttccaatgacgccaaccacgtataaaggatccgtggataaccaaacagattccgggatggtgctcgccagtgaagaatttgagcagatcgagagccgtcacaggcaggaatcaggcttttcctgcaaagggccgggtcagaacgtggctgtcacccgggcccaccctgatagccaggggcgccgtagaaggcctgaacggggcgcccgaggaggacaagtcttctataattccgagtacggcgagttgtctgagccatccgaggaggatcattgctcgccctccgctcgcgttactttctttacagacaatagttactag

SEQ ID NO: 24237 - DNA, 2283 bp, synthetic construct
  misc_feature 1..2283: note = Description of Artificial Sequence: Synthetic coding sequence
  source 1..2283: mol_type = other DNA
atgctggtgagcacccccctgctgcacgacgccctgtacctgcagtgcgagactacatggggagatcaggattttctcagtaatccttttttggtccacattaccggtaacgagctttatgacatccagctcctcccccgtaaaagtctcgagctgctggtgggtgagaaacttgtactgaactgcacagtgtgggcagaattcaattccggagtcaccttcgattgggactatcctgggaaacaggctgaaaggggtaagtgggttcctgagaggcggagtcagcagacacacacagaactatctagcattctcaccatccacaacgtctcccagcacgacttagggtcttacgtatgcaaggccaacaatgggatccaacgcttcagggaaagcaccgaggttattgtgcatgagaatccttttatctcagtcgagtggctcaaaggaccaattttggaggcaactgccggggacgagctcgttaagttgccggtcaagctggccgcttaccccccgccagagtttcagtggtacaaggatggcaaggccctatctggacgccactctccccacgcgctcgtcttgaaagaagtaaccgaagccagtacggggacttataccctcgccctttggaatagcgctgctggcctccggcgcaacatttcgctcgagctcgtggtcaacgtaccacctcagatccatgagaaagaggcttctagtccctccatttattctcggcattctaggcaggcactgacttgcactgcttatggtgtgccactaccactctcgatacaatggcattggcgaccttggacaccttgcaagatgttcgctcagcgctctttacggcgacgccagcagcaggacttaatgcctcagtgccgggactggagagccgttaccacccaggacgcagtcaacccaattgagagcctggatacttggacggagtttgtcgaggggaaaaacaaaacagtttcgaagttggtcattcagaatgccaacgtaagcgccatgtacaagtgcgtggtgtcgaacaaagtggggcaggacgaacgactgatctacttttatgtcaccaccataccagacggtttcacaatcgagagtaaaccttcagaggagcttttagaggggcagccagtgcttctttcctgccaggccgatagttacaaatatgagcacctgcggtggtatcggctgaacctttcaaccctgcatgatgcacatggcaacccccttctgttggactgtaaaaacgttcacctgttcgcgacaccgttggccgcctcacttgaagaagtggcaccaggggcaagacatgcaaccctttctctgtcaatcccccgagtggcgcctgaacatgaaggtcactatgtctgcgaagtgcaagaccgaaggtcacacgacaagcattgccataagaagtatcttagtgtgcaggcactcgaggccccaagactaactcagaatctgaccgatttgcttgtgaacgttagtgactcattggagatgcaatgcctggtggcaggggcgcatgcccccagcattgtgtggtataaggacgagcgcttattggaggagaagtctggagtggacttggcagacagtaaccagaagttgagcatccagcgcgttcgcgaggaggatgctggccggtatctatgctccgtatgcaacgctaaaggttgcgtgaacagcagtgcctctgtggccgttgaggggtccgaggataaaggctcaatggaaatcgtgatcctggtgggaacaggagtgatagccgtgttcttctgggtacttctgctgctcatattctgcaacatgcgtcgccccgcacacgccgatattaagaccggctacctgagcattatcatggacccaggggaagtgccgcttgaggagcagtgcgaatatctgagttacgacgcatcccaatgggaatttcctagagagaggctgcatctgggccgcgttctggggtatggtgccttcggaaaagttgtggaagcctctgcgtttggcatccacaaggggagcagctgcgatacggtggccgtcaaaatgctaaagggagtgggatctgctggagggagaggttcgctggcaggtgaagagcaacagttaggtgttggccggtgggatgggaattccggtagggaaaccgaagctgggtcgcaatctcatcccaggttttatcgtgaggcagctggatttcgcgccgaaggtcctccagagcctccttctgtgggacctgctggctgtcccgggggcccctag

SEQ ID NO: 24238 - DNA, 3897 bp, synthetic construct
  misc_feature 1..3897: note = Description of Artificial Sequence: Synthetic coding sequence
  source 1..3897: mol_type = other DNA
atgcagcggggcgccgccctgtgcctgcggctgtggctgtgcctggggctgctcgacggcctggtgtcaggctactcaatgacgccccctacactgaacattaccgaggaatcccatgtgatagatacgggagacagcctgtccatatcatgcaggggccagcaccctttggaatgggcctggcccggcgcgcaggaggcacccgccacaggagacaaagacagcgaggatacaggagtggtgcgtgattgcgaaggaaccgatgcgcggccctactgtaaggtgcttcttctgcatgaggtgcatgctaatgacacagggtcttatgtgtgttattataagtatattaaagcccgcatcgaaggtactaccgcagccagcagctacgtcttcgtgagggatttcgaacagccctttattaacaaaccagacaccctcctcgtgaatagaaaggatgcgatgtgggttccttgtttggtctccatcccgggccttaacgtcaccctgaggtctcaatcatcggtgctgtggcctgatgggcaggaggtcgtatgggatgacagacgagggatgctcgtgagcactcctctgctgcatgacgccctgtacttgcagtgtgaaacaacctggggggatcaggatttcctatctaaccccttcctggtgcacataacaggaaatgagctctacgatattcaattgttgccccgaaagagtctggagctgctggtgggagagaaactggtacttaattgtaccgtgtgggctgagttcaacagtggcgtgactttcgactgggattaccctggcaagcaagccgaacggggcaagtgggttccagaacgcaggtcacagcagacacacacggagctgagttctattcttacaatccataacgtgagccagcacgatctgggcagctacgtctgtaaggcgaataatgggattcaacgcttcagagaaagcacagaggtgatcgtgcacgagaatccattcatttcagtggagtggctcaagggccctatccttgaggccaccgcaggcgatgagctagttaagctgcccgtgaaactcgcggcctatcctccccccgagttccagtggtacaaggatgggaaagcccttagcgggagacattccccccacgctctggtccttaaggaggtgaccgaggcatccacaggcacctatacattggccttgtggaattcagcagccggcttacggcgtaacataagtctcgaacttgtggtgaatgtgcctccccaaatccacgagaaagaggctagttctccttctatatactccagacactcgcgccaagctttgacctgcaccgcctacggggtcccactcccactgagcattcagtggcactggcgcccctggaccccctgcaagatgttcgcacaacgcagtcttcgcaggagacagcaacaggacctaatgccccaatgccgagactggcgggctgtgactacacaggacgcggtcaatccaattgaatcactcgatacttggactgagttcgtggagggtaaaaataagacagtttctaagctagtaattcagaatgctaatgtttccgctatgtacaagtgtgtggtgagcaacaaagtcgggcaggacgaacgcctaatttatttctacgtgactacaatccccgatggttttacaattgagagcaaaccaagcgaggagctcctcgagggacagcctgttctgttgtcctgccaggcggatagctacaaatatgagcacttgagatggtatagactgaatctgtctacattgcatgacgcccatggaaaccccctcctgttggactgtaaaaatgtgcatcttttcgcaacaccactggcagcatcattggaggaggttgctccgggggctaggcacgcaactctttcactttcaatccctagggtggccccagagcacgagggccactacgtatgcgaggtacaggatcgtcggtctcatgacaaacactgccataaaaaatatttatccgttcaggctctggaagctccccgactgacccagaacctaactgatttgctggtgaatgtgtcagacagcttggagatgcagtgcctcgttgcaggcgcccacgccccaagcatcgtctggtataaagacgaaaggctacttgaggagaagagcggagtcgacctagccgacagcaaccagaagttaagtatacagagagtgcgggaggaagacgctgggcgatatctatgtagcgtctgtaacgctaagggttgcgttaacagcagtgcaagtgtagctgtagagggatcggaggacaaaggatctatggagatcgtcattttagttggcacgggtgtgattgccgtctttttttgggtattactactgcttatcttttgtaatatgcgcaggccagcccacgccgatatcaagactggctacttgagcataattatggatcccggagaagtcccgctggaagaacagtgtgaatacctcagttatgatgcttcgcaatgggagttccccagggaacggcttcacctcggtcgtgttctgggatacggtgcctttggaaaagttgtggaggctagcgcatttggaattcacaaaggttcctcctgtgacaccgtcgctgtcaagatgctgaaagagggagccacagcctcagaacatagagctctgatgagcgagctgaagatcctcattcatatcggcaaccatttgaacgtcgttaacctgctgggcgcttgcaccaagcctcagggcccattgatggtcatagttgagttttgcaaatatggaaatcttagcaattttctgcgggccaagcgggacgccttcagcccttgcgcagagaagtcccctgaacagcgggggagattcagagctatggttgagttggcaagactggatcgtagacggcctggaagcagtgaccgcgtgctgttcgccagattctcaaagaccgagggaggtgccagacgggccagccccgaccaggaggccgaggacttgtggctttcaccactgacaatggaagacctggtgtgctatagcttccaggttgccaggggcatggagttcctggcaagccgcaagtgcatacacagagatctggcagctcgcaacattctcttaagtgaaagcgacgtagtcaaaatttgtgacttcgggctggcccgggacatatataaggacccagactatgtccgaaaagggtctgcgaggctgcctctgaagtggatggctccagagtccatctttgataaggtttatacaacccagtccgacgtgtggtccttcggagttctcctctgggagatctttagtctgggagcctcaccatatcctggagtgcagattaacgaggaattctgtcagaggttacgcgacgggacacgcatgcgagctcctgaacttgccactccggctattcgccgaatcatgctcaactgttggagcggagacccaaaagcccggcccgctttttctgagctggtagaaatcctcggggatctgttacagggaaggggcctgcaggaggaagaggaggtctgcatggcccctagaagctctcagagctctgaggagggctcgttctctcaggtgtcaaccatggcactccatattgcccaggccgacgcggaagacagtccaccaagcctccagcgacatagcctcgccgcaaggtactataactgggtgagttttcctggttgcctggctcgcggagctgagaccaggggcagttcccgaatgaagacctttgaagaatttcctatgaccccgactacttacaaagggagcgtggataatcagaccgatagtggaatggtcctcgcttccgaagagtttgaacaaatcgaatcacgacaccgccaagagtctgggtttcgctag

SEQ ID NO: 24239 - DNA, 3921 bp, synthetic construct
  misc_feature 1..3921: note = Description of Artificial Sequence: Synthetic coding sequence
  source 1..3921: mol_type = other DNA
atgcagcggggcgccgccctgtgcctgcggctgtggctgtgcctgggcctactggatgggttagtgtctggatacagcatgacaccacccacacttaatattacagaggagtctcacgtgatcgacaccggcgattccttgtcaatctcctgcagagggcaacaccctctcgaatgggcctggccaggtgcacaggaagccccagccactggcgacaaggactctgaagacaccggcgtggtgagggactgcgaggggactgacgcccgcccctattgcaaggtgctccttctacacgaagtacacgctaatgacacaggcagttacgtgtgctattacaaatacataaaggctagaatcgaggggaccacagcagcaagctcctacgtcttcgttagagattttgagcagccattcattaataagcccgacacactccttgtcaatcggaaggacgccatgtgggtgccatgcctggtgagcatcccaggacttaatgtgaccctgcggagtcagagctctgtcctctggccggacggacaggaggtcgtttgggacgacaggcgcggaatgcttgtttcaactcccctcctgcacgacgctttgtaccttcaatgcgaaacgacgtggggagatcaggattttctgtctaatcctttcctggttcacatcaccggcaacgaactgtacgatatccagctcctgccaagaaaatctctcgagctcctcgtaggtgagaagctggtccttaactgtactgtgtgggccgagttcaactcaggtgtaaccttcgactgggattaccctgggaaacaggctgagcgtggcaagtgggtcccagagcgccgtagtcagcagacccatacggaactcagttccatcctgacaatacacaacgtgagccaacacgatttaggatcatacgtatgtaaggcaaacaatggtattcagagatttagggaatctacagaggttatcgtgcacgaaaatcccttcatctcagtcgagtggctgaaaggcccgattctggaagcaaccgcaggtgatgagctggtgaagcttcccgttaagctcgctgcgtatccacctcctgagttccagtggtacaaagatggaaaggccttgtcaggacggcacagcccccatgccttggtactgaaggaagtgacagaagcctccaccggcacatacacattagctctctggaatagcgccgcggggttgagaaggaatatttccctcgagctggtcgtcaacgtgccacctcaaatacatgagaaggaagcaagcagcccatctatttacagccggcacagtcggcaagccttgacatgtaccgcctatggagtgccactccctctgtccatccagtggcattggaggccatggacaccatgtaaaatgtttgcccaacgatcattgcgccggagacagcagcaggatctgatgccccagtgtcgggattggcgggccgtaactactcaggacgcagtgaatcccattgagtcattggatacctggactgagtttgttgaaggcaagaacaagactgtgagcaagctggttatccagaacgccaatgtgagcgcgatgtataagtgtgttgtgtccaacaaggttggtcaggatgaacgattgatctatttttatgtgaccacgatccccgacggcttcaccatagagagcaaaccttctgaggagctcctggagggtcagccagtcctgttaagctgccaggcagactcttacaagtacgagcaccttcgatggtaccgcctaaacctgagtacactgcacgacgctcacggcaaccctctactgttggattgcaagaatgtacatctttttgccaccccattagcagcaagcctggaagaagtggccccaggtgcccggcatgctacactgtccctaagcataccgagagttgctcccgaacacgagggacactacgtgtgtgaggtgcaggaccggaggtcccatgataagcattgccataaaaagtacctgagcgtgcaggcactggaagccccccgcttgacgcagaacttaacggatcttctggtgaatgtgtcagacagccttgagatgcagtgcctggtggccggtgctcacgcaccttctatcgtgtggtacaaagatgagagactgctggaagaaaaatcaggtgtggacctggcagacagcaatcaaaagctttctattcagcgggttagagaagaggacgcgggccgatatctttgctcagtgtgtaacgcaaaggggtgtgtcaacagctcagcctcggtggcagtggagggaagtgaagacaaaggctcaatggagatcgtgattttagttggcaccggcgtgattgcagttttcttctgggtgttactcctgctaatcttctgcaatatgcgtagacctgcccatgccgacataaaaaccggctatctaagcattatcatggatccaggtgaagtgcctctcgaggagcagtgtgaatacctgagttatgacgcctcgcagtgggaatttcccagagaacggctgcacctcgggcgggtgctgggttacggagcatttggtaaggttgtcgaggcctcagccttcggtattcataaaggctcctcttgtgatacagtggctgttaagatgctaaaagagggtgccaccgccagcgaacacagggcacttatgagcgaactgaagatccttatacacatcggtaaccaccttaacgtggtgaatctgctgggggcttgtactaagccccaagggccactgatggtgatagtggagttttgtaagtacggcaatctctctaattttttgcgcgccaagcgcgacgcttttagcccatgtgcagagaagtcacccgagcagcgtggccgtttcagggccatggtagagctggcacggctggaccgtcgccgacccggatccagcgatcgggtcctattcgcccggttttccaaaactgaaggaggggctagacgcgccagccccgaccaggaagctgaagatctgtggctctcgccactgaccatggaggacttggtgtgttattccttccaagtcgctcggggtatggagtttctggccagtagaaaatgtatccatcgcgacttagccgccaggaatatcctgctcagcgagtcagatgtcgtgaaaatctgtgactttggccttgcccgtgatatctacaaggacccagattatgtgcgcaagggctccgcccgcctcccactgaagtggatggctccagagagtatcttcgataaggtgtataccactcagtccgatgtgtggtcgtttggggtcctattgtgggagatcttctcgctaggcgcttcaccctaccctggcgttcagataaacgaggagttttgtcagcggctgagagacggcacacgaatgcgcgcccccgagctcgctactcctgcaatcaggagaattatgctcaattgctggagcggtgacccgaaagctcgccctgcattcagcgagctggtggagatactcggtgacctcctccagggtaggggacttcaggaggaggaagaggtgtgcatggcccccaggagtagccaatcatccgaagagggcagcttctcgcaggtctcaaccatggccctgcatattgcacaggccgacgccgaggactctcctcctagcctacagcgtcacagtctcgcagcaaggtactataattgggtctcatttcctggctgtcttgccagaggcgcagagaccagaggctcttctagaatgaaaaccttcgaggaattcccaatgaccccgaccacgtacaagggcagcgtcgataaccaaaccgatagtgggatggtgctcgcgagcgaagagtttgagcagattgagagccgccatcgccaagagagcggttttagggggactcggcgcacacgcggggcttag

SEQ ID NO: 24240 - DNA, 1740 bp, synthetic construct
  misc_feature 1..1740: note = Description of Artificial Sequence: Synthetic coding sequence
  source 1..1740: mol_type = other DNA
atgaacgccatcgtggccctgtgccacttctgcgagctgcacggcccaagaactttgttctgtaccgaggtgttgcacgccccactgccccagggggatggaaacgaggattctccaggtcagggcgagcaggccgaagaagaagaaggagggattcaaatgaatagccgaatgagggcacattccccagcggaaggcgcgtcagtggaatcctcatcccctggccctaaaaagagcgatatgtgcgagggctgtcgcagcctcgccgctggacatccaggctacatttctcacgacaaagagaccagtatcaaatatgtgtcccatcagcatccttcacatccgcaattgtttagcattgtcagacaagcctgcgttcggtctctcagctgtgaggtgtgtccaggacgagaaggaccaattttttttggtgatgagcagcacgggttcgtgttttcgcatactttttttattaaagatagtctggccagggggttccagcgctggtacagcattatcacgataatgatggacagaatctatcttatcaattcatggccctttctgctaggaaaagtaagaggtataattgacgaactgcagggcaaggcccttaaagtattcgaggcagaacaattcggatgccctcagcgcgctcagagaatgaataccgccttcacacccttccttcaccagcggaacggcaatgcagcaagatctttaactagtctaacttctgatgataacctctgggcctgtctgcacactagcttcgcgtggctgcttaaggcttgtggatcgcgtctcacagaaaagttgctggagggagcaccaactgaggatactctggtgcagatggaaaaattggcagacttggaagaagaatccgaaagctgggataattcagaagctgaagaagaggagaaggccccagtactgcccgaatcaacggagggtcgcgagcttacgcagggaccagcagagtcttcttcactgagcggttgtggctcctggcagcctcgcaagctgcccgtctttaaaagcctgcgccacatgcgacaagtacttggcgccccctcttttagaatgctcgcatggcatgtcctgatgggaaaccaagttatttggaaatctagggacgtcgacttagtccagtcagccttcgaggtgctaaggaccatgctccccgtcggctgcgttaggatcatcccgtattcaagccagtatgaagaagcctacagatgtaatttcctgggactgagccctcatgtgcagatccctcctcacgtgctgtcctcagagttcgctgttattgtggaggtccacgcagcagcccgcagcacactgcatccggtcggttgtgaagacgaccagtcgctcagcaagtatgagtttgtggtgacgtccggatctccagtagccgctgaccgcgttggacctaccatcttgaataagatcgaggcagcactgacaaaccaaaacctgtctgtggacgtggtggatcagtgcctggtctgtcttaaggaagagtggatgaacaaggtcaaagtgctgtttaaattcactaaggtggatagtagacccaaggaggatactcaaaaactgttatccatcctgggagcaagtgaggaggataatgtgaagctgctgaagttctggatgaccgggttatccaagacttataaatcacacctgatgtccacggtccgttccccaacagccagcgagtctcgcaactag

SEQ ID NO: 24241 - DNA, 594 bp, synthetic construct
  misc_feature 1..594: note = Description of Artificial Sequence: Synthetic coding sequence
  source 1..594: mol_type = other DNA
atgaacgccatcgtggccctgtgccacttctgcgagctgcacggccccagaactcttttttgcacagaggtcctgcacgctcccctccctcagggcgatggcaacgaggatagccccggacaaggcgagcaggctgaagaagaggaaggtgggatccagatgaactcaaggatgagggcacattccccggctgagggtgcgagtgtggagagctccagtccgggcccaaagaagtccgacatgtgtgagggctgtcgatccctcgcggccgggcatccaggatacataagtcatgacaaggaaacaagcattaaatatgtatcccaccagcacccatcacatccgcagctattttccatcgtccgccaggcttgcgtccggtcactgagctgcgaggtgtccttagtagctactgaaccagtctcggttggcgcccacatgctccctggagcactgggtggactgggtgccagtatcgcccagggtggtcgccattggagctcactcagggccgatccacagatatctaccgcccaaggcactggccgactgccgtgtcccgagctcagggaggaatcctgttggacttgttag

SEQ ID NO: 24242 - DNA, 1029 bp, synthetic construct
  misc_feature 1..1029: note = Description of Artificial Sequence: Synthetic coding sequence
  source 1..1029: mol_type = other DNA
atgaacgccatcgtggccctgtgccacttctgcgagctgcacggccctcgcacactcttctgtactgaggtgctgcacgctcctcttcctcagggagacggtaacgaggatagccctggccagggggagcaggccgaagaggaggaaggcggaatccaaatgaactctaggatgagggcccactctcccgctgaaggagcctcagtcgagtcttcctctcctggcccgaagaagagcgacatgtgcgaaggttgtagatctctggcagccggccatccaggttacatctcacatgataaagagacttccatcaagtacgtgtcccatcagcatccatcccacccccagctgtttagcatcgtgcgccaggcttgcgtcagaagtctgtcctgtgaagtgtgtcctggacgagaaggcccaatctttttcggcgatgagcagcacggatttgtgttttcccatacctttttcattaaagactctctggctcggggtttccagagatggtattctattatcactattatgatggaccggatttatctgatcaactcttggccgtttctgctcggaaaagttagaggaattatcgacgagctccaggggaaggctctgaaggtgttcgaagcagagcaattcggctgcccacagagggctcagagaatgaacacagctttcacaccattcctccatcagcgcaatggaaatgcagccagaagcctgacaagcctgaccagcgatgataacttatgggcttgtctccacaccagtttcgcttggcttctgaaagcctgcggaagccgcctgaccgaaaagctcctcgaaggcgccccaactgaagatacactagtccagatggagaaactggccggcgaagccggcgttttactgcccggcccctggcccgggtggccctggggcggaacctcatgtctgctctcatggcaggagtctctccgtgaaggaaatgccgctttgaaccaaccacggacaagtctgcgcgaggctcatcctcccataagtgtctag

SEQ ID NO: 24243 - DNA, 594 bp, synthetic construct
  misc_feature 1..594: note = Description of Artificial Sequence: Synthetic coding sequence
  source 1..594: mol_type = other DNA
atgaacgccatcgtggccctgtgccacttctgcgagctgcacggccctcggaccctgttttgtactgaggtgcttcatgcccctctgcctcagggcgacggtaatgaagattcacccggacaaggagagcaagccgaagaggaagaggggggcattcaaatgaattcccgcatgcgggctcatagtccggctgagggagcctctgtggaaagcagttcccccggcccgaagaaaagcgatatgtgtgagggatgcaggtccttagctgccgggcatcccgggtatatcagccacgacaaagagacgtcaatcaaatacgtgagccatcagcatccatcgcatccacagctcttttctatcgtgcgccaggcttgcgtgcggtccctgtcctgtgaggtgtccttggtggcaacagagccagtaagcgtgggtgctcatatgctcccgggcgctctgggaggcctcggagcttctatcgctcagggcggcagacattggtcctctctgagggcggatccacagatttcaacggcccaggggaccggacggctcccttgtcctgagctcagagaagagtcatgctggacatgctag

SEQ ID NO: 24244 - DNA, 462 bp, synthetic construct
  misc_feature 1..462: note = Description of Artificial Sequence: Synthetic coding sequence
  source 1..462: mol_type = other DNA
atgaacagccggatgcgggcccacagccccgccgagggcgccagcgtagagagtagcagcccaggccccaagaagtctgacatgtgcgaaggatgcaggtccctggccgcagggcacccaggctatatctcacatgacaaggagaccagcattaagtatgtaagccaccagcatccttcacatcctcagctgttctctatagttaggcaggcctgtgtgagatccctatcctgtgaggtttgtcctgggcgagagggccctattttcttcggcgacgaacaacacggcttcgtgttctcccatacattcttcatcaaagactcgctcgcccgagggtttcagagatggtattctattattactattatgatggaccgcatatatctcattaactcttggccttttctgcttggaaaggtgcgcgggatcattgatgaacttcagggcaaggccttgaagtag

SEQ ID NO: 24245 - DNA, 1419 bp, synthetic construct
  misc_feature 1..1419: note = Description of Artificial Sequence: Synthetic coding sequence
  source 1..1419: mol_type = other DNA
atgctgggcaccgtgaagatggagggccacgagaccagcgactggaattcctactacgcagacacacaagaggcttactcatctgtgcccgtgagcaatatgaattctgggctaggttcgatgaactctatgaacacctacatgaccatgaataccatgactacatcagggaacatgaccccagcgagctttaacatgtcatatgccaacccggggctcggcgccggactttcacctggagctgtagctggaatgcctggtgggagcgcgggggcaatgaattctatgaccgctgccggtgtgacagcaatgggcacagcactgtctcccagcgggatgggcgctatgggggcccagcaggctgcgagcatgaatggtctgggaccgtatgctgctgccatgaacccttgcatgtctcccatggcctatgccccatctaatcttgggaggtctagggcggggggaggcggcgatgccaagacttttaaaaggtcttatccccacgccaaaccaccatactcttatatcagccttatcactatggccatccagcaggctccaagcaaaatgcttacactgtcggagatctaccagtggataatggatcttttcccctattatcgccagaatcaacaaaggtggcagaactcaattaggcatagcctctctttcaacgactgctttgtcaaagtggccagaagccctgacaagccaggtaagggaagctattggactctgcatcctgactccgggaatatgttcgagaatggctgttacttgcgtagacagaagagattcaagtgcgagaaacagccgggcgccggcggcggtgggggaagtggaagcggcgggtcaggcgccaagggtgggccagagtcccgcaaagatccaagcggggcctccaatccctccgccgattcccccctgcatcgaggcgtgcatggtaaaaccgggcaactggaaggggcacccgcccccggaccagctgccagcccgcagacgctagaccatagtggcgccaccgcaaccggtggagccagcgagctgaaaaccccagccagctccacagccccccccatcagtagcggcccgggcgccctagcttctgtccctgcctcacatcccgctcatggtctggctccacacgagtcgcagcttcacctaaaaggcgaccctcattactcattcaatcacccgttctctattaataatctcatgtcttcttcggagcagcagcacaagctggactttaaggcctacgaacaggcgttacagtattccccgtacggatctacacttcctgctagtctgccactcggtagcgcgagcgtaacaacaaggagtccgatcgaaccttccgctcttgagccggcatactaccagggagtgtatagtaggccggtcctcaacaccagttag

SEQ ID NO: 24246 - DNA, 1320 bp, synthetic construct
  misc_feature 1..1320: note = Description of Artificial Sequence: Synthetic coding sequence
  source 1..1320: mol_type = other DNA
atgaacagcggcctgggcagcatgaacagcatgaacacctacatgacaatgaacacaatgaccacatctggcaacatgaccccagcctccttcaacatgtcttatgctaatcccggactgggggccggactctcacctggcgcggtcgccggaatgccaggcggctcagctggagctatgaatagcatgacggccgctggcgtcacagctatggggacagcattaagccctagtgggatgggggccatgggagcgcagcaggctgcctcaatgaatggcttggggccatacgctgccgccatgaatccctgcatgtcccctatggcctacgctcccagtaatttggggcgaagccgggcagggggagggggggacgcaaagacgttcaagcggagctaccctcatgctaagcctccctacagttacatcagccttataactatggccatacagcaagcgccatcaaagatgctgacacttagcgagatctatcagtggattatggatctcttcccctattaccgccaaaaccagcagagatggcagaactccattcggcactccttgagttttaacgactgcttcgtcaaagttgcgcgcagccccgacaagcctggaaagggttcctactggacactccatcccgattctggaaacatgttcgagaacgggtgctatctccgacggcagaagaggtttaaatgtgaaaaacagccaggagctggaggggggggaggcagtggctccggcggatccggcgctaagggaggccctgaatctcgaaaggacccaagtggggcatctaacccatctgccgacagtcccctgcataggggcgtgcacggtaagaccggtcaactcgagggcgcacctgctccagggcctgctgcatctcctcagactctggatcactcaggcgcaacagccaccgggggcgcatccgaactcaagactcccgccagctcaaccgcccccccaatttcttcaggcccaggagccctggcctccgtgcccgcatctcacccggcccacggccttgctccccacgaatcccagttacacttgaagggcgatccacattacagtttcaatcatccattctccataaacaacctgatgtccagttccgaacaacagcacaagctggactttaaagcttatgaacaagcactgcagtactctccttacggatcgactttgccagctagccttcccctcggatccgcctccgtgacaacccgaagtcctatagagccctcagcacttgagcctgcttactaccagggagtctattccaggccagtccttaatacttcatag

SEQ ID NO: 24247 - DNA, 1506 bp, synthetic construct
  misc_feature 1..1506: note = Description of Artificial Sequence: Synthetic coding sequence
  source 1..1506: mol_type = other DNA
atgcaggcccggtacagcgtgagcgaccccaacgccctgggcgtggtcccctacctttcagagcaaaattactatagagctgcagggtcttatgggggaatggcctcccccatgggagtctactcaggtcaccctgaacaatacagtgcaggtatgggccggagctacgctccataccatcaccaccagcccgccgctcccaaagacctggtgaaaccaccatactcctatattgcactgattactatggccattcagaacgcccccgaaaaaaaaattacgcttaatggtatttatcaatttatcatggaccgcttcccgttctaccgcgagaacaagcaggggtggcaaaacagtatacgccataatttgtctctgaacgaatgtttcgtgaaagttcccagagatgacaagaagcctggaaaaggaagttattggactctggatcctgactcctacaacatgtttgagaacggcagctttcttcgtcgccggaggcgatttaagaagaaggatgtgtcaaaagagaaggaggagagagcacacctgaaggagcccccaccagcagcctctaaaggggcaccagcaaccccacacctggctgacgcccccaaagaagctgagaagaaggtggttatcaagagtgaagctgcttcacccgcactacccgtgatcacaaaagtcgaaacgctatcccctgaatctgccctccaaggctctcctagatccgcagcgtcaacccctgcaggcagcccagacggctcattacctgaacatcatgctgccgcccccaacggccttcctggattttccgtggagaacatcatgaccctgagaacgagcccacccggaggcgaattgtcaccgggcgctgggcgggccgggctggtagtgccacctctagcgctgccatacgcagcagccccaccggcggcatacggtcagccatgtgcccagggtttggaagccggggccgctggaggctatcagtgctcaatgcgggccatgtcactgtacactggggccgagcgtcccgctcacatgtgcgtgccgccagccctggatgaggcgttgagtgaccacccctcgggtcccactagcccactcagcgcgctcaacctggctgccggacaggaaggtgcgcttgctgcaaccgggcatcaccaccagcaccatgggcaccaccatccacaggcgcctcctccaccacctgcaccccagccccagccgactccccagccaggcgcagcggcggcgcaggctgccagctggtacctgaatcatagcggcgacttgaatcatctgcccgggcataccttcgctgcccagcagcaaacttttccgaatgtgcgtgagatgtttaactcccacaggctgggaattgagaacagcaccctgggtgagtcgcaagtcagtgggaacgctagctgtcagctcccttatagatccaccccccccctctatcggcacgccgcgccctattcctacgactgtaccaaatactag

SEQ ID NO: 24248 - DNA, 1968 bp, synthetic construct
  misc_feature 1..1968: note = Description of Artificial Sequence: Synthetic coding sequence
  source 1..1968: mol_type = other DNA
atggccgaggccccccaggtggtggagatcgaccccgacttcgagccccttccccggcctagatcctgtacctggcctctgccaagaccagaatttagtcagagcaactcagccacgtcaagcccagcaccttccgggtccgccgcagctaatccagatgccgccgcgggactgcccagcgccagcgccgccgcggtgtctgctgacttcatgtcaaacctgagcctattagaagaaagcgaggatttccctcaagcgccagggtccgtcgcagcagcggtcgctgccgccgcagcagcggcggccacaggagggctttgcggtgactttcagggtccggaggccggttgcctgcacccggctcccccccagcctcctccccctgggcccctcagccagcaccctccagtgccaccagctgccgcaggccccctggctggacagcctagaaaatcttcctcaagtaggaggaatgcctggggtaacctatcctacgctgatttaatcaccaaagccattgagtcctctgccgagaaacgcctgactctttcccagatatatgagtggatggttaaatccgtgccatactttaaggacaagggtgactccaatagctctgctggctggaaaaattctattagacataacctctctcttcacagtaagttcataagagtccagaatgaaggtaccggcaaaagtagttggtggatgctaaaccctgagggaggaaaaagcggcaaaagccctagacgacgcgctgcaagcatggataataattctaaatttgccaaatcgcgctcaagggcagctaagaagaaggcttctctgcagtctggccaagagggcgccggcgattctcccggctcccagttcagcaagtggcccgccagccctggtagccattctaatgacgatttcgacaactggagcacctttcggccacgtacaagttcaaacgcctctactattagtggcagactgtccccgattatgacagaacaagatgacttaggggagggcgacgtccatagcatggtctaccccccatcggccgccaaaatggcctctaccctgccttcactttccgagatcagcaatcctgaaaatatggaaaaccttctcgacaaccttaatttgctctctagccccacctccctgactgtgtccacccagagtagcccaggcacaatgatgcagcagactccttgttatagttttgcgcctcctaacaccagccttaatagcccatctccgaattaccagaaatacacctacggacaaagttcgatgtctcctttaccacagatgcccatacaaaccctccaggacaataagtctagctatggggggatgtcccaatataattgtgccccgggattgctgaaagagctgcttacttctgattctccacctcacaacgacattatgacgcctgtagacccgggggtcgcccaaccaaacagtagggtactaggacagaacgtcatgatgggtcccaattctgtgatgtcaacttatgggtcccaggcgtcccataataaaatgatgaacccgtcaagccacacacatcccggtcatgcccagcagacatctgcagtcaacgggagaccattgccccacacagttagcaccatgcctcacacatccggaatgaatcgcctgacgcaggttaagactcccgtgcaggtgcccctccctcaccctatgcagatgtccgctcttggcggctactcgtcggtgtcgtcttgcaatggctacggcaggatggggctgttacaccaagaaaaattgcctagcgatctcgatggcatgttcattgaaagattagactgtgacatggagtcaattataaggaacgacctgatggacggcgataccctggacttcaactttgacaatgttttgcctaaccagagcttccctcactctgttaagactaccacccactcctgggtatcaggttag

SEQ ID NO: 24249 - DNA, 2022 bp, synthetic construct
  misc_feature 1..2022: note = Description of Artificial Sequence: Synthetic coding sequence
  source 1..2022: mol_type = other DNA
atggccgaggcccccgccagccccgcccccctgagccccctggaggttgaattagatcctgaattcgagccgcagagtaggccaaggagctgcacttggcctctccaacgtcctgagctgcaagcctctccagccaaacccagcggtgagacggccgcagattccatgattcccgaggaggaggacgatgaggatgacgaggacgggggcggcagggccggtagcgcaatggcaattgggggcgggggtggttccggtaccttaggcagtggcctgctcctcgaagacagcgcaagagtgctggccccagggggacaggacccaggaagtggtccagccaccgccgccggagggctgagcggggggacgcaagcgctgcttcagccacagcagcccctaccgccccctcagcctggcgccgccggtggatctgggcaaccacggaaatgctcctcacgcagaaatgcttggggaaatttgtcatatgctgacttgattacccgggccattgagagcagccccgataaaagattaactctcagtcagatatacgaatggatggtgaggtgtgtgccatactttaaggataaaggcgacagtaacagttcagccggttggaagaatagcattcgccacaacctgtccctacactcacgttttatgcgcgttcaaaacgaaggaactggaaagtcctcatggtggattattaatccagacggcggaaaaagtggcaaagctccacgtcggcgggccgtgtctatggacaactccaataaatatacgaagagtcgggggcgtgctgcaaagaaaaaggcggcattgcagacagctcccgaaagcgctgacgactctcctagccagctgtcaaaatggcctgggtctcccactagcaggtctagcgatgagttagacgcttggacagacttccggagccgaacaaattctaacgcatctaccgtatcaggaagattgtctccaataatggcttccacagagctggatgaggtgcaggatgacgacgccccactgtcaccaatgctgtactcaagctctgcttctttatccccaagcgtgtctaagccatgcacagtggaactgccaagacttactgatatggccggtacaatgaacctgaacgatggtctgacagagaatctaatggacgacctgttggataatattaccttgcccccctcacagccctctcctactggcgggctgatgcagcggtctagtagcttcccctacaccactaagggtagtggactcggaagcccgacaagcagcttcaactctacggtctttggcccctcttctttgaacagcttgaggcagtcaccgatgcagacaatccaggagaataagccagcaacattctccagcatgtcgcactatggcaaccaaacactgcaagacctgctgaccagtgacagtctaagtcattcagatgttatgatgacccagtccgaccccctaatgtcacaggcctcaacagccgtatctgctcagaacagtcggagaaacgtaatgcttaggaatgatcctatgatgtcttttgctgcgcaacccaatcagggatctctggttaatcaaaacctgctgcaccatcagcaccaaactcagggcgccctgggaggcagtcgggcactgtccaactccgtctcgaacatggggctttctgagtcatccagtctgggatccgcaaaacaccagcagcagtcacccgtgagccaatctatgcagacattgtcggatagcctcagcggtagttcgctttacagtacttctgcgaatctgcctgttatgggacacgagaaattcccatcagacttggatttagatatgtttaacggtagcctggagtgcgatatggagtctattatcaggtctgaactaatggatgccgacggactagatttcaatttcgacagcctgatcagcacacagaacgtggtgggcctgaacgtgggaaattttactggcgccaaacaggcttcatcccagtcctgggtgccaggttag

SEQ ID NO: 24250 - DNA, 2022 bp, synthetic construct
  misc_feature 1..2022: note = Description of Artificial Sequence: Synthetic coding sequence
  source 1..2022: mol_type = other DNA
atggccgaggcccccgccagccccgcccccctgagccccctggaggtggagctggatcctgaattcgagccccagagcaggcccagatcatgcacctggcccctccagcgccccgaactgcaggcctcacccgccaagccaagcggtgagaccgccgccgacagtatgatacccgaggaagaagacgatgaggatgatgaagacggtggaggacgggcaggctccgctatggccatcggtggtggggggggttcaggaacactggggagtggcctcctgttggaagactctgcccgagtgcttgcaccgggaggacaagacccaggcagtgggcccgcaaccgcagctgggggtctctcggggggcacccaggccctcctgcagccgcagcaacccttgcctcccccacagcccggagcggcgggaggctctgggcagccacgaaagtgcagctctaggcgtaacgcatggggcaatctcagctatgctgaccttatcacgagagctatcgagtcctctcccgacaaacgcctgactctttcccagatctatgaatggatggtgaggtgtgtcccttacttcaaggataaaggcgactctaactcaagcgcaggctggaagaacagcattcgacacaacctctcactgcacagtcggtttatgagggtgcagaacgaaggcacaggcaagagttcctggtggattatcaatcctgatggcggaaaaagcggcaaggcacctagacgtcgggccgtgtcaatggataactctaacaagtacaccaagagtcgcggaagagctgccaagaagaaggcagctttgcagaccgctcccgaaagcgctgacgactctcccagccagctctcaaagtggccaggatctccaacatcccgaagtagtgatgagctcgacgcctggacggactttcgatcacggaccaacagtaacgcgtcaactgtctcaggaagactttcccctatcatggcctctaccgagttggatgaagtccaggacgatgatgcgccattgtctccaatgttatactcctccagtgccagtttgtccccatcagtgtctaagccatgcaccgttgaactgcccaggctcaccgatatggcggggaccatgaacttaaatgacggtttgaccgagaacctcatggatgacttgcttgataatattacactgccacccagccaacctagccctacgggaggtcttatgcagagaagcagctcatttccgtacacgacaaagggaagcggactcggctctcccacctcatcctttaattccacggtcttcggcccttcttctctgaactctttgcgccaatccccaatgcaaactattcaggagaacaaacctgcaacgttcagcagcatgtctcactatggcaaccagactctgcaggatttgttaacatccgattcgttatcccacagcgacgtgatgatgacgcagagcgaccccttgatgtctcaagcgtctaccgccgtctctgcacagaattcaagaagaaacgtgatgctgcggaacgatccgatgatgagcttcgccgcccaaccaaaccagggatccttggtcaaccagaacctactgcatcaccagcatcaaacccaaggggccttaggagggtctcgtgcactgagtaatagtgtgtccaatatgggattatccgagagctctagcctgggttcagccaagcatcagcagcagtctcctgtgagccagtcaatgcagacactgtcagattctctgtctgggagctccttatacagcaccagtgctaacctgccagtgatgggccatgaaaagtttccttcagatctggatctggacatgtttaacgggtctcttgagtgtgacatggagtctatcatccggtctgagctgatggacgcggatggactggacttcaatttcgactctttgatttccacgcagaacgtggtcgggttgaatgtcggtaactttacaggcgcaaagcaagcttccagccaatcctgggtgcccgggtag

SEQ ID NO: 24251 - DNA, 1302 bp, synthetic construct
  misc_feature 1..1302: note = Description of Artificial Sequence: Synthetic coding sequence
  source 1..1302: mol_type = other DNA
atgcgggtgcagaacgagggcaccggcaagagcagctggtggatcataaacccagatgggggtaagtcaggcaaagctccacgcagacgagctgtttcgatggacaactccaataagtacaccaagtcccgcggcagagccgctaagaagaaggcagcgttgcagaccgcccctgagtccgcagatgactctcccagtcagttgagcaaatggcctggatcccccactagcagatcatccgacgaactcgatgcatggacagacttccgctcaaggacaaattccaacgctagtaccgtcagcggaagactgagccccataatggcctctacagagctagacgaggtgcaggatgacgacgcacctctttctcccatgctttacagctcgtcggccagcctctcgccatcggtttctaagccttgcacagtcgaactgcccagattgacagatatggccggcaccatgaatctaaatgacggcctgaccgagaatcttatggatgatctgctggacaatatcactctccctccctcccagcctagccccacaggcgggctgatgcaaaggtcaagttcattcccttacacaacaaaagggtcggggctggggagcccgaccagcagtttcaatagtaccgtatttggtccttcatctctgaactcccttcggcagtcgcccatgcaaaccatccaagagaacaagccggcgaccttctcctcaatgagccactacggaaaccaaactcttcaggacctgctaaccagtgattccctgtcccactcagacgtgatgatgactcagtctgatccactcatgtctcaggcttcgacagctgtgtccgcacagaattccaggaggaacgttatgttgcggaatgatccaatgatgtcatttgcagctcagcctaatcagggttcgttagtcaatcagaacctgctgcaccatcagcatcagacgcagggagctctcgggggctcacgcgccttaagcaatagcgtgagtaacatgggcctgagtgagtcttcctctctggggagcgcaaagcaccagcagcagtctccggtgtctcagtctatgcagactctgtccgattcactttccggatccagtctgtattccaccagcgcgaatttgcccgttatgggccacgaaaagttcccatctgacctcgacctagatatgtctatgggagcctggaatgtcacgtggagtcccctgtctgtcgttaacagttggatgctgatgggctggattctgactctaatcccttcttccccccatcggatgctactggtgtag

SEQ ID NO: 24252 - DNA, 1362 bp, synthetic construct
  misc_feature 1..1362: note = Description of Artificial Sequence: Synthetic coding sequence
  source 1..1362: mol_type = other DNA
atgcgggtgcagaacgagggcaccggcaagagcagctggtggatcattaaccctgatggtggcaaaagtggcaaggccccccgtcgtcgcgcagtatccatggacaactcgaacaaatacacaaaatccaggggcagggctgccaagaaaaaggccgcccttcagaccgctcccgagtctgcggacgacagcccctcccagctcagtaaatggccaggttcaccgacctcccggtcctcagatgaactcgatgcatggacggacttcaggtcgaggacaaacagcaatgccagtaccgtgtcgggtagactgagccctatcatggccagcacggagctggatgaggtgcaggatgacgacgcacctctgagcccaatgctgtatagctcttctgcctccctgtctcctagcgtaagtaaaccatgcactgtagaattaccgagacttacagacatggccggcaccatgaatttgaatgacggcttgactgagaacctcatggatgacctattggacaatattacattgcctcctagtcagccgtcccccaccggtgggctgatgcagagaagctctagttttccctatactaccaaaggaagtggtttaggctctccaactagctcctttaactccaccgtgtttggccctagctctcttaactccttgcgacagagccctatgcagaccatccaggagaacaaaccagcgacttttagcagcatgagccattacgggaaccagactttgcaggaccttctgacgagtgatagcctttcccactcagatgttatgatgacccagtccgatcctttgatgtcccaggcctctaccgccgtgagcgcccaaaatagtcggcgtaatgttatgctgcgaaacgacccaatgatgtcttttgctgcgcagcccaaccagggatccctcgtcaatcagaacctgctgcatcatcagcaccagacacaaggcgctctggggggatctagagctctgagcaactcagtatcgaacatgggtctgtctgagtcttccagtctcggatccgccaaacaccagcagcagagccccgtgagtcagtcaatgcaaacgctttccgactcgctgtctggtagctccttatacagcacttccgcaaacctgcctgttatgggacatgaaaaattcccatcagatctcgatttggacatgttcaacggcagccttgaatgcgatatggagtcaatcatccgctcggagttgatggacgccgacggactggatttcaacttcgattccctcattagtactcagaatgtcgtgggcctgaacgtcggaaactttacaggcgcaaagcaggcctctagccagtcttgggtccctggatag

SEQ ID NO: 24253 - DNA, 444 bp, synthetic construct
  misc_feature 1..444: note = Description of Artificial Sequence: Synthetic coding sequence
  source 1..444: mol_type = other DNA
atgagcttccggttcggccagcacctgatcaagcccagcgtggtgtttctcaagacagagctttcttttgctttggttaacaggaagcccgtagtgccaggccacgtgttggtttgtccgctccgacctgtcgagcgatttcacgatctccgaccagatgaagtggccgatctctttcaaacgacacagcgagtggggaccgttgtggaaaaacatttccatggaaccagcctcaccttctcaatgcaggacgggcctgaggccggccagaccgtaaagcatgtgcacgtgcacgtgcttccacgcaaagcgggagattttcaccgtaatgactcaatctacgaagaattgcagaagcatgataaggaggatttcccggcctcttggcggagcgaggaggaaatggctgcagaggcagccgccctgagggtttatttccagtag

SEQ ID NO: 24254 - DNA, 444 bp, synthetic construct
  misc_feature 1..444: note = Description of Artificial Sequence: Synthetic coding sequence
  source 1..444: mol_type = other DNA
atgagcttccggttcggccagcacctgatcaagcccagcgtggtgttcctcaagacagaactgtctttcgccctggtgaacaggaagccggtggtgcctggtcatgtgctcgtgtgcccactcagacctgttgaaaggttccatgatctccgaccagatgaggtcgccgacctgttccagactacacagcgggtggggacggttgttgagaagcatttccacggcacctccttgacttttagcatgcaagacgggcccgaagccggtcagacggtgaagcatgtgcacgtgcacgtattgcccagaaaggccggagactttcacagaaacgatagtatctacgaggagctgcagaagcacgacaaggaggattttcccgcgagttggcgctccgaagaggagatggctgccgaggccgccgccttgagagtctacttccaatag

SEQ ID NO: 24255 - DNA, 444 bp, synthetic construct
  misc_feature 1..444: note = Description of Artificial Sequence: Synthetic coding sequence
  source 1..444: mol_type = other DNA
atgagcttccggttcggccagcacctgatcaagcccagcgtggtgttcctaaagactgaattaagcttcgccctcgtaaacaggaaaccagtggttcccggtcatgtgttagtgtgcccgcttaggccagtggaaaggttccatgacctccggcctgacgaggtcgcggaccttttccagaccacccagagagtagggacagtggtcgaaaaacattttcatggcacttctctgaccttcagcatgcaagacggccccgaggcaggacagactgttaagcatgtgcacgttcatgtcctgccgcgtaaagctggtgattttcatcgaaatgacagtatctatgaagaactgcagaagcacgacaaggaggactttcccgcctcctggaggagtgaagaggagatggccgccgaggccgcggcactgagggtgtacttccagtag

SEQ ID NO: 24256 - DNA, 240 bp, synthetic construct
  misc_feature 1..240: note = Description of Artificial Sequence: Synthetic coding sequence
  source 1..240: mol_type = other DNA
atgagcttccggttcggccagcacctgatcaagcccagcgtggtgtttctcaaaaccgagctcagttttgcgctggtaaatagaaaaccagtcgttccaggacacgtcctggtgtgcccactgaggccagtcgagcgtttccacgatctgagacccgacgaggtggcggatctgtttcagaccacacagagggtaggtactgtcgttgagaagcacttccatggtacatctctgacctag

SEQ ID NO: 24257 - DNA, 444 bp, synthetic construct
  misc_feature 1..444: note = Description of Artificial Sequence: Synthetic coding sequence
  source 1..444: mol_type = other DNA
atgagcttccggttcggccagcacctgatcaagcccagcgtggtgtttctgaaaacagaactctcatttgctttagttaatcggaagcccgttgtgcctgggcacgtcctcgtttgccccctgagacccgtggagcgatttcacgacctcagacctgacgaggtcgccgacttatttcagacgacccagagagtgggcactgtggtggaaaaacattttcacggcacctcacttacgttttccatgcaagacgggccggaggccgggcagacggtcaagcacgtgcacgttcacgtcctccccagaaaggccggagacttccataggaatgattctatctacgaggagctgcagaaacacgataaggaggacttccctgcctcatggcggagcgaggaggaaatggctgcggaagctgccgctctgagggtatacttccagtag

SEQ ID NO: 24258 - DNA, 1725 bp, synthetic construct
  misc_feature 1..1725: note = Description of Artificial Sequence: Synthetic coding sequence
  source 1..1725: mol_type = other DNA
atgcgggaccccggcgccgccgcccccctgagcagcctgggcctgtgcgctctcgtcctggctctccttggagcgctctcagctggcgctggcgcccagccataccatggtgaaaagggcatttctgtgccggaccacggcttctgtcagcctatatccataccactatgcacagacatagcatacaaccaaaccatcctacctaacctcctggggcacacaaaccaggaggacgcaggccttgaggttcatcagttctacccccttgtgaaagtgcagtgtagccctgaactgagattttttctgtgctcaatgtatgctcccgtgtgtactgtgttagatcaagcaattcctccgtgtcggtcgctgtgcgaaagggctcggcaagggtgcgaggccctgatgaacaaatttgggttccagtggcccgagcgtctgcggtgtgaaaactttccggtacacggggccggcgagatctgtgtcggccagaatacttccgacgggagtgggggcccggggggaggacccacagcatatcccacagccccatacctgccggaccttcctttcacagcactacccccgggcgctagcgatgggcgtggacgaccagccttcccattctcttgcccaaggcagctgaaggttccgccctatctcggttatagatttctcggggagagagactgtggcgcaccgtgcgagcctggccgggcgaatggcctcatgtacttcaaggaagaagaacgaaggtttgcccggctttgggttggcgtgtggtcagttttgtgctgtgcctcaacactattcaccgtactaacttaccttgtggatatgcgcaggttctcctaccccgagcggccaatcatattcttaagcggatgctattttatggtcgctgtggcccacgtcgctggctttctgctagaggacagagccgtgtgcgttgagaggttcagcgatgatgggtatagaacagtggcccaaggaaccaagaaggagggatgcactatcttgtttatggtcctctatttcttcgggatggcctcctctatctggtgggttattttatctctgacctggttcttggccgcaggcatgaagtggggacatgaggctatcgaagcaaattcccagtacttccacctagccgcgtgggccgtgcctgcagtgaagacaattaccattctggctatgggccaggtggatggcgacctcctaagcggggtgtgttatgtcggtctcagctcggttgatgcgcttcggggattcgtgttagccccactgtttgtttacttgtttatcgggacaagctttctgttagccgggtttgtgagcctctttagaatacggacgattatgaaacatgacggcacaaagaccgaaaaactggagaagctcatggtgaggataggtgtcttttccgttctctacaccgtccccgctactatcgtattagcttgctacttttacgaacaagcattcagagaacactgggaaagaacatggctgctgcagacatgcaagtcctatgccgttccctgccccccaggacacttccctcccatgtccccagactttacagtttttatgattaagtacctcatgacaatgattgttggaattaccacaggattttggatttggagcggaaagaccttgcaatcatggcgtcgattctaccaccggctgagccattcatctaaaggggagacagcggtctag

SEQ ID NO: 24259 - DNA, 654 bp, synthetic construct
  misc_feature 1..654: note = Description of Artificial Sequence: Synthetic coding sequence
  source 1..654: mol_type = other DNA
atgagcttccggggcggcggccggggcggcttcaaccggggcggcggtggcgggggctttaatagaggtgggagcagcaaccatttcagaggggggggtgggggcggaggtggcgggaatttccgcggtggcggccggggggggtttgggagaggtggagggcggggcggattcaacaagggccaggaccagggaccgcctgaaagggttgtactgttgggtgagtttctgcatccatgtgaagatgacattgtatgcaaatgtacaaccgacgaaaacaaagtgccgtatttcaatgctcctgtgtatctggaaaacaaggaacagatagggaaagtggatgaaatcttcggccagctgcgcgacttttacttctccgtcaaattaagtgagaacatgaaagcctccagttttaaaaagttacagaagttttatatagatccctacaagctgttgccactgcaacggttccttccacggcctcccggcgagaaaggaccacctcgcggcgggggtcgaggggggcgcggcggtgggcgcgggggtggcggcagagggggcggccggggtggcggctttcgcggcggaaggggaggcgggggcggaggctttagggggggacggggcggtggttttcgcggccggggacactag

SEQ ID NO: 24260 - DNA, 1533 bp, synthetic construct
  misc_feature 1..1533: note = Description of Artificial Sequence: Synthetic coding sequence
  source 1..1533: mol_type = other DNA
atgtaccgggccctgcggctgctggcccggagccggcccctggtgagggcccctgccgcagccctggcctcagcccctgggctgggtggcgccgccgtcccctctttttggcctccaaacgcagcgaggatggcatctcaaaacagcttccgcattgagtatgatacattcggggaattgaaagtgcccaatgataagtactacggggcgcagacggtgcgcagcacaatgaactttaagatcggcggggtcacagaacgcatgccaacacccgtgatcaaagcctttggaatcttgaaaagggccgctgccgaggtgaatcaagattacggacttgatccaaagatagcaaatgccataatgaaagctgccgatgaagtagccgaaggtaagctgaatgatcatttccccctcgttgtctggcaaactggatccggaacccaaactaacatgaacgttaatgaggtgatcagcaatagagccatcgaaatgttaggcggagaacttgggtcaaaaatccccgtgcatccaaacgatcacgtgaacaagtcccagagctctaacgacacatttcctaccgctatgcatatcgctgccgctattgaggtgcacgaagtgctgctccctgggttgcaaaagcttcacgacgctttggatgcaaaaagcaaggaattcgcccagatcataaaaatcggcaggacccatacacaggatgcagtccccctgaccctcgggcaagagtttagcggatatgttcagcaggtcaagtatgcaatgactcgcatcaaggcagccatgccaaggatctatgagttggcagctggcggaaccgccgttggcactggattgaacactaggatcggctttgccgagaaggtggccgcaaaggtcgccgcattaacaggactgcctttcgtgacagcacccaacaaattcgaagctctggctgctcatgacgccttagtcgaactgtctggcgcaatgaataccaccgcctgttctcttatgaagatcgcaaatgacatcaggtttctcggcagcggccccagatctggactgggcgagctcattctccctgagaacgaacctggcagtagtatcatgcctggcaaggttaaccccacacagtgtgaggcaatgaccatggttgcggcccaagtgatgggaaatcacgtggccgttaccgttggtgggagcaacggtcacttcgaactgaacgttttcaagccaatgatgatcaagaacgttctccactcggccagacttctcggggacgcaagcgtgtctttcaccgagaattgcgtggtgggcattcaagccaatacggagaggattaataaactgatgaacgagtcacttatgctggtgacagctcttaacccgcatatcggttacgacaaagccgccaagattgccaagaccgcacataagaatggatctacgctcaaagagactgctattgaactcggctacttgaccgccgaacagttcgatgaatgggtgaaaccaaaggatatgctgggaccaaagtag

SEQ ID NO: 24261 - DNA, 537 bp, synthetic construct
  misc_feature 1..537: note = Description of Artificial Sequence: Synthetic coding sequence
  source 1..537: mol_type = other DNA
atgagccccagcggccggctgtgcctgctgaccatcgtgggcctgattctccctaccagaggacagacactcaaagataccactagttcctcctcagcagattcgacaataatggatattcaggtcccgacgcgtgctcccgacgcggtttatacagagctacagccgacctcccctacccctacgtggccggcagacgagaccccccaaccgcagacacaaacccagcaactcgaaggtaccgatggtcccctcgtgactgaccccgagacacataagtcgacgaaggccgcacaccccaccgatgacacaactacactgtccgaacggccttcaccttccaccgacgtgcagacagatcctcagacccttaagccgtccggcttccacgaggatgaccctttcttttacgatgagcatacacttcgaaagaggggcctccttgtcgccgccgtgctgttcattacgggaatcataatcctcactagtgggaagtgccgacagctttctcgcctgtgccgtaaccgatgcaggtag

SEQ ID NO: 24262 - DNA, 324 bp, synthetic construct
  misc_feature 1..324: note = Description of Artificial Sequence: Synthetic coding sequence
  source 1..324: mol_type = other DNA
atgcagaccctgagcaacatcccctgcttctgcctgcacggcagcttactgccgtcgaccgatctggcgaccctcagcgctcatccaactgatgacacgactactctcagcgaacggccttccccaagcacagatgtacagacagacccacagactcttaagccttctggcttccacgaagacgatccattcttctatgatgaacacactctgaggaaaagaggcctcctcgttgcagcggtgctttttattacgggtattataatcctgacctcaggaaaatgcaggcagctgtcccgcttgtgcagaaacagatgccgatag

SEQ ID NO: 24263 - DNA, 291 bp, synthetic construct
  misc_feature 1..291: note = Description of Artificial Sequence: Synthetic coding sequence
  source 1..291: mol_type = other DNA
atgagccccagcggccggctgtgcctgctgaccatcgtgggcctgatcctgccaactcgaggacagactctgaaagatacaacctctagttcctccgctgactccacaattatggacattcaggtccctacccgagcacccgacgccgtgtacactgagctccaaccaactagccccacccctacctggcctgccgacggcgcctacattaccgcttacggtgtcacgcacttcctgatgaacatgctggccgtgagcagcttcttttgcttgcatacagccccacagtag

SEQ ID NO: 24264 - DNA, 537 bp, synthetic construct
  misc_feature 1..537: note = Description of Artificial Sequence: Synthetic coding sequence
  source 1..537: mol_type = other DNA
atgagccccagcggccggctgtgcctgctgaccatcgtgggcctgatccttccaactcgaggacagactctgaaagacacaacctcctcgagttctgccgatagcacaataatggatatccaggttcccacaagggctcccgacgcagtgtacaccgaactacagccgacctcacccacccctacctggccagcggatgaaaccccgcagccccagactcaaacccagcagcttgaggggactgacggaccgttagttaccgatcccgaaacacataagagtacaaaagctgctcatccaaccgatgatacaaccacactgagcgagcggccatccccatctacagacgtgcagacagacccccaaacgcttaagccatcgggtttccacgaagacgaccctttcttttacgatgaacatacactgcgaaagcgggggttgctggtggctgctgtgctgtttattactggcatcattatcctgacatccggtaaatgtcggcaactgtctcgcctttgtcgcaatcggtgccggtag

SEQ ID NO: 24265 - DNA, 537 bp, synthetic construct
  misc_feature 1..537: note = Description of Artificial Sequence: Synthetic coding sequence
  source 1..537: mol_type = other DNA
atgagccccagcggccggctgtgcctgctgaccatcgtgggcctgatccttccaacaagaggccagacactcaaggacactacctcatcttcctcagcagattctaccatcatggatattcaggtgccaaccagagcccccgacgctgtgtacacagagctccagcctacatcaccgactcctacatggcccgctgacgaaacaccacaaccgcagactcaaacgcagcagcttgaaggaactgacggccccctcgtgaccgatcccgagactcacaagtctaccaaagcagcccaccctacagacgacacaacgaccctgagtgagcgcccctcaccaagcaccgatgtgcagacagacccgcagactctaaaaccttccgggttccatgaggacgacccgttcttctacgatgagcacacattgaggaaacgtggcctcttggtagccgcagttttgttcatcacaggcattattattctcacttcaggcaaatgccgccagttgtccaggctgtgccgtaataggtgcaggtag

SEQ ID NO: 24266 - DNA, 537 bp, synthetic construct
  misc_feature 1..537: note = Description of Artificial Sequence: Synthetic coding sequence
  source 1..537: mol_type = other DNA
atgagccccagcggccggctgtgcctgctgaccatcgtgggcctgatcctgcctacacggggccaaaccctcaaagacactacctcatcctcctccgccgacagtacaataatggatatccaggtcccaactagagcccccgacgccgtttatactgagctgcagccaactagccctacgccgacttggcccgccgatgagacaccgcaaccgcagacacaaacccaacagctggaaggtaccgatgggcccctggttacagatcccgagactcacaagtccactaaagccgcccatccaactgatgacaccaccaccctgtccgagcgaccttctccaagcaccgacgtgcaaaccgatcctcagacattgaagcccagtgggtttcatgaagatgacccctttttctacgatgagcacacgttgagaaagaggggcttgttggtagccgccgtgctgttcatcacaggaatcatcattctgacaagcgggaagtgtcggcagttgtcgagattatgccgcaacaggtgccgctag

SEQ ID NO: 24267 - DNA, 585 bp, synthetic construct
  misc_feature 1..585: note = Description of Artificial Sequence: Synthetic coding sequence
  source 1..585: mol_type = other DNA
atgagccccagcggccggctgtgcctgctgaccatcgtgggcctgatactgccaacacgaggccagaccctgaaagacaccacctcaagctcatccgccgactctaccatcatggacatccaggtgcctacccgggccccagacgcggtctacaccgaactgcagccaacgagccccacccccacgtggccggccgacgagactcctcagccacagactcaaacccagcaactggaaggcaccgacggtccactggtgacagacccagagacgcacaagagtactaaggccgctcacccgacagatgataccactaccctctccgagcggccctccccctctactgatgtgcaaaccgatcctcaaacattaaagccttctggatttcatgaggacgacccatttttctacgacgagcatacactgcgtaagcggggtctgctggtcgctgccgtcctcttcatcacgggaattatcatactgaccagtgaaaactggggctgggtgggtcgaacaccccgcccaggggggggactcatgacagaaggatgggtgctaaaggggccatgggccatcctgttttag

SEQ ID NO: 24268 - DNA, 1518 bp, synthetic construct
  misc_feature 1..1518: note = Description of Artificial Sequence: Synthetic coding sequence
  source 1..1518: mol_type = other DNA
atgagcaacatctgccagcggctgtgggagtacctggagccctaccttccctgtctttcaacagaggcagataagtccacggtgatagaaaaccccggagcactgtgctccccccagtcccaaagacacggccactattttgtggcattattcgattatcaggctagaactgccgaagacctgagcttccgggccggggataaattgcaggtattggacacgctccatgaaggctggtggtttgcacgacacctggaaaaacgcagggacgggtcgtcacagcagctccaaggttatattccttcgaactacgtcgctgaggaccggtcgctgcaagctgagccatggttctttggagccatcggaaggtccgacgctgaaaagcagttactgtattcagagaacaagactggaagcttcctgattagggagagtgagtctcagaagggagagttctccctgtccgtgctggacggggcggtcgtaaagcactatcgaatcaagcggctggacgagggcggctttttcctgacacgtagacgtattttttctactctgaacgaatttgtgagccactacactaagacgagtgatggcctgtgtgtaaaactcggaaagccatgtcttaaaatccaggtgccagccccatttgacttgagttacaagaccgtggatcagtgggagattgacagaaattcaatccaactactcaaaaggctgggatctggtcagtttggggaggtgtgggagggcctgtggaataacaccactccagtggcagtgaaaacccttaaacctggatccatggatccaaacgatttcctgcgggaagcccaaattatgaagaatctccgccaccccaagctgatacagctgtatgccgtctgcacccttgaggatccaatctatattatcacagagctcatgagacacggcagtctacaggagtaccttcagaacgatacaggcagcaagatccatctcacacaacaggttgacatggctgcacaggtagctagcggtatggcctatctcgaatcccgcaactatatccacagggacctggcagccaggaacgttttagttggcgagcacaacatatataaggtggctgattttgggctggcaagagtgttcaaggttgataacgaagacatctatgagagcaggcacgagatcaagctacctgtgaaatggacagcacctgaagccatacgctcgaacaaattttcgatcaaatctgatgtatggagctttggcattctgttgtatgagattattacttatggaaaaatgccctattctggcatgaccggggcacaagttattcagatgcttgcacagaactacaggctcccgcagccctccaattgcccacagcagttttacaacattatgctggaatgttggaacgctgaacccaaggaacgcccaacatttgagaccctcaggtggaaactggaagactactttgagaccgattcttcatactctgatgccaataacttcatacggtag

SEQ ID NO: 24269 - DNA, 1092 bp, synthetic construct
  misc_feature 1..1092: note = Description of Artificial Sequence: Synthetic coding sequence
  source 1..1092: mol_type = other DNA
atggacagcaccagcctgctgcccaacccctggatccgggtgctggacggtgccgtggtgaaacattatcgcatcaaaaggttagacgaaggaggcttcttcctgacaagaaggcggatcttttcaacactgaatgaatttgtcagccactacactaagaccagcgacggtctctgtgtgaagttggggaagccctgtcttaagattcaagtgcccgctccattcgatctaagctataagaccgtggaccagtgggagatcgatagaaacagcatccagctccttaagcggctgggcagcggacagtttggggaagtctgggagggcctgtggaataacaccactcccgtcgccgtgaagaccctgaagcctgggtccatggacccgaatgacttcttgcgggaggctcagattatgaagaatctcaggcaccccaagcttatacagctatacgctgtttgcacgctcgaagaccctatttatattattacagagctcatgcgtcacggatccctgcaggaatatctgcagaatgatacgggcagcaaaatacacctgacccagcaagtggacatggccgctcaggttgcttccggcatggcctacttggagtctagaaactacattcaccgggacctggccgcccgcaacgtactcgttggtgaacataacatctataaggtcgccgattttggcctcgcccgtgtgtttaaggtggataacgaggatatctacgagtctaggcacgaaatcaagctgcccgtaaaatggactgcacccgaagctatccgctccaataagttcagcatcaagtccgatgtgtggagcttcggaattctgctgtacgaaattatcacctatgggaagatgccatactcaggcatgacaggtgcccaagtgattcaaatgttagcccaaaattatagactcccgcagccctccaactgtcctcagcagttctataatataatgctggagtgctggaacgccgaacctaaggagaggcctactttcgaaaccctgcgttggaagttagaagactacttcgagacagactcttcttactctgacgcaaataattttattcgatag

SEQ ID NO: 24270 - DNA, 1128 bp, synthetic construct
  misc_feature 1..1128: note = Description of Artificial Sequence: Synthetic coding sequence
  source 1..1128: mol_type = other DNA
atgcggagcgtggcccccagcggccccaagatgggcaacatcaccgccgataattccagcatgagctgtaccatcgaccacactatccaccagacgttggccccggtagtgtatgtgacagtgctcgttgttggttttccagctaattgtctttcactttacttcgggtatctgcagatcaaagcaagaaatgagctgggcgtgtatctttgcaatttaaccgtggccgaccttttttacatctgttcgctgccattctggcttcaatatgttctccagcacgataactggtctcacggagatctcagttgccaggtgtgtggtatcctattgtacgaaaacatctacatttccgtcggcttcctgtgttgtatatctgttgacagataccttgccgtcgcacacccattccgattccaccaatttcgcacccttaaggctgcggtcggggtgtctgttgtaatctgggcaaaggagctgctgaccagcatctattttctgatgcatgaagaggtcattgaagacgaaaaccagcatagggtctgtttcgaacattaccccattcaagcctggcagcgtgcaatcaactactatcggttcctggtgggttttcttttccctatttgcctactcctcgcctcataccaggggatcctcagagcagtcagacggtctcacgggacacagaaatctcgtaaggatcagatccagcgcctcgtgctttcaacagttgtcattttcctcgcttgttttctgccctaccatgtgctcctgctggtccgaagtgtttgggaagccagttgcgattttgcaaaaggggtttttaacgcttaccacttcagtttattgttaactagctttaactgcgtcgctgaccccgttttgtactgttttgtcagcgaaaccacacatagggatctcgctagactgcgcggagcctgcttagcctttctgacatgttctaggacagggcgggcccgggaagcatatcccctgggtgcccccgaagcctccgggaagtccggtgcgcagggcgaggagccagaattattgacaaaactgcacccagctttccagactccaaactcgcccggatccggcggttttccaactggaaggctggcttag

SEQ ID NO: 24271 - DNA, 1017 bp, synthetic construct
  misc_feature 1..1017: note = Description of Artificial Sequence: Synthetic coding sequence
  source 1..1017: mol_type = other DNA
atgggcaacatcaccgccgacaacagcagcatgagctgcaccatcgatcacaccatacatcagactctggccccagtggtgtatgtgaccgtgctggtcgttgggttcccagcaaactgtctgtcattatactttggctacctacaaattaaagctagaaatgaactaggagtatatctgtgtaacctaacagtcgcagatcttttttatatctgttctttgcccttctggctccaatatgtgctgcaacatgataactggagccatggagatttgtcctgtcaagtctgcggcatactgttgtacgagaatatctatatcagtgtgggttttctctgctgcatctctgttgatcggtatctcgccgttgctcatcccttccgctttcatcagtttcgcaccctgaaagcagcagtcggtgtgagtgttgtgatatgggccaaagaacttttaaccagcatctacttccttatgcacgaggaggtcattgaagacgagaaccaacacagagtctgcttcgaacattaccctatccaagcttggcagcgcgccataaactattacaggttcctcgtaggctttctgtttcccatctgcctactcttggcgtcctaccaggggattcttagagccgttcggcgctcccatggcacccagaaaagtagaaaagaccagattcaaagactggtgttatccacagtggtgatttttctggcatgctttcttccctatcacgtcctgctgctcgtccggtccgtttgggaggccagctgtgactttgccaagggggtctttaacgcgtaccatttttcgctcctgctaacttcattcaactgcgtggccgatccagtgctttattgcttcgtttcagaaacaactcacagagatcttgccaggctgcgcggcgcttgtttggccttcctgacatgctcaaggacaggccgggcccgggaagcctacccattgggcgctccggaggcctccgggaagagtggggcacagggcgaggagccttag

SEQ ID NO: 24272 - DNA, 1098 bp, synthetic construct
  misc_feature 1..1098: note = Description of Artificial Sequence: Synthetic coding sequence
  source 1..1098: mol_type = other DNA
atgggcaacatcaccgccgacaacagcagcatgagctgcaccatcgaccataccattcatcagacattggcacctgttgtctacgtaaccgtgctcgtggtggggtttcctgccaactgcctctcactatatttcgggtacctgcagatcaaggctaggaacgaactgggggtatacttgtgtaacctcacagtggcagatcttttttacatctgcagtttgcccttctggctccagtatgtgttgcagcacgacaactggtctcacggtgatctgagctgccaggtgtgtgggattctgctttatgagaatatttacattagtgtcggattcctgtgttgcattagcgtggatagatacctagccgttgcccacccgttccgcttccatcaattccgtaccctgaaagcagctgtcggggtctcagttgtcatttgggccaaggaactgctaactagcatttattttctcatgcacgaagaagtgatagaagacgagaatcagcaccgagtttgtttcgaacactatccgatacaggcttggcagagagctataaattactaccgatttctggttgggttcctgttccccatatgtcttctgcttgcgagctatcaggggatattgcgtgctgttcgaaggagccacgggacccagaaaagccggaaggatcagatacaaaggcttgtgctcagtaccgtggttatcttcttggcttgtttcctgccataccacgtcctgctgctagtcagaagtgtttgggaagcgagctgcgatttcgccaaaggtgttttcaatgcataccatttcagcctgctccttacttcattcaattgtgtagcagaccccgtgttgtattgcttcgtttccgagaccacacaccgcgacttagctcggctgcgtggggcttgcctggccttcctgacgtgctcacgtaccggacgcgcacgggaagcctatcccttaggagccccggaagccagcggcaaaagcggtgctcaaggagaagagccggagctgctgacaaaactgcatcctgcatttcagacacctaatagcccagggtccggcggtttccccaccggtcgtctggcgtag

SEQ ID NO: 24273 - DNA, 1098 bp, synthetic construct
  misc_feature 1..1098: note = Description of Artificial Sequence: Synthetic coding sequence
  source 1..1098: mol_type = other DNA
atgggcaacatcaccgccgacaacagcagcatgagctgcaccatcgatcacaccattcaccaaacactggcgcccgtggtatacgttactgtgttggtggtaggcttcccagcaaattgcctgtccctctactttggctatctccagataaaggccaggaatgagttaggcgtgtatctgtgtaatctgaccgtggctgaccttttttacatatgcagcttacctttctggctacagtacgtgctccaacatgataactggtctcatggagatctttcctgtcaggtgtgtggaatccttttatacgagaatatctatattagtgtaggattcctttgctgcataagtgttgatagatatttagccgtggcgcatccgttcagattccatcaatttagaacactgaaagccgccgtgggggtgtctgtcgtgatttgggctaaagagctgctcacttccatttattttctcatgcacgaagaggttatagaagatgagaaccagcatcgggtgtgctttgaacattatccgatacaagcatggcagcgggcaataaactattacagatttctggtgggctttctgttccccatctgtttactgctagcttcttatcagggcatattgcgcgctgtgcggaggtcccacggaacccaaaagtccaggaaagaccagatccagagactggtcctgtctaccgtcgttatcttcctggcgtgtttcctaccctaccacgttttgttacttgttagaagtgtgtgggaggctagttgtgattttgctaagggagtgtttaacgcatatcatttcagcctcttattgacctcatttaattgtgttgctgaccccgtgctgtactgcttcgtctcagagactacgcaccgggatctggccagacttcggggtgcctgtttagcttttcttacctgctcccggacaggaagagccagggaggcttaccctcttggtgccccagaggccagcggcaaaagtggtgcccaaggcgaagagccagagctcctgaccaagctgcacccagcatttcagacaccaaattcaccggggagcggcggcttccctaccgggcggcttgcttag

SEQ ID NO: 24274 - DNA, 2100 bp, synthetic construct
  misc_feature 1..2100: note = Description of Artificial Sequence: Synthetic coding sequence
  source 1..2100: mol_type = other DNA
atgaccctgcggcggaagtgcaacgaggacgacgaggtgttcttcgggccttttggacacaaagagaggtgtatagctgccagcttagagctgaataatcccgtgccggaacagccaccactgcctacaagcgaaagccctttcgcctggagccctcttgctggcgagaaattcgtggaagtgtataaagaagcccacctgctcgccctgcacattgagagtagctctagaaatcaggccgcacaggctgccaagccagaagatccgcgcagccagggagtggagcggtttatccaggagagtaaactcaagatcaatcttttcgagaaggaaaaggaaatgaagaagtcaccaacctcgcttaaaagggagacctactacctgagcgactcccccctgctgggaccacctgtaggggaacccaggctgctggcatctagtccagcccttccctcatccggagcccaggcgcgactgacacgggcacctggccccccacattcagcgcacgccctcccgagggagtcgtgcaccgcacacgctgcatcccaggcagcaactcagcgcaagccaggcaccaagctgctgctgcccagggctgcatcagtgagaggccgaagcatccctggggcagcagaaaagcccaagaaggagatccccgcaagtccatcgcgcaccaaaattccagcagaaaaggagagccacagggatgtcctgccagacaaacctgctccaggcgccgtaaatgtgccagccgcaggaagccacctagggcaggggaaaagggccattccagtacctaacaaactagggctgaagaagactttgcttaaagctcccgggagcacaagtaatctcgccaggaagtcttcctccggtccggtgtggtccggggcctcctccgcttgcactagcccagctgtgggcaaggctaagagttccgagttcgcttctattccggctaatagttcccggcctctttccaacatctccaagtccgggcgcatgggccccgcaatgctgcggcctgccctgccggctgggcctgtaggagcatcaagctggcaggctaagcgggtcgatgtgagcgagctggccgctgaacaactgaccgccccaccatcagccagcccaacccagcctcagactccagagggcggggggcagtggctgaatagttcatgcgcatggtctgagagttcacagctcaataagactaggtccatcagaaggagggactcatgcctgaactctaaaacgaaggttatgcccactcctactaatcaattcaagatccctaaattcagtattggggactccccagactcatctacaccaaagctatctcgggcccagcggcctcagtcttgcaccagtgttggccgggtgacagttcactctactcctgtgaggcgcagttcaggcccggccccccagagtctgctctcagcctggagagtctcagcgctcccaaccccggccagccgtcgatgttccgggctgccacctatgacacctaagacaatgccgcgcgccgtcggctctccgctgtgtgtcccagcaaggaggcggtcatcagaaccccggaagaacagtgccatgcggactgaacctacgcgtgagtcgaatcgaaagaccgactctagattggtcgatgtgtcaccggaccgcggcagccctccatctcgggtgccacaagccctgaactttagtcccgaagagagcgacagcacctttagcaagtcaacggccactgaagtggcacgcgaagaagcaaagcctggtggagatgcggcaccaagcgaggccctgctcgtggatataaaactggagccactggcagtgactccagacgccgcttctcagcctctgatcgaccttcctttaatagacttttgtgacacaccagaagcccatgtggctgtcggctctgagtctcgccccctgatcgacctaatgacgaacacaccagatatgaataagaatgtggccaaaccatcacccgtcgttggtcagctgatcgatttgagcagccctttaatccagctgtcccccgaagccgacaaggaaaacgtcgatagccccctgcttaaattttag

SEQ ID NO: 24275 - DNA, 2220 bp, synthetic construct
  misc_feature 1..2220: note = Description of Artificial Sequence: Synthetic coding sequence
  source 1..2220: mol_type = other DNA
atggagggcggcggcggccgggacgagcccagcgcctgccgggccggggacgttaatatggatgatccaaaaaaggaggacatactgcttttggccgacgagaaatttgacttcgatctgagtctgtcctcgtcatcagccaacgaagatgacgaggtgttcttcggcccattcggccataaggagcggtgtattgccgcaagcttggagttgaacaatcctgtccctgagcagcctcctctgcctacgtcagagagccctttcgcatggtcccctttggcaggcgagaagttcgttgaagtgtataaggaggcacacctcctggcccttcatatagagtccagctcccggaatcaggcagcgcaagccgctaaacctgaagatcctcgtagccagggcgtagagcgcttcatccaagaaagtaagctgaagatcaacctgtttgagaaggagaaagagatgaagaaaagccccacttcactgaaacgggaaacatactacctctcagactcccctcttctgggacccccggtgggagagcctaggcttctggcctcctcacctgccctcccatcttcaggcgctcaggcccggctgaccagagctcctgggcccccgcattccgctcacgccctgcctcgcgaatcctgcacggctcacgcagcctcccaggcggccacgcaacgcaaacccggcactaaactgctcctgccccgcgcagcaagcgtccggggccgttcaatcccgggagccgcggaaaagcctaagaaggaaatccctgcctctccaagtcgtactaaaatcccagccgaaaaagagtctcaccgtgacgtcctgcccgataaaccggcccccggcgcagtgaatgttcctgccgcaggtagccacctcggacagggaaaaagagctataccagtgcccaacaaactgggtcttaaaaaaacactcctgaaagctcccggctctaccagcaatctggctcggaaaagttcctcgggccctgtctggtccggagcttccagcgcctgtacttctcccgctgtggggaaagccaaaagcagcgaatttgctagcattccagcaaactcgagccgacctctgtccaatatctccaagagcggaagaatggggccagccatgctgagacccgccttaccagccgggccagttggcgcgagtagctggcaagccaagagagtagatgtctctgagttggctgccgagcagttgacagcccccccatctgccagccccactcagccccagacccctgagggaggcggccagtggttaaactcttcatgtgcttggtcggaatcctcccagcttaacaagaccaggtccatcagacggagggactcctgtctgaattctaaaacaaaggtgatgcctacgccgacaaaccagtttaagatccccaaattttctatcggcgattcccccgattctagtacccctaagctatccagagctcagcggccacagtcctgcacttctgtgggtagagtcactgtccatagtacgcctgtaaggcggtcgtctggtccggccccccagagcttgctgtccgcctggcgagtgtcagctctccccacgcccgcaagccgacggtgctcaggattgcctcccatgacaccaaagacaatgccccgggctgttgggagcccattgtgcgtgccagctcggagacggtcaagcgagccacggaagaattcagcaatgcgcaccgaaccaacccgtgaatccaacaggaagactgattcccgcctggtggatgtgtccccagaccgggggtcaccaccgtcaagggtgccccaggctctgaacttcagccccgaggagtcagattccacattcagtaagagcaccgctacagaagtggcacgggaggaagctaagcctggcggcgacgctgccccaagtgaggcccttctggtggatatcaagcttgagccactcgccgtgacacccgacgcggcctcgcagcccttgattgacctgcccttgatcgacttttgcgacacccctgaagcccacgtagcagtaggaagcgaatcacgccctctgatcgacctgatgaccaatactcctgacatgaataaaaacgttgcgaagccctcccccgtggtgggccagcttatcgatctctcctctccacttattcagctctctcctgaggccgacaaggagaacgtagactccccgctgctgaagttctag

SEQ ID NO: 24276 - DNA, 1149 bp, synthetic construct
  misc_feature 1..1149: note = Description of Artificial Sequence: Synthetic coding sequence
  source 1..1149: mol_type = other DNA
atgggcgactggagcgccctgggcaagctgctggacaaggtgcaggcgtacagcacagccggtggaaaagtgtggctttccgtgctgtttattttccgcatcctattacttggcaccgccgtggagtccgcctggggggacgagcagtccgccttcagatgtaacacacagcaaccaggttgcgagaatgtgtgttatgataagagtttccccatcagtcatgtgaggttctgggtcctccagataatatttgtgagtgtgccaaccctgctgtacctagctcacgtgttctatgtcatgcggaaggaggagaagcttaacaagaaggaggaagagctgaaagttgcacagactgatggagttaacgttgatatgcatctgaaacagattgaaataaagaaattcaagtatggaatcgaggaacatgggaaggtcaagatgcgtggagggcttttgcggacttacataatttcgatactcttcaagtctatatttgaggttgcttttctactgattcagtggtatatctatggtttctccctgagcgctgtctacacctgcaaacgcgatccttgtccacaccaggtggactgctttttatctcgccctaccgaaaagacaatctttatcatcttcatgcttgtggtcagtctggtttccttggctttgaatataatcgaactcttctacgtgttctttaagggagtcaaggaccgggtgaagggcaagtctgacccataccatgcaacatctggggccctctctccagccaaagattgtggcagtcagaaatacgcttatttcaatggctgtagctcgccaaccgctcccctctctcccatgtcccccccagggtataagttggttaccggggatcgcaacaacagtagttgccggaactataacaaacaggcgtctgagcaaaactgggcaaactacagcgccgaacaaaatagaatgggccaagccggttcaactatctccaattctcatgcccagcctttcgatttcccagatgataaccagaacagcaaaaagttggcggccggacacgaacttcaacccctggccatcgtagatcagagaccatctagcagagcctctagccgggcatctagtagaccaagacctgacgacctggaaatctag

SEQ ID NO: 24277 - DNA, 1101 bp, synthetic construct
  misc_feature 1..1101: note = Description of Artificial Sequence: Synthetic coding sequence
  source 1..1101: mol_type = other DNA
atgggcgactggagcgccctgggcaagctgctggacaaggtgcaggcatactctacagctggcggcaaagtgtggctgtccgcgtggggtgatgaacaaagcgctttccgctgtaacacacaacagcctggatgtgaaaatgtgtgttacgacaagagctttccgataagccacgtgcgcttctgggtcttgcagataatttttgtgtcagtacctaccctgttatatctcgcacatgtgttttatgtaatgcgaaaagaggagaaattaaacaaaaaggaggaagaactcaaggttgcacagaccgacggggtgaacgtggacatgcaccttaagcaaattgagataaagaagttcaagtacggcatcgaggaacatggaaaggtgaagatgcgcggcgggctactgcgaacctatatcatctccattttgtttaagtctatctttgaggtggccttcctgttgattcagtggtacatttacgggttctcgctcagtgccgtgtatacttgcaagcgagatccttgcccgcaccaggtggactgctttttatcgcgcccgacggagaaaactatttttatcatttttatgcttgtggtgtcgctcgtttctctagctcttaacatcattgaactcttttacgtcttctttaaaggagtgaaagatagggtcaaggggaagtccgacccgtaccacgccacctcaggcgccctgtctcctgctaaggattgtggaagtcagaagtatgcttatttcaacggttgctcaagccctacggccccattgtccccaatgtcaccacccggttataagttagtgacaggtgataggaataatagcagctgtcggaattacaataaacaggcctccgaacagaattgggccaattattcagctgagcagaataggatgggacaagctggttctacgatctccaactcgcacgcacaaccatttgatttccccgacgacaatcagaatagtaaaaagctagctgcaggacacgagttgcagcccctggccatagtcgatcaacgaccgtcgagccgagcctccagtagagccagcagccgacctcgtcctgacgacctcgaaatttag

SEQ ID NO: 24278 - DNA, 2673 bp, synthetic construct
  misc_feature 1..2673: note = Description of Artificial Sequence: Synthetic coding sequence
  source 1..2673: mol_type = other DNA
atggacagcaacaccgcccccctgggccccagctgcccccagccccctcccgctcctcagcctcaggctagatcccgtctaaacgcgacggcttccctagagcaggagagaagtgaaagaccccgagctccaggtccgcaggccggccctggccccggtgtgcgggacgcggccgcccctgcagagccacaggctcaacatacccgttctagggagcgtgccgacgggaccgggcctactaaaggagacatggagattccatttgaggaggtgctggaacgcgccaaggctggcgatcccaaagcccagaccgaagttgggaaacattatctccagctagctggggataccgacgaggagctgaatagctgcacagccgtggactggctggtgctggctgcaaaacaaggaaggcgcgaggccgttaagttgctccggaggtgtctggccgacagaaggggtataacaagtgagaatgagcgggaggttcgtcagttatcgtcagaaacggacctggagcgggcggtgcggaaagccgccctcgtgatgtactggaaattgaacccaaagaagaaaaagcaggtggctgttgcggagttactcgaaaacgttggacaagtgaacgaacacgacggtggcgcgcagcctgggccagtcccgaagtctctgcaaaaacagagacgcatgctggaacgcctggtgagcagtgaatcaaagaattacatcgccctagatgattttgttgagatcacaaagaaatatgcgaaaggggtcattccctctagtcttttcctccaagatgatgaggatgacgatgaactcgccgggaagtctccggaggatcttccacttcggcttaaagtcgtgaaatatcctctccatgctattatggagattaaggagtacttgatagacatggcctcgcgcgctggcatgcactggttatctacgatcattccaacccaccatatcaacgctttgattttttttttcattgtttcaaatttaacaatcgacttcttcgcattctttatccctctcgtaatcttttatctgtcctttatatctatggtgatctgtacattgaaggtgttccaagacagtaaggcctgggagaacttcagaactctgaccgacctgcttctccggtttgagccgaacctggacgttgaacaggcagaagttaatttcggctggaaccacttggagccgtatgcccatttcttactgagcgtcttcttcgtgatcttttcttttccgatcgcttccaaggactgcattccttgcagcgagctagcggtgataacaggctttttcacagtcacatcatatttgtccctgtccacccacgcagagccatacactaggcgggcgctggcaacggaagtcactgcaggtttgctgagcctgctcccatcaatgccccttaattggccctacctgaaggtattaggacaaacgtttatcactgtgccagtggggcatctggtggtcctcaacgtttctgtgccatgtctgctgtatgtatacctgttatacctctttttcaggatggctcagctgaggaattttaaggggacatactgctatctggttccctaccttgtgtgctttatgtggtgcgagctgagtgtcgttattctgctggaaagcaccgggctgggtcttctgagagcatccatcggatattttctttttcttttcgccttgccaattctggttgcggggttagccttggtcggagtgctccaatttgccagatggtttacatccctcgaactcaccaagatcgctgtgacagtggccgtgtgttcagtgccacttttgcttagatggtggacgaaggcctccttttccgtagtgggaatggtgaagtctttgacccgatccagtatggtgaagctgatcctagtctggctcaccgcaatcgtcctgttctgttggttctatgtctatagatctgaaggcatgaaggtatacaattcgaccctcacctggcagcagtacggcgcactttgcggtccaagggcgtggaaggaaaccaatatggcaaggacccagatcctctgctcccatctggagggccaccgggtgacatggacagggagattcaagtacgtgcgcgtaactgacattgacaatagtgccgagagcgccatcaatatgctgccattctttatcggcgattggatgcggtgcctctacggcgaagcatacccagcctgttccccaggaaacacatcaacagccgaggaggaactgtgtcgactgaagcttctagctaaacatccatgccacatcaaaaaatttgatagatataagtttgagatcacggtaggtatgccattctcttccggcgctgacggatcacgaagtagagaagaagacgacgtcactaaggatatagttctccgtgcatcctcagagtttaaaagtgtgttactgtccctccgtcagggcagcctgatcgaatttagcaccattcttgaaggacggctgggaagcaaatggccagtttttgaattaaaagccatttcctgcctgaattgcatggctcagctcagccctacccgacgtcacgtgaaaatagaacatgattggcgtagtaccgtccacggagcagtaaaattcgccttcgacttctttttctttccatttctgtcggcggcttag

SEQ ID NO: 24279 - DNA, 654 bp, synthetic construct
  misc_feature 1..654: note = Description of Artificial Sequence: Synthetic coding sequence
  source 1..654: mol_type = other DNA
atgagcttccggggcggcggccggggcggcttcaaccggggcggcggcggagggggattcaatagaggggggagtagcaatcattttcgagggggtggaggcgggggcgggggggggaacttccggggaggtgggcgggggggttttggccgggggggtggcaggggtggcttcaataaggggcaggaccaaggaccacctgaaagggtggtccttctgggagaatttctgcatccatgcgaggacgacattgtttgtaagtgcaccaccgacgagaacaaagtgccatacttcaatgcgccggtctaccttgagaataaggaacaaattgggaaggtggacgagattttcggacaactgcgcgacttctatttctcggtcaagctgagcgaaaacatgaaggcatcgagcttcaagaagcttcagaagttctatatcgacccttataagctcctgcctctgcaacgatttctcccacgacctcctggggaaaaaggcccaccccggggtggtggcagagggggccgcggtgggggccgcggcggcgggggacgcgggggcgggcggggcggaggcttcagaggaggcagaggtggcggaggtggcggattcagaggaggtaggggcggcggctttagaggccgcgggcattag

SEQ ID NO: 24280 - DNA, 1590 bp, synthetic construct
  misc_feature 1..1590: note = Description of Artificial Sequence: Synthetic coding sequence
  source 1..1590: mol_type = other DNA
atgggctgcgtgttctgcaagaagctggagcccgtggccaccgccaaggaagacgccggcttggaaggggacttccgatcttacggagccgcagaccactatggtccggacccaaccaaagcaagacctgcatcctcatttgctcacattcctaactattctaatttcagcagtcaggcaatcaatcccggatttctcgactcgggaacgatccggggtgttagcgggatcggcgtgaccctgttcattgccctctatgactatgaagctcggacggaggatgatctgacatttactaaaggggagaaatttcatatccttaacaataccgaaggtgactggtgggaggcacgctctttgagctctggtaaaacagggtgtatccctagtaattatgtggcacctgttgattctatacaggccgaagagtggtactttggaaagatcggccggaaagacgccgagcgtcagctcttatccccgggaaatccacagggggcctttctaataagggaaagtgaaaccacgaaaggtgcttattccttgtccatcagggactgggaccagactcggggcgaccacgttaagcactacaaaatcagaaaattggatatgggaggctactacattacaactagggtccagttcaatagcgtacaggaactggtgcagcactacatggaggtcaatgatgggctgtgcaatctgttgattgccccctgtacgattatgaagcctcagaccctgggacttgctaaggatgcttgggagatttcacggagttccataaccctcgagaggcgactcggcaccggctgttttggggacgtctggctcggcacatggaatggctcaacgaaagtggccgtcaagacactcaaaccaggcactatgtctccgaaggccttcttagaagaggcccaggtgatgaaactgctgcgtcacgacaaactagtccaattgtacgctgtcgtgagtgaagagcctatttatatcgtgactgaattcatgtgtcatgggtccctgcttgattttctgaagaaccccgagggccaggaccttagactaccacagttggtggacatggccgctcaagtcgcggaagggatggcttacatggaacgcatgaactatatccatagagaccttagagcagctaacatcctggtcggggagagactggcttgcaaaattgctgactttggccttgccaggttgataaaggacgacgagtataatccctgccaggggtctaagttccccattaaatggacagccccagaggcggccctgttcggccggtttacaataaagtcagatgtctggtcatttggcatcctcctgactgaactcatcactaaaggacgcattccctacccgggcatgaacaaaagagaggttctcgaacaggtcgagcaggggtaccacatgccatgtcctcccggatgtccggcatccctgtacgaagccatggagcagacttggaggctcgatccggaagagaggcccacatttgagtatctgcagtccttcctcgaggactactttacatccgcggagcctcaataccagcctggcgaccagacttag

SEQ ID NO: 24281 - DNA, 1590 bp, synthetic construct
  misc_feature 1..1590: note = Description of Artificial Sequence: Synthetic coding sequence
  source 1..1590: mol_type = other DNA
atgggctgcgtgttctgcaagaagctggagcccgtggccaccgccaaggaggacgccggcctcgagggcgactttcgcagctatggcgcggccgatcactacgggccggatccgacaaaggcacgaccagcttcttctttcgcccacattcccaattattctaatttttcttctcaggccatcaatcccggcttccttgattcaggcaccataagaggggtttcagggatcggcgtgacacttttcatagctctgtacgactacgaagcacggaccgaagatgacctaacattcacaaaaggagaaaaatttcacattcttaacaataccgagggcgactggtgggaggctaggtcactgagctccggcaagactgggtgtattccttccaactatgtggcacccgtggatagcattcaggctgaggaatggtattttggcaaaattggcagaaaggacgccgagaggcagctgctatctccagggaacccgcagggcgcctttctgattagagaatctgaaaccacaaaaggggcctacagtctgtccatacgcgactgggaccagacacgaggggatcatgttaagcattacaaaatccggaaattagacatgggcggttactacattacaacaagggtgcagttcaactccgtgcaggaactggtgcaacactacatggaagtcaatgatggactttgtaacctactgatcgctccatgcaccattatgaagccccagactctgggattagccaaggatgcatgggagatttcccggagttcaattacgctggaaaggagattggggacagggtgcttcggtgatgtttggcttgggacctggaatggcagtactaaggtggccgtgaagactctgaaaccgggcacaatgtctcctaaagcttttctggaggaggcgcaggttatgaagctgctgagacacgacaagctggtccaactgtacgccgttgtcagcgaagagcctatttacatcgttaccgagtttatgtgccacgggtcactgcttgacttccttaaaaaccccgagggacaggatttgcgcctgcctcagctggtcgacatggctgctcaagttgccgaggggatggcgtacatggaacggatgaactatattcacagggatcttcgagccgccaacattcttgttggagagcgtctggcttgtaagattgctgactttggcctggcccggctgatcaaagacgatgagtacaatccatgccagggttccaagttcccgattaaatggacagcccccgaagccgccttattcggcagatttacaatcaaatccgatgtttggtcttttggcatcctgctcactgaactgatcaccaaaggccgcattccatatcccggcatgaataagagggaagtgctcgagcaagttgaacagggctatcacatgccgtgcccgccagggtgccccgcaagtctatatgaagcaatggagcagacgtggagactggacccggaagaacgccctaccttcgaatatctccagtctttcctagaggactacttcacaagcgcagagccacagtaccagcctggtgaccagacctag

SEQ ID NO: 24282 - DNA, 1590 bp, synthetic construct
  misc_feature 1..1590: note = Description of Artificial Sequence: Synthetic coding sequence
  source 1..1590: mol_type = other DNA
atgggctgcgtgttctgcaagaagctggagcccgtggccaccgccaaggaagacgcaggtttagagggggacttcaggagctatggcgccgctgatcattacggccccgatccaaccaaggctagacccgcttccagctttgctcatatccccaactatagcaacttttcaagtcaggccattaatcccggcttcttggacagcggcaccattcgaggagtaagtggcattggcgtcaccctatttattgccctgtacgactacgaggctcgaaccgaggatgatctgacattcaccaaaggggaaaaattccacatccttaacaacaccgagggggactggtgggaagctcgctctctgtcctccgggaagacaggttgcatcccaagtaattacgtcgctcctgtggacagcatccaggctgaagagtggtacttcggaaagattgggagaaaggatgctgagcgacagctgcttagtccaggcaatcctcagggagccttccttatacgagagtctgagactactaaaggagcatattccctgtcaatcagagactgggaccagactagaggagaccatgtgaagcactataagatccgtaaactggatatgggtggctattacattaccacccgggtccaatttaactccgtccaagagctagtgcaacactatatggaggtaaatgatggcctttgtaacctgctaattgcgccctgtactattatgaagccgcagactttgggactggctaaggatgcctgggagatcagtcggtctagcatcacactcgagcgccgcctgggcaccggctgtttcggtgatgtgtggctgggaacttggaacgggtctaccaaggtggccgtcaaaactctcaagcctgggactatgagtcccaaggcctttctagaggaggcacaagtcatgaagcttttgcgacatgacaagttagtgcagctctatgccgtagtgagcgaggaacctatttatattgtcactgaattcatgtgccacggtagcctgctcgatttcctgaaaaacccagaaggacaggatctccgcctgccccagctagttgacatggcagcccaggtggctgagggcatggcctacatggaaaggatgaattacatccaccgggatctcagggctgccaatatacttgtcggcgaaaggctggcatgcaagattgccgactttggcctcgcaagactcattaaagatgatgagtataatccttgtcaggggagcaagttccccattaaatggaccgctcccgaagcagcccttttcggcaggtttacaattaagtcagacgtgtggtccttcgggatccttctgacagaactcataaccaaggggcgcatcccctacccgggcatgaacaagcgggaagttctggagcaggtggagcagggttaccacatgccgtgtccccctggctgtccagcatcactctacgaagccatggagcagacgtggagactcgaccccgaagaacgcccgacattcgagtatttgcagtcattccttgaagactactttactagtgcggaaccacagtatcagcccggcgaccagacatag

SEQ ID NO: 24283 - DNA, 1590 bp, synthetic construct
  misc_feature 1..1590: note = Description of Artificial Sequence: Synthetic coding sequence
  source 1..1590: mol_type = other DNA
atgggctgcgtgttctgcaagaagctggagcccgtggccaccgccaaggaggatgcgggactagaaggcgacttccgatcttatggcgcagcggaccactacggccctgatcctaccaaggctagaccagcatcttcttttgctcatatccccaattacagcaatttctcgtctcaggcgatcaatcccggctttttggatagtgggacaattcggggggtgtccggtattggggtgactctgttcatcgctctgtacgactatgaggcacggactgaagacgacttaaccttcacaaaaggggaaaagttccatatcctgaacaatacggagggcgactggtgggaagcacggagtctgtcatccgggaagactggatgcattccttcaaactatgtggcccccgtcgactctatccaggccgaggaatggtactttggtaagattggcagaaaggatgccgaacggcaacttcttagccctggcaatccacagggtgcttttttgatccgggaatctgagactaccaagggcgcctattccctgagtattagagactgggaccaaactagaggcgatcacgtgaaacattacaaaattaggaagctcgatatgggaggttactacatcacaacccgagttcagttcaacagcgtgcaggaattagtgcaacactatatggaagttaatgacggcttatgtaacctcctaatagcaccatgcaccattatgaagccgcaaaccttaggactagccaaagacgcctgggagatctcacggagtagcatcaccctggagaggcgtctcggaaccggctgcttcggggacgtttggctgggtacatggaatgggtccacgaaggtggccgtcaaaacccttaaacctggaactatgagccccaaggcattccttgaggaagcccaggtgatgaaactgctgagacacgataaactggtgcaattatacgcggtcgtcagtgaagagccgatttacattgtaactgaatttatgtgtcacggaagccttttagactttctgaaaaaccccgagggtcaggacttacgacttccacagttagtcgatatggcagcccaagtcgctgaagggatggcatatatggagcgtatgaactatatacaccgcgacctcagggccgccaatatcttagttggcgagaggctcgcatgcaagattgccgatttcggccttgcccgtttgattaaggatgacgagtacaatccctgccagggaagtaagttccccatcaagtggaccgctcccgaagcagccttatttggtcggttcaccatcaaaagcgacgtatggtcgttcggtatactgttgacagagctgattactaaaggccgaattccataccccggcatgaacaagcgcgaggttctggaacaggtggagcaggggtaccacatgccctgtccgcccggatgccccgccagtctctatgaggccatggaacaaacttggagactggacccagaggagagaccgaccttcgaatatcttcagagcttcttggaggattatttcacttcggctgagcctcaataccaacccggagaccagacctag

SEQ ID NO: 24284 - DNA, 942 bp, synthetic construct
  misc_feature 1..942: note = Description of Artificial Sequence: Synthetic coding sequence
  source 1..942: mol_type = other DNA
atgggctgcgtgttctgcaagaagctggagcccgtggccaccgccaaagaggatgccggacttgagggcgacttccgctcatatggagcagccgatcactacggtccggacccgactaaagctcggcctgccagcagctttgctcacattccaaactattcaaatttttcaagccaagccattaatcccgggttcctggacagtggcactataaggggcgtgtccggcatcggcgtgactctatttatcgccctatatgattacgaggcccggaccgaagatgacctgacgttcacaaaaggcgagaaattccacatcttgaataatacagaaggtgactggtgggaggcgaggagccttagctcaggcaaaacaggatgtataccctccaattatgtagcccccgtggactcaatccaggccgaggagtggtattttggaaaaataggaagaaaggacgccgaaaggcagctgctgtcacccgggaacccccagggcgctttcctgattcgcgaatcagaaactacaaagggcgcttattcactatcaataagggattgggaccaaactagaggggaccatgtcaagcattataaaattcgcaagctggatatgggcggatattacatcacaactagggttcagttcaattcagttcaagaattagtccagcattatatggaggtcaacgatgggctgtgcaatttgttgatagcaccgtgcacaattatgaaacctcagacacttggcctcgcaaaggatgcatgggagatctcccgatcctccatcacccttgagcgaagattaggtacaggttgttttggagacgtttggctgggtacttggaacggttctacaaaagttgccgtgaagaccctcaagcctggaacgatgtctcctaaagcttttctggaggaagcacaggtgatgaaactgctgtag

SEQ ID NO: 24285 - DNA, 1392 bp, synthetic construct
  misc_feature 1..1392: note = Description of Artificial Sequence: Synthetic coding sequence
  source 1..1392: mol_type = other DNA
atgggctgcgtgttctgcaagaagctggagcccgtggccaccgccaaagaggacgccggactcgaaggggattttaggtcctacggagccgctgatcattatggtcccgatcccactaaggcacggccagcaagcagtttcgctcacattcctaattattcaaacttctctagccaggctatcaacccggggtttttggacagtggcactatcagaggagtgtccggcattggcgtcaccctctttattgctctgtatgactatgaagccagaacggaggacgacttgacgttcacaaaaggggagaagttccacatactgaataacactgaaggagcctatagcctctccatccgcgactgggaccagacccggggagatcacgtcaagcattacaaaatccggaaacttgacatgggaggatattacataacaacccgagttcagtttaacagtgtgcaggagttggtgcagcattatatggaggtgaacgacggtctatgcaacttgcttatcgcaccgtgtacaattatgaaaccacaaaccctgggccttgcaaaagacgcatgggaaatcagccgcagcagcatcaccctggagcggcgcctaggaacaggctgctttggcgatgtgtggctgggcacttggaatgggtccactaaggtggctgtaaaaacactgaaacctggtaccatgtctccaaaggcgtttctcgaagaggctcaagtaatgaagcttttgcgccacgacaagcttgtgcagttgtacgcggtggtgtccgaggaaccaatatatattgtcaccgaatttatgtgccacgggagcctgctcgactttctgaaaaaccctgagggccaagatctacggctgccacagttagtcgatatggcagcccaagtggccgaaggcatggcttacatggagaggatgaactatattcatcgcgatctgagagccgcgaacatcctcgttggcgagcgtttggcgtgtaagatcgccgactttggactcgctaggctgatcaaggacgacgagtacaacccatgtcagggcagcaaatttcccattaagtggacagccccagaagccgctctcttcggaagattcaccataaagagtgatgtgtggagttttgggatcctgctcaccgaactcatcactaaaggtaggatcccctatccgggaatgaacaagcgtgaagtcttagaacaggtggaacaggggtatcacatgccctgcccccctggctgcccagcgtccttgtatgaagccatggaacaaacctggagattggaccccgaggagcgcccaacatttgagtatctgcagtccttcctcgaggactacttcacttctgctgaaccccaatatcagcctggcgatcagacctag

SEQ ID NO: 24286 - DNA, 1005 bp, synthetic construct
  misc_feature 1..1005: note = Description of Artificial Sequence: Synthetic coding sequence
  source 1..1005: mol_type = other DNA
atggagttccccggcctgggcagcctgggcaccagcgagcccctgccccagtttgtagatcctgccctggtttcttcaacacctgaatctggcgtgttttttccaagtggtccagagggcctagacgctgccgccagcagtaccgcccctagcacggccacagccgccgccgctgctctggcatattatagggacgctgaggcctatcggcactctcctgtgtttcaagtctacccactactcaattgcatggaggggattccagggggaagcccatacgctgggtgggcctacgggaaaacaggcctgtatcccgctagcacagtgtgcccaacaagagaggactcccctccccaagctgtcgaggatctggacggtaaaggcagcacttccttcctcgaaactttgaagaccgaacggctgagtcctgacctactcacactcggcccagccctccctagtagcttgccggttccaaattcagcctacggaggaccagacttcagctccactttttttagcccaacaggaagtcccctgaatagcgccgcatacagctctccaaagttgagggggactctccccctgcctccatgcgaggcacgggaatgcgtcaattgtggggcaacagcaacccccctgtggcgtagagataggaccggtcactacctgtgtaatgcctgcggtctgtatcataagatgaacggccagaatagacctcttatcagacctaagaaaaggctgattgtcagcaagcgggcaggtacccagtgcacaaactgccaaactactacgacgactttgtggcgccgcaatgcaagcggcgaccctgtctgtaatgcctgcgggctgtactacaagcttcaccagcattattgtgggggtagcgcgcaattaatgagggctcaatccatggccagccgagggggagttgtctcatttagttcatgttcccagaattccgggcagccaaagagtctggggccccgtcaccccttggcttag

SEQ ID NO: 24287 - DNA, 1242 bp, synthetic construct
  misc_feature 1..1242: note = Description of Artificial Sequence: Synthetic coding sequence
  source 1..1242: mol_type = other DNA
atggagttccccggcctgggcagcctgggcaccagcgagcccctgcctcagttcgtcgacccagctcttgtcagctcaactccggaatcaggggtgtttttcccaagcggcccagaaggtttagacgcagctgcatcttcaacagcaccatccactgcaacagctgcagcagcggcactcgcatattatagagacgcggaagcctacagacattctcctgtcttccaggtttatcccctgcttaattgcatggagggaatccctggaggctccccttacgctggttgggcatatggtaaaaccggtctgtatcccgccagcaccgtgtgtcccacccgcgaagatagcccccctcaggccgttgaggacctagacgggaagggcagcacatcattcctcgaaaccttaaagactgagcgtctgtctcccgatctactgactctgggcccagctttaccatccagtttaccagttccaaactctgcctacgggggacccgatttttcctccacttttttttcccccacaggctcacccttaaattcggcggcctactcaagccccaagttgagaggaaccctgcctttacctccctgcgaagcccgtgaatgcgtgaattgtggcgctacggcaacccccttgtggagacgcgatcgcaccggccattatctctgtaacgcttgtggactgtaccataaaatgaatggtcagaacaggcccctcatccggccaaagaagcgcctcattgtcagtaagagagcaggtacacagtgtactaactgtcagaccactactactacgctgtggagaaggaatgccagtggtgatccagtttgtaatgcatgtgggctctattacaagctccatcaggtgaaccgcccgctgacaatgcgcaaggatggcattcagacaagaaatagaaaggctagcggtaaaggtaagaaaaaaaggggaagctccttgggggggactggcgctgcagagggacccgcaggtggtttcatggtagttgccgggggcagtggtagtgggaactgcggagaggttgcctccggtctcacactaggaccgcccggtaccgcgcatctttaccagggtctggggcccgtggtgctgagtggtccagtctcccacctgatgccattccctggtcctcttttagggtctcctacaggctcattcccaacagggcctatgccacccacaacttcaactactgtcgtcgcccctctctctagctag

SEQ ID NO: 24288 - DNA, 369 bp, synthetic construct
  misc_feature 1..369: note = Description of Artificial Sequence: Synthetic coding sequence
  source 1..369: mol_type = other DNA
tgacagaaccggcccctgatccggcccaagaagcggctgatcgtgagtaagagggcaggcacacaatgcacgaattgccagaccacaactactacgctgtggagaaggaacgcgtccggcgaccccgtgtgcaacgcctgtggactatactacaagctacaccaagtgaatcgacctcttacaatgcggaaggatggaatacaaaccaggaatcgaaaggcttcaggcaaaggcaaaaaaaaacgagggtctagtctgggaggtactggcgcggccgaggggcctgccctcctgtggtggcttaggtctgctcatgagggcacagaacatggcctacagaggaggggaggcgtgctgctgctgctgtag

SEQ ID NO: 24289 - DNA, 1332 bp, synthetic construct
  misc_feature 1..1332: note = Description of Artificial Sequence: Synthetic coding sequence
  source 1..1332: mol_type = other DNA
atggaggtgaccgccgaccagccccggtgggtgagccaccaccaccccgcagtgttaaatggacaacatcccgacacacaccatcccggcctttctcacagttacatggacgctgcacagtatcctctacctgaggaagtggacgtcctgtttaatattgatgggcagggaaatcatgtgcccccatattatggcaacagcgtgagagctaccgtgcaaagatacccacccacccaccatggcagccaggtgtgccgcccgccactgctgcacggctctcttccttggctagacggcggcaaggccttgggatcccatcacactgcaagtccatggaatttatcacctttcagcaaaacttccattcatcacgggagtcctgggcctctgagtgtgtatcctcctgcctcttcctcaagtctgtctggagggcacgcgagcccccaccttttcacgtttcctccaaccccacccaaagatgtttcacctgatccatctctcagtactcccggaagcgccggcagtgctcgccaggatgagaaagaatgtctaaaatatcaggtccctcttcccgactccatgaagctagagtctagtcatagtcgcggcagcatgacagcattgggtggcgcgagctcaagtacccaccatcccattacaacttatccaccgtatgtacctgagtactcctctggactcttccctccctcctccctgctgggtggcagcccaaccgggttcggatgtaaatctcgcccaaaagcgcggtcatccaccggccgagagtgcgttaactgcggggcgacttccactccgctgtggaggcgtgatggaactggccattatctgtgtaacgcctgtgggctctaccacaaaatgaacggacagaatcgcccgctgattaaacccaagcggaggctgtccgccgctcggagggcaggtacctcctgtgccaattgtcagaccacgaccacgacactgtggaggcgtaatgccaacggggacccagtgtgcaatgcttgcggtctgtactacaagctacacaatatcaatcggccgctcacaatgaagaaagagggcatacagactcgcaaccgcaagatgtcttctaagtctaagaagtgcaaaaaggttcacgacagcctggaggatttccccaaaaatagctctttcaacccagctgctctctctagacacatgtcttccctttcccatatcagccctttttcacacagctcccacatgctgaccacacctactcctatgcatccgccatcttctttgagtttcggaccacaccacccatcatctatggtgacagcaatgggctag

SEQ ID NO: 24290 - DNA, 1335 bp, synthetic construct
  misc_feature 1..1335: note = Description of Artificial Sequence: Synthetic coding sequence
  source 1..1335: mol_type = other DNA
atggaggtgaccgccgaccagccccggtgggtgagccaccaccacccagcggtcttgaacggtcaacacccagatacgcatcatccagggctctcccattcttatatggacgctgctcagtacccgctcccagaagaggtagacgtgctgttcaacattgacgggcagggtaaccacgtccccccttactatggtaattcagtgagagccacagtgcagcggtacccacccacccatcatgggtctcaggtgtgcagacccccccttctgcatgggagcctgccctggctcgacggtggaaaagccctggggagtcatcatacagcctcaccctggaacttgtccccatttagtaagacctcaattcatcatggctctcctggtcccctcagtgtctaccctccggctagtagctcatctctctccggcggacacgccagcccccacctcttcacttttcccccaacaccccccaaggacgtcagtcccgacccctccctgtccacgcctgggagcgccggatcagcgaggcaggacgaaaaagaatgccttaagtatcaggtgcccctcccagattcaatgaaattggaatctagtcactctaggggaagcatgacagcattaggaggagcttcttccagcacacaccacccaatcacaacttaccctccatatgtgcctgagtacagtagtggtttgtttccgcctagttccctgctgggcggaagccctacgggcttcggctgcaagtcccggccaaaggcacggagctccactgagggcagagaatgtgtcaactgcggggcaacgtccacgcccctctggcgcagggatggaaccggccactacctgtgcaatgcctgtgggttgtaccacaagatgaatggacagaacaggcctttgattaagcctaaacgccggcttagcgctgcaaggagagctggcacaagctgtgcgaactgccagaccacaacaactacattgtggcggcgaaatgcgaatggcgatccagtgtgcaatgcatgtggactgtattataagctgcacaacattaatagacccctgaccatgaaaaaagaaggcatccaaaccagaaataggaaaatgagttccaagtcaaaaaagtgtaagaaagtccacgattctctggaagacttcccgaagaacagctctttcaacccagctgctctgagcagacatatgagctcactcagtcacatcagcccatttagtcacagcagccacatgctgacaaccccaactcccatgcacccgccctccagtctgagttttggtcctcatcaccctagttctatggtgacagctatgggatag

SEQ ID NO: 24291 - DNA, 393 bp, synthetic construct
  misc_feature 1..393: note = Description of Artificial Sequence: Synthetic coding sequence
  source 1..393: mol_type = other DNA
atggaggtgaccgccgaccagccccggtgggtgagccaccaccaccctgctgtgctgaatggtcagcacccagacacccaccatcccggcttgtcacacagctatatggatgcagctcagtacccattacctgaagaggtggacgtactgttcaacattgacggtcaggggaatcacgtgccaccctattacggaaacagcgttcgagcaaccgtccagaggtaccccccaacccatcatgggagtcaagtttgtaggcccccgctcttgcacggatccctgccatggcttgatggaggcaaagctttggggtcacatcataccgcctctccttggaatctcagaccttgcctgcaatgtctgtgggccctgctgcaggcctctcaatgttag

SEQ ID NO: 24292 - DNA, 798 bp, synthetic construct
  misc_feature 1..798: note = Description of Artificial Sequence: Synthetic coding sequence
  source 1..798: mol_type = other DNA
atgcggcgggccgagctggccggcctgaagaccatggcctgggtgccagctgaaagcgccgtagaggaactgatgccgcgattgttaccggtggaaccctgcgaccttacagagggctttgatccatctgtgcccccccggacccctcaagagtacctcagaagagtgcagattgaggctgcccagtgcccagatgtggtggttgcccagatagatccaaagaaactcaaaagaaagcagtcagtgaacatctcactctctggatgccagccggcacccgaaggctatagcccaacgttacagtggcagcagcaacaggtagctcagttcagcactgtgcgacagaacgtgaacaagcataggagccattggaaatcccaacagttggactcgaatgtcactatgcccaaaagcgaagacgaagagggatggaagaaattctgcttgggagaaaagctctgtgccgacggtgccgtaggtcccgctaccaatgaatcgcctggcatcgattacgtgcaggctaccgttacttctgtactggagtatctgtctaactggttcggagagcgggatttcacccccgaactaggtcgctggctctatgccctgttggcttgcctagaaaagcccctgctgcccgaggcacatagtctgatccggcagctggcccggcgctgtagtgaggtccgactccttgttgattccaaggacgacgaaagggttccagccctgaatctgctgatctgtctggtgtcgcgctattttgaccagcgggatctggcggacgagccttcctag

SEQ ID NO: 24293 - DNA, 843 bp, synthetic construct
  misc_feature 1..843: note = Description of Artificial Sequence: Synthetic coding sequence
  source 1..843: mol_type = other DNA
atgcggcgggccgagctggccggcctgaagaccatggcctgggtgcctgctgaatctgctgttgaagaactgatgccacggcttttgccagtggaaccatgcgacctaactgagggcttcgacccaagcgttccccctagaacacctcaagaatacctccgaagggttcagatcgaagccgcgcaatgccccgatgtggtggtggcccaaatcgatcctaagaaactgaagcgcaagcagagcgtgaacatctcattgtccggttgccaacccgctccagaaggctactctcctactctgcagtggcagcagcagcaagttgcccaattcagtaccgtcagacagaacgtgaacaagcaccgttctcactggaagtctcagcagctcgattctaacgtgacaatgccaaaaagtgaagatgaggagggctggaaaaagttttgcttgggggaaaagctctgtgccgatggggcggtcgggccagccaccaacgagtctcccggaattgactacgtccagatcgggttccctcccctcttgtctattgtcagcagaatgaaccaggcaactgtgacaagcgtgctggagtacttgtctaactggtttggtgagcgcgacttcacgcctgaacttggacggtggctatacgctttactggcttgcctggagaagccattgctgcccgaagcccatagcctcatcaggcagctggccaggaggtgtagcgaggtccggctactggtcgatagcaaagatgatgaacgggttcctgcacttaatctgctcatctgtcttgtgtctcgatacttcgaccaaagagacctggctgatgaaccatcttag

SEQ ID NO: 24294 - DNA, 753 bp, synthetic construct
  misc_feature 1..753: note = Description of Artificial Sequence: Synthetic coding sequence
  source 1..753: mol_type = other DNA
atgcggcgggccgagctggccggcctgaagaccatggcctgggtgcctgctgaatcagcggtggaggagctgatgccacgactgctcccagtagaaccatgcgatctcactgaaggttttgacccgagcgtgccccctcgcacccctcaggagtacttgcggagggtccagattgaagcagcacagtgcccagacgttgtagtggctcaaatcgaccccaaaaagctcaagaggaagcaatcagtcaatatttccctcagcggctgtcagcctgcccctgaaggctactcgcctacgttgcagtggcagcagcaacaggtggctcagttcagcacggtcaggcagaacgttaacaagcaccggtcccactggaagagtcagcagctggattctaacgtcaccatgccaaagtcagaagatgaggagggctggaagaagttttgcctcggcgagaaattgtgtgctgacggtgcggtcggcccagctacaaatgagtcccctggcatcgattatgtgcagattggctttccgccattgctgagtattgtaagccgaatgaatcaagccacggtgacgtccgttctggaatatctgtctaattggttcggtgaacgcgacttcactccggagctgggccgatggctctatgccctgcttgcgtgtttagaaaaacccctgcttccggaggctcacagccttatcagacagctggcccgccggtgctcagaggtcaggctcctcgtggtgttctag

SEQ ID NO: 24295 - DNA, 768 bp, synthetic construct
  misc_feature 1..768: note = Description of Artificial Sequence: Synthetic coding sequence
  source 1..768: mol_type = other DNA
atggacgtgatggacggctgccagttcagccccagcgagtacttctatgacggctcctgcattccatctccggaaggagagtttggcgacgaatttgtgcccagggtagctgcgtttggagcccataaggcggagttgcaagggtcagatgaggatgaacatgtgagagctcctaccggccatcatcaggccggacattgcttgatgtgggcttgcaaggcgtgtaaaaggaaaagcactactatggataggagaaaggctgccaccatgcgggagcgtaggaggctgaagaaggtaaaccaagcattcgaaaccctaaagcgctgtacaaccacaaatcctaatcagcgtttacccaaggtggagatacttcgcaacgccataaggtatatcgagtccctccaggagctgctccgcgagcaggtcgagaactactacagcctccctggacaatcatgctctgaacctacatcccccacctccaactgcagtgatggaatgcctgagtgcaatagccctgtctggtcaagaaaatcttccacattcgactccatctactgccccgatgtttccaatgtctacgccaccgacaaaaactccttgagctcccttgactgcttatctaatatcgtggacagaataacctccagtgaacagcccgggctccctctgcaagacttggctagcctcagccctgtggccagcacagacagccagcccgccaccccgggggcgtcctctagtaggttaatatatcacgtgctgtag

SEQ ID NO: 24296 - DNA, 1725 bp, synthetic construct
  misc_feature 1..1725: note = Description of Artificial Sequence: Synthetic coding sequence
  source 1..1725: mol_type = other DNA
ctgagccccagcctgggcttccccgcccagatgaaccaccagaagggtccctctccgtccttcggggtccagccgtgcgggcctcatgattctgccaggggtggtatgataccacatccacagtctcgcggtccgttcccgacctgtcagctgaagtccgaacttgacatgttagtgggaaagtgtagggaggaacccttagagggggatatgagcagtccgaactccaccgggatccaagaccctctgctgggcatgctcgacggccgcgaggatttggagcgggaagagaaacgtgaacctgaaagcgtttacgaaaccgactgtcggtgggatgggtgttcccaggagtttgactcccaggaacaactggtgcaccatattaattctgagcatattcacggagagagaaaagaattcgtgtgccactggggcggctgctcccgagagttgcggcccttcaaagctcagtacatgctggtagtgcacatgaggcgtcacacaggggagaagcctcacaaatgtactttcgaaggctgcaggaagtcctattcacgccttgagaacttaaagacgcacttgcgatctcatacaggggaaaagccctatatgtgtgagcacgaaggctgctccaaggcgttcagcaatgcctccgaccgcgccaaacaccagaacagaacacattccaacgagaaaccatacgtgtgcaagctcccaggatgcactaagcggtatactgatccaagttccctgaggaaacacgtgaaaactgttcacggccctgacgcccacgtaaccaagcggcatcggggtgacgggcccttaccccgggcaccttccatcagcacggtggaacccaagcgagagagggaaggcgggcctatcagagaggaatcacggctgacggttcccgagggagccatgcccccacatccccagccccttttttctcattatccacagcccagtccaccacagtacctgcaaagcgggccatatactcagccccctcctgattacctcccatccgaaccccgaccatgccttgactttgactcaccaacccatagtaccggacagcttaaggcgcagctcgtctgcaattatgtccaatcccagcaggagttgctgtgggaaggaggagggcgcgaggacgctcccgcccaggaaccaagctaccagagtcccaaattcttagggggatcacaggtttctccatctcgggccaaagcgccagtgaacacatacggacccggattcggtccaaatctgcccaatcacaagtcaggcagctaccccaccccttctccctgccacgagaactttgtggtgggcgcaaatcgagcttcccacagggctgctgcaccacctcgcctgcttccacctcttccaacgtgctacggacccctgaaggtcggcggcacgaacccctcctgcggacatcctgaggtgggccgcctgggcggagggcctgccttatatccaccccctgagggtcaggtgtgtaaccccctggactccctcgatctcgacaacacccaacttgactttgttgccattctcgacgagccacagggcctttcacccccgccctcgcatgatcaacggggatcaagcgggcataccccccccccttccggtccccccaatatggccgtcggcaacatgtccgtcctcttgaggtccctcccaggagaaaccgaattcctgaactcctccgcatag

SEQ ID NO: 24297 - DNA, 390 bp, synthetic construct
  misc_feature 1..390: note = Description of Artificial Sequence: Synthetic coding sequence
  source 1..390: mol_type = other DNA
atgttcaacagcatgacccccccccccatcagcagctacggcgagccctgttgcctacgccccctgccaagccaaggagccccaagcgtaggcactgaaggcctgtctggaccaccattctgccaccaagctaacctgatgtctggaccccactcttacggacccgctcgtgagactaatagctgtaccgaagggcctttgttttcatcgccaagatctgccgtcaaactgacaaaaaagcgcgccttgagtatcagcccactcagcgatgcctctttggacctccaaacggtgattcgtacttccccatcatcacttgtcgccttcatcaatagccgctgtacctctcctggcgggtcttatggccatctgagcataggaactatgtag

SEQ ID NO: 24298 - DNA, 3198 bp, synthetic construct
  misc_feature 1..3198: note = Description of Artificial Sequence: Synthetic coding sequence
  source 1..3198: mol_type = other DNA
atgttcaacagcatgacccccccccccatcagcagctacggcgagccttgctgcctccgccccctaccatcccagggcgcaccgtcagtggggactgaggtgaaactcacgaaaaaacgtgcattgtctatcagccctctctctgatgcctctctggatttgcagactgtgattaggactagccctagctcactggttgcgtttataaattctaggtgtacaagtcccggcggcagctatggtcatctctccatcggtacaatgagcccttccctagggtttcctgcccaaatgaatcaccagaagggtcccagcccgtctttcggcgttcagccctgtggcccccacgactctgcccggggtggcatgattcctcacccccaaagccggggaccattcccaacctgccagctgaaaagcgagcttgacatgctagtgggcaagtgccgggaagaacccctggagggagacatgagttcacccaatagcaccggaattcaggatcccttattagggatgctggacggacgtgaggacctcgaacgtgaggaaaagcgagaacccgagtctgtgtatgagacggactgtaggtgggatgggtgttctcaagaattcgactctcaggagcagctcgtgcatcacatcaacagcgagcacatccatggagagcggaaagaattcgtctgtcattggggggggtgcagtagagagctgcgtccattcaaagcacagtatatgctggtggtccatatgagacgccacaccggtgagaagccacataaatgtacgttcgaaggatgtcggaagagctacagccgcctagagaacctgaagacacacctgagatcacacaccggggaaaagccatacatgtgcgagcatgaaggatgctctaaggccttttcaaatgcatctgatcgcgcgaagcatcagaataggacccattctaacgaaaagccctatgtgtgcaagttaccgggctgtactaagcgctatacagacccttcaagccttaggaaacacgtgaaaacggtccacggacctgatgcacatgtgacgaaaagacatcgtggagatggcccgctgcccagggctccatctataagtaccgtcgagcccaagcgggaacgcgagggcggtcctattagagaggagagcagactcacagtgccggaaggggctatgaagccccaaccatcacccggcgcccagtcctcctgttcctctgatcactctcctgccgggagcgccgcaaatacagattccggcgttgagatgaccggcaacgccggcggcagcacggaggacctgtcttctctggatgagggcccctgtatcgctggcactggactctcaacgcttcgaaggctggagaacttacgactggatcagttgcatcagctgcggcccattgggactcgagggcttaagctcccctcccttagtcacaccggcacaacagttagcaggagagtggggccaccggtaagtctcgagaggagaagctcctccagttcctccatttccagcgcatacaccgtgagcagacgttctagtctagctagccccttcccgccgggcagtccaccagagaatggcgcatcttccttgccaggactgatgcccgcccagcactacctgctgcgggccaggtacgcttctgcccggggaggcggcaccagcccgacggccgcctccagtttagatcggatcggcggactgccgatgcccccttggcgaagccgggccgagtaccctggctacaatccgaatgctggtgttacccgtcgcgcttcagatcctgcccaggcggccgatcgccccgctcctgcaagggtgcaacggtttaagtcgttgggctgcgttcatacccccccaacagtcgcaggcggtggacagaacttcgatccctatctacctactagcgtctattcaccacagccaccatcaataaccgagaacgccgcgatggacgcccgcggactgcaggaggaaccggaggtagggacatcaatggtgggatctggattgaacccctacatggatttcccacccaccgacaccttaggctacggggggcctgagggcgcggccgcagaaccatatggcgcccgcggcccgggctccttgcctcttggtccaggccctcctacaaactatggaccaaatccatgtccacaacaggcaagttatccggatcccacacaggagacttggggggaattcccttcacatagcgggctgtaccccggtccaaaggctttgggcggcacatactcacaatgcccgagactggagcactacggccaggtccaggtcaagcccgagcaagggtgccctgtgggtagcgatagcaccgggctcgcgccttgcttgaacgcccatcctagcgagggccctcctcatccccagcctctgttcagccactacccgcaaccttctcctccgcagtatctgcagtccggcccctacacacagccaccccccgactacctgccaagcgaaccccgcccctgtctggacttcgactcacccacccattctaccggccagctgaaggcccagttggtgtgtaactacgtgcagagtcagcaggagcttctgtgggagggcgggggccgtgaggatgctccagcccaggagccttcatatcaatcgccaaagttcctgggcgggtcacaagttagccccagtcgtgcaaaagcccctgtaaacacctacgggcctggcttcggacctaatcttcccaaccacaaaagcggatcctatcctacgccctccccatgccacgaaaattttgtggtgggcgccaaccgagcttcccacagggcggccgcgccgcccagactactccctccgttgccaacctgctacggccccctgaaggttggcgggaccaatcctagctgtggtcacccagaggtggggcgcctgggaggcggaccggccctatatccaccccctgaaggccaggtttgcaaccccttggatagcctagacctggacaacacacagttggattttgtggcaattttggacgaaccccagggcctgtcaccccccccatctcacgaccaaaggggctcttctggccacactccacctcctagtggccctcccaatatggccgttggcaatatgtccgtcctgctcaggtccttgccaggcgagaccgaatttctgaatagctccgcttag

SEQ ID NO: 24299 - DNA, 528 bp, synthetic construct
  misc_feature 1..528: note = Description of Artificial Sequence: Synthetic coding sequence
  source 1..528: mol_type = other DNA
atgagccccagcctgggcttccccgcccagatgaaccaccagaagggcccttcacccagctttggcgtccagccttgtggaccgcatgatagcgcaagggggggtatgatcccacacccccagtccagaggacccttcccaacatgccaactgaagtctgagctggatatgttggtgggcaaatgccgcgaagaaccgctggagggagacatgagctcaccaaatagtaccggtatccaggacccactacttggtatgttagacggccgggaggatctggaacgcgaagagaagagagaaccagagagcgtctatgaaaccgactgccgttgggacgggtgcagccaggaatttgactcccaggagcagttagtgcaccacatcaatagcgagcacatacatggcgagagaaaggagtttgtgtgccactgggggggctgctccagagagctgcgaccttttaaggctcagtatatgttggttgtgcacatgcgtcggcacacaggcgagaagccgcacaaatgttag

SEQ ID NO: 24300 - DNA, 2937 bp, synthetic construct
  misc_feature 1..2937: note = Description of Artificial Sequence: Synthetic coding sequence
  source 1..2937: mol_type = other DNA
atgagccccagcctgggcttccccgcccagatgaaccaccagaaggggccctccccttcatttggagtgcagccgtgtggcccccacgactctgcacgaggagggatgattccacatccacagtccaggggcccttttccgacatgtcagctgaagtcagaactcgacatgttggtaggaaagtgccgtgaagagcccttggaaggggatatgagttctcccaacagcactggaatccaggatcccctgcttggaatgctggacggccgagaggacctggagagggaagaaaaacgcgaacccgagagcgtttacgagacagactgcaggtgggatggctgttcgcaggagtttgactctcaggagcaactggtgcaccacattaattctgaacatatccacggcgaaagaaaggagttcgtatgccactggggcgggtgctcacgagaactgcggccttttaaagcacaatatatgctcgtggtccatatgcgtcggcacacaggcgaaaagccgcacaaatgcacatttgagggctgtagaaagagctattctcggctggagaatctgaagacacacttgagaagccacacaggagaaaagccctatatgtgcgagcacgaggggtgtagcaaggcctttagtaacgctagtgatcgcgctaagcaccagaaccgcacacactccaacgagaaaccatacgtgtgtaaactgccgggctgcactaagcgttacacagatccctcctccttgcggaaacatgtgaagacggtgcatggtcctgacgctcatgtaactaagcggcatcggggggacggcccactccctagagccccatccattagcacagtggagcctaaaagggaacgggaaggcgggccaattcgagaagagtcccggctgacagtaccagagggagcgatgaagcctcaaccaagcccgggtgcccagtccagctgttccagtgaccacagcccagccggtagcgcagctaatactgactctggggtagaaatgaccggaaatgcagggggatctacagaagacctctcatcgcttgatgaaggaccctgcatcgccgggactggattgtctacgctaaggcgtctggagaatctccgtttggaccagctccatcagcttcggccgatcggtacccgtgggcttaaactgcctagcctgagccacacaggaacaactgtgtcgcgtcgtgtcgggccacctgtgtccctggaaagacggtccagttcaagctctagtatcagttctgcctacaccgtgagtagaaggagttcccttgcatctccgtttcctcccggatcaccccccgaaaacggtgccagctctttgccaggactcatgcccgctcagcattacttgcttcgggcccggtatgcctcggcaaggggtggcggcacaagccctacggccgcctcttctcttgacaggatcggcggactccccatgccgccatggcggtcacgagctgagtatcctggatacaaccccaatgctggtgtcaccagacgggcgagcgatccagcccaggcggcagatagaccagcccccgcccgggtccagcggttcaagtcactcggctgtgtccatacaccccccacagttgcaggaggaggccagaactttgacccttatctacctacctctgtgtacagcccacaacccccatccatcaccgaaaacgcagcaatggatgcccgaggcttgcaggaagagccagaagtgggcactagcatggtcgggagtggtctcaatccctatatggactttccccccacggataccctagggtacggtggccctgagggcgccgccgcagaaccgtacggcgcacggggccccgggagccttcctctaggtccagggccacctacaaactacgggccaaatccctgcccccaacaggcgtcttacccagatcctacccaggaaacgtggggtgaatttcccagccacagtggactgtacccggggcccaaggccctcggaggaacttattcccagtgcccccgacttgaacattatggccaggtgcaggtcaagccggaacagggctgccccgttgggagcgactcgaccggccttgccccatgtctcaatgcccacccgtccgagggacctccccatcctcagccattgttcagccattaccctcaaccatcaccaccccagtacctgcagtctgggccatacacccaaccacccccagattatttgccctctgaaccccgcccttgtttggatttcgattcacctacccattccaccggacagttaaaggcccagctggtttgcaactacgtccagtcacagcaggaacttctttgggaaggcggtggccgtgaagacgctcctgcccaggagccttcctatcaatctccaaagtttctaggtgggagtcaggtcagcccatctagagccaaggctcccgtgaatacttacggaccaggcttcgggcctaacttgcccaaccacaagtcagggagttaccctacaccttccccatgccacgaaaatttcgtcgttggagctaatagggccagccaccgcgccgccgcacccccgaggcttctgccccccttgccaacttgttacggtccattgaaggtggggggcaccaaccccagctgcgggcatcccgaggtgggcagactgggaggtgggcccgctctgtacccgccacccgaggggcaggtctgtaaccccctggattcacttgacctggacaacactcagctggactttgtggccattctcgatgaaccacagggcctctctccccctccttcacacgaccagcgggggagcagcggccatactccacccccatcaggaccaccaaacatggccgtggggaacatgagtgtgctgctcaggagtctccccggcgaaaccgagttcctgaatagttccgcgtag

SEQ ID NO: 24301 - DNA, 135 bp, synthetic construct
  misc_feature 1..135: note = Description of Artificial Sequence: Synthetic coding sequence
  source 1..135: mol_type = other DNA
atgagcggcccccacagctacggccccgcccgggagaccaacagctgtacagagggaccgctattcagctcaccccgaagcgccgtgaagctgaccaaaaaacgcgctctgtcgatttctcctctttccgattag

SEQ ID NO: 24302 - DNA, 3198 bp, synthetic construct
  misc_feature 1..3198: note = Description of Artificial Sequence: Synthetic coding sequence
  source 1..3198: mol_type = other DNA
atgttcaacagcatgacccccccccccatcagcagctacggcgagccttgttgcctgcgccccctaccttcacagggcgcgccatcagtggggacggaggtgaagctcactaagaagagggcgttatccatttctccactctctgacgcttctttggatctccagactgtgatccgaacctctccaagcagtctggtcgcctttattaattctcggtgcacaagtccaggcgggtcttacggccatttgtcaatcgggaccatgagcccaagcttgggattccccgcccagatgaaccaccagaaagggccctcaccttccttcggcgtgcagccatgtggcccccatgacagtgcccgcggaggcatgataccacaccctcagtctagaggcccctttccgacctgtcagctgaagtccgagctggacatgttggtgggcaaatgccgagaggagcctttggagggggatatgtccagccctaatagcacagggattcaggaccctttgttgggaatgcttgatggccgggaagacctggagcgggaagagaaacgagagccagagagtgtgtacgagacagactgcaggtgggacggatgctcccaggaatttgatagtcaggagcagctggtgcaccatatcaactctgagcacattcacggtgaacgaaaagaattcgtgtgtcactggggtggttgcagcagggaactgcgaccgttcaaagcccaatacatgttggtcgtgcacatgagaaggcacaccggcgagaaaccccataagtgcacgtttgaggggtgccgtaagagctattcccgactagagaatttgaagacccatttacggtcccatacgggggaaaagccctacatgtgtgaacacgagggatgctcgaaggctttcagcaacgcatctgaccgtgctaagcatcaaaatagaacccactctaacgaaaagccctatgtgtgcaaactcccgggatgtaccaagcggtacacagatccctcaagccttaggaaacatgttaaaacagtgcatgggccagacgcccacgtgacgaagcgccaccgaggggacggaccactgcccagggcaccttccatcagcacagttgagcccaaacgagagagagagggtggtccaattcgagaggaaagtcggctcacagttcctgaaggggccatgaagccacagccgtcaccaggagctcagtcttcttgttcctcagatcacagcccagccggcagcgccgcaaacacagatagcggtgtggagatgacgggtaatgcgggcggatccactgaagacctgagcagcctggacgagggcccttgtatcgcgggtacgggactctctacactgagacggctggagaaccttcgcctggaccagcttcaccagctgagacccatcgggactagaggcctcaagctgccatcgcttagtcacacaggcaccacagtatctcgcagggtaggaccacccgtgagtcttgaacggcgttcttccagctcgtcgagcatctcgtcagcctatacagtttccaggcgatcctccctggcatccccattccctcctggctctccccccgaaaacggcgcttctagcttgccaggattaatgccagctcagcactacttgttgcgggcaaggtacgcttctgcgcgcgggggggggacctccccgacagctgcgagctctctggataggatcggcggacttcccatgcccccttggcgaagtcgtgcagagtatccagggtataaccctaacgctggtgtcactagacgggcctcagatcccgcacaagccgccgatcgcccagcgcccgcacgggtccaacgtttcaagtcgttggggtgcgtgcacacaccacccacagttgctggcgggggtcagaacttcgacccatatctccctacatcagtctattctccgcagcctccatcaattaccgagaacgccgccatggacgctcgaggactgcaggaggaacctgaggtgggtacctctatggtggggtcagggctgaatccctacatggactttcccccgacagatacactgggctacgggggaccagagggagccgcggcagagccttatggggccagggggccaggatcgctgcccttaggtcctgggcctcctacgaactatggtccaaacccatgtcctcagcaggcatcctatcccgatccgacccaggaaacctggggtgaatttccaagccactctgggctttatcccggcccaaaagccctgggcggcacttactcccagtgcccgaggcttgagcactacgggcaggttcaggtgaaacccgagcagggttgtcccgtggggagcgattctaccggtctggcaccctgcctgaatgcgcacccatctgagggacctccacacccccagccccttttcagtcactatccccagccatccccgcctcagtaccttcaatccgggccttacacacaaccaccacctgattacctcccctctgagccccgtccttgcttagatttcgatagcccgacgcattccaccggccagttgaaggcccagctggtgtgcaattacgtgcagagtcagcaggagctactgtgggagggaggaggaagagaagatgctccagcacaagaaccttcataccagtcacccaagttcctgggcggatcacaggtgtccccaagtcgggccaaagcacctgttaacacctacggcccaggatttggccctaacctgcccaatcataagtcgggatcctatcccaccccttcgccgtgtcacgagaatttcgtcgtgggtgccaatcgtgcctctcatcgcgccgcggcccccccgcggctgctgccccctctgcccacctgttatggcccccttaaagtgggcgggactaacccaagttgtggacaccccgaggttggacgacttggcggtgggccagctctgtacccaccccccgaagggcaagtatgtaaccctctcgactccctggacctcgataatactcagctggacttcgtggcaattctcgatgagccacagggtctgtctccgcccccctcccatgaccagcgaggctcctctggccatacaccacccccatcaggaccacccaacatggccgtgggaaatatgtcagtgctcctgcgctcactgcctggtgaaactgagtttttaaattcctcagcttag

SEQ ID NO: 24303 - DNA, 1548 bp, synthetic construct
  misc_feature 1..1548: note = Description of Artificial Sequence: Synthetic coding sequence
  source 1..1548: mol_type = other DNA
atggccgagcaggtggccctgagccggacccaggtgtgcggcatcctgagggaggagctctttcaaggggatgcattccaccagtccgatacgcacatcttcattatcatgggagcgagcggggacctggcgaagaagaaaatctacccgactatttggtggctgtttcgggatggactcctgccggagaacacattcattgtaggctacgccagatccaggctaactgtcgccgacatccggaagcagagcgagcccttctttaaagctaccccggaagagaagctcaaactggaagacttctttgcacgcaatagctacgtggcaggacagtacgatgatgcagcatcataccagaggctgaacagccatatgaacgccttgcatttagggagccaggccaacagactgttctatttggctctcccacctaccgtgtacgaggctgtcaccaaaaatatccacgagtcatgcatgtcccagatcggatggaacagaatcatcgttgaaaaaccgtttgggcgagatttgcagtcttcggaccggctttccaatcatatcagctctctcttccgtgaggaccaaatttatcgaattgatcattacctagggaaagaaatggtccagaacctcatggttctgaggttcgcaaacagaatctttggacctatctggaaccgcgataatatcgcttgcgtgattctcacttttaaagagccttttggaacagagggaagaggcggatattttgatgaattcggcatcatacgtgatgtgatgcaaaatcatcttctccagatgttatgcttggtcgctatggaaaagccagccagtacaaacagcgatgacgtgagggacgaaaaggtcaaagtgctcaagtgtattagtgaggtgcaagctaacaacgtggtgctcgggcagtatgtgggcaaccccgatggggagggtgaggccaccaaaggctatctggacgaccccacagtccctagaggctcaaccacagctacttttgcggcagtcgtgctgtacgtggagaatgaacgctgggacggggtgccatttatccttcgctgtggcaaggccctgaacgaaagaaaggccgaggtgcgcttacagtttcatgatgtcgccggcgacatattccatcagcagtgcaagaggaatgaattggtgatcagagtacagcccaatgaagctgtgtataccaagatgatgaccaaaaagccggggatgttctttaatcccgaggagtccgaactcgacctcacttacggcaaccgctacaaaaacgtcaagcttccggatgcatacgagaggctgattcttgacgtattctgtggctcccaaatgcactttgtcagatcagacgaattaagagaggcctggcgcatcttcacaccactgctgcatcagatcgagctggagaaacccaagccaataccatacatttacggctcaaggggtcctactgaagccgatgagctcatgaagcgtgtgggatttcaatatgagggcacctacaaatgggtgaaccctcacaagctttag

SEQ ID NO: 24304 - DNA, 1686 bp, synthetic construct
  misc_feature 1..1686: note = Description of Artificial Sequence: Synthetic coding sequence
  source 1..1686: mol_type = other DNA
atggccgagcaggtggccctgagccggacccaggtgtgcggcatcctgcgagaagagttgttccagggggatgcgttccatcaatcagatactcatatattcattattatgggagcctccggcgatctcgctaaaaaaaaaatttatcctactatttggtggttatttcgggacgggctgcttcccgagaataccttcatagtcgggtacgccaggagccggctcactgtcgccgacatccgcaaacagtctgaacccttcttcaaagcaacccccgaagaaaagctgaagcttgaggatttcttcgcccggaactcttacgtggcaggacaatacgacgatgcggccagctatcagcggcttaatagtcatatgaatgctttgcatctcgggtcacaagcaaaccgactgttctatctggcactcccaccgacagtgtatgaggccgtgactaaaaatatccatgagagctgcatgagccagatcgggtggaaccgcattatagtagagaaacctttcggcagagacctacagagctccgatagactgagtaaccacatctcaagtctctttagggaggaccagatttacagaattgaccactacttgggtaaggaaatggtgcagaacctcatggtgttgcggtttgctaaccgtatttttgggccaatttggaaccgggacaatatcgcgtgtgtcatcttgacattcaaggagccgttcggaacagagggtcgaggtggatatttcgatgaatttgggattatccgcggacccgggaggcagggtggatctggatccgagagctgttcgcttagtcttggtagcctggtttggggaccccatgcactggagccaggcgaacaggggggggagctgaggagggccttagcatcatccgttccgcgcgatgttatgcagaaccatttgctccagatgctttgccttgtggctatggagaagcccgcctcaactaactctgatgacgtgagagacgagaaggtgaaggtattaaagtgtatttcagaagtgcaggccaataacgttgtcttgggacagtatgtgggtaaccctgatggcgagggagaggcgacgaaagggtatctcgacgatccgaccgtgccgcgggggtccaccactgccacttttgctgctgtggtcctgtacgttgagaacgagcgttgggacggcgtacctttcatcctgagatgcgggaaagcactgaacgaacggaaggctgaagttcgactgcagttccacgatgtggctggagacatcttccatcagcagtgcaagaggaacgagctcgtgatccgcgttcagccaaatgaggctgtttacacaaaaatgatgaccaaaaaacccggaatgttcttcaacccggaggaaagcgaactggatctaacctacggaaacagatataaaaacgtgaagctgcctgatgcatacgagagactgatcctagacgtgttctgcggcagtcagatgcacttcgtgagatccgacgagctgcgcgaggcctggcgcatatttaccccactgttgcaccagattgagctggaaaaacctaaaccgataccttatatctacggctccaggggacccactgaagcagatgaactgatgaagcgggtgggcttccagtacgagggaacctataagtgggtaaacccacacaaactgtag

SEQ ID NO: 24305 - DNA, 1638 bp, synthetic construct
  misc_feature 1..1638: note = Description of Artificial Sequence: Synthetic coding sequence
  source 1..1638: mol_type = other DNA
atgggccggcggggcagcgcccccggcaacggccggaccctgcgggggtgcgaacgtgggggcagaagaagaaggagtgcggacagcgtaatggcagaacaggtcgcactttcccgaactcaggtatgtgggattctgagggaggaactgttccaaggggatgcttttcaccagagcgacacacacattttcattataatgggagcgtctggggacctggcaaagaagaaaatttacccgacaatatggtggctctttagggacggccttctgccagagaatacctttattgtaggctatgctcgcagtcggctcaccgtcgccgacatacgcaagcagtcagaaccgttcttcaaagcaacccccgaggagaagctgaagctcgaggatttcttcgcccggaactcgtatgtagctgggcagtatgatgacgcggcgtcttaccaacggctgaattcgcatatgaacgctctccacctggggtcccaagctaatcggctgttttatctggctttacctcccaccgtctatgaagctgtaaccaagaatatccatgagagctgtatgagccagattggctggaaccggatcatagttgagaaacctttcggtagggatctccagagctccgataggctgtctaaccatatcagctctctgtttagagaagatcagatttatagaatcgatcattacttgggtaaggagatggtccagaacttgatggttctccggtttgcaaatcgcatatttggcccgatttggaaccgcgacaatattgcgtgtgtcatccttaccttcaaggaaccttttggaaccgaaggccgcggcggatatttcgatgagttcggaataatcagggacgtaatgcagaatcacctgttacaaatgttatgcctcgttgccatggagaaaccagcctctaccaatagcgacgacgtccgggacgagaaggtgaaagttctgaaatgtatctcggaagtgcaagccaataacgttgtgttaggacaatacgtgggcaatccagatggtgaaggcgaagcaaccaaggggtatctcgatgatcctaccgtgcccagaggatccaccaccgctacctttgcagccgtcgtgctgtacgttgaaaacgaacggtgggacggggtcccattcattctgagatgcggtaaagccttaaatgagaggaaagccgaggtaagactgcagttccacgatgtcgccggcgatatcttccaccagcaatgcaaaagaaacgaactggttatccgtgtacaaccaaacgaggcagtttataccaaaatgatgacaaagaaacccggcatgttctttaaccccgaggagagtgagttggacttaacatacggcaatcggtacaaaaatgtcaaactccccgacgcctacgaaagactgatactcgatgtgttttgtgggtcccaaatgcacttcgtgcgcagtgacgagctgcgggaggcttggcggatttttactcccctgttacatcagattgaactggaaaagcccaagcctatcccttatatttatggcagcagggggcctacggaggccgacgagcttatgaagcgcgtgggattccagtacgaaggtacttataagtgggttaatccccacaaactctag

SEQ ID NO: 24306 - DNA, 1548 bp, synthetic construct
  misc_feature 1..1548: note = Description of Artificial Sequence: Synthetic coding sequence
  source 1..1548: mol_type = other DNA
atggccgagcaggtggccctgagccggacccaggtgtgcggcatcctgagggaagagcttttccaaggtgatgccttccatcagtcagatacgcacatatttattattatgggtgcctctggtgacctggcgaaaaagaagatctatcccactatttggtggctgttccgagatggcttactcccagaaaatacgtttattgtcggctatgctaggagtagacttaccgtggctgacatccgaaagcagagtgaaccattttttaaagctactcccgaggagaagttaaagctggaggacttctttgcacggaattcttacgttgccgggcaatatgatgatgccgcttcataccagcgcttgaactctcacatgaatgcgttgcacctgggtagtcaggccaacagactcttctacttggctctgcctcctacagtctatgaagcagttactaagaatattcacgaaagctgtatgagccagattggatggaataggataattgtggaaaagccatttgggcgagacctgcaatccagcgatcgcctatccaatcatattagctccctgttccgggaggaccagatctatagaatcgatcattatcttggaaaagaaatggtccaaaatcttatggtccttcggtttgcaaaccggatcttcggcccaatctggaatagggataacattgcctgcgtaatcctgacctttaaggagcctttcgggactgagggcagagggggatactttgatgagttcgggattattcgcgacgtgatgcagaatcacctgcttcagatgttatgcttggtggccatggaaaaacctgccagtaccaacagcgatgatgtgcgtgacgagaaagttaaggtcctcaagtgcatttcagaagttcaagccaataacgtggtgctggggcagtacgttggaaacccagatggcgaaggcgaagccacaaagggctacctggacgacccaacagtacctcgaggtagcacaaccgcaaccttcgccgcagtggtcctgtatgtggaaaacgagcggtgggatggcgtcccattcatcctgcgttgtggaaaggccttaaatgagagaaaggcagaggtcaggctccagttccatgacgttgctggagatatatttcaccaacaatgtaaacgaaacgaactggttatcagagtacaacctaatgaggccgtatatacaaagatgatgacgaagaaacctggtatgttcttcaacccagaggagtctgagctggacctaacctatggtaacaggtacaagaacgtgaaattgccagatgcctatgaaagattgatcctggatgtattctgtggtagtcagatgcactttgtgcggtctgacgagctaagagaggcctggcgcatttttacccccctacttcatcagatcgagttagagaagcccaagcctatcccttacatctatgggagccggggccctacggaagctgacgagctcatgaagcgtgtggggtttcagtatgagggcacgtacaagtgggtcaatccccacaagctttag

SEQ ID NO: 24307 - DNA, 771 bp, synthetic construct
  misc_feature 1..771: note = Description of Artificial Sequence: Synthetic coding sequence
  source 1..771: mol_type = other DNA
atggccgagcaggtggccctgagccggacccaggtgtgcggcatcctccgggaggagctttttcaaggcgatgcctttcatcagagcgatacacatatttttattatcatgggggcttcaggggatctcgcgaagaagaagatctatccgacgatttggtggctgttccgggatggtttgctccccgagaatacgttcattgtgggttatgctagaagtcgtttaacagtggccgatataaggaaacaaagcgaaccctttttcaaggcaactccggaagagaaactgaaactggaggactttttcgcccggaattcctacgtggccggacagtacgacgatgcagcgtcataccaaaggctgaattcccatatgaatgcccttcacctggggtcccaggccaatcgacttttttatttggcgctgcctcccactgtgtacgaggccgtgactaagaatatacacgagtcttgtatgagccagattggatggaaccgaattattgttgagaaaccctttggacgggatctccagagctcggatcgtcttagcaatcatatcagttcactcttccgagaggaccaaatttatcgcatcgaccactaccttggcaaggagatggtacagaacttaatggtacttaggttcgctaatcggatattcggaccgatatggaatagggacaacatcgcttgcgtaatcttaaccttcaaagaacccttcgggactgaaggccgcggcgggtactttgatgaattcgggattatctag

SEQ ID NO: 24308 - DNA, 681 bp, synthetic construct
  misc_feature 1..681: note = Description of Artificial Sequence: Synthetic coding sequence
  source 1..681: mol_type = other DNA
  modified_base 217: mod_base = OTHER; note = uracil
atggcccggctgctgcaggccagctgcctgctgagcctgctgctggccgggtttgtgagccagagcagaggtcaagagaaaagcaagatggattgtcatggcgggatctctggcaccatttatgagtacggcgccctgaccatcgacggggaggaatatattcctttcaaacagtacgctggaaaatacgtgctgtttgtgaatgtggccagctactgaggactcacgggacagtatatcgaattgaatgctctgcaagaagaactggcaccattcggtctcgtgatccttggctttccttgcaatcaatttggaaagcaggagcctggggaaaattcagaaatcctcccaaccctaaaatatgtccgccctggggggggatttgtgccaaatttccagctgttcgagaagggagatgtgaatggcgagaaagagcagaagttctatactttcctgaaaaactcatgtcccccaacctctgagctgctgggcacctcagaccgattattttgggagcctatgaaggtgcacgatatcaggtggaatttcgagaagttcctcgtgggtcccgatggcattcccattatgagatggcatcacagaaccactgtgtcaaacgtcaaaatggacattctgtcctatatgaggcgccaggccgcactcggtgtaaagcggaaatag

SEQ ID NO: 24309 - DNA, 219 bp, synthetic construct
  misc_feature 1..219: note = Description of Artificial Sequence: Synthetic coding sequence
  source 1..219: mol_type = other DNA
atggcccggctgctgcaggccagctgcctgctgagcctgctgctggcgggctttgtatctcagtcccggggacaggaaaagtcaaagatggattgccatgggggcatttcaggaacgatctatgagtacggcgcactgacgatcgacggagaggaatatatcccttttaaacagtacgctggaaaatacgtgctgttcgtgaatgtggccagctactag

SEQ ID NO: 24310 - DNA, 633 bp, synthetic construct
  misc_feature 1..633: note = Description of Artificial Sequence: Synthetic coding sequence
  source 1..633: mol_type = other DNA
atgcccccctacaccgtggtgtacttccccgtgcggggccggtgcgcagccctgcggatgttactggcagaccagggtcagagctggaaagaggaagttgtgaccgttgagacttggcaggaaggatctctgaaggcctcctgtctgtacggccagttgcctaaatttcaggacggagatctcaccctgtaccaatccaataccatcttaaggcatctcggcagaacactgggtctctatgggaaggaccaacaagaagcggccctggtggatatggtcaacgatggcgtggaggacctccgctgcaagtacatcagcctgatctacaccaactacgaggccggtaaagatgactatgttaaggccttacctggacagctcaagccattcgaaactctgctgagtcagaaccaagggggcaaaacattcattgtgggagaccaaatttccttcgctgattacaatctgctggatttgctgctaattcatgaggtgctcgccccaggttgcctcgatgccttcccactgttgtccgcctatgtgggcagactatccgcgcgccccaaactgaaagctttcctggcctcaccagagtatgttaatttgcctattaacggaaatggaaaacagtag

SEQ ID NO: 24311 - DNA, 2184 bp, synthetic construct
  misc_feature 1..2184: note = Description of Artificial Sequence: Synthetic coding sequence
  source 1..2184: mol_type = other DNA
atggccttccagaaggccgtgaagggcaccatcctggtgggcggcggagccctggcgaccgtgctggggctcagtcagttcgcccactatcgtcggaaacaaatgaaccttgcatatgtgaaagctgctgactgtatcagtgaacccgttaatagggagcctccctctagagaggcccagctcttaactttacagaacacctctgagtttgatattctggtcatcggaggcggcgccacaggtagtgggtgcgccctggatgcagtaacacggggtctcaaaacagctcttgtggagcgagacgacttctcgagtggaaccagctccagatccactaagcttatccacggtggcgtgaggtatttgcaaaaagcaattatgaagctggatattgaacaataccgaatggtgaaggaggccttacacgagagggctaacctgctcgagatcgctccacacttgtcagctcctttgccaattatgttacctgtgtacaagtggtggcagctgccgtattactgggtgggtatcaagttgtatgatttagtggcaggtagtaactgcctaaaaagctcatacgtgctgtctaagtcgcgggctctagagcactttcccatgctgcagaaggataagctagtgggagccatcgtttattatgatggccagcataacgacgcaaggatgaatttggcgatagctctgacagcagcacggtacggtgccgctactgcgaactacatggaggtcgtgtcactgctcaagaagaccgatccccaaactggtaaggttcgcgttagcggggctagatgtaaagatgtgctgaccggccaggaattcgacgtgagagcaaagtgtgttataaacgctacgggcccttttaccgactctgtacgtaaaatggacgataaggacgctgcagcaatttgtcagccatctgccggcgttcacatcgttatgccagggtactattctccagaaagtatgggtctgttagatcctgcaacgtctgatggccgggttatcttttttctaccatggcagaaaatgacgatagccggaaccacggacaccccaaccgacgtgacacaccacccaatcccgtctgaagaggacatcaattttattctgaatgaggttcgaaattatctgtcgtgcgatgtcgaagtcagaaggggcgatgtacttgccgcatggagcggcattaggcctctggtgaccgaccctaaatccgccgacacccagtccataagccggaaccacgttgttgacataagcgagagtggcctaataacaatagcaggaggcaagtggaccacctacagatcaatggccgaagatactatcaatgctgcagtgaagacccataacctgaaagccggcccttcgcggaccgtggggctcttcctgcaaggcggcaaggactggtcccccactctgtatattcgcctggtgcaggactatggcctcgagagcgaagtagctcagcatcttgctgcaacctacggagacaaggcttttgaagtcgccaaaatggcgagtgtgaccggaaaaaggtggccaattgtaggagtgcgcctggtgtccgaattcccatatatcgaagcagaggttaagtacggcatcaaagagtacgcctgtaccgctgtggatatgatatcacgtcgaacacgactggctttcctgaatgtccaggccgccgaagaggccctgcctcgcattgtcgaactgatggggcgagagctcaactgggacgattataagaaacaggagcagctggaaaccgctcgcaagttcctctattacgagatggggtacaaaagccgctccgagcagttgacagacagatccgagatatccctgctgccctctgatatcgatcggtacaaaaagcggttccataaatttgatgcagaccagaaaggcttcattaccattgtagacgttcagagggttcttgagagtatcaatgtgcagatggatgaaaatacattacatgagatcctaaacgaggtggacctcaacaaaaacggccaggttgagcttaatgagtttctgcaactcatgtcagctatccagaagggccgtgtgtccggttcaaggctggcaatcctaatgaagactgcagaagagaaccttgatagacgagtccctatacccgtcgaccggagctgcggcggcctgtag

SEQ ID NO: 24312 - DNA, 1503 bp, synthetic construct
  misc_feature 1..1503: note = Description of Artificial Sequence: Synthetic coding sequence
  source 1..1503: mol_type = other DNA
atgaacctggccatcgccctgaccgccgcccggtacggcgccgccacagcaaactatatggaagtggtgagtttgttaaaaaagacggatcctcagacagggaaggttagggtgtctggtgcccgatgtaaagacgttctaacgggtcaggagttcgatgtgcgcgcaaagtgtgtcatcaatgctacaggcccatttacagacagcgtgcgaaagatggacgacaaggatgcggctgccatctgtcaaccctccgccggcgtgcatattgtaatgcccggatattactcccccgaatctatgggcctcttggacccagccacatccgatggcagagtgatttttttcctgccatggcagaagatgacgatcgcaggcaccaccgacactcccaccgatgtcactcatcatcccatacccagcgaggaagacataaatttcattctgaacgaggtgaggaactacctgtcttgcgatgtggaggtgagacgaggggatgtccttgcggcttggtccggaataagacccctggtgactgaccccaaatctgccgacacacagagtatttcccggaatcatgtggtagacatttcagagtctggcctgatcacaatcgccggggggaaatggactacctaccgctctatggcagaggacacaatcaatgccgctgtgaagacacataatcttaaggcagggccgtcacggacagtgggcttattcttgcagggcggtaaagattggtctcccacactctacattcgattagtgcaagattacgggctggaatcggaggtggcacagcatttagccgcgacctacggcgataaagctttcgaggtggccaagatggcatccgtcactgggaagagatggcccattgtaggagtgcggcttgtgtctgagtttccctatattgaggcagaggtaaaatacgggataaaagagtatgcctgcacagctgtcgacatgatttcaaggcggaccagattagcctttctgaacgtccaggctgcggaagaagccctcccccgtatcgtagaactgatgggaagggagctcaactgggatgactacaagaaacaagagcagctagagactgccaggaagttcctgtattacgagatgggctacaagagccgctctgagcagctcactgaccgtagcgaaatttctcttctccctagcgatatcgatcgatacaagaagagatttcataagttcgatgctgaccagaaggggttcatcaccatagtggacgtccagcgggtgcttgagagtatcaacgttcagatggacgaaaacaccctgcacgagatactaaacgaggtggacctcaacaagaacggccaagtcgaactgaatgaatttctccaactcatgtcagccatacagaaggggagagtaagcgggtcacggctggccattctaatgaaaactgcagaggaaaaccttgatcggagagtgcccattccagttgatcgcagctgcgggggcttatag

SEQ ID NO: 24313 - DNA, 2184 bp, synthetic construct
  misc_feature 1..2184: note = Description of Artificial Sequence: Synthetic coding sequence
  source 1..2184: mol_type = other DNA
atggccttccagaaggccgtgaagggcaccatcctggtgggcggcggcgcgcttgctacagtgcttggattgtctcagttcgctcactaccggcgtaagcaaatgaatcttgcatacgtgaaagccgctgactgtatttccgagcctgtgaatagagaaccaccttctcgggaagcgcagctccttaccctccaaaatacgtctgaattcgacatacttgtgattggcgggggtgccaccggctccggatgcgccttagatgccgtcacccggggcctgaaaacagccctggttgagagggatgatttcagctccgggacctcaagccgttctactaagctcatacacggaggcgtgcgctacctccaaaaagccattatgaagctggacattgagcagtaccgaatggtgaaggaggcgctccacgaacgggcaaatctgctggaaatcgcccctcatctctcagcaccgttaccgataatgctgcctgtctacaaatggtggcagttgccttactattgggttggcattaaactatacgaccttgtggccggaagcaactgcttaaagtcatcatatgttctgagtaaaagtagagccttagaacacttccccatgctacagaaagacaaacttgtcggggcgatcgtttattacgacggtcagcataacgatgccaggatgaacttggctatcgcgttaactgcagccaggtacggcgctgctacagccaattatatggaagtagttagtctcctgaaaaagacggaccctcagaccggaaaagtgagagtgtcgggggccagatgtaaagacgtgctcactggccaagagttcgatgtcagggcaaaatgtgtgatcaatgcgactgggccctttaccgattccgtgcggaagatggacgacaaagatgccgccgcgatttgccaacccagcgcaggagtgcacatcgttatgccaggctattattccccagaatccatgggcctgttagaccccgcaacttctgatggaagagtgatattcttcctaccatggcaaaagatgactatagctgggactacggatactcccaccgacgtgactcaccatccaataccgtccgaggaggatattaattttattcttaatgaggtgagaaactatctttcctgcgacgtggaagtgcgtcggggagacgtgttggctgcctggtctggtattaggcctctggtgaccgaccctaagtcggcagatacacaatctattagtagaaaccacgtcgtggacatttcagagtctggtctcatcactattgcagggggaaagtggacgacatacaggtcaatggctgaggatactattaatgctgcagtgaagactcataacctcaaggcaggcccatcccggaccgttggactgtttttacagggcgggaaagattggtccccgacgctttatatccgactcgtacaagattatggcttggaatccgaggtcgcacagcacctggcagctacgtacggcgacaaggctttcgaggtggcaaagatggcctcagtcactggcaaacgctggccaatcgtgggtgttagattagtcagtgaattcccatacatcgaggcagaggtcaaatacggaataaaagagtacgcatgtacagcggtggatatgatcagccggagaacccggttggcttttctcaacgtccaggcagccgaagaggcactccccaggatcgtggagctgatgggaagggagttaaattgggacgattataaaaaacaggagcagctggaaactgccaggaaatttttatactacgagatgggctataaaagccgaagcgagcagttgacggatcgttcggagattagcttgcttccatcggacatcgaccgctataagaagcgatttcataagttcgatgccgatcagaagggttttattacaattgtggacgtccagcgagtcctggaaagcatcaatgtgcagatggacgaaaataccttgcacgagatactgaacgaggtcgacctcaataagaacgggcaggtagagctcaacgagtttctgcaattaatgagtgctatccagaagggtagggtttctggcagccgcctcgcgatacttatgaagaccgccgaagagaacctagaccggagagtgccaatacctgtcgatcggtcatgcggtggtctctag

SEQ ID NO: 24314 - DNA, 2184 bp, synthetic construct
  misc_feature 1..2184: note = Description of Artificial Sequence: Synthetic coding sequence
  source 1..2184: mol_type = other DNA
atggccttccagaaggccgtgaagggcaccatcctggtgggcggcggggctttagctactgtgttgggtcttagccagtttgcgcactacaggagaaaacaaatgaatcttgcctatgtcaaggcagccgactgcatttccgaacccgtgaaccgcgagcctcccagtcgcgaagcccaactgctcactttacaaaatacgtctgaatttgatatcctggtaatcgggggcggagctactggttccggatgcgcactggatgccgtgacaagaggccttaagacagcactggtcgaacgagatgatttctccagtggcacgtcaagccggagcacaaagctgatacatggtggcgtcaggtacttgcaaaaggccatcatgaagctggacattgagcagtaccgaatggttaaagaggccctccatgagcgggcaaacctgctggaaatagcccctcatctgagcgctcccttgccaatcatgctgcccgtttacaagtggtggcagctgccatactactgggtgggaattaagttatacgatctcgtggcaggatctaactgcctcaaaagcagctacgtgctgtccaagtctagggctttagaacacttcccaatgctgcaaaaggacaaactcgtgggtgccattgtctactacgacggacaacataatgacgcccgcatgaatctggccatagccctgaccgcagctcgatacggtgctgcgacagccaattacatggaagtcgtgagtctgttaaaaaaaaccgaccctcagaccggaaaggtacgggtctccggcgctaggtgtaaggacgtgctcaccggacaggagtttgatgtgcgcgccaaatgcgtgataaacgctaccggcccctttactgattccgtgcggaagatggatgacaaagacgctgccgcaatctgccaaccttcagctggagttcatattgtgatgcccggctactactcacccgagagcatggggctgttggacccggccacatcagatggccgggtaatatttttccttccatggcagaagatgacgattgccggtaccacagatacacccacagacgtgacgcaccaccccataccttctgaagaagacattaatttcatcttgaatgaggtacggaattatctttcctgcgacgtcgaggtccggagaggtgatgtcctcgctgcctggtccggaattcgccctctggtgacagatcccaaatcagccgacacccaaagcattagtagaaaccatgtcgtcgatatcagtgagagcggcttaattaccattgctggcggtaagtggacgacataccgttcgatggccgaagatacaataaatgccgctgtgaaaacacacaacttgaaggccggaccctccagaacagtcggcctgttcctgcaaggcggcaaggactggtctcctacgctctacattagacttgttcaggattatggattggaaagtgaagtggctcagcacctggcggccacttacggtgacaaggccttcgaagttgctaagatggccagcgtgacaggaaagcgctggcccatagtaggcgtgagattagtttcagagttcccctacatcgaggcggaggtgaaatatgggataaaggaatacgcatgcaccgcagtggatatgatctctaggaggacaaggctggccttcctcaacgtacaggcggccgaagaagccttgccaaggatagttgaactcatgggccgcgagttgaactgggatgactacaaaaaacaggagcaattagaaactgcccgcaaatttttgtattatgaaatggggtataaatctcgcagcgaacaactgacggaccgcagcgaaataagtcttctgccatccgacatagaccgatacaaaaagaggtttcacaaattcgacgctgaccagaaagggttcattaccattgtcgatgtgcaaagggttttggagagtataaacgtccagatggacgagaatactctgcacgagatacttaacgaggtggacctgaacaagaacgggcaggtggaattgaatgaattcctgcagctcatgtccgctatccagaaggggcgtgtctctggctcaagactggccatcctgatgaaaacagctgaagagaatctggacagaagggtgcctattcccgtggatcggagttgtggaggcctgtag

SEQ ID NO: 24315 - DNA, 330 bp, synthetic construct
  misc_feature 1..330: note = Description of Artificial Sequence: Synthetic coding sequence
  source 1..330: mol_type = other DNA
atggccttccagaaggccgtgaagggcaccatcctggtgggcggcggtgccttagctaccgttcttggcctttcacagttcgctcactataggcgcaagcagatgaacctagcgtatgtcaaagctgctgattgcatcagcgaaccggtaaaccgggaacctccaagtcgcgaagcccaactgctgactctccagaatacctctgagttcgacatccttgttattgggggcggcgctaccggatcgggatgtgccctcgacgctgtcactagaggattgaagactgccctcgtagagagggatgacttctcctccggaacttccagctag

SEQ ID NO: 24316 - DNA, 2184 bp, synthetic construct
  misc_feature 1..2184: note = Description of Artificial Sequence: Synthetic coding sequence
  source 1..2184: mol_type = other DNA
atggccttccagaaggccgtgaagggcaccatcctggtgggcggcggagcattggcaacagtccttggtttgtcccaattcgcccactatcgccgtaaacagatgaatctcgcttacgtgaaggccgctgactgtatcagcgagcctgtaaaccgtgagcctccatctcgagaggcgcagctcctgacattgcagaacactagcgagtttgacatcttggtgatcggcggaggggccacaggaagcgggtgcgctctggatgcagttacccgtggcctgaaaactgcactggtggaacgggacgatttttcaagtgggacgagctcccgctccactaaacttatccacggaggggtgcgatatctgcagaaggcgataatgaaactggacatagagcaatatcgcatggtaaaggaggctctgcacgagcgtgcaaacttgctggagatcgccccacacttatctgcccccctgcctatcatgctgcccgtttacaaatggtggcagctgccttactactgggtgggaataaaattgtatgacctggtagctggaagtaattgtctgaaatcgtcttacgttctgtcgaaatcccgggccctggagcacttccccatgcttcaaaaagataagcttgttggtgccatcgtatactacgacggtcagcataatgatgcccggatgaacctcgccatcgcactgaccgctgcccgctacggagctgccacagcaaattacatggaagtagtgtccctactgaaaaaaaccgacccccagaccggaaaagtacgagtcagtggagctcgatgtaaagatgtgctaactggccaggaattcgatgtgcgcgccaaatgcgtgataaacgccaccggtcccttcaccgatagtgtacgaaagatggacgataaagacgccgcagctatctgccagccctccgctggggtccacattgtgatgccagggtattacagcccggagtcaatggggctactcgatcccgccacaagtgacggcagggtgatttttttcctgccatggcagaagatgaccatcgccgggactacggacacgcccactgatgtgacgcaccacccaatccccagcgaagaagatataaactttatactgaatgaggtcaggaattacctgtcctgtgatgttgaagttaggagaggcgacgtgctcgccgcttggtccggaatcagaccgttggtgactgacccaaaaagcgccgacacccagtcgatcagccgcaaccacgtcgttgacatatccgagtcagggctgatcacaatagcaggaggtaagtggacaacataccgttctatggcagaggacaccataaatgccgccgtgaaaactcataatttaaaagctgggccttctcgcactgtcggactttttctgcagggcggcaaggactggtctcctaccctgtacattcgtctcgtccaggactatggattggagagtgaggtggcccagcatttggcagctacttacggagacaaagcctttgaggttgctaaaatggctagtgtgaccggcaagagatggccgattgtgggtgtgcgcttagtaagcgagttcccctacattgaggctgaggttaaatacggaattaaagaatacgcctgcacagctgtcgatatgatttccaggagaacccgcctggcgttcctgaacgtgcaagccgcagaggaggcattacctcggattgtggagctcatgggaagagaattaaattgggatgactataaaaagcaagagcagctcgaaacggccagaaagtttttgtattatgagatgggctataagagtcgatccgagcagctgaccgataggtcagagatctcactccttccctccgatattgaccgatataaaaagcggttccacaagttcgatgcggaccagaagggatttatcacgattgttgatgtgcagcgtgttcttgagagcattaacgttcagatggatgagaatactttacatgaaatcctgaacgaggtggacctaaataagaacggccaagtagaacttaatgagttcctgcaacttatgtccgcaattcagaagggcagggtgagtggtagtcggctagcaatcctgatgaagacggcagaggaaaatcttgaccgtagggtaccaattccagttgaccggtcctgcggagggctgtag

SEQ ID NO: 24317 - DNA, 1140 bp, synthetic construct
  misc_feature 1..1140: note = Description of Artificial Sequence: Synthetic coding sequence
  source 1..1140: mol_type = other DNA
atggccttccagaaggccgtgaagggcaccatcctggtgggcggcggtgctctcgctaccgtgctgggcctttcacagtttgcccactacaggagaaagcagatgaaccttgcctatgtgaaggcagccgactgcatctccgaaccagtgaacagggaaccccctagcagagaagcacagctgctcacacttcaaaatacatctgaatttgacattctggtgatcggcgggggagctacaggcagcggctgtgccctggacgccgtgactagaggcctgaaaactgccctagtcgagagagacgactttagctcagggacctcctctcggtctactaaattaattcacggcggcgttcgctacctgcaaaaggctatcatgaaacttgacatcgagcagtataggatggtgaaagaggcattgcatgaacgggccaatttgttagagattgctccgcatctgtctgcgccactgcctatcatgctgcctgtgtataagtggtggcagcttccctactattgggttggcatcaaactctatgacctggtcgcaggctccaattgtttgaaaagctcctacgttttgtccaagagcagggctctggagcactttccaatgctgcaaaaagataaactagttggggctatcgtctattacgatggccagcacaacgatgctcgaatgaacctggccatcgccctgaccgcagctaggtatggagcagccacagcgaattacatggaagtagtgtccctgctcaagaaaaccgacccacaaactgggaaagtgagggtgtctggcgccagatgtaaggacgtgctcacggggcaagagttcgatgtacgggcgaagtgtgtaataaacgcgaccggaccctttaccgattccgttagaaaaatggatgataaggacgcagcggcaatttgtcagcccagtgcgggagtgcacatcgtgatgccggggtattactcgccagagagcatgggcttactcgatccagccacttccgacggtcgggtcatattctttcttccatggcaaaaaatgacaattgccggcaccacagatacaccaactgacgtcacccaccacccaataccgagcgaagaggatataaattttattcttaatgaagtgtag

SEQ ID NO: 24318 - DNA, 1263 bp, synthetic construct
  misc_feature 1..1263: note = Description of Artificial Sequence: Synthetic coding sequence
  source 1..1263: mol_type = other DNA
atgagcggccggccccggaccaccagcttcgccgagagctgcaagcccgtgcagcagcctagcgctttcggaagcatgaaagtgagtcgcgacaaagacgggagtaaggtgaccactgttgtggctaccccgggccagggaccagaccggccccaggaagtctcctatactgacacaaaggttatagggaacggcagcttcggggtagtgtatcaggccaagttatgtgacagcggtgagctggtcgcaataaaaaaggtgctgcaagacaaaagattcaaaaatcgagagctgcagatcatgcggaaattggatcattgcaacatagttaggctccggtacttcttttattcttctggagagaaaaaggacgaggtttatttaaacctagtgctggattatgtcccagagactgtgtacagagtggcgcgacactactcccgggcaaaacagaccctgcctgtgatctacgtcaaactctacatgtatcagcttttcaggtcccttgcatatatccactcttttggcatatgtcacagggacataaagccccagaacctgctactggacccagacacagccgtgctgaagctgtgcgatttcggtagtgctaaacagctggtgagaggcgaacctaacgtcagctatatctgttcgagatattacagggcgcccgagctaatcttcggagccactgactataccagctcaattgatgtctggtcagccgggtgcgtcctggctgagttgctgctaggccagccaattttccccggtgattcaggagtcgaccagctggtggaaattattaaggttctcggcacacccacgcgagaacagatccgggagatgaatcccaactatacagagttcaagttcccccagattaaggcccacccttggacgaaggttttccgtccacgaacccctccagaggcaatagcgttgtgctccagacttcttgagtataccccaactgccaggttaactcctctcgaggcctgcgctcactctttcttcgatgaactgagggacccaaacgtgaaactgccaaacggaagagacacaccagcccttttcaacttcactacccaggagctctcaagtaacccaccacttgcaacaattctaatacctccccacgccaggatacaggccgctgccagcacccctactaatgccacagcagcctccgatgctaacactggagatcggggccaaacgaataacgctgcatctgcctccgccagcaattctacctag

SEQ ID NO: 24319 - DNA, 1302 bp, synthetic construct
  misc_feature 1..1302: note = Description of Artificial Sequence: Synthetic coding sequence
  source 1..1302: mol_type = other DNA
atgagcggccggccccggaccaccagcttcgccgagagctgcaagcccgtgcaacagccgagtgcatttgggagcatgaaggtgagtagggataaagatggcagcaaggtgaccactgtggttgcaacgcccggtcaggggccggaccggccacaggaagtgagctatactgacacaaaggtaatcggcaacgggtcttttggcgtcgtgtatcaggccaaactttgtgattccggggaactggtggctattaagaaggtcctgcaagataagcgtttcaagaatagggagcttcagatcatgaggaaactggatcattgtaacatcgtgcgcctacgatattttttctactcaagcggggaaaagaaggacgaggtctacttaaatttagtgctcgattacgtacctgaaaccgtctaccgtgtggccaggcactactcgcgggctaagcagaccctgcccgttatctacgtcaaattatacatgtaccagctgttccgctctctggcatatatccactcattcggtatttgtcatcgagatattaaaccacagaatttgctccttgatccggacaccgcggttctgaagctgtgcgatttcggctccgctaagcagttggtcaggggcgaacccaatgtgagctacatttgctcccgttattacagggctccagaactcatctttggtgctacggattatacctcttctatcgacgtgtggtctgccggctgcgtgctggccgaactcctcctgggccagcctatcttccctggcgacagcggagttgatcaattggtggaaatcattaaggttctggggacaccaactcgcgagcaaataagagagatgaaccccaactatactgagttcaaattcccccagatcaaggcacacccatggacaaaagatagtagcggcacgggacacttcacctcaggcgttcgggtgttccgcccgagaacaccaccggaagctatcgcactttgcagcagactactggaatacacgcccactgcaagactgactcccctggaagcctgtgctcactcattttttgacgaactgagggaccctaatgtcaaactgccaaatggccgagatacgccagccctgttcaacttcacaactcaggagctcagctctaatccacccctggctactatcctaattccaccccacgcacgaattcaggccgctgcttctaccccaactaatgccaccgccgcaagcgacgccaatactggggacaggggccaaactaataatgccgcctccgcctcagcttctaattccacatag

SEQ ID NO: 24320 - DNA, 315 bp, synthetic construct
  misc_feature 1..315: note = Description of Artificial Sequence: Synthetic coding sequence
  source 1..315: mol_type = other DNA
atgaaccccaactacaccgagttcaagttcccccagatcaaggcccatccgtggacaaaggtctttcgacctcgaacacctccagaggccatcgccctctgtagcaggctgctcgagtacacgcccaccgctagactgacacctcttgaagcctgcgcccactcattcttcgatgaactgagagatcccaatgtcaagctgcccaacggtcgcgacacacctgccctcttcaatttcacaactcaggatgccaataccggagacagaggccagactaacaacgctgcgtctgccagcgcatcaaatagcacttag

SEQ ID NO: 24321 - DNA, 837 bp, synthetic construct
  misc_feature 1..837: note = Description of Artificial Sequence: Synthetic coding sequence
  source 1..837: mol_type = other DNA
atggaggagaacatggaggagggccagacccagaagggctgcttcgagtgctgtatcaaatgccttggaggaattccatacgcttcgctgattgccaccatcctgctgtacgctggcgtggcgctgttctgcggatgcgggcatgaagccctgagcggaaccgttaatatacttcagacgtacttcgagatggccaggaccgccggcgacaccttggacgtgtttactatgatcgacatattcaaatacgtcatctacggaatcgcggctgctttctttgtgtacgggattctcttaatggtggaagggttttttaccacgggcgctattaaggatctgtacggcgatttcaaaatcaccacttgcggacgctgtgtgagcgcatggttcatcatgctgacctacctgttcatgctcgcctggctcggcgtaactgcattcacttctttacccgtatatatgtacttcaacctgtggactatttgccgaaacacgactctggtcgagggcgcaaatttgtgcctcgatctaaggcagttcgggattgtaacgattggtgaggaaaagaagatttgcacagtttcagaaaactttttaaggatgtgcgagagcactgagctcaacatgacctttcatctcttcatcgttgcgttggcgggagctggagcggcagttatcgcgatggtacactatcttatggttctgtcagctaactgggcttacgtgaaggatgcctgtaggatgcagaagtacgaagacattaagagcaaggaagaacaggagctccatgatatacacagtacacgcagcaaggaacgtttaaacgcatatacctag

SEQ ID NO: 24322 - DNA, 837 bp, synthetic construct
  misc_feature 1..837: note = Description of Artificial Sequence: Synthetic coding sequence
  source 1..837: mol_type = other DNA
atggaggagaacatggaggagggccagacccagaagggctgcttcgaatgttgtattaaatgtctcggcggcataccttacgccagcttgatcgctactattctgttgtacgccggcgtggcgctattctgcggatgcggccacgaagctctttccggaacagtgaatatcctacagacatatttcgaaatggcaagaactgctggagacactctggacgtcttcacaatgatcgatatttttaagtacgtcatatacggaatcgctgcggcttttttcgtgtacgggatattattgatggtggagggcttctttaccaccggtgccatcaaggatctctacggggacttcaagattaccacctgcggccggtgcgtctccgcctggttcatcatgctaacctacctttttatgctggcttggctaggtgtaaccgctttcacgtctctaccggtgtacatgtatttcaatttatggactatctgtcgtaatacgaccttggtagaaggggcaaatctctgcctggatttgcgtcaatttggtattgtgacaatcggcgaagagaagaagatctgcaccgtatcggagaacttcctccgcatgtgcgagagcacagaactgaatatgaccttccatctatttatagtggccctggcaggggccggcgcagccgtgatcgccatggttcactacctgatggtactatccgctaactgggcctatgtcaaggatgcttgtaggatgcagaaatatgaggacatcaagagtaaggaagagcaggagttgcatgacatccactcaactagatccaaggagcgcttaaacgcgtacacatag

SEQ ID NO: 24323 - DNA, 33 bp, synthetic construct; identical to SEQ ID NO: 10859
  misc_feature 1..33: note = Description of Artificial Sequence: Synthetic coding sequence
  source 1..33: mol_type = other DNA

SEQ ID NO: 24324 - DNA, 804 bp, synthetic construct
  misc_feature 1..804: note = Description of Artificial Sequence: Synthetic coding sequence
  source 1..804: mol_type = other DNA
atgggctgcttcgagtgctgcatcaagtgcctgggcggcatcccctacgcatcgctgattgcgaccatcttgctctacgccggggtggctctgttctgcggctgcgggcacgaggccctgtctggtacggtcaatatcctgcaaacctatttcgaaatggcgcgcacagccggcgatacattagatgtgttcaccatgattgatatctttaagtacgtgatctatggcatcgccgccgcttttttcgtttacggtattctgttaatggtcgagggatttttcaccaccggggcaataaaagacctgtatggtgattttaaaatcacaacgtgcggtaggtgcgtcagcgcttggttcataatgctgacatacctgttcatgcttgcctggctgggagtaacggccttcacgagcctgccagtatatatgtactttaacctgtggacaatctgccgcaatacgactcttgtggaaggggcaaacctatgcctcgacctccgccagttcgggatcgtcaccatcggcgaggaaaaaaaaatctgcaccgtgagcgagaatttcctgcgaatgtgtgaatctaccgaactgaatatgacctttcacctctttatcgtggccctggcaggcgccggcgctgctgtgatcgccatggtgcattacttgatggtgctctcagcaaattgggcgtacgtcaaggacgcatgtagaatgcagaagtatgaggatatcaaatccaaagaagagcaggaattgcacgacatccactccactagaagtaaagaaaggctgaacgcctacacttag

SEQ ID NO: 24325 - DNA, 390 bp, synthetic construct
  misc_feature 1..390: note = Description of Artificial Sequence: Synthetic coding sequence
  source 1..390: mol_type = other DNA
atggaggagaacatggaggagggccagacccagaagggctgcttcgagtgctgcatcaagtgcctgggcggaattccctatgcctccttaattgccaccatccttttatatgccggagtagcgcttttttgcgggtgcggtcacgaggcgctgtccggtactgtgaatatcctgcagacttacttcgaaatggccaggacagcaggcgacactctggacgtctttaccatgattgatatctttaagtatgtcatttatggtattgcagcagccttttttgtctacggcattctgcttatggtggagggcttcttcacaactggggctattaaggatttgtatggcgattttaagatcactacttgtggtaggtgcgtgtctgcttggtag

SEQ ID NO: 24326 - DNA, 816 bp, synthetic construct
  misc_feature 1..816: note = Description of Artificial Sequence: Synthetic coding sequence
  source 1..816: mol_type = other DNA
atgaccgacctggagggctgcttcgagtgctgcatcaagtgcctgggggggatcccctacgcctctctgattgccaccatccttctatatgcaggagtagcacttttttgcggctgtggacacgaagccctaagtggtaccgtgaacattctgcaaacctacttcgagatggcgcgaactgctggagataccttggacgtgttcactatgatagatattttcaagtatgtcatctatgggatcgctgccgcttttttcgtgtacggaatcctcttaatggttgaaggattttttaccacaggtgcaataaaggacttatatggagatttcaagatcaccacgtgcggcaggtgcgttagtgcctggttcatcatgctaacatatctgttcatgttggcctggctgggggttacggcatttaccagccttccggtgtacatgtatttcaatctgtggactatctgtaggaataccacactggtggaaggtgctaacctctgcttagatctgaggcagtttggaattgtcacaattggggaggaaaagaaaatttgcaccgtgagcgagaattttctgaggatgtgtgagtccactgaactcaacatgacatttcacctctttattgtggcgctggccggcgcaggggctgccgtgatcgccatggtacactatcttatggtgttgagtgctaattgggcctacgtcaaggatgcctgcagaatgcaaaaatatgaagacataaagtcaaaggaagagcaggagctccatgacatccactccacacgatctaaggagagactgaatgcttacacctag

SEQ ID NO: 24327 - DNA, 1206 bp, synthetic construct
  misc_feature 1..1206: note = Description of Artificial Sequence: Synthetic coding sequence
  source 1..1206: mol_type = other DNA
atgatgggcctgggcaacggccggcggagcatgaagagcccccccctggtgcttgctgcacttgtcgcctgtataatcgtgttaggatttaactattggatagccagctccagaagcgtagatctgcagacgagaattatggagctcgaagggcgggtgcgacgggccgcagctgaaagaggcgccgttgagctgaagaagaatgagttccagggcgaactggagaaacagcgagaacagctcgacaagatccagtccagccacaacttccagcttgaaagcgtgaataagttataccaggacgagaaagcggtacttgtgaacaacatcacgaccggcgagcgactcattagggttctgcaggaccagctgaaaacactccagcggaattacggcagacttcagcaggacgtgctgcagtttcaaaaaaatcagactaatcttgaacggaaattttcctatgatctgtcccagtgcattaatcaaatgaaggaggtgaaagagcaatgtgaagagcggattgaagaggtgacgaagaagggcaacgaggcagttgcctctcgcgacctgagtgaaaacaacgaccagcggcagcagctacaggccctcagtgagcctcagcccaggctgcaagcggcaggactgccgcacactgaagttccccagggcaaggggaacgtgttagggaactccaaaagtcagacaccagctcccagctcagaggtagtgctcgacagcaaaagacaggtggaaaaagaggagaccaatgagatacaggtcgtcaacgaggagcctcaacgagatcggctgcctcaagagccaggaagggagcaggtcgtggaagacaggccagtgggaggtcgggggtttggcggtgctggggaacttggccagacgccccaggtgcaggccgcactgagcgtgtctcaggaaaacccagaaatggaggggcctgaacgtgatcaactggtcatcccagacgggcaggaggaggagcaggaggcagccggcgagggccgaaatcagcagaagcttagaggcgaagatgactacaacatggatgagaatgaggccgagagcgaaaccgacaagcaagcagccctggcaggaaacgataggaacattgatgtgttcaatgtggaggaccagaagcgtgacaccatcaacctcctggatcaacgagaaaagaggaaccatacactgtag

SEQ ID NO: 24328 - DNA, 1206 bp, synthetic construct
  misc_feature 1..1206: note = Description of Artificial Sequence: Synthetic coding sequence
  source 1..1206: mol_type = other DNA
atgatgggcctgggcaacggccggcggagcatgaagagcccccccctcgtgctcgcagcactagtggcctgcataattgtactgggcttcaactactggattgcgtcctcaaggtccgtggacttacaaacccgcataatggagttggaaggacgagttagaagagctgccgctgaacgcggggcagttgagctgaaaaagaacgaattccagggggaacttgaaaagcagagggaacagttggacaaaattcagtccagccacaacttccaactggagagtgtcaataagctgtaccaggatgagaaggccgtactcgtaaataacatcacgaccggcgagcgcctgatacgggtactccaagaccagttgaaaacgctgcagagaaactatgggcgcctgcagcaagatgtgctgcaatttcagaagaaccagaccaacctggaacgaaagttttcttatgacctaagccagtgcatcaaccagatgaaagaagtgaaagagcaatgtgaagaacggatcgaggaggtgacgaagaagggcaatgaggcagttgcttcacgtgacctgagtgaaaataacgatcagcgccagcaactgcaggccctgtctgaaccccagcctcgactgcaggcagccgggctaccacataccgaggtaccgcagggaaaggggaacgttttgggcaactcaaagtcccaaacaccggccccatcttccgaagtggttctcgactccaagagacaagtcgagaaggaagagaccaacgagatccaagttgtaaatgaggaacctcagcgagaccggctgcctcaagagcccgggcgagaacaagtggtggaggacaggcccgtagggggcagaggctttggaggagctggggaactggggcaaacccctcaagttcaggctgcactcagcgtgtctcaagaaaaccccgaaatggagggccctgagcgagaccagctggtgatcccggacggacaggaggaagagcaggaggcagcaggcgagggacgcaatcagcagaaacttcggggagaagatgactataacatggacgagaacgaggccgagagtgagaccgataagcaggccgcattggccggcaacgataggaacatcgatgtgttcaatgtggaggatcagaagcgggacactatcaatctgctggaccaaagggaaaagcgaaaccatacgctgtag

SEQ ID NO: 24329 - DNA, 243 bp, synthetic construct
  misc_feature 1..243: note = Description of Artificial Sequence: Synthetic coding sequence
  source 1..243: mol_type = other DNA
atgatgggcctgggcaacggccggcggagcatgaagagcccccccctagtactggccgctcttgtcgcgtgtataattgtgttgggcttcaattactggatcgcttcttcaagatcggtcgacctgcagacccggattatggaactcgagggccgggtccggcgggccgctgcggaacgaggagctgtggaactgaagaaaaatgagtttcagggtgagctcgagaaacagcgcgagcaatag

SEQ ID NO: 24330 - DNA, 366 bp, synthetic construct
  misc_feature 1..366: note = Description of Artificial Sequence: Synthetic coding sequence
  source 1..366: mol_type = other DNA
atgatgggcctgggcaacggccggcggagcatgaagagcccccccctcgttctggcagcacttgtcgcgtgcattatcgtgctgggattcaactactggattgcatccagccgatccgtggatctacaaacccggattatggaattggaaggacgggtgagacgtgcggccgctgaaagaggagcagtcgagctcaagaaaaatgagttccaaggagaactggagaaacagagagaacagctggacaagatccagagcagccataactttcaactcgaatcagtgaataagttatatcaggacgagaaagccgtgttggtgaataatatcacaacaggcgaaagactgattcgcgtgttgcagtag

SEQ ID NO: 24331 - DNA, 279 bp, synthetic construct
  misc_feature 1..279: note = Description of Artificial Sequence: Synthetic coding sequence
  source 1..279: mol_type = other DNA
atgaagcccatccagaagctgctggccggcctgatcctgctgacctggtgtgtggaagggtgttcgtcccagcactggagttatggccttagacctggtggtaaaagagacgccgagaacctgattgactcgttccaggagattgtcaaggaagtgggtcagttggccgagacgcaacgattcgaatgcacgactcaccagcctcggagccctttgagggacctgaagggagctttggagtcactgatagaggaagaaaccggacagaagaaaatttag

SEQ ID NO: 24332 - DNA, 279 bp, synthetic construct
  misc_feature 1..279: note = Description of Artificial Sequence: Synthetic coding sequence
  source 1..279: mol_type = other DNA
atgaagcccatccagaagctgctggccggcctgatcctgctgacctggtgcgttgaaggatgctctagccaacactggtcgtacggactcagaccaggtgggaaacgtgatgccgagaacctgatcgattcattccaagaaatagtgaaggaagtgggccagttggctgagacgcagcgatttgagtgtaccactcatcagccccgctcacctcttcgggatctcaagggcgccctggaaagcctgattgaagaagaaacaggacaaaagaagatatag

SEQ ID NO: 24333 - DNA, 774 bp, synthetic construct
  misc_feature 1..774: note = Description of Artificial Sequence: Synthetic coding sequence
  source 1..774: mol_type = other DNA
atgcccgccagcatgttcagcatcgacaacatcctggccgcccggcccaggtgcaaagattcagttctacccgtggctcatagcgccgctgccccagtcgtgttccccgcactgcacggtgatagcctatacggagctagtggcggcgcatcaagtgactacggcgctttctatccccgacctgtcgcccccggaggggctggcttgccggccgcggtatcaggttctcgactgggctacaacaattatttctacggccaactgcatgtgcaggctgcaccggtgggccctgcgtgctgtggagcagtgcccccattgggcgcccagcagtgttcgtgcgttccaacgccccccggttacgaggggccagggagtgtgctcgtttcgcccgtaccccatcagatgctgccatatatgaatgtgggaactctgagcagaaccgaacttcagctgctcaatcaactacattgtcggcggaagaggcgtcacagaactattttcacagacgaacagctggaagctctggagaaccttttccaggagaccaaatatcctgacgtgggaacacgggaacaactggctcgcaaagtacaccttcgcgaggagaaggtggaggtgtggttcaaaaaccgacgcgctaagtggaggagacaaaagaggagctctagcgaagaaagtgaaaacgctgagaagtggaataagacatcatcatcaaaagcgtcccctgagaagagggaagaagaaggaaaatcagatctagacagtgattcctag

SEQ ID NO: 24334 - DNA, 654 bp, synthetic construct
  misc_feature 1..654: note = Description of Artificial Sequence: Synthetic coding sequence
  source 1..654: mol_type = other DNA
atggcctaccccggctacggcggcggcttcggcaacttcagcatccaggtgcctggaatgcagatgggccaacccgtgcctgagaccgggcctgctattctgttagatggttattccggacctgcctattcggatacatattcatctgccggagatagcgtctacacatatttcagcgccgttgcagggcaggatggcgaggtcgacgccgaagagctccagagatgtcttacgcagtctgggattaacgggacctattctcctttttctttagaaacttgcaggatcatgattgcaatgctcgatcgggatcatactggcaagatgggattcaacgctttcaaagaactctgggccgccctgaatgcttggaaggaaaacttcatgactgtcgaccaggatggaagtgggacagttgagcatcacgagcttcgtcaagccatcggtctcatggggtaccgcttatctccccaaacactgactactattgtgaagcggtatagtaaaaatgggagaatttttttcgacgactacgtagcatgttgcgtgaaactgagggcactgacagatttttttcggaaacgggaccatctgcagcagggctctgcgaatttcatatacgatgactttcttcagggtacaatggccatctag

SEQ ID NO: 24335 - DNA, 438 bp, synthetic construct
  misc_feature 1..438: note = Description of Artificial Sequence: Synthetic coding sequence
  source 1..438: mol_type = other DNA
atggccacctgggccctgctgctgctggccgccatgctgctgggcaaccccggcctggtgttttcgaggctgtctccagaatattacgacctagctcgcgcccacctgagagacgaggaaaagagttgtccgtgtctggctcaagaaggcccccagggcgacctgttgaccaagacccaagagctgggtcgtgactacaggacgtgtctcacgattgtccagaaactgaagaagatggttgataaacccacgcaacgctctgtctccaacgccgctacccgcgtgtgccgaacgggtcgatctagatggcgtgacgtatgcaggaatttcatgcggcgctatcagtccagagtcacccagggcctggtggccggcgaaaccgcacaacaaatttgcgaggacctgcgactgtgcatcccatcaactggtccattatag

SEQ ID NO: 24336 - DNA, 393 bp, synthetic construct
  misc_feature 1..393: note = Description of Artificial Sequence: Synthetic coding sequence
  source 1..393: mol_type = other DNA
atggagggcctggtgttcagccggctgagccccgagtactacgacctggcaagggcacatcttagggacgaggagaaatcctgtccctgtttggcccaggagggccctcaaggagacctcctgactaagacacaggagttgggacgggactacagaacttgcctaactattgtccaaaagctgaagaaaatggtggacaagcctacgcaaaggtctgtgagcaacgctgctaccagggtgtgtcgcaccgggaggtctaggtggcgggacgtctgccggaactttatgagaaggtaccagtcccgggtcactcagggcctggttgctggtgaaacagctcaacaaatctgcgaagaccttcgtctctgcattcccagtacaggccctctttag

SEQ ID NO: 24337 - DNA, 555 bp, synthetic construct
  misc_feature 1..555: note = Description of Artificial Sequence: Synthetic coding sequence
  source 1..555: mol_type = other DNA
atgagccggaccgcctacaccgtgggcgccctgctgctgctgctggggacgctgctacctgctgccgaggggaaaaaaaagggaagccagggtgccataccccctcccgataaagcacaacacaacgatagcgagcagacccagtcaccccagcagcccggatcgcggaaccggggaagagggcagggcagagggactgctatgcctggagaggaggtccttgaatcatcacaggaagctttgcatgttacagagcgtaagtacctcaagagagattggtgcaaaacacagccactgaagcagacgatacacgaagagggctgtaatagtcgtaccattattaatcgattttgctacggacaatgtaattcattttatattccgaggcatatcagaaaagaggagggtagcttccagtcatgttccttctgcaagccaaaaaagttcactacgatgatggttacgcttaattgcccagaactccaacctcccactaaaaaaaagagagtgacgcgtgtgaaacagtgccgctgcatcagcattgacctagactag

SEQ ID NO: 24338 - DNA, 432 bp, synthetic construct
  misc_feature 1..432: note = Description of Artificial Sequence: Synthetic coding sequence
  source 1..432: mol_type = other DNA
atgagccggaccgcctacaccgtgggcgccctgctgctgctgctggggaccctcctgccagccgctgaagggaagaagaaaggatctcagggcgctattcctccccctgataaggccctgcatgtcaccgagcgcaagtacctgaaaagggactggtgcaagacgcaaccactcaagcagaccattcatgaagagggctgtaacagtcggacgataataaaccgcttctgttatggacagtgcaacagcttctacattcctaggcacatcagaaaggaggaggggtcctttcagagctgctcattttgcaagcccaaaaagttcaccacaatgatggtgactttgaattgccctgaactgcagccccccaccaaaaagaagagagtaacacgagtaaagcagtgcaggtgtatcagcatcgacctagattag

SEQ ID NO: 24339 - DNA, 432 bp, synthetic construct
  misc_feature 1..432: note = Description of Artificial Sequence: Synthetic coding sequence
  source 1..432: mol_type = other DNA
atgagccggaccgcctacaccgtgggcgccctgctgctgctgctgggcactctgctacccgcagccgaaggaaagaagaaggggtcccagggcgcaatcccacctcccgataaggccctgcatgtcaccgaaaggaagtacctcaaaagggattggtgcaaaacacagcctttaaagcagactattcacgaagaggggtgtaactccaggacaatcattaacaggttttgttacggccaatgcaactcattctatatccccaggcacatccgaaaggaagaagggtcattccaatcctgctctttttgcaagcccaagaagttcacgaccatgatggtcacgctcaactgccccgagctccagcctccaacaaagaaaaagcgcgtgacacgggtgaagcagtgtcgctgtattagcatcgacttggattag

SEQ ID NO: 24340 - DNA, 396 bp, synthetic construct
  misc_feature 1..396: note = Description of Artificial Sequence: Synthetic coding sequence
  source 1..396: mol_type = other DNA
atgaccctggaggagttcagcgccggcgagcagaagaccgagagcgatcctgataatgtcgtgctctgcttattagccgcagatgaagacgatgatcgggacgtggcccttcagatacactttaccttgatccaggccttctgctgcgaaaacgacattaacatcctaagggtcagcaatcccggccgcttggctgagctgctgctccttgagacagacgccggacctgccgccagcgaaggggcagaacagccacctgaccttcactgcgtgctggtaaccaatcctcattctagccagtggaaagatccagctctaagtcagctgatatgcttctgtagggaatcacgctatatggatcagtgggtacctgtcattaacctccctgaaagatag

SEQ ID NO: 24341 - DNA, 498 bp, synthetic construct
  misc_feature 1..498: note = Description of Artificial Sequence: Synthetic coding sequence
  source 1..498: mol_type = other DNA
atgaccctggaggagttcagcgccggcgagcagaagaccgagcggatggataaggttggggatgctctggaagaagtcctttccaaggccctgtcccagagaaccatcacagtgggtgtatatgaggcagcgaaactcttgaatgtggaccctgataacgtcgtgctttgccttttagctgcagatgaagacgacgaccgggacgtagctcttcaaatccattttacgcttatccaggcgttttgctgcgagaatgatattaatatactgcgagtgtctaacccaggacggctggcggagctgctgctgcttgagaccgacgcaggacccgccgcatccgagggtgcagaacagccaccagacctgcattgtgtactcgtgaccaatccccactcttcccagtggaaagatcctgccctctcccagttgatctgcttttgtcgcgaatcaagatacatggaccaatgggtcccagttataaatttgccagaacgatag

SEQ ID NO: 24342 - DNA, 3693 bp, synthetic construct
  misc_feature 1..3693: note = Description of Artificial Sequence: Synthetic coding sequence
  source 1..3693: mol_type = other DNA
atgagcgccctgtgctggggccggggcgccgccggcctgaagcgggctctaaggccatgcggccgccctggcttgccgggaaaggaagggacagccgggggggtgtgtggacctcgccgcagcagcagcgctagccctcaggaacaggaccaagataggagaaaagattgggggcatgtagaactgctcgaagtccttcaggccagagtgagacaactccaggctgagagtgtcagcgaggtcgtggtgaatcgggtggatgtggcaaggttaccagaatgtgggtctggagatggctcactgcagccacccaggaaagtccagatgggtgccaaggatgctaccccagtgccatgtgggcggtgggctaagatcttagagaaggacaagcgtactcagcagatgcgcatgcagcgtcttaaggccaaactccagatgcctttccagtccggagagtttaaagctttaacaaggaggctgcaggttgaacctaggctgctgtcaaagcagatggctggctgcctggaggattgcacgcggcaggcacccgaatccccatgggaggaacagctggctcgcttgctgcaggaagcccccggcaaattgtccctggacgttgagcaggcacctagtggacagcactcacaggcccagctcagcggccagcaacaacgcctgctggccttttttaaatgttgtctgctgactgatcagctgccgttggctcaccatcttctcgtagtccatcacgggcagcgacagaagcgaaaactgctgacccttgatatgtacaatgcagtcatgttgggctgggcccggcagggggctttcaaggagctggtctacgtcctgttcatggtaaaggatgccgggcttacccctgatctactctcctacgccgctgccctgcagtgcatgggccgacaggatcaggacgccggcacaattgagagatgtcttgagcagatgtcacaggaaggactgaaactgcaggctctgtttactgcagtcctgctatccgaggaggacagagccacagtcctgaaagccgtgcataaggtcaagcccacattttctctgcccccacagctcccgccccctgtaaacacctccaaacttctccgagatgtctacgccaaggacgggagggtctcctaccctaagttgcatctccctctgaaaaccctccaatgtctcttcgagaaacagctgcacatggaattggctagcagagtgtgtgtcgtctctgtggagaagccaactctgccttccaaagaggtgaaacacgcgcggaagactctcaagacattgagggaccagtgggagaaggcactgtgcagggctttgagggaaacgaaaaatcgcttggagagagaggtgtacgagggacgcttttcgctgtaccccttcttatgtctactggatgaacgtgaggtcgtgcgaatgttgcttcaagtactgcaggccctccccgctcaaggagaatccttcactacactggccagagaactcagcgcccggacttttagccggcatgtggtgcagcgccagcgtgtgtccggacaggtgcaggctctacagaatcattatcggaagtatttgtgcctacttgcatccgatgcggaggtgcccgagccctgcctcccccgacagtactgggaggagttgggcgcaccagaagctctgagggagcagccatggcccctccccgtacaaatggagctgggcaaactgctagctgaaatgctcgtgcaggcaactcagatgccttgttccctggataagcctcacaggagctctcgactcgtgccggtgctgtaccacgtctactctttcaggaacgtccagcagatcggtattctgaaaccacaccccgcctacgttcagctgctcgagaaggctgccgaacctaccctgacttttgaagccgtagatgttccaatgctgtgcccccccctgccatggacctctccccacagcggcgcctttcttctgagcccgaccaagctgatgcgtacagtggagggggctactcagcaccaggagctgctggagacttgtccccccaccgcactccatggggcattagacgcactgactcagctagggaactgcgcctggcgtgtgaacggcagggtgctggatctggtgctacagttgtttcaggccaaaggttgcccacaattgggggtccccgcacctccaagcgaagcaccacagccacccgaagcgcacctcccgcatagtgcagctcccgctagaaaagctgagctccggcgcgaacttgctcattgtcagaaggttgcgagagagatgcattctctgcgtgcagaagctctctaccggctgtctctggcccagcacctcagggacagagtgttctggttgcctcataacatggactttaggggtaggacgtacccctgcccacctcactttaatcacctgggctccgatgtggccagggcccttctggagttcgctcaaggtaggccgctcggcccacacgggctcgattggttaaaaatacatctggtcaatttgactgggctgaagaagcgcgagcccttgcgcaaaagattggccttcgcagaggaggttatggacgatattttagactcagccgaccaacctctaacagggaggaagtggtggatgggggccgaggagccatggcagacgctcgcctgttgcatggaggtggccaacgcagttcgggctagcgatccggcagcatatgtttcccatctgcccgtgcatcaggacggctcttgcaacggacttcagcactatgccgcactggggagggactcagtcggtgcagccagtgtcaacctcgaaccttcagacgtaccacaggatgtctatagtggagtggcagcccaggtggaagtatttcggcggcaggacgcacagcgagggatgcgtgtggctcaagtgttagaggggtttatcacaagaaaagtcgtcaagcagaccgtgatgactgtggtttacggagtgacccgatacggcggcaggctacagatcgaaaagagactccgcgagctcagcgatttcccacaggaatttgtctgggaagccagccactatcttgttcgccaggtgtttaaatccttacaggagatgttttccggcaccagagccatccagcactggctcacggaaagcgccaggctgatttcccacatggggtcagtggtggaatgggtgactcctcttggcgtacccgtaatacaaccctaccgactagattctaaagtcaagcagattgggggaggtattcaaagcattacatacacccataacggagacattagccggaagcccaacacacgcaagcagaaaaacgggtttccccccaacttcatccacagcttagattcctcccatatgatgttgacggcgctgcactgttatcgcaaaggcctgacctttgtgtctgtacatgattgttactggactcatgccgcagacgtgagtgtgatgaaccaggtgtgccgtgagcaattcgtgcggctgcacagcgaacctatcctccaagacctgagtagattcctagtgaagaggttttgctctgaacctcagaagatccttgaggccagccagctcaaggagacactgcaggcggtaccaaagcccggtgcattcgacctcgagcaggtgaaaaggagcacttatttcttcagctag

SEQ ID NO: 24343 - DNA, 480 bp, synthetic construct
  misc_feature 1..480: note = Description of Artificial Sequence: Synthetic coding sequence
  source 1..480: mol_type = other DNA
atgaccctggaggaggtgcggggccaggacaccgtgcccgagagcaccgcaaggatgcagggcgctggaaaagctctgcatgaactccttttgtcggctcaaaggcaaggatgcctcacggctggcgtctacgagagcgcaaaggtgctgaacgtggatcccgataacgtgaccttctgcgtgttggcggccggagaggaagacgagggcgacattgccctccaaatacatttcaccctgatccaggccttttgctgtgaaaatgatatcgatatagtaagagtgggagacgtgcagagactagccgctatagtgggtgcgggggaggaagcaggggccccaggcgaccttcactgcatcctgatctcaaatccaaacgaagatgcttggaaagacccagccttggagaagctgtccctgttttgtgaagagtcccgatccgtgaatgactgggtgcccagtattaccctgccagagtag

SEQ ID NO: 24344 - DNA, 426 bp, synthetic construct
  misc_feature 1..426: note = Description of Artificial Sequence: Synthetic coding sequence
  source 1..426: mol_type = other DNA
atgcagggcgccggcaaggccctgcacgagctgctgctgagcgcccaaagacagggctgcttgacagctggggtgtacgaatccgcaaaagtgttaaacgtcgatccagacaatgtgacattttgtgttctggctgccggcgaagaagacgagggtgatatcgcgcttcagattcacttcacactgatccaagccttctgctgtgaaaacgatattgacatcgttcgagtcggggatgttcagagactggctgctattgtgggcgccggcgaagaagccggcgcccccggcgatctacattgtatcctcatttccaatcccaacgaagacgcatggaaggaccccgccctggagaaactgagcctcttttgcgaagagtcacggtctgtgaacgactgggttccttctattacactgccagagtag

SEQ ID NO: 24345 - DNA, 2085 bp, synthetic construct
  misc_feature 1..2085: note = Description of Artificial Sequence: Synthetic coding sequence
  source 1..2085: mol_type = other DNA
atgcagcccgccatccaggtgtggttcggcgaggacctgcccctgtcaccaagatcacccctgactccccggcatggtccaggactagccaatgtctgtcagtacgatgaatggattgcggtaagacatgaagccactctgctaccaatgcaggaggacttgtccatttggctgagcggccttctgggaatcaaagtgaaagcagaaaagctcctagaagaattagataatggcgtgttgctttgccagttaattgatgtcctacagaacatggtcaagacctgcaatagcgaggagagtgggaattttccaatgcggaaagtgccttgtaagaaggatgctgctagtggttccttcttcgcgcgcgataatactgcgaacttcctccactggtgtagggacatcggagtcgatgaaacttatctgttcgagagcgaggggctggttctccacaaggaccccagacaggtctatctgtgcttgctggagataggcaggattgtctcaaggtatggcgtggaaccgcccgtgctcgtcaagctcgagaaggagatcgagcttgaggagacgctgctcaatacttccggaccagaggatagcatctccattccaaagtcctgctgtcgtcacgaagagctccatgaggctgtgaagcacatagctgaggaccccccgtgttcctgctcacatcggttctcaatagaatacctcagcgagggtagatacaggctcggcgacaagatcctttttataagaatgttgcatggcaagcacgtgatggtgagagtgggtggtggatgggatactctacagggatttctgttgaaatatgacccctgtaggatcctgcagttcgcgactctggagcaaaaaattctcgctttccagaaaggtgtcagcaacgaatcggtcccggattcacccgcacgaactccccagccaccggagatgaacccattatctgcagtgaatatgtttcaaaagcagaacagtaagccgtcagtaccagtgtccattcccaagagcaaggagaaacagggtagaccacccggcgcccttgtgcctgccagctccctgaaaggaggaaatttgggcagtatgtccgtccgatcaaaattacctaattcacctgcggcttcctcccaccccaagctgaagagtagcaaaggaatcaccaaaaagccgcaagcgccatcgaacaacgcatccagttcactggcctccctgaatcctgtagggaagaacacatcctcaccagcgctgcctaggactgccccatgtatttccgaatcgcctaggaaatgcatctcctcacccaataccccgaaagccaaggtgatccctgctcagaattctgccgacctccctgagtctactctactcccaaacaagtgcagcggtaaaactcagccaaagtacttgaagcataatcacatctccagcagggataacgcggtgtcgcatctggccgctcacagtaattcttcttccaagtgtcccaagctgcccaaggcgaatatccctgtcagaccaaaacctagctttcagtcctccgccaagatgaccaagacgtcaagtaagacaattgctaccggtcttggcacccagtctcagccatccgacggtgccccgcaagccaagcccgttcccgctcaaaagctcaaatcagctctgaatttaaaccaacccgtgtcagtgtctagtgtgagtcccgttaaagcaacgcagaaatcgaaggataagaacatcgtctcagccacaaaaaaacagccacagaataaatctgcatttcaaaagacaggtccttctagccttaaaagcccgggccggacaccactttccattgtaagtctgccccaaagttctaccaaaacacagaccgctcccaagagcgctcagacagtggccaagtcccagcacagcacgaaaggccctccacgaagcgggaaaactcctgcgtccattagaaaaccccccagcagcgtgaaggatgctgactcaggagacaagaagccaacagccaaaaaaaaagaagacgatgatcactacttcgtaatgacgggatccaaaaagcccaggaagtag

SEQ ID NO: 24346 - DNA, 2085 bp, synthetic construct
  misc_feature 1..2085: note = Description of Artificial Sequence: Synthetic coding sequence
  source 1..2085: mol_type = other DNA
atgcagcccgccatccaggtgtggttcggcgaggacctgcccctgagtcctcgctctcccttgacccctaggcatggtccggggttagcaaatgtgtgccagtacgacgaatggatagccgttaggcacgaggctaccctcctgccaatgcaggaagatctctccatatggctcagtgggctgttgggcataaaggttaaggctgagaaacttcttgaggagttggacaacggagtgttactatgtcagctaatcgatgtactgcagaatatggtcaagacatgtaactcagaggaaagcgggaactttcctatgcgaaaggtgccctgtaaaaaagacgctgcttccgggtctttcttcgccagggataacacagccaattttcttcattggtgcagagatatcggggtggacgaaacctatctgttcgaaagcgagggtctggtgctacacaaggacccgcggcaggtctacctgtgcttgctggagattggacgtatcgtgtcacgctatggggtggaaccccctgtactggtgaagctggagaaggagattgaattagaagaaactctacttaatacctctgggcctgaagattctataagcattcctaaatcttgttgtcggcatgaagagctccacgaagccgtcaagcacatcgctgaggacccgccctgctcttgcagtcataggttttctatcgagtacctttcagaaggccgataccggctcggcgacaagatattgtttatacgtatgctgcatggcaaacatgtcatggtgagggtaggcggcggttgggacaccctgcagggattccttctgaagtatgatccttgtcgtatcttgcaatttgctaccctcgaacagaaaattttggccttccagaagggagtttcaaacgaaagcgtcccagactcacccgccagaacacctcaaccacccgagatgaacccgctctccgcagtcaacatgtttcagaaacagaacagtaaaccaagcgtccccgtttctattccaaaaagtaaggagaagcaggggcgccctcctggcgctctggtccctgctagctctctgaaggggggaaacttaggctctatgtctgtgagaagtaaattacccaattcgccagctgcctcaagccacccaaagcttaagtcctccaagggcatcacaaaaaaaccacaagccccctccaataacgcatcgagttctctagcctcccttaaccctgtcggtaaaaacacctcgagccctgccttgccaaggacggccccctgcatcagcgaatctccacgcaaatgcatttcctctccgaatacgcccaaagcgaaggttatccctgctcagaatagcgccgatcttcctgagagtacactgcttcccaataaatgcagcggtaaaacccagcccaagtatttgaaacacaatcacatttcatcaagagataacgcagtttcgcacctggcagcacacagcaatagcagctccaagtgccctaaactcccaaaggcaaacattccggtccggccgaaaccgagcttccagtcatcagccaaaatgaccaaaactagttcgaagaccattgccaccggtcttggcacacaaagccagccctccgatggcgccccccaggccaaacccgtccccgctcaaaagctcaaaagtgccttaaacctgaaccaacctgtctctgtgtcttctgttagccctgtgaaagccacacagaaatccaaagacaaaaacattgtgtccgctacaaaaaaacagccacagaacaagagcgccttccagaagacagggccatcctccttaaagtcacccggccgaacccccctctctatcgtgtcgttgcctcagtccagcaccaagactcaaaccgctcccaaatccgcccaaactgtggccaagagtcaacactctaccaaaggcccaccacgctcaggcaaaaccccagcctccatcagaaaaccacctagctccgtgaaggacgcagacagcggtgacaagaagcccacagcaaagaagaaggaggacgatgaccactactttgtcatgactggaagtaaaaagccaagaaaatag

SEQ ID NO: 24347 - DNA, 2085 bp, synthetic construct
  misc_feature 1..2085: note = Description of Artificial Sequence: Synthetic coding sequence
  source 1..2085: mol_type = other DNA
atgcagcccgccatccaggtgtggttcggcgaggacctgcccctgagcccccgctcaccgttaacccccagacatggtcccggcctggctaacgtgtgccaatatgacgagtggatcgctgttaggcatgaggccacattgctgcctatgcaggaagacctttctatctggctatcgggacttttggggatcaaagtgaaggcagaaaagttactcgaagaactcgacaacggagttcttctttgtcagctgatagacgttctccagaatatggtgaagacgtgcaacagcgaggagagcggaaactttcctatgcgtaaggtaccctgcaagaaagatgctgccagtgggtctttcttcgcacgggataatacggctaacttcctgcattggtgcagggacattggcgtggacgagacgtatcttttcgagtccgaggggctcgtgctgcacaaagacccgcggcaggtttacctgtgccttctcgaaataggtcgcatcgtgtcacgttatggtgtcgagcccccagtcctcgtgaaactggagaaagagatcgagctggaggagacactcctgaacacgtcaggtcctgaggacagcatcagcatccccaagtcctgttgcaggcatgaagaacttcatgaagccgttaagcacatcgctgaggatcccccttgtagctgtagccaccgcttcagcatagagtatctgtctgaaggacgctatcggctcggggacaaaattttgttcatcaggatgctgcacgggaagcacgtgatggtgcgagtgggcggtggctgggacacattgcagggattccttctgaagtacgacccttgcaggattctccaatttgccactctcgaacagaagatcctggccttccagaagggggtgtctaacgaatccgtccccgatagcccagcccgtacaccacaacctcccgagatgaatcccctttccgcagttaacatgttccaaaaacagaactccaagccgagtgttcccgtgtccatcccaaaaagcaaggagaagcagggaagaccgcctggggccctcgtgccagcgtctagtcttaaggggggcaatcttggctcaatgtcggtgcgaagcaagctgcctaatagtcctgccgccagttctcatcccaagcttaagtcttctaagggaatcaccaaaaaacctcaggccccttcaaataatgcaagcagttcactggctagcctgaaccccgttgggaaaaacacgtcatcacccgccctccctcgcaccgctccttgcatttccgaatcaccccggaaatgcatctcctctccaaacacacctaaagcgaaggtcattccagctcagaactcagctgacctccccgaatctacactgttgcccaacaagtgctcaggtaagacccagcctaaatacttaaaacacaaccacatctcatctagggacaacgccgtgagccacctcgcagcccattcaaattcgtccagtaagtgtcccaagctacccaaagcaaacattcccgtgaggccaaagccgtcgttccagagcagcgctaagatgactaaaacgagctccaaaaccatagctacggggctgggcactcagagccagcctagcgatggggcccctcaagcgaagcctgtgccagctcaaaaactgaaatctgctctgaacctcaaccaacccgtgtccgttagctctgtgtcccctgtgaaggcgacccaaaagtccaaagataaaaatattgtctctgccacgaaaaagcagccccagaataagagtgcgtttcagaagacgggaccttcctctctgaaatctcccgggcgcacaccccttagcatcgtgagtctgcctcaatcaagcactaagacacagaccgcgcctaaaagtgcacaaacagtggccaagtctcaacatagcaccaaagggcccccccgcagtggtaaaacgcccgcttccataagaaagcctcctagctccgtcaaagacgctgatagcggggataaaaaacccacagctaaaaaaaaagaggacgatgatcattacttcgttatgactggctctaaaaagcctcgcaagtag

SEQ ID NO: 24348 - DNA, 150 bp, synthetic construct
  misc_feature 1..150: note = Description of Artificial Sequence: Synthetic coding sequence
  source 1..150: mol_type = other DNA
atgcagcccgccatccaggtgtggttcggcgaggacctgcccctgagcccaagaagtccacttaccccacgtcatggcccagggctggccaacgtctgccaatatgatgagtggatcgcagtgcgacacgaggcgactctgctcccatag

SEQ ID NO: 24349 - DNA, 1611 bp, synthetic construct
  misc_feature 1..1611: note = Description of Artificial Sequence: Synthetic coding sequence
  source 1..1611: mol_type = other DNA
atgaacgccagcctggagagcctgtacagcgcctgcagcatgcagtcagatactgtgcccctgctccagaatggccagcatgcacgcagccagccacgggcctccggtcctccccgatcaatccagccccaggttagccccagacagcgcgtgcagagaagccagcctgtgcacatcctggcagtacgtagactgcaggaggaagaccagcagttccgtacaagcagtctgccagctattccaaacccttttcctgagctttgtggccctggatcacctccagtgctgactcccgggagcctaccgccctcgcaagccgcagctaaacaagacgttaaagtctttagcgaggatggaacctcgaaggttgttgaaattctagctgatatgaccgcacgagacctgtgtcaactattggtgtataaatctcactgcgtggatgataacagctggaccctagtggagcaccacccccatctgggactcgagcggtgtctagaggaccacgaacttgtcgtccaggtggaatcgactatggcttctgaatccaagttcctgtttcggaagaactacgcaaagtatgagttctttaagaatccaatgaacttctttccggagcagatggtcacctggtgtcagcagagtaatgggagccagactcagttactgcagaattttctaaattccagttcatgccccgaaatccagggctttttgcatgtcaaggagctcggtaagaagtcatggaagaaactttacgtctgccttcgcaggtcaggcctgtattgctcaacaaaaggaacttccaaggagccacgtcatcttcagttgctggccgaccttgaggatagcaacatcttctccttgattgccggccgcaaacagtacaacgcaccaacagatcacgggttgtgcatcaaacctaacaaagtgaggaatgaaaccaaggaactccggcttctctgcgctgaggacgaacagacccgaacctgctggatgactgctttcagactgctgaaatatggaatgctgctataccaaaattacagaattccccagcagcggaaagcccttctgtctccattctccaccccggtgaggtctgtctcggagaacagtctggtagctatggacttctcaggccagactggcagagtgatcgagaacccagccgaggcccagtctgcagccctggaagagggtcatgcatggagaaagcgtagcactcgaatgaacattttgggtagccagtctcccttgcacccctccaccttgagcactgtcatacaccgcacgcagcattggttccatgggaggatttcacgcgaagaaagccacaggattattaagcagcaggggttggtggacggcctgttcctgctgcgagactctcagagtaaccctaaagcatttgtgctgacactgtgtcatcaccaaaagataaagaacttccagatcctcccctgcgaagatgatggccagactttcttctccctggatgatggaaataccaaattcagtgatctgatacagctggtagacttttatcagctaaacaaaggcgtcctgccttgcaagcttaaacaccattgcatcagagtggcactttag

SEQ ID NO: 24350 - DNA, 1647 bp, synthetic construct
  misc_feature 1..1647: note = Description of Artificial Sequence: Synthetic coding sequence
  source 1..1647: mol_type = other DNA
atggccctggccggctgccccgacagcttcctgcaccacccctactaccaagataaagtggaacagacccccaggtcacagcaggatccagctggcccaggactccccgcgcagagcgatcgtttggcgaaccaccaggaagacgatgtcgaccttgaagccctggtaaacgatatgaacgcctctctggagagcctgtacagcgcttgttccatgcagtccgataccgttcctctgctgcagaatggtcagcatgcaaggtcccagcctcgggccagtggaccaccacgctctattcagccgcaggtcagcccccggcagcgagttcaacgcagccagcccgtgcatatattagcagtccggcgcctccaggaagaggatcagcagtttcgcacatcttctctgccagctataccaaacccctttccagagctctgtgggcccggctctccccctgttctgacacccggttcattgcccccgagtcaagccgcagccaagcaagacgttaaggtcttttctgaagacggaacttccaaagttgttgagattctggcggacatgacggcaagagacttgtgtcagctgctcgtgtacaaaagccactgtgttgacgataatagctggacgttggtggagcatcaccctcacctgggcctggaaagatgtttagaggatcacgaactggtggtgcaggtggaatcaactatggcttcagaatcaaaattcttgtttcggaagaattatgcaaaatacgagtttttcaagaacccaatgaatttcttccctgagcagatggtgacctggtgccagcagtccaatgggtcccagacgcagctccttcaggagcctcgtcatctgcagctgctggctgatttagaggattctaacatcttttctctaattgccgggaggaaacagtataatgctcccacggaccacgggttgtgcatcaagccaaacaaggtcagaaatgagacaaaggagcttcggctcctgtgcgccgaggacgaacagactaggacttgttggatgaccgccttccgcctgctgaaatatggaatgctgttataccagaactacaggattccacagcagagaaaggccctgctatcaccctttagcactcctgtgaggagtgtgtccgagaatagtttggtagcaatggacttttctggacaaacaggcagggttatcgagaacccagccgaggcccagtctgctgctttagaagagggccacgcatggagaaagcgcagtactaggatgaacattctgggtagtcagtctccactgcatccttccactctcagcaccgtgatccatcgcacccagcactggttccatggacgcatatccagagaggagtctcaccgcataattaaacaacagggattggtggacggtctgttcctcctgcgcgattctcagagtaatcccaaagcatttgttttaacgctgtgtcaccatcagaagataaaaaatttccaaattctgccatgcgaagatgacggccagactttcttctctttggatgatgggaatacaaaattcagcgacttgatccagctggtggacttctatcaactcaacaaaggcgtccttccatgtaaactcaaacatcactgtatcagagtggctttgtag

SEQ ID NO: 24351 - DNA, 381 bp, synthetic construct
  misc_feature 1..381: note = Description of Artificial Sequence: Synthetic coding sequence
  source 1..381: mol_type = other DNA
atgaacatcctgggcagccagagccccctgcaccccagcaccctgtccacagtaatacataggactcagcattggtttcatggtcgtatttctcgcgaagaaagccatcgcataataaagcagcagggactagtggatgggctatttctactgagagactctcagagcaatcccaaggctttcgtgcttacactctgtcaccatcagaagattaaaaacttccagatcctgccatgtgaagacgacggtcagacctttttctccctcgacgacggtaatactaaattctcagatctcatacagctcgtcgacttttaccagctaaataagggagtgttaccttgcaaattgaaacaccactgcattcgagtcgctctgtag

SEQ ID NO: 24352 - DNA, 1611 bp, synthetic construct
  misc_feature 1..1611: note = Description of Artificial Sequence: Synthetic coding sequence
  source 1..1611: mol_type = other DNA
atgaacgccagcctggagagcctgtacagcgcctgcagcatgcagagcgataccgttcctctgctgcaaaacggccagcatgcccggtcacagcctagagccagcggcccccctcggtccattcaaccacaagtgtctccacgacagcgagtccagaggagccaacctgtgcacatcctggcagtgcgacgactccaggaagaagaccagcagtttcggaccagctccctgcccgccatcccaaaccccttcccagagctgtgcggcccaggatcgcctcctgtcctcacccctggtagcctccctccctcgcaggccgccgccaagcaagatgtaaaggtgttctccgaagatggcaccagcaaagttgtggagattttggctgacatgaccgcccgcgacctgtgccagctgctggtgtataaatcacattgtgtggacgacaattcttggacattggtggaacaccacccgcatctcgggctggaaagatgtctcgaggatcatgagctggtcgtccaggttgaatccaccatggcctcagagagtaaattcctatttcggaaaaattatgcgaagtatgaattctttaagaacccaatgaatttctttcctgagcaaatggtcacctggtgtcagcagtcaaacggttcacaaacgcagcttttgcaaaattttctcaactcttcctcctgtccagaaatccagggattcttgcacgtgaaggaactagggaaaaagagttggaagaagctgtacgtctgcctacggcgttcaggactgtactgtagcacaaaggggacaagcaaagaacccagacatttgcagctcctagccgatcttgaagactctaacatattctccctgatcgctggccgtaagcagtacaatgcccctacggatcacggattgtgtatcaagcctaacaaggttagaaatgaaacaaaggaactacgattgttgtgcgctgaagacgagcagacccgcacatgctggatgacagcttttagattgctgaagtatggcatgctcctgtaccagaactatcgcattccccaacagaggaaggctcttctgagcccgttttctactccagtgcgatctgtcagtgaaaactcactggtggccatggatttctccggtcaaacaggcagggttatagaaaatcctgccgaagcacagagcgccgcgcttgaggaaggccacgcgtggcgaaaaagaagtactcgaatgaacatcctcgggtcacagagccccctgcacccttccaccctcagcactgtcatacatcgtactcaacactggttccacggaaggattagcagggaagaaagccatagaattatcaaacagcaggggctggttgacggtctctttcttctgagggattcccagtcaaatcccaaagcctttgtcttgacattatgccatcaccaaaagattaaaaacttccaaattctgccttgcgaggacgatgggcagaccttcttttctctggacgacggtaataccaagtttagtgatctcatacagctggtggatttctatcagttgaacaagggggtgctcccttgcaagttgaaacaccattgcatcagggtcgccttatag

SEQ ID NO: 24353 - DNA, 1785 bp, synthetic construct
  misc_feature 1..1785: note = Description of Artificial Sequence: Synthetic coding sequence
  source 1..1785: mol_type = other DNA
atggccctggccggctgccccgacagcttcctgcaccacccctactatcaggacaaggtcgagcagaccccccgctcgcagcaggaccccgctgggcccgggctgcccgcccagtctgataggctcgccaaccaccaggaagatgacgtggacctggaggcgttagtgaacgatatgaatgcatctctggaaagcctgtattcagcatgcagtatgcagtcagatacggtgccactgctgcagaatgggcaacacgcgcgcagtcagccgcgagcttctgggcctccccgcagtatccagccccaggttagccccaggcagcgagttcaacggagccagcccgtccacatcctggccgtccggagactccaggaggaggatcagcagtttcgtaccagctctctgccagccatcccaaaccctttccccgagctgtgcgggcctggctcccctccagtactgactccaggcagtctgcctcccagtcaggcagccgccaagcaggatgtgaaggtgttctctgaagacggtaccagcaaagtcgtggagatcctcgcagacatgacagcgcgtgacctgtgtcagttgctggtctacaaaagccattgcgtggatgacaacagctggacattggttgagcaccaccctcatcttggactggaacgctgtcttgaagatcatgagcttgttgtccaggttgagagcaccatggcaagcgaatcgaagttcctgtttagaaaaaactatgcaaagtacgagttttttaaaaatccaatgaatttttttcctgagcagatggttacctggtgtcaacagagtaacgggtcccagactcagcttctccagaattttttgaactcatcctcttgccctgaaattcagggatttctgcatgtgaaagaattggggaagaagtcttggaagaagctatacgtatgcctccggcggagtggactgtattgttccactaaagggacaagtaaggagccaaggcatctgcagctcctggccgatctcgaagacagcaacatattcagtctgattgccggacgcaaacagtacaatgcccccacagaccacgggctgtgtatcaagccgaacaaggtgcggaatgagaccaaagagctcagactgttatgcgccgaagatgagcagacacgcacctgttggatgacagctttcaggctgttgaagtatggaatgttgctgtatcagaattataggatcccgcaacaacgtaaggccctccttagccccttctctacgcccgtgcgctccgtctcagagaactcgttggtcgctatggatttctctggtcagacgggccgcgtcattgagaatcctgccgaggctcagagcgctgccctcgaagagggtcatgcctggcgcaagcgaagcaccaggatgaacatcctcggatcacagtcacccctccatccatccacgctgagcacagtgattcatcggacccagcattggttccacgggagaatctccagggaggaaagccaccggatcattaagcagcagggtttggttgacggtctgttcttgctgcgcgattcacagtccaatcctaaggcgttcgtgttgaccctgtgtcaccaccagaagattaagaattttcagatcctcccctgtgaagacgatggtcaaaccttcttttccctagatgacggaaataccaagttcagtgatttaattcaattagtcgatttttatcaacttaataaaggcgtgttaccctgtaaattaaaacaccattgcattagggtagctttgtag

SEQ ID NO: 24354 - DNA, 1785 bp, synthetic construct
  misc_feature 1..1785: note = Description of Artificial Sequence: Synthetic coding sequence
  source 1..1785: mol_type = other DNA
atggccctggccggctgccccgacagcttcctgcaccacccctactaccaggacaaggtagagcagactcccaggtcccaacaagaccctgccgggcccggcctaccagcccagagcgatcgactggcaaatcaccaggaagatgacgtggacctagaggcccttgtgaatgatatgaatgcctccctcgaaagcctgtactcagcctgttccatgcaatcagataccgtgccattgctgcagaatgggcagcacgcccggagccaacccagagctagtggacccccacggagcatccagccacaggtgtctccacgacagcgagttcagcggagccagccagtgcatattctcgcagttcggagacttcaggaagaagatcagcagtttcgcactagcagtttacccgcgatccctaacccttttcccgagctgtgcggccccggctccccgcctgtgctgaccccaggatcgctgccgccatctcaggccgctgccaagcaggacgtgaaggtgttttctgaagacgggacctcgaaagtcgtcgaaattttggcagatatgacagcgagagacctttgtcaattgctcgtctataaatcccactgtgtggacgacaacagctggacgctggtagagcatcatccccacttaggtctagagagatgcttggaggaccacgagctcgtagtgcaggtagaatccactatggcctcagagagcaagttcctgttccgcaagaactacgccaaatacgaattcttcaagaacccaatgaatttttttcctgaacaaatggtcacatggtgccagcagtctaatggctcgcagacacagctcctgcagaacttccttaatagctcctcatgccccgagatccagggattcttgcacgtcaaggagctagggaaaaagtcatggaaaaaactttacgtgtgtttgcggcggtctgggctctactgctccactaagggaacctctaaagaaccccggcacctgcagctgctggctgaccttgaggattcaaacatcttcagcctaatcgccgggagaaagcagtacaacgctccaacagatcacggcttgtgtataaaacctaataaggtgcggaacgagacaaaggaattacgactcctctgtgcagaggacgaacaaacgcgaacatgttggatgactgcctttcgcctgttgaagtatggaatgctactgtatcaaaattatagaatcccacaacagcgcaaggctctcttgtcccctttcagcacccctgttagatccgtcagcgagaattctctggtggctatggatttttcaggacagaccggcagggtgatcgaaaacccagccgaggcgcaatctgccgccttggaagaggggcatgcatggcgaaagcgatccacacggatgaacatcttggggagtcagtcaccgctccacccctcaacgctatccaccgtcatccatagaacacaacattggttccatggacggatcagccgggaggagagtcaccgtatcattaagcagcaaggactcgtggacggcctgttcctgctgcgagactcccaaagcaaccccaaggctttcgtactgaccttgtgtcaccaccagaagattaagaattttcagattctgccctgcgaggatgatggccagacattcttcagtcttgatgatgggaacactaagttttccgatctgattcagctcgtggacttttatcaactcaacaagggtgtactcccctgtaagctgaaacaccactgcatacgcgtggcgctttag

SEQ ID NO: 24355 - DNA, 1611 bp, synthetic construct
  misc_feature 1..1611: note = Description of Artificial Sequence: Synthetic coding sequence
  source 1..1611: mol_type = other DNA
atgaacgccagcctggagagcctgtacagcgcctgcagcatgcagtctgatacggtcccactcttacagaacggccagcacgcccggagccagcctcgcgctagtggtcctccacgttccattcagccgcaggtcagtcccaggcagcgagttcagcggtcacagccagtgcatattctcgccgtccgccgactacaggaggaagatcagcagtttcggactagtagccttccagcgatcccgaatcctttccctgaactctgtgggcccggaagtcccccggtactcactccggggtccttacctccatcacaagccgccgccaagcaggacgttaaggtcttttccgaggacgggacttcaaaggtggtggagatcctggccgatatgaccgccagagatctatgccaactgcttgtgtacaagagccactgtgtggacgataacagttggacattggtggaacatcacccacacctggggctggagcggtgtctcgaagaccacgagctggtcgtgcaggttgaatcaaccatggctagcgaaagtaagttcttgttcaggaaaaactacgctaagtacgagttttttaaaaaccccatgaacttcttccccgaacagatggtgacctggtgccagcaaagcaacggcagccagactcagctgctgcagaattttttgaattcatcttcttgtcctgagatccaaggattcctgcacgtgaaggaactcgggaaaaagagttggaagaagttgtatgtgtgtctacggcgatcagggctatattgttccacgaaaggcacaagcaaggagcccaggcatctgcagcttctggccgacctcgaggatagcaacattttttctttgatagcagggagaaagcagtacaatgctcctacagatcacggtctgtgcattaagcccaataaggttcgcaacgaaaccaaggaacttagattgctctgcgcagaggatgagcaaacaaggacctgttggatgaccgcattcagattacttaagtacgggatgctgctgtaccagaattaccgcatccctcagcagagaaaggccctcctttctccttttagcactcccgtgcgttccgtgtcggaaaactcacttgtggccatggattttagtggccaaacaggacgggttatcgaaaatccagctgaggctcaatccgctgctctggaggaagggcacgcttggagaaaacgttccactagaatgaatattttggggtcccagtcccctctgcacccaagtacactgagtaccgtgatccatcggacacaacactggttccacggtcggatcagtcgcgaggaaagtcatcgaataataaaacagcagggacttgtggatggactattcctgctccgagactcacagagcaacccaaaggcattcgtgctgactctgtgtcaccatcagaaaataaaaaacttccaaatactgccttgtgaagacgacgggcaaacttttttcagtcttgatgacgggaacacaaaattttctgacctcatacagctcgtagacttctaccagctgaataagggagtactgccatgtaagcttaaacaccactgcataagggtagcgctgtag

SEQ ID NO: 24356 - DNA, 1611 bp, synthetic construct
  misc_feature 1..1611: note = Description of Artificial Sequence: Synthetic coding sequence
  source 1..1611: mol_type = other DNA
atgaacgccagcctggagagcctgtacagcgcctgcagcatgcagtctgacaccgtccccctgcttcagaatgggcaacatgctcggtctcaaccgcgcgctagcgggccccctaggagcattcagcctcaggtttcgcctcgtcaacgggttcagagaagtcaaccagtccacatcctggccgttcgtcggttgcaagaggaagaccagcaatttaggacctcctcactccctgccattcccaaccccttccctgaactctgtggacctgggtctcctcccgtgctcacaccgggatccctgcctccctcacaggcggccgccaagcaggatgtgaaagtcttttccgaggatggcacttccaaagtagtggaaatattggcagatatgactgccagagatctctgtcagctgctagtctacaaaagtcattgcgtggacgacaacagctggacacttgtcgaacaccacccccaccttgggctggaacgatgccttgaggaccacgaacttgtggtgcaagtggagagcaccatggcatctgagtctaaatttctcttcagaaaaaactacgccaaatacgaattttttaaaaaccctatgaattttttccccgagcagatggtgacctggtgccagcagtccaatgggtcccagacgcagttgctgcagaattttcttaattcttcctcatgccctgaaattcaaggcttccttcacgtgaaggagctgggcaagaagtcttggaagaagctgtatgtgtgcctgcgcaggagtggactatactgttctacaaaggggacctcgaaggagccacggcatttacaactgctggctgaccttgaagatagcaatattttttcactgatcgcaggcagaaagcagtacaatgccccaaccgaccacggattgtgtattaaaccaaacaaagttcgaaacgaaaccaaggagcttaggttactgtgcgccgaggacgagcagaccaggacctgctggatgacggcttttcgcttgctgaaatatggaatgctgctgtaccagaactaccgtatcccccagcagcggaaggcacttctgtcacctttttctaccccggtcaggtcggtctctgagaactcactggttgctatggacttctctggtcaaaccggtcgagtgattgagaatccagccgaggcacagtcagccgccttggaggagggccacgcttggcgtaagcgctctactagaatgaacatcctcggctctcagtctccactgcaccctagcactttaagcacggttatccaccgaacacagcactggttccatggaaggatcagtagagaagaatcccaccgaattattaaacaacaagggttggtggatggtcttttccttttgcgcgatagccagtcaaaccctaaagccttcgtcctgacactctgtcatcaccagaaaataaagaacttccagatcctgccctgtgaggatgacggccaaactttttttagtctggacgacggtaataccaagttcagcgatctcattcagctggtggacttttaccagcttaataagggcgtgctcccctgcaagctgaaacatcattgcattagggttgcactgtag

SEQ ID NO: 24357 - DNA, 1767 bp, synthetic construct
  misc_feature 1..1767: note = Description of Artificial Sequence: Synthetic coding sequence
  source 1..1767: mol_type = other DNA
atgcaggccgccggccccctgttccggagcaaggacaaggtggagcaaacgccacgcagtcagcaggacccagccggccctgggttacctgcacagagcgatcgcctggccaatcaccaggaggacgacgtggatctagaagcactggtgaatgacatgaacgcctccctcgagtccttgtatagcgcctgttccatgcagtcagacacggtgccactcctccagaacggacagcacgcccggagccagccaagagcttccgggcccccccgttctatccagccccaagtgtctccccgccaaagggtgcagcggtcacagccagtccatattctggcggtccgccgactgcaggaggaggaccagcagtttcgtacaagcagtctgccggcaatcccaaaccctttcccagagctgtgcggaccgggaagcccgcctgtgctgacccctggatccttgcctccctctcaggcagcagctaagcaagacgtcaaggtgttctcagaggatgggacaagcaaggtcgtggaaattttagcagacatgacggctcgtgatctctgccagctgctcgtgtataagtcacactgtgtggacgacaatagttggactcttgtggagcaccacccgcaccttggcctggaacgctgcttagaagaccatgagcttgttgtgcaggttgaatctaccatggccagcgagtcaaaattcttgtttcgcaaaaactacgctaaatacgagtttttcaagaatcccatgaatttcttccctgaacaaatggttacttggtgtcagcagtccaatgggagtcaaacccagctgctccaaaacttcctcaattccagctcctgtcctgagatccaaggctttctgcacgtaaaggagcttggaaagaagtcatggaaaaagctctacgtgtgtttacggcgatcaggactttattgcagcaccaagggcacttcaaaggaaccgcgccacttgcagctcctggctgacctggaagactctaacattttctctcttattgcagggcgcaagcagtataatgctcctacggatcacggtctttgtattaaaccaaacaaggtgcgcaatgaaacaaaagaactaaggttattgtgtgcagaggacgagcagacccggacctgttggatgaccgccttccgactactgaaatatggcatgctgctttatcagaattataggatcccgcaacagaggaaggccctgctgagcccattcagtacaccagtgaggtcggtaagtgagaactcactggtggccatggatttctctggccagaccgggagagtgattgagaaccccgctgaggcacagagtgctgctctcgaggagggacacgcatggcgcaagaggagcacacgcatgaacatcttaggctcccaatctcctctgcatccatcgaccctgtcgacagtgatacatcggacccagcactggttccatgggcgcataagtcgcgaagaaagtcatcgaatcataaaacagcaggggcttgtggacggacttttcctgctaagagactcccagtcgaatcccaaggctttcgtcctgactctctgccaccatcagaagatcaaaaattttcagatcctgccatgtgaggatgatggacagacttttttctccctggacgatggaaacactaagttttcggacctcatacagctggtggacttctaccaactcaataagggggttcttccatgtaaactaaagcatcactgcatccgggtagcactgtag

SEQ ID NO: 24358 - DNA, 1611 bp, synthetic construct
  misc_feature 1..1611: note = Description of Artificial Sequence: Synthetic coding sequence
  source 1..1611: mol_type = other DNA
atgaacgccagcctggagagcctgtacagcgcctgcagcatgcagagtgataccgtccccctactgcagaacggtcaacatgccaggtctcaaccacgtgcctcggggccgcctcgcagcatccagccccaggtaagccctcggcagcgggttcaaagatctcaaccagtgcatattctggctgtgaggaggttacaggaagaagaccagcaatttcggacaagtagcctgcctgctattccaaacccttttcccgagctgtgtggaccgggctcaccccccgtcctcactccagggagcctccctccctctcaagccgcagcaaagcaagatgtgaaggtcttctccgaggacgggacttcaaaggttgtggaaatactggcagatatgacggctcgggatctgtgccagttgctagtgtacaagtcccattgcgtcgacgacaatagctggacactggtagagcatcacccacacttaggcctagagcgctgtctggaagatcacgagctagtcgtgcaggtggagagcaccatggcctccgagagcaaattcttgtttcgtaaaaactacgctaagtacgaattttttaagaatccaatgaatttcttcccagaacaaatggtcacgtggtgccagcaatcaaatgggtcccaaacgcagctgctacagaatttcctgaattcttccagttgcccagaaattcagggcttcctgcatgtcaaggagctaggtaagaaatcctggaagaaactatatgtgtgcctgaggcggagcggattgtactgtagtaccaaaggtacaagcaaggaaccccggcatttgcagctcctcgctgacctggaagattcaaacatttttagcctcatcgctggaagaaagcaatataacgcccccactgaccacggactgtgtataaaaccgaacaaagtgaggaacgagaccaaagagctccgtctgttgtgcgccgaggatgagcagactaggacctgctggatgacagccttccgattactcaaatatggcatgctgctgtatcagaattatcgtatccctcagcagcgaaaggcgctccttagcccctttagcacgccagtccgcagcgtgtctgaaaacagcctggtggccatggatttctcaggtcagaccgggcgggttattgagaatcctgccgaggcccagagtgctgccctcgaagaaggccacgcctggcgaaagcgatccactcgcatgaacatactcggatctcagtcgcctctgcacccctcaaccttatcaactgtcatccacagaacccagcattggtttcatgggcggatttctcgcgaagaaagccaccgaattataaaacaacagggtttagtggatggtctttttctgctcagagactcgcagtccaacccaaaggctttcgtgctgaccctgtgtcaccaccaaaaaattaagaattttcagattctgccttgtgaagatgacggccagacctttttctcccttgatgatggcaacacaaaatttagcgatctcatccagcttgtagatttttaccagcttaataagggagtgcttccctgcaaactgaaacatcactgcattcgagtggccttatag

SEQ ID NO: 24359 - DNA, 1611 bp, synthetic construct
  misc_feature 1..1611: note = Description of Artificial Sequence: Synthetic coding sequence
  source 1..1611: mol_type = other DNA
atgaacgccagcctggagagcctgtacagcgcctgcagcatgcagagcgacactgtgcccctactccaaaatggccagcatgctaggagccagccgagggcttctggaccgcctcggagtatccagcctcaggtcagccctcggcagcgagtacagaggagccaaccagtacatatactggctgtgagacgattgcaggaggaagatcaacagttccgaaccagctctctgcccgcgattccaaatcctttccccgagctgtgtggccctggcagtcctcctgtcctgacaccgggaagcctgcccccttcacaggcggcggcaaagcaagatgtcaaagtattttctgaggatggaacctcaaaggtggtcgaaatcttagctgacatgaccgcaagagacctgtgtcagctactcgtgtataaaagccactgcgtggatgacaactcttggacactcgtggagcaccacccgcacctgggactcgagcgctgccttgaagaccatgagctcgtggtccaagtggaatctaccatggcctctgaatcaaagttcttgttccgtaaaaactatgcaaagtacgagttttttaaaaaccctatgaattttttccccgaacagatggtgacctggtgccagcagtctaatggctcccagacccagcttctgcagaatttccttaactcctcttcttgccccgaaattcaggggtttctacatgtgaaggagctaggaaagaaatcctggaaaaaactgtatgtgtgcctccggagatcaggactctactgctccaccaagggcacttcgaaagagcctcgccatttgcaattactcgccgaccttgaggattcgaatatattcagtttaattgccgggcgtaaacagtataacgcccctaccgaccacggtctgtgtatcaagcctaataaagttaggaacgagacaaaggagctgaggctgctgtgcgccgaggatgagcagactcggacgtgctggatgaccgcgtttcggctgctaaagtacgggatgctgctgtaccagaattataggattcctcaacaaaggaaagccctgctatcaccattcagcacccccgtgaggagcgtttcggaaaattcgttagtcgctatggacttcagcggccaaacgggccgcgtaatcgagaacccagctgaagcccaatccgctgctctggaggaggggcacgcttggcgaaaacggtctacgcgcatgaacatcctaggctcccagagccccctgcacccttccaccttaagtactgtgatccatcgaacgcagcactggttccacggccggatatccagagaggaatcgcatcggatcattaaacaacaggggctagtggacggactctttctgctgcgagattcacagtccaacccaaaagcgttcgtgttgacactgtgtcatcatcagaagatcaagaacttccagattcttccctgcgaagatgatggccagacctttttctcactggatgacggtaatacaaagttctcagacctgatccagctcgttgacttctaccaactgaacaaaggggtactgccatgtaaactgaaacatcattgtatccgggtggctctttag

SEQ ID NO: 24360 - DNA, 345 bp, synthetic construct
  misc_feature 1..345: note = Description of Artificial Sequence: Synthetic coding sequence
  source 1..345: mol_type = other DNA
atgcaggccgccggccccctgttccggagcaaggacaaggtggagcaaacccctcgttctcaacaggatcccgcaggtcccggtttaccagcacaaagcgaccgcctggctaatcaccaggaagatgatgtggacctcgaggctttagtgaacgatatgaacgccagtctggaaagcctgtacagcgcgtgttccatgcaatctgacacggtgcccctccttcagaacgggcagcacgccagaagtcaacctcgcgcatcgggtcctcctcgctcaatccagccgcaggtgtccccccggcagcgggtacagagaagccaacccgtccatatattggccgtgtag

SEQ ID NO: 24361 - DNA, 1767 bp, synthetic construct
  misc_feature 1..1767: note = Description of Artificial Sequence: Synthetic coding sequence
  source 1..1767: mol_type = other DNA
atgcaggccgccggccccctgttccggagcaaggacaaggtggagcaaacacccaggtctcagcaggatccggccggcccagggttgccagctcagagcgacaggctggccaaccatcaggaagacgacgtggatctggaagcgctagtgaacgatatgaacgcttccctggaaagtctctacagcgcttgctctatgcaatctgacactgtccctttgttgcagaacgggcaacacgcacgctctcagcctagggcaagcggccctccaaggagcattcagccgcaggtgagtcctcgacagagagtgcagagaagccagcccgtccatatactagctgtcagacggttacaggaagaggaccagcagttcagaacaagttccctgccagcgatacctaatcccttccctgagctgtgcggccccggatccccacctgtactgacccccggatccctgcccccgagccaagccgccgcaaagcaggacgtgaaagtctttagtgaagacgggacctctaaggtcgtagaaattctcgcagatatgaccgctcgcgatttgtgtcagttactggtctacaagtcccactgcgtcgacgacaatagctggaccctggtagaacaccatccgcacctggggctcgagcgttgcctggaagatcatgaattggtagtccaggtggagagcaccatggctagcgaatctaaatttttgttccgaaagaactacgctaaatatgagttctttaaaaaccccatgaatttcttccctgagcagatggtaacgtggtgtcagcaatccaatggcagtcaaactcagctgctgcagaatttcctgaatagcagctcgtgccccgagatccagggctttctccatgtaaaggaactaggaaagaaaagctggaaaaaactgtacgtttgccttagaaggtccggactttactgctctactaaaggaacttcgaaagaaccgagacatctgcagctcctggcagatcttgaggattctaatatctttagtctcatcgcaggccgcaagcagtacaacgcgcccacagaccatggactgtgtatcaagcctaacaaggtgagaaacgaaaccaaggaactgcgcctgctctgtgccgaagacgagcagacccggacctgctggatgacagccttccgactcctgaaatatggcatgctgttgtaccagaactacagaattccgcagcagaggaaagccttgctcagccccttctcaactcccgtgaggtctgtttcggaaaattcccttgtagccatggatttctcaggtcagactggcagggtgatcgagaaccctgctgaggcacagtccgctgctctcgaggagggccacgcttggagaaagcggtctacccggatgaatattctcggatctcagtcaccgctgcacccatccacgctgagtaccgtgatccatagaacccaacattggtttcatggcaggattagccgagaggaatctcaccggattatcaaacaacaggggctggtggacggtttgtttctcctccgtgattcccagagcaatcctaaagcctttgtcctcactctgtgccaccaccagaaaatcaagaacttccagatcctcccctgcgaggatgacggccaaacatttttctctttagacgacggtaataccaagttctcagaccttatccagcttgtggatttttaccagctaaacaaaggggtgctgccatgcaagctcaagcatcattgcatcagggtggcactgtag

SEQ ID NO: 24362 - DNA, 531 bp, synthetic construct
  misc_feature 1..531: note = Description of Artificial Sequence: Synthetic coding sequence
  source 1..531: mol_type = other DNA
atggaggccatcgccaagtacgacttcaaggccaccgccgacgacgagctgagctttaagagaggcgacatcctcaaggtcttaaatgaagaatgtgatcagaattggtacaaagcagagttaaacggcaaagatggctttattcccaagaactacattgagatgaaacctcacccgttcggcaacgatgtgcagcacttcaaagtgctgagggacggagctggaaagtactttctttgggtggtgaagtttaattctctgaatgaactggttgattaccacagatcaaccagtgtctcccgaaatcagcagatctttcttagagacatcgaacaggtgcctcagcaacccacatacgtacaggctctgttcgatttcgacccgcaagaggacggggaacttggctttcgaaggggcgactttatccatgtgatggacaattctgaccccaactggtggaagggcgcctgccatggacagacaggcatgttccccaggaattacgtcacgcctgtgaaccgtaacgtttag

SEQ ID NO: 24363 - DNA, 654 bp, synthetic construct
  misc_feature 1..654: note = Description of Artificial Sequence: Synthetic coding sequence
  source 1..654: mol_type = other DNA
atggaggccatcgccaagtacgacttcaaggccaccgccgacgacgagctgtcgtttaagaggggtgatattctgaaggtgcttaatgaagaatgtgaccagaactggtataaagctgaattgaacggcaaggatggtttcatccccaaaaattatattgagatgaaaccccacccttggttcttcgggaaaattccacgggcaaaggctgaggagatgctgtccaagcagcgacacgatggcgctttcttaatccgcgagtctgaatccgcacccggcgacttctctctgtccgtgaaattcggcaatgacgtgcagcatttcaaagtattgagggacggagccggaaaatatttcctgtgggtggtgaagtttaactcactgaacgagctcgtggactaccaccgcagcaccagtgtgtctaggaaccaacagatctttctcagggacattgaacaggtccctcaacagcccacatacgtccaggcattatttgactttgaccctcaagaagacggggagttgggcttcaggaggggggacttcattcacgtgatggacaatagtgacccaaattggtggaaaggagcttgtcacggacagaccggtatgttccccagaaattacgtgacaccagtgaacagaaatgtctag

SEQ ID NO: 24364 - DNA, 654 bp, synthetic construct
  misc_feature 1..654: note = Description of Artificial Sequence: Synthetic coding sequence
  source 1..654: mol_type = other DNA
atggaggccatcgccaagtacgacttcaaggccaccgccgacgacgaattgtcattcaaacggggcgacatactgaaggtactcaatgaggaatgtgaccagaattggtacaaggcagaactgaacgggaaggatggatttatcccaaagaactacatcgaaatgaaacctcacccctggttctttggaaagatcccacgggcgaaggctgaggagatgctttccaagcaacgccacgatggcgccttcctaatccgagagtccgaatcagcccccggagactttagcctgagcgtaaaattcggaaacgacgtccagcacttcaaagttctgcgtgacggggccggcaaatactttctgtgggtggttaaatttaatagtctcaatgagctggtcgattatcaccgaagtacaagtgtctcaagaaatcagcagatcttcctcagagatatagagcaggtgccacagcaacctacatacgtccaagcactgttcgacttcgaccctcaggaggacggtgagctgggctttcgacgcggagatttcattcatgttatggacaattcagatccaaattggtggaagggagcatgtcacggtcagaccgggatgtttccccgaaattacgtcacccccgtgaaccgaaacgtgtag

SEQ ID NO: 24365 - DNA, 654 bp, synthetic construct
  misc_feature 1..654: note = Description of Artificial Sequence: Synthetic coding sequence
  source 1..654: mol_type = other DNA
atggaggccatcgccaagtacgacttcaaggccaccgccgacgacgagttaagctttaaaagaggcgatatcctcaaagtcttaaacgaagagtgcgatcaaaattggtacaaagcggaactgaatggaaaggacggcttcatcccaaaaaactacattgagatgaagccgcacccatggttcttcggcaagattccccgggcaaaagcggaggaaatgttgagtaaacaaaggcacgacggtgcctttctaatcagggagtccgagtccgcacctggcgactttagtctcagtgtcaagttcggcaacgatgtgcagcacttcaaagtgcttcgagatggggccgggaaatactttctctgggtggttaaatttaacagcctgaatgaactggtggactaccacaggtccacatctgtgtcgcggaaccagcagatttttctgagagacattgaacaggttcctcaacagcccacctatgtccaggccctgttcgactttgatccacaggaggacggcgagttaggattcagaaggggggacttcatacatgttatggataacagcgacccaaactggtggaagggcgcttgtcatggccagactggaatgttcccccggaattatgtcactcccgtaaataggaatgtttag

SEQ ID NO: 24366 - DNA, 222 bp, synthetic construct
  misc_feature 1..222: note = Description of Artificial Sequence: Synthetic coding sequence
  source 1..222: mol_type = other DNA
atgcccgccctgcacatcgaggacctgcccgagaaggagaagctgaagatggaagtcgaacagctgcggaaggaggtgaaattacaacgtcagcaggtgagcaagtgctctgaggaaattaagaattacatagaagaaagatccggggaggaccccttagttaaggggattccagaggacaagaatccttttaaggagaaggggagttgcgtgatctcttag

SEQ ID NO: 24367 - DNA, 432 bp, synthetic construct
  misc_feature 1..432: note = Description of Artificial Sequence: Synthetic coding sequence
  source 1..432: mol_type = other DNA
atgagcggccggggcaagaccggcggcaaggcccgggccaaggccaaatcaagaagcagccgggccggactgcagttccctgtggggcgggtgcacagattgcttaggaagggccactatgcagagagggtgggcgcaggagccccggtttacctcgccgcagttcttgagtatttgaccgccgagattttagagctggcaggtaatgccgctcgggataataaaaaaacccgaatcattccaaggcatctccagctagccatccggaatgacgaagaactgaataaactgctgggaggcgtcacaatcgctcaggggggagttcttcctaatatccaggctgtgctcctgcccaagaagacatctgctacagttggcccaaaggccccgagcggaggcaaaaaggctacccaggcttcccaagagtattag

SEQ ID NO: 24368 - DNA, 432 bp, synthetic construct
  misc_feature 1..432: note = Description of Artificial Sequence: Synthetic coding sequence
  source 1..432: mol_type = other DNA
atgagcggccggggcaagaccggcggcaaggcccgggccaaggccaagtcgcgaagcagccgggccggcctgcagtttccggtcggacgagttcacagactcttacggaaaggacattatgctgagagggtgggggccggagcacctgtgtatcttgctgctgtcctcgagtatctcacagctgagatcctggaacttgccggaaatgccgcccgtgataataagaaaacccgaatcataccacgccatttacagcttgctatcagaaatgatgaggaattgaacaagctcctcggaggcgtgaccatcgcgcagggcggagtcttaccaaatatccaagccgtgctgttgccgaaaaagacttcggccactgtagggccgaaagccccttccggcggtaagaaagcaacacaagctagccaggaatactag

SEQ ID NO: 24369 - DNA, 276 bp, synthetic construct
  misc_feature 1..276: note = Description of Artificial Sequence: Synthetic coding sequence
  source 1..276: mol_type = other DNA
atgtgcccctgccccctgcaccggggccggggcccccccgccgtgtgcgcctgctctgcggggaggcttggtctgcgtagtagtgcagctcaactaaccgccgcgcgcctcaaggccctcggagatgagctccaccagagaactatgtggaggaggcgtgctaggtcaaggagagccccagcccctggtgcactgcctacgtattggccttggctatgcgcagctgcccaggtcgcggccctggcagcatggctcctcggacggcgtaacttatag

SEQ ID NO: 24370 - DNA, 618 bp, synthetic construct
  misc_feature 1..618: note = Description of Artificial Sequence: Synthetic coding sequence
  source 1..618: mol_type = other DNA
atgaccgagcggcgggtgcccttcagcctgctgcggggccccagctgggatcccttccgggactggtatcctcacagccggctctttgaccaggcattcggcctgccccgacttccggaggagtggtcccagtggctgggcggctcctcttggcccggctacgtccgccccctccctccagccgctatcgagtcccctgccgtggctgcccccgcttactccagagccctgtctaggcagcttagcagtggtgtcagtgagattcggcatacagcagatcggtggagagtatcgctcgatgtgaaccattttgcgccagacgaactcaccgtgaagacaaaggatggcgttgtggagataacggggaaacatgaggaacgacaggatgaacacggatatatttcgcgctgtttcaccaggaaatacactctgcctccgggggttgaccccacccaagtgtcttcaagtctgtcccctgagggaacgctgactgtggaggctcctatgccaaaactggcaactcaaagtaatgaaatcaccatccctgtgactttcgagtcaagggcccagctcggcggacccgaggctgctaagtcagatgagaccgcagccaagtag

SEQ ID NO: 24371 - DNA, 513 bp, synthetic construct
  misc_feature 1..513: note = Description of Artificial Sequence: Synthetic coding sequence
  source 1..513: mol_type = other DNA
atgaccgagcggcgggtgcccttcagcctgctgcggggccccagctggcccggctacgttaggcctcttcctccagcagcaatcgaatctcctgctgtggccgccccggcttactctcgagctctctcgcgacagttgtcctcaggtgtctcggaaatccggcacacagccgatcgctggagagtctcactggatgtgaaccatttcgcgccagatgaactgaccgtgaaaacaaaggatggagtagtggagatcactggcaaacacgaagagcggcaagacgagcacggctatatttctagatgctttaccagaaaatataccctgcctcccggagtcgaccctacacaggtatccagttcgctctctcccgagggtacgttaacggttgaagctccaatgccaaaactcgctacccagagcaatgagatcacaattccagtgacctttgaatcacgggcccagcttggcggcccagaagcggctaagagtgacgagaccgccgctaagtag

SEQ ID NO: 24372 - DNA, 1926 bp, synthetic construct
  misc_feature 1..1926: note = Description of Artificial Sequence: Synthetic coding sequence
  source 1..1926: mol_type = other DNA
atggccaccgccaagggcatcgccatcggcatcgacctgggcaccacatactcctgcgtcggggtgtttcagcacggcaaggtggagattattgcaaacgatcagggcaacaggaccacaccgagctacgtggccttcaccgatactgaaaggctgattggagatgcagccaagaatcaggtggctatgaacccacagaataccgtgtttgacgctaaaaggctgattggccgcaagtttaacgacccagtggtgcaggcagatatgaagttgtggccctttcaagtcatcaatgaggggggcaaacccaaggtgctcgttagttacaagggcgaaaacaaggccttttaccctgaagagatctccagtatggtactcaccaagctgaaagaaacagctgaagccttcctcgggcatccagtaacaaacgccgttatcacagtgcccgcctattttaatgacagccagagacaagccactaaggatgcgggggtaatcgcaggcctgaacgtactgagaattattaacgaaccaacagccgctgctattgcatacggcctggataaggggggccaaggcgaaaggcacgtcctgatcttcgacctggggggagggacatttgatgtgtccatacttaccatcgatgatggaatatttgaggtgaaggcaacggccggagacacccacctaggaggcgaggactttgacaaccgcctggtgagccacttcgtggaggagttcaaacgaaagcacaaaaaggacatctctcagaacaagcgcgcagtccggcggctgaggaccgcctgtgagcgcgcaaagaggacattgagcagctccacccaggccaatctggagattgatagtctgtatgagggaatagatttttatacctctatcaccagagcgcgattcgaggaactgtgcgctgatctatttaggggtactttggaacccgtcgagaaggccctgagggacgccaaaatggataaagcaaagatccacgatatagtgctggtgggaggtagtacgcgcatccctaaggttcagagactgctgcaagattatttcaatggtcgagatcttaacaagtccatcaatcctgacgaggcagtggcctatggagctgctgtgcaggctgcaatcctgatgggggataagtctgaaaaggttcaggatctgcttcttctggatgttgcgccacttagtctcgggcttgaaacagctggaggggttatgaccgctctgatcaaacgcaatagcacgatccctacaaaacagacgcagatctttactacttacagcgacaatcaacctggcgtgctcattcaagtttacgagggcgagcgcgcgatgactaaagacaacaacctgctgggccgtttcgacctgactgggatcccaccagcccctagaggcgtgccacagatcgaggttacatttgatattgacgcaaacggcattctcaacgtcacagccatggataaatctactggtaaagtaaacaagataacaataacaaacgacaaagggcgtctctctaaagaggaaattgagaggatggtactcgatgctgaaaagtacaaagctgaagacgaggtccagcgcgagaaaatcgcagccaaaaacgccctggaatcttacgcattcaacatgaagtcagtcgtgtcagacgagggactgaaggggaagatatccgagtccgacaagaataagattttggataaatgcaatgagttgcttagctggctcgaggttaatcagctcgcagagaaagatgaattcgatcacaaaagaaaagaactgaagcagatgtgcaacccaatcatcacaaagctttaccagggagggtgcaccgggccagcctgcgggacagggtatgtcccaggtcgccccgccaccggaccgaccatcgaggaggtcgactag

SEQ ID NO: 24373 - DNA, 1599 bp, synthetic construct
  misc_feature 1..1599: note = Description of Artificial Sequence: Synthetic coding sequence
  source 1..1599: mol_type = other DNA
atggccaccgccaagggcatcgccatcggcatcgacctgggcaccacatattcgtgcgtgggggtgtttcaacatgggaaggtcgaaatcattgctaatgatcaggggaaccgcaccactcctagctacgttgcattcacagacacagagcggcttatcggagacgcagccaaaaatcaggtcgcgatgaatccccagaacaccgtgtttgacgccaaacgattgattgggcgtaaattcaatgaccccgttgttcaggctgacatgaagctgtggccgtttcaggtgatcaatgagggaggcaagccgaaggttctagtgtcatataagggggagaacaaagcattttatcccgaagaaatctcatctatggtgttaacaaaattgaaagaaactgcagaggcatttttgggacatcctgtgactaatgcagtaattaccgttcctgcctactttaatgactctcagcgccaggctactaaggacgccggggtcattgcagggttgaacgtgctgagaatcatcaacgagccaaccgcagcagccattgcatacggcttggataagggaggtcagggagagcgccacgtcctgatttttgaccttggagggggaacatttgatgtttccatactcacaatcgacgacggcatctttgaagtcaaggctacagctggcgatacccacctcggaggagaagattttgataacagactcgtgtcacacttcgtcgaggaatttaaacggaagcacaagaaggacatctcacagaataaaagagccgtgagacgcctgcgcaccgcatgcgagcgagctaagcgcactctgagttccagcacacaggccaatctggagattgacagcctgtatgagggaatcgacttttatactagcatcacgcgggctcggtttgaagagctctgtgcagacctgttccggggcaccctcgaaccagtggaaaaggcccttagggacgccaaaatggataaggcaaagatacacgatatagtcctggtaggcggatccacccggatcccaaaggtgcagaggcttcttcaggactacttcaacggacgcgatctgaataagtccattaatcctgacgaggctgtagcttacggagccgcagttcaggccgcaatcttgatgggtgacaaaagcgaaaaagtgcaggacctcttgctgctggacgtggctcctctctctctcggcctggaaacggccggcggcgttatgaccgcactcatcaagaggaatagcaccattcccacaaagcagacccagatcttcaccacatactctgacaaccaacccggggtgttgatccaagtgtatgagggagagcgtgcaatgactaaggacaataatcttctggggagattcgatttaacagggatcccccccgccccaagaggagtaccccagatcgaggtgacattcgacatcgatgctaacggcatcctgaacgtgactgcgatggataaatctactggcaaggtaaacaagatcactattactaatgataagggaaggctgtccaaggaagagatcgagcgcatggtgttagatgccgaaaagtataaggccgaggacgtatag

SEQ ID NO: 24374 - DNA, 1926 bp, synthetic construct
  misc_feature 1..1926: note = Description of Artificial Sequence: Synthetic coding sequence
  source 1..1926: mol_type = other DNA
atggccaccgccaagggcatcgccatcggcatcgacctgggcaccacctacagttgcgtgggagtcttccagcacggcaaggtcgaaatcattgctaatgaccagggcaacaggaccacccccagctacgtggcattcactgacactgaacggctgatcggtgatgctgctaaaaatcaggtagccatgaatcctcagaatacggtattcgacgcaaaaaggctgatcggacgtaagtttaacgaccccgtggtacaagccgatatgaaattatggcctttccaggtgataaatgaaggggggaagccgaaggtgctggtctcctacaagggcgaaaacaaggctttctaccctgaggaaatctctagtatggtactaacaaagctgaaagagaccgctgaagctttcttgggtcatccagtgactaacgctgtgatcacagttccagcgtactttaacgatagccagcgacaagcgaccaaggacgcgggcgtaatcgctggcttgaatgtgcttagaataataaatgagccaaccgctgctgcaattgcatatgggctcgataagggaggacagggggaaaggcatgtattgattttcgacctcggcggggggacatttgacgtgtcaatactgacaattgatgatggtatatttgaggtgaaagccaccgccggcgatacccatctaggaggcgaagactttgataatcgcctggtaagtcactttgtcgaggaattcaagagaaagcataagaaagacatttcccagaacaagagggctgttcgccgcctaaggaccgcctgtgaaagagccaagcgcacacttagctcgtcaactcaagcaaacctggagatagacagcctctacgagggcatcgatttttataccagtattactcgcgcacgttttgaggaactgtgcgccgacctgtttagaggcaccctggagccagtggagaaggctcttcgggacgcaaagatggataaggcaaagattcatgatattgtgctggttggcggatctacccggattcccaaggtccagaggttactccaggactacttcaacggaagggacttgaacaagtctatcaatccagatgaagctgtggcctatggcgcagcagttcaggcggcaattctgatgggagacaagagcgagaaagtccaagacctcctgctactggacgtcgcacccttgtcgctgggccttgagactgccggaggcgtgatgacagcactgattaagaggaatagtaccattccaaccaagcagacccagatcttcacaacttacagcgataaccagccgggggttctaatccaggtgtacgaaggggaacgcgctatgacgaaggataacaatctcctgggccgattcgatttaactggcattccgcctgccccccggggtgtgccgcagattgaggtgacatttgacattgacgccaatggaatcctaaatgtgacagccatggataagagcacaggcaaagttaacaaaattactattacgaatgataagggaaggcttagcaaggaagaaattgaacggatggtgctggacgcagagaagtataaagctgaagatgaggtccaaagagagaaaattgctgcaaagaatgcactggagtcatacgctttcaacatgaagagtgtcgtgagtgatgagggcctcaaggggaagattagtgaatccgacaaaaacaagatattggataagtgtaatgaactgctcagctggcttgaagtcaatcagttagcagagaaagacgaatttgaccacaagagaaaggagctcaagcagatgtgcaatcctatcattacgaaactttaccaaggcggctgcacaggcccagcctgtggcactggatatgtaccgggaagaccggcaaccggaccaaccatcgaggaggtggattag

SEQ ID NO: 24375 - DNA, 699 bp, synthetic construct
  misc_feature 1..699: note = Description of Artificial Sequence: Synthetic coding sequence
  source 1..699: mol_type = other DNA
gccaagggcatcgccatcggcatcgacctgggcaccacctacagctgtgtgggggtgtttcaacatgggaaggtggaaataattgccaatgaccaaggaaataggactacgccatcctatgtggctttcaccgataccgagcgcctcatcggagatgccggtgtaatcgccgggttgaacgtcctgagaatcataaatgaacccactgccgccgcaatagcttacgggctggacaagggcggacagggcgagaggcacgttctgatctttgatcttgggggagggacctttgacgtttccattctgaccatagatgatggtatcttcgaagtcaaggccacagctggtgacactcaccttggcggcgaagatttcgacaatcgcctggtatcgcatttcgtggaagaatttaaaaggaagcataagaaggacatcagtcagaacaagcgagcagtgcggaggctgcgtaccgcatgcgagcgtgcgaagaggacgttgagctccagcacccaagccaacttagaaattgacagtctgtacgaggggatcgatttctacacctcaataacgcgcgccaggttcgaggaactctgtgctgatctctttcgcggcaccctggagccagtggaaaagggggctcctcccgcctcaccgcgctgtagcggatgtttcaggaccacttcaatggatgtcatttag

SEQ ID NO: 24376 - DNA, 1074 bp, synthetic construct
  misc_feature 1..1074: note = Description of Artificial Sequence: Synthetic coding sequence
  source 1..1074: mol_type = other DNA
atgaaggagaacaaggagaacagcagccccagcgtgaccagcgccaatctggaccacaccaaaccatgttggtactgggacaagaaggatcttgctcacaccccttctcagctcgaaggactcgaccctgcaacagaggcaaggtaccgacgagaaggtgcccgctttattttcgatgtgggtactaggctgggattgcattacgacaccctggcaacagggataatctacttccaccggttttacatgttccacagctttaaacagtttcccagatatgttaccggagcctgctgcctgtttttggcaggcaaggttgaagaaaccccaaagaaatgcaaggacatcatcaagaccgctcgctcccttcttaatgacgtacagttcggtcagtttggagatgatccgaaggaagaagtgatggtcctcgagcgaatcttactacagacgataaagttcgaccttcaggtggaacatccctaccagtttctcttgaaatacgcgaaacagctgaagggggataagaacaagatccagaaactggtgcaaatggcttggacctttgtgaatgaccgaacgtcactgtgtacaacgttgagtctgcagtgggaacccgaaatcattgctgttgcggtgatgtacctagccgggagactgtgtaaattcgagattcaggaatggacttccaagccaatgtatcggagatggtgggagcagtttgttcaagacgttccagtagatgttctcgaggacatatgccaccagattttagatctgtattctcaggggaaacagcagatgccccaccataccccccaccagttacagcagcctcctagcctacaacctaccccacaggtgcctcaggtgcagcagtcccaaccaagccagtcatcagaaccaagtcagccccaacaaaaggatcctcccctcattctactgcagggctgggcttgcagacagcccgctactcacctgctccccagcccactcgaggattcactgctgtgtccacgtccctttcctcacccagcatgtctgcagctggggggatggggagggcagcctggatag

SEQ ID NO: 24377 - DNA, 2565 bp, synthetic construct
  misc_feature 1..2565: note = Description of Artificial Sequence: Synthetic coding sequence
  source 1..2565: mol_type = other DNA
atgcccccctgcagcggcggcgacggcagcaccccccccggccccagcctgcgagatcgtgactgtcctgcccagagtgccgagtatcctagggataggttagatcctcgtccaggttctcccagcgaagcgtccagccctccattcttgcgttccagggcacccgtgaattggtaccaagagaaagcacaggtgtttctgtggcacttgatggtttctgggagtaccaccctcctctgtctttggaaacagcctttccatgtgagtgcctttcctgtgacggcttcacttgctttcagacagtcccagggcgcaggacaacacttatacaaggacctgcaacctttcattctgcttaggctgctcatgccagaggagacccagacccaggaccagcctatggaagaggaagaagttgaaacatttgccttccaggctgaaatcgcgcagctgatgtcccttattatcaataccttctactccaataaagaaatcttcctgcgcgagctgattagtaacagttctgacgccctggacaagattcggtacgagtctctgacagatcctagcaaactggatagtggaaaggagttacatattaatctgatccccaacaagcaggatcgaactctcaccattgttgataccgggatcgggatgactaaagccgatctaatcaacaatctgggcaccatcgctaagagcgggactaaggcattcatggaagccctgcaggccggggcagacatcagcatgattgggcagtttggtgtgggcttctacagcgcgtacctggttgccgaaaaggtcacagtgattacaaagcacaacgatgacgagcagtatgcgtgggaatcctcagccggtggatcgttcaccgtgcgcacggatacaggcgagcccatgggccgcggaacaaaggtgattctccatctgaaagaggaccagacggagtacctggaggagagacgcatcaaagaaatagtgaagaagcacagccagtttattggataccctatcactcttttcgtggaaaaagagagggataaagaggtatctgatgatgaggcagaagagaaggaagataaagaagaagaaaaggagaaggaggaaaaagagtctgaggataagcccgagattgaagacgtcgggagcgacgaggaggaggagaagaaggacggggataagaaaaagaaaaagaaaatcaaggagaaatacattgaccaggaggagctgaataaaacaaaacctatttggacgcggaatcctgatgacatcaccaacgaggaatacggcgaattttataagtcacttaccaacgactgggaagaccatctagcagtgaagcacttctctgtcgaaggccagctggaattccgggctctgttatttgtcccacggcgggcaccctttgacctgttcgaaaatcgcaaaaaaaagaataacataaagctatatgtgcggagggtgttcatcatggataactgtgaagaactgatcccagagtatctgaactttatcagaggggtggtggacagcgaggatctccctctgaatataagcagagaaatgttgcagcaaagtaagatattgaaagtgatccggaaaaatctggtgaaaaagtgtctagagttgtttacagaacttgcagaggacaaagaaaactacaagaagttctacgaacaattctccaaaaacattaaactcggtattcacgaagatagtcagaaccgcaagaaactcagcgaactcctcagatactacacgagtgcatctggtgatgagatggtgtcactaaaggattactgcacgcggatgaaggagaatcagaaacatatctattacatcaccggagaaactaaagatcaggtagccaattccgcttttgtggagcggttgaggaagcatggcctggaggttatttatatgattgagcccatagacgaatactgcgttcagcagctgaaggagttcgagggaaagacattggtttccgtgacgaaggaagggcttgagctccccgaggacgaagaggagaagaagaaacaagaagagaagaagacgaagttcgaaaatctctgcaagattatgaaggacattctggaaaaaaaggtggagaaagtggtagtttccaaccgactcgtcaccagtccctgctgtattgtgaccagtacgtatgggtggaccgccaatatggagcggatcatgaaggcacaggccctgcgtgacaatagcacaatgggctacatggctgcgaagaagcacctggagataaatcccgaccatagtataatcgagactctcagacagaaggccgaggccgacaaaaacgacaaatcggtgaaagacctcgtgatcctgctttacgaaaccgctctgttgtcctctggattcagtctcgaagacccccaaacccatgcaaacaggatctaccgaatgatcaagctcggcctggggatcgacgaggatgatcccaccgccgacgataccagcgctgcggtgactgaggagatgcctcccctggagggagatgatgacacgtctagaatggaggaggtcgactag

SEQ ID NO: 24378 - DNA, 1242 bp, synthetic construct
  misc_feature 1..1242: note = Description of Artificial Sequence: Synthetic coding sequence
  source 1..1242: mol_type = other DNA
atgggccggggcaccaaggtgatcctgcacctgaaggaggaccagacggaatacttagaggagcgcagaataaaagagatcgtcaagaaacactctcagttcatcggctacccaatcacgttgtttgtggagaaagaaagagacaaggaggtctctgacgacgaggccgaagagaaggaagacaaggaggaagagaaggaaaaggaggaaaaagagtccgaagacaagcctgaaattgaagacgttggttcagacgaggaagaggaaaagaaggacggcgacaagaaaaaaaagaaaaaaataaaggagaaatatattgaccaagaggaactgaacaaaacaaagcccatctggaccagaaatcccgatgacataactaatgaagaatatggcgagttttataagtccctaacaaacgattgggaggatcacttagcagtgaagcactttagtgtggagggacagctcgagttcagggctctgctgttcgtcccgagacgggctccatttgatctgtttgaaaatcgcaagaagaagaataacataaagctgtatgttcggagagtgttcatcatggacaattgcgaggaactgattcccgagtacctgaattttatccgcggagttgtggatagcgaagacctccctctgaatatttctagagagatgctgcagcagtctaagatcttgaaggtcatacgcaagaacctcgttaaaaagtgtcttgagctgtttaccgaactggccgaggataaagagaattataagaagttttacgagcaattcagtaagaatatcaaactgggtatccacgaagactctcaaaataggaagaaactatccgagctgctgcgatactatacgtctgcgtcgggtgacgagatggttagcctgaaggattattgcactaggatgaaagaaaaccaaaaacacatttactacatcacaggagagaccaaggatcaggtggcaaattctgcatttgtggaacggttgaggaaacacggccttgaggtgatttacatgattgaacccattgacgagtactgcgtacaacagctgaaggagtttgagggaaaaacgttggtctcagtaaccaaagaaggactcgaattaccggaagatgaggaggagaaaaaaaagcaggaggagaagaagaccaagttcgaaaatctgtgcaagatcatgaaagacattctggaaaaaaaagtggaaaaggtatgcgagtactctatttcgtag

SEQ ID NO: 24379 - DNA, 2412 bp, synthetic construct
  misc_feature 1..2412: note = Description of Artificial Sequence: Synthetic coding sequence
  source 1..2412: mol_type = other DNA
atgcgggccctgtgggtgctgggcctgtgctgcgtgctgctgaccttcggatccgtacgcgcggatgacgaggtggatgttgatggtacagttgaggaagatctcgggaagtcacgcgagggttctagaacggatgacgaagtggtgcagcgggaggaggaggctattcaattggatggactcaatgcctcacagatcagggagctgcgagagaaatctgaaaagtttgcctttcaggcggaagtgaatcgcatgatgaaattgatcatcaactccctatataaaaataaggagatcttcctgagggaattgatttctaacgcatccgatgctctggataagatacgattgattagtctgacggacgagaatgcactgagcggcaacgaagagttgaccgtaaagataaagtgcgataaggaaaaaaacctgctgcatgtaaccgacaccggcgtcgggatgaccagagaggaactagtgaaaaacctgggcactattgcaaagtctggaacttccgagtttctgaataaaatgaccgaggctcaggaagacgggcagtctacttcagagctgatcgggcagtttggtgtcgggttctatagtgcttttctggtagcagataaggtgatcgtgaccagtaagcacaataacgatactcagcacatttgggagagcgatagcaacgagttttccgtaattgctgacccccgagggaatacactgggtagaggcactaccataacactggtcttgaaggaagaagcctccgactacctcgaactggacacaatcaagaatttggtcaaaaaatattctcagtttatcaatttcccaatctacgtatggagttctaaaaccgagacggtcgaggagcccatggaggaggaggaagcagctaaagaagagaaggaggagagcgatgatgaagccgcggtagaggaggaagaggaggaaaaaaagccgaagactaagaaggtggaaaagaccgtgtgggattgggaacttatgaacgacattaaacccatatggcagcgaccctcaaaagaggtggaggaggacgagtataaagccttctataagagcttttcgaaagaaagcgatgaccccatggcttacattcactttaccgcagaaggagaggtgacgttcaaatcaatactatttgtcccaaccagtgccccccgtggactgtttgatgagtacggctcgaaaaaatctgattatataaaactctacgtcagaagggtatttatcaccgatgattttcacgacatgatgcctaaatacctgaactttgtgaagggcgttgtcgatagcgacgacctgccgttgaatgttagccgcgaaacccttcagcagcataaactcctgaaagtcattagaaagaaattagtacgtaagaccctagacatgataaagaagattgccgatgataaatacaacgacacattctggaaagaattcggcactaacatcaaacttggtgtcatagaagatcatagcaatcgaactagactggcgaagctcctccgcttccagtcatcacaccacccaacagacataacaagcctggaccagtacgtagagaggatgaaagagaagcaggacaagatttacttcatggctggctctagccggaaagaagcggagtctagtccttttgtcgagcgactgttaaagaagggttatgaagtgatatacctcactgaaccagtggacgaatattgcatccaggcactccctgagtttgacggtaaacgatttcagaatgtcgcaaaagagggcgttaaatttgacgagagtgaaaagaccaaggaaagtagggaagcggtcgaaaaggagttcgaacccctattgaactggatgaaggataaagccctgaaagataagatagaaaaggctgtcgtttctcagagacttactgagagcccatgtgccttagtagccagccagtatggctggtcgggcaatatggaaaggattatgaaggcacaggcgtatcaaacgggcaaagacatatctacaaactactacgcctcacagaaaaagactttcgaaattaaccctcgacatccattgattcgtgatatgctgagaagaatcaaggaggatgaggacgacaagaccgtactggacttggccgtggtactgtttgagaccgcaactttgcggagcgggtacctccttcccgacactaaggcatatggggatcgcatagagcgtatgctccgcctttcgctgaacatcgaccctgatgccaaggttgaagaggagcccgaagaggagcccgaagagaccgcagaggacactaccgaagacactgaacaggacgaggacgaagagatggatgtgggcaccgacgaggaagaggagaccgcgaaagaatccacagccgaaaaagatgaactttag

SEQ ID NO: 24380 - DNA, 1662 bp, synthetic construct
  misc_feature 1..1662: note = Description of Artificial Sequence: Synthetic coding sequence
  source 1..1662: mol_type = other DNA
atgcgggccctgtgggtgctgggcctgtgctgcgtgctgctgacctttggttctgtgagggcagatgatgaagtcgacgtcgatggaacagttgaagaggacttgggcaaaagtagggaggggtctagaacggacgacgaggcagcaaaagaagagaaagaagagtctgacgacgaggccgcggtcgaggaggaagaagaagaaaaaaaacctaaaacgaagaaggttgaaaaaacagtctgggactgggagctgatgaatgacataaaaccaatttggcagcgaccttcaaaggaggtggaagaggatgaatacaaggccttctataagtccttcagcaaggaatccgacgatcccatggcgtatatccacttcacggctgagggagaagtcacattcaagtcaattctttttgtgccgacttccgctccaagagggctgtttgacgaatatggatccaaaaagtcagattatataaagctgtacgtaagacgggtgttcatcacagacgatttccatgatatgatgcccaaatacctaaattttgtgaaaggtgttgtggacagtgatgacttacccctgaacgtgtctcgtgaaactctgcagcagcataagctactgaaagtcatccgaaagaaactggttcggaagacactggacatgatcaagaagatcgctgatgataaatacaatgatacattctggaaggagtttggaacgaatattaaactgggagtgatcgaggatcacagcaaccggacaaggctggctaaattgctacgcttccagtcaagccatcacccaaccgatattacctcactggaccaatatgtcgagagaatgaaggaaaagcaggacaagatttatttcatggccggctcatcaagaaaggaggcggagagctcacctttcgtggagagactgctcaaaaaaggctacgaggtgatctatctgactgagcccgtggatgaatactgcatacaggctttacctgagtttgatgggaagaggttccagaatgtggcaaaggaaggtgtcaagtttgatgagtctgagaagaccaaagaaagcagagaagcagtggagaaagagttcgagccgcttttgaactggatgaaggacaaggccctgaaagacaagatcgagaaagctgtggtctctcagcgcttaacggagagcccctgcgccttagtggcgtctcagtacggatggagcggcaacatggaaaggatcatgaaagcacaggcatatcaaacaggaaaggatatctcaacaaattactatgcgagccaaaagaaaacatttgaaattaatcccagacaccccctgattcgcgatatgcttcgtcgaatcaaagaagacgaagatgacaaaaccgtgctcgatcttgccgtcgtactctttgagaccgccacactacgtagcgggtaccttctgcctgacactaaggcatacggcgacaggattgagcggatgttgcggctgagcctgaacatcgatccagatgccaaggtggaggaggagccagaagaggaacctgaagaaactgccgaagataccaccgaagacacagaacaggacgaggatgaagagatggacgttggcacggatgaggaggaggagacggccaaagagagtacagccgagaaggacgaattgtag

SEQ ID NO: 24381 - DNA, 948 bp, synthetic construct
  misc_feature 1..948: note = Description of Artificial Sequence: Synthetic coding sequence
  source 1..948: mol_type = other DNA
atgcgggccctgtgggtgctgggcctgtgctgcgtgctgctgaccttcggctccgtgagggcagatgacgaggtcgatgttgacggcaccgtcgaagaggacctgggaaagagccgggaagggtctcgcactgacgatgaggttgtccagcgagaggaggaagctattcaactagatggcctgaatgcctcacagatcagagagctgagagaaaaaagtgagaagtttgcctttcaagcggaggtaaataggatgatgaagttgattatcaattctctgtataaaaataaagagatttttttaagagagctcattagcaatgctagcgacgccttagacaaaatccgcctaatctcacttaccgacgaaaacgccctttctggcaacgaggaactcacagtgaagattaagtgcgacaaagaaaaaaatctcttgcatgtgacagatactggcgtcggcatgactcgggaagaactggtcaagaacctgggaactatagccaagtctggtaccagtgaattcttgaataaaatgacagaggcacaggaagacgggcagtcgacaagcgaactcattgggcagtttggggtcggcttctattcagcctttctggtcgcagataaagtcatcgttacttctaagcataacaacgatacccagcacatttgggagtctgattccaatgagttcagcgtgatcgccgacccacgcggcaataccctgggccgcggcaccacaatcaccctggtactgaaggaagaagccagcgattaccttgagttggataccattaaaaatctggttaagaaatattcccagtttattaatttccctatttatgtgtggagctccaaaactgagaccgttgaggaacccatggaggaggaggaggccgccaaagaggagaaggaggagtccgatgacgaagcagcagcccggcgtagatag

SEQ ID NO: 24382 - DNA, 483 bp, synthetic construct
  misc_feature 1..483: note = Description of Artificial Sequence: Synthetic coding sequence
  source 1..483: mol_type = other DNA
atgagcgaggtgcggcccctgagccgggacatcctgatggagaccctcttatacgaacagttactcgagccacctaccatggaggttctgggaatgacggacagtgaagaggatttggaccctatggaagattttgatagcctggaatgtatggagggctctgatgccctggctctccgtctggcgtgcataggagatgaaatggatgtgtcgctccgagcaccccggcttgcccagttaagcgaggttgccatgcacagtctcgggctggccttcatctatgatcagacggaggacattcgggatgttctgcggtcatttatggatggttttactactctgaaggaaaatattatgagattctggagaagtccgaatccaggatcctgggtgtcttgtgagcaggtgctgctagccctcctgctcctgcttgccctgttattgccactgttgtccggtggactgcaccttttgctgaagtag

SEQ ID NO: 24383 - DNA, 564 bp, synthetic construct
  misc_feature 1..564: note = Description of Artificial Sequence: Synthetic coding sequence
  source 1..564: mol_type = other DNA
atggagcggccccagcccgacagcatgccccaggacctgagcgaggctctgaaggaggcgactaaggaagtgcatactcaggccgaaaacgccgagtttatgcgaaattttcagaagggtcaagtgactagagatggctttaagctggtgatggccagcctgtaccacatctacgtcgcactcgaggaggagattgaacggaataaagagtcacccgtgttcgcccccgtttacttcccagaggagctccatagaaaagcggccctcgaacaggatctcgcattctggtacggtccccggtggcaagaagttatcccttataccccagccatgcagcgctatgtgaaaaggctgcatgaagtaggccgtactgaacccgagctgcttgtagcccacgcctacacccggtatctaggtgacttgtctggaggtcaggtgttgaagaaaatagcccagaaagccctggatcttccttcatctggcgaaggactcgcatttttcacattcccgaatatagcctctgccacaaagtttaaacagctataccggtcacggatgaactag

SEQ ID NO: 24384 - DNA, 1581 bp, synthetic construct
  misc_feature 1..1581: note = Description of Artificial Sequence: Synthetic coding sequence
  source 1..1581: mol_type = other DNA
ctgggcggccggagcagctgcgaggaccccggctgcccccgggacgaggagcgggctcctaggatgggatgcatgaagtcaaaattccttcaggttggaggaaacactttttcaaaaactgaaacgtcagcgtcaccccactgccccgtgtatgtgccagaccctacatcaaccattaagcctgggcccaatagtcataattctaatacccctgggatccgggaagccgggtccgaggatattatagtagtcgccctgtacgactacgaggccatccaccacgaggacctcagctttcagaagggagaccaaatggtggtgctggaggagagtggtgaatggtggaaagcccggtccctagctactagaaaggaaggctatattcccagcaattacgttgcccgtgtcgattcactcgagaccgaagagtggttctttaaaggaatctcacgaaaagatgcagagcggcagctgctggcgccagggaacatgttaggcagctttatgatacgcgattcggagaccaccaagggcagttatagcctgagtgtgcgtgactacgaccccagacagggcgacaccgtaaaacattataagatccgcactctggacaacggaggattctacatctcaccccgcagcaccttctcgaccctgcaggaattagtggatcattacaagaagggaaatgacggtctttgtcagaagttgagcgtcccatgtatgagctcaaaaccacagaaaccttgggaaaaagacgcctgggagattcctcgcgagagcctgaagctggagaaaaagctgggtgcaggtcaatttggcgaagtttggatggcaacttacaacaagcacacaaaagtcgctgtcaagacaatgaaaccagggtctatgagcgtggaagcgttcctggcagaggccaacgttatgaagacgctccagcacgataagctggttaagctgcatgccgtggtgactaaggagcctatttatatcattacagaattcatggctaagggctccctgctggactttttgaagtcagatgagggaagtaagcagccattaccgaaactgatcgactttagcgcccagatcgcagaggggatggcattcatcgaacagagaaattacatccaccgagacctcagagcagctaacattctggtatcagccagtctcgtatgcaagatagctgatttcggattggctcgggtgatagaagataatgagtataccgcccgggagggcgctaagttcccgataaaatggactgcacccgaagcgatcaatttcgggtccttcaccataaagtctgatgtctggtcttttgggatcctgctgatggaaatagttacttacggtagaataccttatccagggatgtccaacccagaagtgattagggcattagagcgcggatatagaatgccccgccctgaaaattgtcccgaagagctgtataacatcatgatgcgatgctggaaaaatagacccgaagagcgaccaacttttgagtacatccaatccgtgctggatgatttctataccgccactgagagccaataccagcagcagccctag

SEQ ID NO: 24385 - DNA, 1578 bp, synthetic construct
  misc_feature 1..1578: note = Description of Artificial Sequence: Synthetic coding sequence
  source 1..1578: mol_type = other DNA
ctgggcggccggagcagctgcgaggaccccggctgcccccgggacgaggagcgtgcccctcgtatgggatgtatgaaatctaagtttcttcaggtcggggggaatactttcagtaaaacagagacaagtgccagccctcactgtcctgtgtatgtgcctgacccaacaagtaccatcaagccgggaccgaatagtcataattccaatacccccggcatccgcgagggctccgaagacatcatagtcgtggccctgtacgactatgaggccattcaccacgaagatctcagtttccagaagggcgaccagatggtagttctggaggagagcggcgagtggtggaaagcaaggtccctggcaacacggaaggagggctatattcccagtaattacgtggcccgggttgattccctggagacagaagagtggttctttaagggaatctctagaaaggatgccgaaaggcagcttctagcgcccggaaacatgcttggttctttcatgatcagagattctgaaaccaccaaggggtcttactctttgtccgtccgagactacgatcccaggcaaggagacacagtgaaacactacaaaatccgtactctagacaatggcggattttacatttcccccagatctactttctcaactctgcaggagctggtggatcattacaagaaaggcaacgacggcctgtgtcagaaactctccgttccttgcatgtccagcaaacctcaaaagccatgggaaaaggatgcctgggagattccgcgtgagtccctgaagcttgagaagaaactgggcgccgggcagtttggggaagtctggatggcaacatacaacaaacatactaaagtcgccgtgaaaaccatgaaacctggctctatgtctgtcgaggctttcctggcagaggccaatgtaatgaagaccctccagcatgataagttagttaaattgcacgctgtagttaccaaggagccgatctatattatcaccgaattcatggcaaaagggagtcttttggacttcctgaagtccgatgagggttcaaaacaaccattacccaagttgattgacttcagtgctcagattgcggaaggtatggcctttatcgaacagagaaactatatccaccgggacctgcgggctgcaaatattctggtgtccgcctcgctagtctgcaaaatagcagactttggcctggcccgcgtaattgaagacaatgaatacacggccagggaaggcgctaagttccccatcaaatggacagcccccgaagccattaattttggttcattcaccattaaatcagatgtctggagcttcgggattcttctgatggaaatcgttacatacggcagaataccgtaccccggaatgtccaacccggaggtgatccgcgcattagagcggggttaccgtatgcctcgccccgagaattgtccagaggaactttacaatatcatgatgcgctgctggaagaaccgcccagaagaaaggcccacattcgaatacattcagtctgtgctggatgacttttacaccgccactgaatcacagtatcagcagcagccgtag

SEQ ID NO: 24386 - DNA, 1515 bp, synthetic construct
  misc_feature 1..1515: note = Description of Artificial Sequence: Synthetic coding sequence
  source 1..1515: mol_type = other DNA
atgggctgcatgaagagcaagttcctgcaggtgggcggcaacaccttttccaagactgagacttccgcaagcccgcactgtcctgtttacgtgccagatcccacaagcactattaagcccggaccaaatagtcacaactcaaatactccagggatcagagaaggctccgaagatatcatcgtggtggccctctacgactatgaagcgatccaccatgaagatctgagttttcagaagggcgatcagatggttgtgctggaggagtctggagagtggtggaaggcaaggtccctggccactaggaaagagggatatataccaagtaattatgtcgcccgtgttgactctctcgaaacagaggagtggttcttcaaaggcatcagcagaaaggacgcagagagacaattactggctccagggaatatgctcggtagcttcatgatccgggactcagaaacgactaaggggagttactctttgagcgtgagggactatgatccgcggcagggcgacaccgtcaagcattacaagatccgcaccctcgacaacggggggttctatattagcccaaggagcactttctctactttgcaggagttagtcgatcattacaagaagggcaatgacggtctctgtcagaagctgtccgtgccttgcatgtctagtaaaccgcagaaaccttgggagaaagacgcatgggagatccccagggagtccttgaaactcgagaagaagctgggagctggccagttcggtgaggtgtggatggccacatataacaagcatactaaagttgctgtgaaaacaatgaagcctggatctatgtcggttgaagcattcctggccgaggccaatgtgatgaaaaccctgcagcacgacaagcttgtgaagttgcacgcagtagtcactaaagaaccaatttacattataacagagtttatggcgaaagggtctcttttagactttctgaagagcgatgaaggaagtaaacagcctctcccaaaacttatcgacttttcggcacaaattgctgaaggaatggcgttcattgaacagcggaattacatccaccgcgatctgcgtgctgctaatattctcgtttccgccagtcttgtgtgcaaaatagctgactttgggctggcacgagtaatcgaagacaacgagtatacagcaagagagggcgctaaatttcccatcaaatggacggctcccgaggccatcaacttcgggagctttacaatcaagagcgatgtgtggagcttcggaatcctgcttatggagattgtgacatacggaagaatcccgtatcctggtatgagcaatcccgaagtaatccgtgctctggagagaggatacaggatgccccgaccggagaactgtccagaagagctttacaacataatgatgcggtgctggaaaaataggcctgaggaacgccctaccttcgagtacatccaatcagtgctcgatgatttctacaccgctacggaatcccaatatcagcagcagccctag

SEQ ID NO: 24387 - DNA, 1518 bp, synthetic construct
  misc_feature 1..1518: note = Description of Artificial Sequence: Synthetic coding sequence
  source 1..1518: mol_type = other DNA
atgggctgcatgaagagcaagttcctgcaggtgggcggcaacaccttctccaaaaccgaaaccagtgctagcccacattgccctgtctatgtgccggatcccacctctactatcaagccagggcccaattcacacaacagcaacacacccggcatccgggaagcaggcagtgaagatatcatcgtggtggccctctatgactatgaggcgatacaccatgaggacctttcctttcagaagggcgaccagatggtggtgctcgaggaaagcggggaatggtggaaggcacgttccctcgcaacacggaaggagggatacattccttccaattatgtggcaagggtggactctctggaaacagaagagtggtttttcaagggcattagtagaaaagatgcagaacggcagttgctcgctcccggcaacatgttaggtagcttcatgatcagggattccgagacaaccaaagggtcttattcattgagcgttcgagactacgatccccgtcagggagacacggtgaaacactataagataaggacgctggacaacggtggcttttacatctcgccgcggtctaccttttcgaccctgcaggaattggtcgaccactataagaagggtaacgacgggctgtgtcagaagctgtctgttccttgcatgtcctcgaagccgcagaaaccctgggaaaaagacgcatgggagatccctcgcgagtccttaaagttagagaaaaaattaggagccggccagttcggtgaggtatggatggctacatacaataaacacactaaggttgcagtcaagactatgaaaccaggctctatgagtgtcgaggcatttttagcggaagccaacgtgatgaagaccttacagcacgataagcttgtcaaattgcacgcagtagtcacaaaggaacccatctacattatcacagaattcatggccaagggtagtttgctggactttttgaagtcagacgagggcagtaagcagccccttccaaagctgatcgatttctcggcccaaattgcagagggtatggcgtttattgaacagcgtaactacattcatagggatttacgggcggccaacatcctggtgagcgcctctctcgtatgcaagatcgccgacttcgggctcgcccgcgtgattgaagataacgagtatacagcccgggagggtgccaagttccctatcaaatggacggcgcccgaagccatcaatttcggcagcttcaccattaagagcgatgtctggagcttcggtatcttgctgatggaaattgtgacatatggcaggatcccctatccgggcatgagcaacccagaagtgattcgcgccctggagcgcgggtatcgaatgccgcgcccagaaaactgtcctgaagagctttacaacatcatgatgagatgctggaaaaaccgaccagaggagaggcccaccttcgagtacatacagtcagtcctggacgatttttacacagccaccgagagtcagtaccagcagcagccctag

SEQ ID NO: 24388 - DNA, 1521 bp, synthetic construct
  misc_feature 1..1521: note = Description of Artificial Sequence: Synthetic coding sequence
  source 1..1521: mol_type = other DNA
atgatgggctgcatgaagagcaagttcctgcaggtgggcggcaacaccttttcgaagactgaaacctcggcctctccacactgtcccgtgtacgtacctgacccaacaagcaccattaagccaggacccaactctcacaattccaatacccccggaatcagggaggcaggctctgaagatatcattgttgtagcactttatgattatgaagccatccaccatgaagatctgtcttttcagaagggtgaccaaatggtggtcctagaagagtctggcgagtggtggaaggctaggtctctggccactaggaaggagggctacatcccctcaaactacgtggcccgggttgactctttagagacagaggaatggttttttaagggcatctcgagaaaagacgccgagcgtcagttacttgcacccggaaacatgctgggatcgttcatgattagggacagtgagaccaccaagggttcttactctctctctgttcgcgactatgacccgaggcagggggacacagtcaaacactacaagatcaggaccttggacaacggggggttctatatctcaccaaggtcgacttttagcaccctccaggagttagtggatcactataagaagggcaatgacgggttatgccagaagctgagcgtcccctgtatgtctagtaagccccagaagccctgggagaaagacgcttgggagataccccgtgagtccctcaaactagaaaagaagctgggcgcgggccagtttggagaggtttggatggcaacttacaacaagcatactaaagtggccgtgaaaacgatgaagcctggatctatgtccgtggaagcttttctggcggaggccaatgttatgaaaactctgcagcatgacaagctcgtaaaactgcacgccgtggtgaccaaagagccgatctatatcatcaccgagttcatggccaaaggctccctactcgacttcctaaaatctgatgagggctcgaaacagccattacccaagcttattgacttttccgcccaaattgccgaaggtatggccttcattgaacagagaaattacatccacagagatcttagagctgcaaatattctcgtgagcgcatcattggtgtgcaagattgctgatttcggcctggcaagggtgatcgaagataatgagtatactgcccgtgaaggggccaaattcccaatcaagtggaccgcaccagaagccattaatttcggttcatttacaatcaaaagcgacgtttggagctttgggatcttgctgatggagatcgtcacttacggacgtatcccttatcctggcatgagcaaccccgaggtgatccgagctctggagagagggtatcgtatgcccaggccagaaaactgtcctgaggagctctacaatattatgatgaggtgttggaagaaccgacccgaggaacggcccacttttgaatatattcagagcgttctggatgatttctatacagcaacagaaagtcagtaccagcagcagccctag

SEQ ID NO: 24389 - DNA, 1518 bp, synthetic construct
  misc_feature 1..1518: note = Description of Artificial Sequence: Synthetic coding sequence
  source 1..1518: mol_type = other DNA
atgggctgcatgaagagcaagttcctgcaggtgggcggcaacaccttctcaaaaacggaaacgagcgctagtccccactgccctgtatacgtgccggaccccactagcaccattaagccaggccccaactcccacaattccaacacacctgggatccgggaagctggaagtgaggacatcatcgtcgtggccctgtatgattatgaagccatacaccacgaagacctgtcattccagaagggtgaccagatggtggtcctagaagagtccggagagtggtggaaggcacgttctctggccaccagaaaggaaggatacatccctagcaactatgttgccagagtggactccttagaaactgaggagtggttcttcaaaggcatcagtcggaaagacgcagaaaggcaacttctggccccaggcaatatgctgggcagtttcatgatccgggacagcgaaacaaccaagggctcatatagcttaagcgtgagggattacgacccaaggcagggagacaccgtgaagcattataagattaggacactggacaatggcgggttttacatctcaccacgttctacgttctcaacactgcaggaactcgtagatcactacaagaagggcaacgatggcctgtgccagaaactcagtgtgccgtgtatgagctcaaaaccacagaagccctgggaaaaagatgcctgggaaatcccccgggagagtctcaagctcgaaaagaaactgggcgccggtcagttcggtgaagtgtggatggcaacatacaataagcacacaaaggttgcagttaaaaccatgaaacccggaagtatgagtgtggaggcgttcttggccgaggctaatgtcatgaagaccctgcagcatgacaaattggtcaagttgcatgccgtagtcaccaaagagccaatctatatcattacagaattcatggcgaaagggtctctgctcgactttctgaaatctgatgagggtagcaagcagccacttcccaagttaatcgacttctctgcccagattgctgaaggaatggccttcatagagcagcggaactatattcatcgcgatttgcgcgccgccaatattctggtgagtgccagtctcgtctgcaaaattgctgatttcggattggctcgcgtgatcgaggataacgagtatactgccagggagggggccaagtttcctatcaagtggactgcccctgaggctatcaacttcggcagtttcactatcaagtccgatgtgtggtcatttggaatattgcttatggaaattgtaacatacggccgaataccgtacccaggcatgagcaaccctgaagtcattagggctctggaaagaggctataggatgccacgccctgaaaattgtcctgaggaactgtacaatataatgatgagatgctggaaaaaccgaccagaggaacgcccaaccttcgagtacattcagagcgtgctcgatgatttttacaccgccaccgaaagtcagtaccaacagcagccctag

SEQ ID NO: 24390 - DNA, 1632 bp, synthetic construct
  misc_feature 1..1632: note = Description of Artificial Sequence: Synthetic coding sequence
  source 1..1632: mol_type = other DNA
atgctgctgcggagcaagcccgccctgcccccccccctgatgctgctgttgctagggcctctcgggccgttatctccaggggctcttcctcgcccggctcaggcccaagatgtcgtcgacctggatttctttacccaagagccattgcacctggtgagcccctcctttctgtccgtgacaatcgacgcaaacctggccacggatccgcgattcctcattcttctggggagccctaaacttcgcacgctggcgagagggctgagtcccgcctatctcaggttcggaggtaccaaaactgattttctgatatttgacccgaagaaagagtcaacattcgaggagcggtcctactggcagtctcaggttaaccaggacatttgcaagtatgggagtatccctcctgacgttgaagagaagttaaggctggaatggccataccaggaacagttgttgttaagggagcactatcagaagaagtttaagaactctacatattcgcgaagctctgtggacgtgctatatactttcgcaaattgttctggcctggatcttatcttcgggctgaacgccttgctccgcacagcagatctccaatggaatagctccaacgcgcaattgctcctcgattactgtagcagcaaaggatataacatttcttgggagctgggcaatgaacctaattcctttctcaagaaggcagatatattcatcaatggttcacagctcggcgaggacttcatccaactccataagttactgagaaagtccacgttcaagaatgcaaagctgtacggaccggatgtgggacagccacggcggaagaccgccaaaatgctcaaaagctttcttaaggccggcggggaagtaatagacagcgtaacttggcaccattattatctcaacgggcgcactgccacaaaagaagacttcctgaatcctgacgtcctagacatttttataagctcagtgcaaaaggtatttcaggtggtagaatccacgcggccagggaaaaaggtctggctcggcgagacatcctcggcctatggcggcggggcaccactgttgtctgacacatttgccgcaggcttcatgtggctggacaagctggggctctccgctaggatgggcatagaggttgttatgcgccaagtgttcttcggagcaggaaactaccacctggtcgatgaaaatttcgaccccctgcctgactattggctaagtttgctgtttaagaagctggtgggcactaaagtgctgatggcgtccgtgcaaggctctaagcgccggaagctgcgggtttatctgcactgcacaaataccgataacccgagatacaaagaaggggacctcactctctatgcaataaatctgcataacgtgaccaagtatctgaggttaccttaccctttcagcaacaaacaagtggacaagtacctcctgcgaccgctaggtccacatggcttgctgtctaaatccgtgcagctgaatggactgacactgaagatggtggatgaccagacactgccaccactgatggagaaaccgctccgccctggtagtagcctgggcctccctgctttctcctacagttttttcgtcatacgcaacgccaaagtagccgcttgcatttag

SEQ ID NO: 24391 - DNA, 1632 bp, synthetic construct
  misc_feature 1..1632: note = Description of Artificial Sequence: Synthetic coding sequence
  source 1..1632: mol_type = other DNA
atgctgctgcggagcaagcccgccctgcccccccccctgatgctgttgcttttgggcccgctgggtcctttatcccctggagctctccctcgaccagcccaagctcaggatgttgtggacttagatttcttcacgcaggagcccctgcatttggtgagccccagcttcctgtctgtgactatcgatgcaaatttagctactgacccacgctttctgatactgctcggcagtccaaagttacggactctggcaagaggtctctcgccagcatatctgcggttcggcggcacaaaaacagatttcctcatattcgacccgaagaaagagtccacctttgaggagcgaagctattggcagagccaggtgaatcaggacatctgcaaatatgggagcatccccccggatgtggaggaaaagctccgtttggagtggccataccaggaacagctcttactgcgggagcactaccaaaagaagttcaaaaattccacttactctagatcatctgtcgatgtgttatacaccttcgcaaattgctccgggctggacctgatttttggcttaaatgcactccttcggaccgctgatctgcaatggaattcgtcgaacgcccagctcctgctcgactactgctcttctaagggttataatatcagctgggaactgggtaacgagcccaatagttttctgaagaaagctgacatcttcattaatggcagtcagctgggcgaggattttatccagcttcacaagctcctacgcaaaagtaccttcaaaaatgctaaattgtatggaccagatgtggggcagccacgtcggaaaacggccaaaatgttgaagtcatttctcaaggcaggtggagaagtgattgactcagtaacctggcaccactactatctgaatggtcgtacggccacgaaagaggatttcttgaatcctgacgttctcgacattttcatctcatcagtgcaaaaagtcttccaggtcgtggagagcacaagacctggcaagaaggtttggctcggcgaaacttcatcagcatatggtggcggggctccactactaagcgataccttcgccgccggttttatgtggcttgacaagctgggactttccgccagaatgggcatagaggttgttatgcggcaggtctttttcggagcagggaactaccacttggtggacgagaactttgatcctctacccgactattggctgagcctattatttaagaagttggtgggaactaaggtgctaatggcctcagtgcaaggctccaagagacgtaagctccgcgtgtacctccattgcaccaacacagacaatccgcgctataaagagggagacttgactctctatgctatcaatctgcacaatgtgaccaagtatttacgtttgccatatcccttttctaataagcaggtggacaagtaccttttgagaccactggggccacacgggctgctgtccaagagcgttcagctgaatgggttaactttaaaaatggttgatgaccagactctgccacctctcatggaaaagccattgagacctgggagtagtctcggattgcctgcctttagctattcgttttttgtcattagaaacgccaaggtagctgcttgtatatag

SEQ ID NO: 24392 - DNA, 294 bp, synthetic construct
  misc_feature 1..294: note = Description of Artificial Sequence: Synthetic coding sequence
  source 1..294: mol_type = other DNA
atgctgctgctgctgggccccctgggccccctgagccccggcgccctaccacggccagcccaggcacaggatgtggtggacctggatttcttcacacaggaacccctgcacctggtgagcccatctttcctgtcagtcacccgtccaggcaaaaaggtctggctaggtgagacatcctccgcatacggtggaggcgcccccctgttgagcgacacctttgctgcagggtttatgtggctggacaaacttggattatcagccagaatgggtattgaggtcgtcatgcggcaatag

SEQ ID NO: 24393 - DNA, 1410 bp, synthetic construct
  misc_feature 1..1410: note = Description of Artificial Sequence: Synthetic coding sequence
  source 1..1410: mol_type = other DNA
atgctgctgcggagcaagcccgccctgcccccccccctgatgctgctgcttcttggaccactaggccctctgagccctggagccctgcctaggcccgcccaagctcaggacgttgtggatcttgacttctttactcaagaacctctacatctggtgtccccgagtttccttagtgtgacaattgacgccaatcttgctacagacccgaggttccttatcctgctgggctctcccaaacttcggactctggctcggggactgagcccagcttacttgaggttcggcggaaccaagaccgattttctgatctttgaccccaaaaaggagtctactttcgaagagcgcagctattggcagtctcaggtgaaccaggatatctgtaaatacgggtctattccacccgacgtggaagaaaaactgcgactggaatggccctaccaagagcagttgctcctgagagagcactaccagaagaagtttaagaattccacatactcccgcagctctgtggacgttctctatacattcgcaaactgtagtgggcttgatctgatatttggtctgaatgccctgctgcgcaccgctgatctgcaatggaacagctccaacgcccagcttttgctcgactactgttccagcaagggttacaacatctcatgggagctgggtaacgagccaaactccttccttaaaaaagccgatatttttattaacggcagccaactgggtgaagactttatccaactgcacaagcttctgagaaaatctacctttaagaacgcaaagctgtatggccccgacgtcggtcagcccagacgaaaaacagcaaaaatgttgaagtctttcctcaaagcaggcggcgaggtgattgatagtgtcacttggcatcactattacctgaacggccgcacggccaccaaggaggactttctaaatccagatgtgctcgatatcttcatctcttcagtgcaaaaagtgttccaggattactggctgtctctcctattcaaaaagttggtggggaccaaagttctcatggcaagtgtccaaggctcaaaacgccggaaactgagagtgtacctccactgtacaaacacggacaatcctcgctataaagagggcgacctgacgctctacgccataaacctacacaatgttacaaaatatctgcggctgccataccccttctccaacaagcaggtggataaatatctcttaaggcctttgggccctcacggtctgctgtctaagtccgtgcagcttaacgggctcactctcaagatggtggacgatcaaaccctgccaccacttatggagaaacccctgaggcctggaagttccttgggacttccggcattctcgtatagtttctttgtgatccgcaacgcaaaagtggccgcctgcatatag

SEQ ID NO: 24394 - DNA, 1458 bp, synthetic construct
  misc_feature 1..1458: note = Description of Artificial Sequence: Synthetic coding sequence
  source 1..1458: mol_type = other DNA
atgctgctgcggagcaagcccgccctgcccccccccctgatgctgctgctgctgggtcccctaggccctctcagtcctggagctttaccgcggcccgctcaagcgcaggacgtagtcgaccttgatttcttcacacaagagccccttcacctggtgtctccctctttcctgagcgtcacgattgacgctaacctagcaaccgatcctcgctttctgattttactgggatcaccaaaactgaggacacttgcacggggtctaagcccagcgtatcttagattcggaggtacaaagaccgacttcctcatctttgatcctaagaaggaaagtacctttgaggaaagatcctattggcagtcccaagtcaatcaggacatatgcaagtatggctccatccctcctgatgtagaagagaaacttcgcttagaatggccttaccaagaacagctgctcctgagagagcattatcagaaaaagtttaagaacagcacatactccaagcctaatagcttcttaaaaaaggctgacattttcatcaacggctcacagctcggtgaagactttatacagttacacaaactcttacgcaagtctaccttcaaaaacgctaagctgtatgggcctgatgtgggtcagcccagaagaaaaactgcaaaaatgttgaagtcctttctgaaggctggcggagaggttattgatagtgtcacctggcatcattactacttaaatgggcggacagccacgaaggaagatttcctgaatcctgacgtgcttgacatctttatcagttctgtccagaaagtcttccaagtcgtggaatcaactcggcctggcaagaaggtgtggctcggggaaacctcatctgcatacgggggaggcgcacctctcttgagtgacacctttgccgctggttttatgtggttagataaattgggtctgtctgcgcggatgggcatcgaggtcgtgatgcggcaagtgttcttcggcgctggcaactatcacctagttgatgaaaactttgaccccctgcccgactattggctgtccctgttgttcaaaaaactggtgggaaccaaagtgctcatggcgagtgtccaagggagcaagagacgtaaactgagagtctacctccattgcaccaacaccgataacccgagatacaaagagggggacctcaccctctatgcaatcaacctccataatgtgacaaagtacctgaggttgccatatccgttttctaataagcaggtcgataagtacctcctgcggcccctcggtccgcatggcttactgagcaaatctgtgcagctgaacgggttaactctgaaaatggtggatgatcagaccctgcctccccttatggaaaagcctctcaggccggggagcagcctggggctgcctgccttctcgtactctttcttcgtgatcagaaacgccaaggtcgctgcttgcatttag

SEQ ID NO: 24395 - DNA, 1062 bp, synthetic construct
  misc_feature 1..1062: note = Description of Artificial Sequence: Synthetic coding sequence
  source 1..1062: mol_type = other DNA
atggagaagaccctggagaccgtgcccctggagcggaagaagcgggagaaggagcagttcaggaagctgttcattggcgggctatcatttgagaccacggaggagtctctccgaaactattatgaacaatggggcaagctgacagactgtgttgtcatgagggaccccgcctctaagaggtcgcggggctttggctttgtcacctttagctccatggctgaggttgatgctgcaatggccgcccggccacattcaattgacggccgagtggtcgaacctaaaagggcggttgcgagggaggaaagtggtaagcccggcgctcatgttaccgtgaaaaagcttttcgtgggcggaataaaggaggatacagaggagcaccacttacgggactattttgaagagtacggcaaaatcgacactattgaaattattactgacagacaatccggcaagaagagaggttttggatttgtgacttttgacgatcatgaccccgtggataagattgtgcttcaaaagtatcatacgatcaatggccataatgccgaggtacggaaagccttgagccggcaagaaatgcaagaagtccagtcaagccgtagtgggcgggggggaaacttcggattcggcgactcccggggcggtggcggtaacttcggccctgggcctggtagtaacttcaggggcggcagcgatggctacgggagcgggcgcgggttcggcgatgggtacaacggctacgggggcgggccgggaggaggcaattttggtggttcgcctggctatggggggggacgcgggggatacggaggaggagggccagggtacggcaatcagggggggggatacggtggcggctatgacaactacggcggcggcaattacggttcaggcaactacaacgacttcggcaactacaaccaacagcctagtaactacggacctatgaaaagtgggaattttggaggaagcaggaacatgggcggcccttatggaggtggaaactatggtccaggaggaagcggcggctccggagggtatggcggaagatctcggtactag

SEQ ID NO: 24396 - DNA, 1026 bp, synthetic construct
  misc_feature 1..1026: note = Description of Artificial Sequence: Synthetic coding sequence
  source 1..1026: mol_type = other DNA
atggagcgggagaaggagcagttccggaagctgttcatcggcggcctttccttcgaaacgaccgaggagagcttgcgtaattactacgaacagtggggcaaattgactgactgcgtggtgatgcgcgaccctgctagtaagaggtccagggggtttggctttgttacgttttcaagcatggcggaagttgacgcggccatggccgcccgcccacactcaattgacgggagggtcgttgagcccaaacgagcagttgctagggaggagtcgggcaagccaggggctcacgtaactgtgaagaaactgttcgtgggcgggatcaaagaagataccgaggaacatcacctgcgggattatttcgaagaatacggcaagattgacaccattgaaattattactgaccggcagagcggcaagaaaagaggctttggattcgtaactttcgatgaccacgatcccgtggacaaaatcgtgctgcaaaagtaccatacaattaacgggcacaatgctgaggtgagaaaagcccttagcaggcaggaaatgcaggaagtgcagtcctcccggagcgggcggggtggcaacttcgggttcggggattccaggggaggcggaggcaatttcgggcctggcccagggagcaacttcagagggggctccgacggttacggctctggtcgcgggttcggtgatggctacaacgggtatgggggaggacctggaggtgggaactttggcggatcaccaggttacggcggtggcaggggcggatatggaggaggtggccctggctacggtaatcagggcgggggttacggcggcgggtacgacaactatgggggcggcaactacggaagcggtaactacaatgatttcggcaattacaatcaacagcccagtaactacggtcccatgaagtccgggaacttcggcggctctcggaacatgggggggccttatggtggcgggaactatgggccagggggctctggtgggtccggcggctacggaggacggagccgctattag

SEQ ID NO: 24397 - DNA, 1062 bp, synthetic construct
  misc_feature 1..1062: note = Description of Artificial Sequence: Synthetic coding sequence
  source 1..1062: mol_type = other DNA
atggagaagaccctggagaccgtgcccctggagcggaagaagcgggaaaaggagcagttccgaaaactgtttattggcggactgtcattcgaaactaccgaggagagtttacgcaactattatgaacagtgggggaagctgaccgattgcgtggtgatgagagaccccgcctctaagcgatctcgcggtttcggcttcgtcaccttctcctctatggctgaagtggacgcagctatggctgcccgcccacacagcatagacggccgggtggtagagcctaagcgcgcagtcgcacgggaggaaagtggcaaacccggcgctcatgttactgtgaagaagctgttcgtaggaggcataaaagaggacaccgaagagcaccacttaagggactatttcgaagaatacggcaaaatcgatactatagaaattatcaccgaccggcagagtggcaagaagagaggctttggtttcgtcacgttcgacgatcacgatcctgtcgataaaatcgtattacagaagtaccacacaatcaacggacataacgccgaagtgcgaaaggccctgagtcgtcaggagatgcaggaagtccaaagtagcaggtctggacggggagggaatttcggttttggggactcccggggaggaggaggcaattttggaccaggtcccggtagtaacttcagagggggcagtgacgggtatggcagtggacggggatttggcgatggatacaacgggtacggtggcggacctggcggcgggaacttcggaggatcccccggatatggcgggggccgggggggctatgggggcgggggccccggctatggtaaccaggggggtggatatgggggcggttacgataattacggcggcggtaattacgggtcaggtaactacaacgactttgggaattacaaccaacagccatctaactatggacccatgaaaagcgggaattttggcggctctcgcaatatgggtggaccttacggcgggggtaattacgggccgggcggcagtggcggatccggcggttatggcgggcgctctcggtactag

SEQ ID NO: 24398 - DNA, 750 bp, synthetic construct
  misc_feature 1..750: note = Description of Artificial Sequence: Synthetic coding sequence
  source 1..750: mol_type = other DNA
atggagcgggagaaggagcagttccggaagctgttcatcggcggcttatcatttgaaactaccgaggaatcacttcggaactattatgaacagtgggggaagttgactgactgtgttgtgatgagggaccctgcatctaagcggagtcggggttttggcttcgtgaccttctcttctatggcagaggtggatgcagcaatggccgctcgcccccatagcatcgatggtagagtagtggagcctaagcgggcagtggccagggaggaatcaggcaagccaggtgcacacgtcaccgtaaaaaagctgtttgtcggtggaatcaaagaggacaccgaggagcaccatctgcgcgactactttgaggaatacgggaagattgacactatcgaaataattacagatagacagtcaggaaagaagagaggcttcggctttgtcacatttgatgatcatgatccggtggacaagattgttctccaaaagtaccacacaattaatggccacaacgcggaggtgcgaaaagccctttctcgacaggagatgcaggaagatcttgaggtcgctattttggaagtggcccccgtcatggaggaggaggaagaggatatggtggtggaggacttagatatggctacccgagtgggcgccaccgaggtggtgatgactacaatggaggaggagatcatggaggtcgagatcactatgatcctggagatcatcacctcaaacttgctcactactgtgcagtag

SEQ ID NO: 24399 - DNA, 846 bp, synthetic construct
  misc_feature 1..846: note = Description of Artificial Sequence: Synthetic coding sequence
  source 1..846: mol_type = other DNA
atgagcgaggagcagttcggcggcgacggcgccgccggcaacggcggaggccgacgcgcgggcgagcaggagggcgcgatggtggccgcaacccagggcgcggctgcacgggaagcagagccaggacctggtgccgagcccagactggaggcccccaagggggccgagtcagaaggagcaaaaattgatgcaagtaaaaacgaggaggacgagggcaaaatgttcatcggaggccttagctgggataccacaaagaaggaccttaaggattactttagcaagttcggagaagtagttgattgcactctgaaactggacccaataacaggaaggtctcggggatttggatttgtactgttcaaggagtctgaatcagtggacaaagtcatggaccagaaggaacacaagctgaacggaaaagtcatcgatcctaaacgtgcaaaggccatgaaaaccaaggaacctgtgaaaaaaattttcgtaggcggcctcagcccagacaccccagaagagaagattcgtgagtacttcggcggttttggtgaagtggagagcatagagctgcctatggacaataaaaccaacaagcgcaggggtttctgtttcattactttcaaggaggaggagccagtcaaaaaaattatggagaaaaaatatcataatgtgggcttgtcgaagtgtgagattaaggtcgctatgagcaaggaacagtaccagcagcagcaacagtggggatccaggggaggattcgcagggagggccagaggtcggggtggcgaccagcagtccgggtatggcaaggtgtctagacggggggggcaccagaattcctacaagccctattag

SEQ ID NO: 24400 - DNA, 1068 bp, synthetic construct
  misc_feature 1..1068: note = Description of Artificial Sequence: Synthetic coding sequence
  source 1..1068: mol_type = other DNA
atgagcgaggagcagttcggcggcgacggcgccgccgccgccgccaccgcagcggtgggcggcagcgccggggaacaagagggcgccatggtggccgccacccagggggcagcagcggcagcaggcagcggggccggcactggaggcggaacggcttcgggcggcactgaaggcgggagtgcagagtctgaaggtgcaaagatcgacgctagcaagaacgaggaggacgaggggcacagtaactcttcacccagacattcagaggccgctaccgcccagcgagaagaatggaaaatgttcatcggggggttgtcatgggacactaccaaaaaagaccttaaagactactttagcaagtttggtgaggtcgtggactgtacgctgaagctggacccaatcacgggacgctccaggggtttcggcttcgtgttgttcaaggaatctgagagcgtggacaaagtaatggaccagaaggagcacaagctgaacggtaaagtgattgatcccaaacgggcgaaagccatgaaaaccaaggagccagttaagaaaatttttgtcggtggcctctcccccgacacgcccgaggagaagatccgcgagtattttggcgggtttggtgaggtggagtccattgaactcccgatggacaataagacaaacaaaaggcgcggcttttgttttatcacattcaaagaggaggagcccgtcaaaaagattatggagaagaagtatcataacgtgggcctctccaagtgcgaaatcaaggttgctatgtctaaggagcagtatcagcagcaacagcagtggggctccagggggggatttgcaggacgtgcgagggggagggggggcggaccctcccaaaactggaatcagggttacagtaattattggaaccagggttacggtaattacgggtataatagtcaagggtacggcggttacgggggctacgactatactggttataataactactacggctacggggactattctaaccagcagtctggttacggcaaggttagtagacggggtggccaccaaaatagctacaaaccttattag

SEQ ID NO: 24401 - DNA, 1011 bp, synthetic construct
  misc_feature 1..1011: note = Description of Artificial Sequence: Synthetic coding sequence
  source 1..1011: mol_type = other DNA
atgagcgaggagcagttcggcggcgacggcgccgccgccgccgccaccgcagctgtcggaggtagtgcaggagagcaggagggcgctatggtcgctgccactcagggggctgctgcggccgctggatccggagcgggtaccggcggcgggactgcctctggagggacagagggtggctcggctgagtctgagggcgctaaaattgatgcctcaaagaatgaagaagacgagggcaagatgtttataggcggcctgtcgtgggatactacaaagaaagatctgaaagattatttcagcaagttcggcgaggtggtcgactgtaccttgaagctggaccctatcaccggaaggagtcgcggatttggcttcgtacttttcaaagagtctgaatccgtagataaggtgatggaccagaaagagcataagctgaacggaaaggttattgatccaaagcgcgccaaagctatgaaaaccaaggaaccggtaaagaaaatcttcgtggggggattgtctcctgacacacctgaagagaaaatcagagagtactttggcggtttcggggaggtggagtccatcgagttacccatggataacaaaaccaataagagaagagggttctgcttcatcacttttaaagaagaagaacccgtaaagaagattatggagaagaaataccacaatgttggcttgtccaaatgcgagatcaaggtggccatgtcaaaggaacagtaccagcaacagcagcagtggggcagtaggggcggctttgctggcagagctcggggcagaggtgggggaccttcccagaattggaaccaggggtattctaactattggaaccagggttacggaaactacggctataactctcaggggtatggagggtacggtggatacgactacaccggttacaataattattacgggtatggcgactatagcaaccaacagagcgggtacggcaaggtgtctagaagaggtggacatcagaattcctacaagccctactag

SEQ ID NO: 24402 - DNA, 921 bp, synthetic construct
  misc_feature 1..921: note = Description of Artificial Sequence: Synthetic coding sequence
  source 1..921: mol_type = other DNA
atgagcgaggagcagttcggcggcgacggcgccgccgccgccgccactgccgctgtggggggctcagccggagagcaggaaggcgcgatggtggccgcgacccagggggccgcagcagcagctggttcaggagccggtaccggaggagggactgccagcgggggtaccgaaggcggctctgctgaaagtgagggagctaagatcgacgccagcaagaatgaagaggacgaaggccactctaacagtagtccaagacactctgaagccgcaaccgcccagagagaggagtggaagatgttcatcggaggtttatcatgggatacgacaaagaaagatctgaaagactattttagtaagtttggcgaagtggtggattgcacactgaaattagatcctataacgggccggagccgcggattcggcttcgtactgtttaaggaaagcgagtcagtggataaagtcatggaccagaaagagcacaagctgaacggcaaggtaattgatcctaaacgggcaaaagctatgaaaactaaggagccagtgaaaaaaatctttgtggggggcctgtcccctgacacacctgaagaaaagattagagagtacttcgggggctttggcgaggtggaatcaattgaacttccaatggacaataaaactaacaaacggagaggcttttgtttcatcaccttcaaggaagaagagccagtcaagaagattatggaaaagaagtatcacaatgtgggcctgtcaaaatgtgagattaaagttgcaatgagcaaagagcagtaccaacagcaacagcagtggggttcaagaggcggtttcgccggccgtgcacgagggcgaggtggagatcagcaatcagggtatggaaaggtttcccgacgcgggggccaccagaattcatataaaccttactag

SEQ ID NO: 24403 - DNA, 468 bp, synthetic construct
  misc_feature 1..468: note = Description of Artificial Sequence: Synthetic coding sequence
  source 1..468: mol_type = other DNA
atgagcgaggagcagttcggcggcgacggcgccgccgccgccgccaccgcagccgtcgggggttctgcaggtgagcaggaaggagccatggtcgctgctacccagggcgccgctgccgcggctggatctggggccggaacgggtggtggcaccgcatctggaggaaccgaaggagggtcagctgaatcagaaggcgccaagatagatgcctccaaaaacgaagaagatgagggtaagatgttcatcggcggactgtcttgggataccacgaaaaaagaccttaaggattatttttctaaatttggcgaggtggtggattgtactctcaagctcgatccaattaccggcaggtcccgcgggtttggatttgtcctgtttaaagagtctgaatccgttgataaggtcatggaccaaaaggagcacaagcttaatggaaaggtcattgaccccaaacgggccaaggcctag

SEQ ID NO: 24404 - DNA, 666 bp, synthetic construct
  misc_feature 1..666: note = Description of Artificial Sequence: Synthetic coding sequence
  source 1..666: mol_type = other DNA
atgagcgaggagcagttcggcggcgacggcgccgccgccgccgccactgccgccgtgggcgggtctgccggggaacaggagggtgcgatggtggccgccactcagggcgctgccgccgctgccggttcaggtgccggaaccggtggcggaactgcctcaggcggtacagagggcgggagcgccgagagcgaaggagcaaaaattgacgcttcaaaaaatgaggaggacgaggggcacagcaatagctctccgcgccattccgaggccgctacagcacagcgtgaggaatggaaaatgttcattggcggcctgagttgggataccaccaagaaagacctaaaagattatttctctaagttcggagaggtggtggactgcacccttaagctagaccccatcaccggtaggtcccggggattcggttttgtgctctttaaggaatccgagtcggtcgataaggttatggatcaaaaggaacataaactcaacggtaaagtcatcgatcctaaaagagcaaaggcaatgaagactaaagaacctgttaagaaaatcttcgtgggtggtctgtcacccgatactccagaggagaagatcagagagtatttcggaggattcggcgaggttgagagcatagagcttcccatggacaacaaaactaataaatag

SEQ ID NO: 24405 - DNA, 633 bp, synthetic construct
  misc_feature 1..633: note = Description of Artificial Sequence: Synthetic coding sequence
  source 1..633: mol_type = other DNA
tgaaagatgttcatcggcggcctgagctgggacaccaccaagaaggaccttaaagattattttagtaagtttggcgaagtggtcgactgcaccctaaagctcgatcccattacagggaggtctcgtgggttcggattcgtgctctttaaggagagtgagtcagtcgataaagttatggaccagaaagaacataaactcaacgggaaggtgatcgaccctaagcgggcaaaggctatgaagacgaaggagccagtgaagaaaatctttgtagggggcttatcaccagacacacccgaagagaaaatcagagaatacttcggcgggttcggagaagttgaatcaatcgaacttcctatggataataagaccaacaagaggcgagggttctgttttattacgttcaaagaggaagagcctgtgaagaagatcatggagaaaaagtatcataatgtcggactttccaagtgcgagattaaggtcgccatgtccaaggagcagtaccagcaacaacagcagtggggcagcagaggggggtttgcagggcgtgcccgcggccgcgggggggaccaacagtctggctacgggaaggtgtccaggcgcggaggccatcagaactcttataagccctattag

SEQ ID NO: 24406 - DNA, 606 bp, synthetic construct
  misc_feature 1..606: note = Description of Artificial Sequence: Synthetic coding sequence
  source 1..606: mol_type = other DNA
atggaccagaaggagcacaagctgaacggcaaggtgatcgaccccaagagagcaaaggccatgaagaccaaggaaccggtgaaaaagatattcgtcggcggactgagccctgacaccccggaagagaagataagggagtactttggagggtttggcgaggtggagagtatcgagctgccgatggataacaagaccaataagcgacgcgggttttgttttatcacattcaaagaggaggaacccgtgaagaaaataatggaaaagaaatatcacaacgtgggtctgagtaaatgcgaaataaaagtagctatgtcgaaagagcagtaccagcagcagcagcaatggggctcccgcggcggctttgccgggcgggctcggggcagaggggggggccctagtcaaaattggaaccagggctacagtaactactggaatcagggatacggcaattacggatacaattctcaaggatacgggggttacggcggctatgattacactgggtacaacaattactatggctacggtgattattccaaccaacagtcaggatacgggaaggtgagcaggaggggtgggcaccagaacagttataagccctattag

SEQ ID NO: 24407 - DNA, 912 bp, synthetic construct
  misc_feature 1..912: note = Description of Artificial Sequence: Synthetic coding sequence
  source 1..912: mol_type = other DNA
atgagcgaggagcagttcggcggcgacggcgccgccgccgccgccactgcagcggccagcggtggcactgaaggagggtccgccgagagcgaaggtgccaaaatcgacgcatctaaaaatgaggaggatgagggcaaaatgttcatcggcgggttaagttgggacacaaccaaaaaagacttgaaagactatttctctaagttcggagaagtggtagactgcactttgaaactggaccccataacaggaaggagtcggggattcggctttgttctgttcaaggaatccgagtcagtggacaaggtcatggatcagaaagagcacaagctaaacgggaaggtcattgatcctaaacgcgccaaagccatgaagactaaggaacccgtcaaaaaaattttcgtagggggccttagccccgacacgcctgaggagaagattcgcgagtatttcggcggctttggcgaagtggaaagcatcgagcttcccatggacaataaaactaataagcgcagaggcttttgcttcatcactttcaaggaggaagagccagtgaagaaaataatggaaaagaagtaccacaacgtaggccttagtaagtgcgagattaaggtggcaatgtccaaagagcagtaccaacagcaacagcagtggggctcccggggcggctttgcgggaagggccaggggaaggggcggtggtcctagtcagaactggaaccagggatactctaactattggaatcagggctatggaaactatgggtacaatagccagggctacggcggctatggcggatacgactacaccggctacaacaattattatggctatggagactattctaaccaacagtcaggatatggtaaggtgtcacgaaggggcggccaccagaacagctataaaccatactag

SEQ ID NO: 24408 - DNA, 1974 bp, synthetic construct
  misc_feature 1..1974: note = Description of Artificial Sequence: Synthetic coding sequence
  source 1..1974: mol_type = other DNA
atgccccggtacaccgtgcacgtgcggggcgagtggctggccgtgccttgccaggatgcacagttgaccgtcggttggttggggagagaagctgtgcggaggtatattaaaaacaagcccgacaatggcggctttactagcgtcgatgacgcccacttccttgtaaggagatgtaaagggctgggcctgcttgacaacgaagataggctggaggtggcattagaaaacaatgaattcgtggaggttgtcatcgaaggagacgccatgagcccagattttattcccagtcaacccgaaggggtgtatctttatagcaaatatcgtgagccggagaaatatattgagctggatggagaccgactgacaacagaggatctggtgaatttgggcaaaggcaggtataaaattaaactgacgccaactgcagagaagagggtgcagaaatccagggaagtaatagatagcattatcaaggaaaagacagtggtgtacggaatcaccaccggatttggcaagtttgcccgcaccgtgattcctatcaacaagctacaagagctacaggtgaatctcgtcaggagccactcgtccggagtgggaaagcccctcagccccgaacggtgtcgaatgttactcgcacttaggatcaatgtgctggccaaaggttacagcggaatcagcctggaaactctgaaacaggtgattgaaatgtttaatgcgtcatgcctcccatatgtgcctgaaaagggtaccgtaggagcgagtggagatttagctccactcagtcaccttgccctgggcctggtgggagagggaaaaatgtggagccccaaatcaggatgggctgatgctaagtacgtacttgaggcgcacggtctgaagccggtgatcctgaagccaaaggagggtttggccctgatcaacgggactcagatgatcacctcactcggatgcgaagcggttgaacgggcctctgcaatagcaagacaggcagacattgttgcggccctgacccttgaggtgctgaagggaaccactaaagcttttgatacggacatacatgccctaaggccacaccgcgggcaaattgaagtagccttcaggttcaggagtttgctcgatagcgatcatcatccatccgagatcgcagaaagccacaggttctgtgaccgtgtacaggatgcctacacactgcgctgctgcccccaggtgcacggggtcgtgaacgacaccatcgccttcgtcaagaacatcattactaccgaactgaattccgccacggacaaccccatggtgttcgctaatagaggcgagactgtgtctggcggaaacttccatggtgaataccctgcaaaggccctggattacctggccataggcatccacgagctggctgcaatctcagaaagaaggatcgaacggctgtgcaacccctctttgtctgagcttccggctttcctggtggcagagggtggactcaacagcggctttatgatcgctcattgcacagctgcagccctcgtaagtgagaacaaggcactttgtcaccccagttctgtcgactccctatcaactagtgcagcaaccgaagatcacgtctccatgggcggctgggccgccaggaaagccctgagagtgatcgagcacgtggagcaagtgctggccattgagcttctcgctgcatgtcagggcattgagtttctgaggccactcaaaacaacaactcctttggaaaaagtgtacgacctggtacgttccgtcgtacggccgtggatcaaagaccgctttatggccccagacattgaggcagcgcacaggcttctgctcgaacagaaagtctgggaagtggcagccccctacatcgagaagtatcgtatggaacacatccccgagtcacgtccactttcccctaccgcgttcagtctgcagttcctgcataagaagtccactaagatccccgaatcagaagacctttag

SEQ ID NO: 24409 - DNA, 1776 bp, synthetic construct
  misc_feature 1..1776: note = Description of Artificial Sequence: Synthetic coding sequence
  source 1..1776: mol_type = other DNA
atgccccggtacaccgtgcacgtgcggggcgagtggctggccgtgccttgtcaggatgctcagctgaccgtgggatggctgggccgcgaggctgtgagaaggtatataaagaacaaaccagataacggggggttcacatcagtcgacgatgcacacttcctggtgcgccgctgtaagggcttgggactcctcgataacgaggatcgcctggaggtggccctcgagaacaacgaatttgttgaagtcgtgatcgagggagacgctatgagcccagatttcataccctcacagccagagggggtgtatctgtattcaaagtaccgggaacctgagaaatacatcgagcttgacggcgaccgtctcaccactgaggatttggtaaacctagggaaaggacggtacaaaattaaactgacccctacggccgagaaacgagttcagaaatcaagagaagttatcgactcaatcatcaaggaaaaaacagttgtctacggcatcactacaggcttcgggaagttcgctcgaactgtgattcctattaacaagctgcaggaactgcaggtgaaccttgttcggtcccactcatcaggcgtaggcaagcctctctccccagagaggtgcagaatgctccttgcactgcggattaatgtgctcgctaaaggatattcaggcatcagcttagagacactcaaacaggtgatcgaaatgtttaatgcctcatgccttccctacgtcccggagaagggaactgtaggagcctccggcgatctcgctcccctgtcacatttagccctggggctagtcggtgaggggaagatgtggagtcccaaatccggatgggctgacgcaaagtatgtgctcgaggcccacggccttaagcccgtcatcctcaagccaaaggagggcttagcccttatcaacggaacacagatgataacaagtttaggctgcgaggcagtggagcgtgcaagtgccatagccagacaggccgatattgttgccgccctgaccctcgaggttctgaagggcacgaccaaggcatttgacacagacattcatgccctgcggcctcaccgcggccagatagaggtcgcgttcagatttcgtagtctcctggactccgatcaccatccaagcgagatagccgagagtcatcggttctgcgatcgcgtgcaggacgcctacactctgagatgttgcccccaagtccatggagtcgtgaatgatactatcgcctttgtgaagaatataatcaccactgaactcaatagcgcaactgataatcccatggtgtttgccaacagaggcgaaactgttagcggtggcaactttcatggcgaataccctgcaaaggccttagattacctggcaatcgggattcatgaactggcagctatatcagaacggagaattgagagactgtgtaacccatccttgagcgagctgcccgcgttcctggtggccgaaggagggctcaactccggtttcatgatcgcccattgcactgcggcagctttggtgtccgaaaacaaggccctgtgtcatccatctagcgtggacagtctatccacgagcgcagctaccgaagaccatgtctctatgggtggttgggcagccagaaaagcacttcgagtgatcgagcacgttgagcaggtgctcgctatcgagctgcttgctgcctgccaggggatagaatttctcaggcctctcaaaaccacaactccactggaaaaggtctacgatttagtgcggtctgtcgtgcgctttggtaagtag

SEQ ID NO: 24410 - DNA, 1350 bp, synthetic construct
  misc_feature 1..1350: note = Description of Artificial Sequence: Synthetic coding sequence
  source 1..1350: mol_type = other DNA
atgctgctggccctgcggatcaacgtgctggccaagggctacagcggcatctctctcgagaccctgaaacaggtaatcgagatgtttaacgcttcttgcctcccctacgtacctgaaaagggcaccgtgggcgcctcaggagatctcgccccgcttagccatcttgcactggggctggtaggggaaggaaagatgtggtctcccaagtcaggctgggcagatgccaagtatgtcttggaggcccatggactcaaaccagttattcttaagcccaaggaaggtcttgccctgataaacggaacccaaatgatcacgagcctgggatgcgaagccgtggaaagagcatccgccatcgctcgccaggcggacattgtggccgcactcaccctcgaagtcctcaagggaacaaccaaagcctttgacactgacatccatgccctccgaccacatagaggccagatagaggtggccttcaggttcagaagcctcctcgactccgaccaccacccgagcgaaatcgccgaaagtcatcgcttctgtgatagagtgcaggacgcttacacactccgctgctgcccacaggttcatggggtcgtgaatgacacaatcgcattcgtgaagaatatcatcaccacagaactgaacagcgcaacggataatccaatggtctttgcaaacagaggggagaccgtgtctggggggaactttcacggcgaatatcccgccaaagcccttgattacctcgccattggaattcatgagcttgccgccatcagcgagagacgcatcgagcgattgtgcaatcccagtcttagtgagcttccagccttccttgtcgccgagggaggccttaattctggcttcatgatcgctcattgtactgccgccgcactggtatcagaaaataaggcgctgtgccaccctagtagcgtagactccctttctacaagtgccgctactgaggaccatgttagtatgggaggatgggctgcccgcaaggcacttagggtaatcgagcatgtggagcaggttttagcgatagaactacttgcagcctgtcaggggatagaatttctgaggcccctgaagacaactacacccttagaaaaggtttacgacttggtgagatcagttgttagaccatggattaaagaccgatttatggcgccggacattgaagccgcccaccggctcttattggaacaaaaagtgtgggaagttgccgccccttatattgagaagtatcgcatggagcacattccagagtcgagacctctgagtcccacagccttctcactccagtttcttcacaagaagtctacaaaaatccccgagagcgaggacctgtag

SEQ ID NO: 24411 - DNA, 1260 bp, synthetic construct
  misc_feature 1..1260: note = Description of Artificial Sequence: Synthetic coding sequence
  source 1..1260: mol_type = other DNA
atggccggcttcggcgccatggagaagttcctggtggagtacaagtccgccgtggaaaagaaactggctgagtataagtgcaatacgaacactgcaatcgaattaaaacttgtgagattccccgaggacctggaaaacgacatccgcacattcttcccggaatatacccaccaactgttcggcgatgatgagactgctttcgggtataaagggctcaagatattgctgtactacatcgcaggtagcctgagcaccatgttccgggtggagtacgccagcaaagtggatgaaaatttcgattgtgtggaagcagatgacgtggaggggaagattcggcagatcatacctccaggattctgtaccaacacgaatgactttctgtccctgttggaaaaagaggtggattttaagccctttgggaccctgcttcacacctattctgttctctcccccaccggcggagagaattttacgttccaaatctacaaggcggacatgacatgccgaggctttagggagtaccatgagaggcttcagaccttcttgatgtggtttattgagactgcgtcattcattgacgtggacgacgaaagatggcattactttctggtctttgaaaaatataataaggatggtgccaccctatttgcaactgtgggctacatgacagtatacaactactacgtttatcccgacaaaacccggcctcgtgtctctcaaatgctgatcttgaccccctttcagggtcagggccacggagcacagctattagagaccgtgcatagatattacaccgaatttcccactgtgttggacatcaccgcagaagaccctagcaaatcctacgtcaaactgcgggacttcgtgctggtgaagctatgccaagatcttccctgtttctcacgtgaaaagttaatgcaggggtttaacgaggacatggcaatcgaagcccaacaaaagtttaagatcaataaacaacacgcgcggagagtatacgagatcctgagactgctagttaccgatatgtcggacgccgaacagtacagatcatacagactggacatcaagcgacggctcatttctccatacaagaagaaacagagagatcttgctaaaatgcgtaagtgtctgcgacccgaggaattgacgaaccagatgaaccagatcgaaattagcatgcagcacgagcaactcgaggagtccttccaggaactggtcgaagactacaggcgagtgatagaacgcttagcgcaggagtag

SEQ ID NO: 24412 - DNA, 1005 bp, synthetic construct
  misc_feature 1..1005: note = Description of Artificial Sequence: Synthetic coding sequence
  source 1..1005: mol_type = other DNA
atgttccgggtggagtacgccagcaaggtggacgagaacttcgactgcgtggaggcagacgacgtggaaggcaagataagacagattattcctcccgggttttgtactaacaccaacgattttctcagtctcctggagaaagaggtcgatttcaagcccttcggaactctgttgcacacttacagtgtgctgtcacctacagggggcgaaaatttcactttccagatttacaaagcagacatgacatgccggggtttccgtgagtaccacgaacgattgcaaacgttccttatgtggtttatagagactgccagcttcattgatgtggatgacgaacgttggcattactttctggtgtttgagaaatacaacaaggatggagctacacttttcgcaacagtcgggtacatgacggtatacaattactacgtgtatcctgacaaaacgcggccgcgggtgtcccagatgttaattcttaccccctttcaaggccagggacacggcgcccaacttctggagaccgtgcaccgttattacacagagtttcctacggtcctagacattactgcagaagacccttctaagtcttacgtgaaactgcgtgatttcgtgctagtcaaactctgtcaggacctgccctgcttttcccgagagaaactaatgcaaggattcaatgaggacatggccattgaagctcagcagaaatttaagattaacaaacagcacgcacgccgggtgtacgaaatcctcagactgctagttacagacatgtcagacgctgagcagtataggtcatataggctagacatcaagagacgcctgatttccccctataaaaaaaagcagcgcgacctggcaaaaatgagaaagtgccttaggcccgaagagctgactaaccaaatgaaccagatcgagatttcgatgcagcatgagcagctcgaagagtccttccaagagttggtggaagattataggagagttatagagcgcctggcgcaggagtag

SEQ ID NO: 24413 - DNA, 870 bp, synthetic construct
  misc_feature 1..870: note = Description of Artificial Sequence: Synthetic coding sequence
  source 1..870: mol_type = other DNA
atgaccgtgagcttccacaagtacggcgagtacttccccggcaccggagatcttcgggacataggtgcgggcaaagggaaatactacgccgttaattatcccctgcgcgacggaatcgacgacgagtcttacgaggccatctttaagccagtaatgtcaaaagttatggagatgtttcagccctccgccgtagttcttcagtgcgggtctgatagtctatccggggatcgtctcggatgtttcaatctgacaattaagggacacgctaagtgtgtcgaattcgtaaagtccttcaatctgccaatgctaatgctgggtggcggtggttataccatcagaaacgtcgcaagatgctggacatacgagacagccgtggcgctagacacagagattccgaatgaattaccatacaacgactactttgagtactttggtccggattttaaactacatatatctccctcaaacatgacaaatcagaatactaatgagtacctcgagaaaattaagcagaggcttttcgaaaacctgcgtatgctgccacatgctcccggcgtgcagatgcaagcaattccggaggatgccatccctgaggaatccggcgacgaggacgaggacgatcccgataaaagaatctcaatctgctccagtgacaaacgcatcgcctgcgaggaagagttttctgatagtgaagaagaaggagagggcggcaggaagaattccagcaatttcaaaaaggccaaacgggtcaaaaccgaagacgagaaagaaaaagacccagaggagaaaaaagaagtgaccgaagaagaaaagactaaggaagagaaaccagaggcaaaaggggtaaaagaggaagtgaagttggcctag

SEQ ID NO: 24414 - DNA, 1449 bp, synthetic construct
  misc_feature 1..1449: note = Description of Artificial Sequence: Synthetic coding sequence
  source 1..1449: mol_type = other DNA
atggcccagacccagggcacccggcggaaggtgtgctactactacgatggtgatgttggcaattattattatggccaggggcaccctatgaaaccccaccgtatccgtatgacccacaacctactgctgaattacggactctatcggaaaatggaaatctaccgccctcacaaggcgaatgctgaagagatgaccaaatatcacagtgacgactatataaagttcttaagatccattcgaccagataacatgtctgagtactctaagcagatgcagaggtttaatgtgggcgaggattgtccagtgttcgatggactctttgaattctgtcagttgtctactgggggtagcgtggcctctgccgtgaagctgaacaagcaacagacagacatcgctgtgaattgggctgggggattacatcatgcaaagaaatcagaggccagtggtttttgctacgtgaacgatatagtgctcgctatactagagttactgaaataccatcaaagggtgttatatatcgacatcgatatccaccatggggatggggtggaggaagctttctatactaccgacagggtaatgacagtgagcttccataagtacggcgagtattttcccggtaccggggatctgagagacataggcgccggaaagggcaagtattatgcagtgaactatcctctccgggatggcattgacgacgagagttacgaagctatcttcaagcctgtcatgagcaaagtgatggagatgtttcagccttctgcagtggtactgcaatgtggaagtgactcattgtccggagaccggctgggttgttttaatctgactatcaagggccacgcgaaatgcgtggaatttgtgaagtctttcaacctgcctatgttaatgttgggcggtggcgggtacacaataaggaatgtggccagatgctggacatacgagaccgccgtggccttagacaccgaaatccccaacgagcttccctataacgactactttgagtactttggtccagactttaaattgcacatttccccttccaacatgacaaaccagaatactaatgagtatctagagaagatcaagcagcggctgtttgagaacctgaggatgctcccacatgctcccggcgttcagatgcaggctatcccggaggacgccatccctgaggagagcggagatgaggacgaggatgaccctgataagagaatctctatttgttctagcgataagcgcatagcctgcgaggaagagttcagcgatagtgaggaagaaggtgagggagggcgtaagaattcctcaaatttcaagaaagccaagagagtcaagactgaggacgagaaggaaaaggaccccgaagaaaagaaggaggtgaccgaggaagaaaaaacaaaggaggagaaaccagaagctaaaggggtgaaggaggaagttaaattggcctag

SEQ ID NO: 24415 - DNA, 636 bp, synthetic construct
  misc_feature 1..636: note = Description of Artificial Sequence: Synthetic coding sequence
  source 1..636: mol_type = other DNA
atggcccagacccagggcacccggcggaaggtgtgctactactacgacggggatgtaggcaactactattacgggcaaggccatccaatgaaacctcaccgcatcagaatgacccacaacctccttttaaactatggcctctaccgcaaaatggagatctacaggccccataaagctaacgctgaggagatgactaagtaccatagtgacgactatataaaattcctgcgctccatcaggcctgacaatatgagtgaatacagcaagcagatgcagcgctctagcgccgtgaaactaaataaacagcagaccgacatcgctgttaactgggctggcggcctccaccatgcgaaaaagtccgaagcttccgggttctgctatgtgaatgacattgtgctcgccattcttgagctactcaaataccaccagcgggttctttacattgatattgatatccaccatggcgatggtgtcgaggaggcattttacaccaccgaccgggtaatgactgtctcttttcacaagtatggggaatacttcccaggaactggcgacctgagagatataggtgcaggcaaaggaaagtactatgctgtgaattacccactacgagatggaatcgatgacgagagctag

SEQ ID NO: 24416 - DNA, 1044 bp, synthetic construct
  misc_feature 1..1044: note = Description of Artificial Sequence: Synthetic coding sequence
  source 1..1044: mol_type = other DNA
atgctgcacaccacccagctgtaccagcacgtgcccgagacccggtggcccatcgtatactctcctcgatacaacattacatttatgggattggaaaagttgcatccttttgatgcagggaaatggggcaaggttataaattttctgaaagaggagaagctgctgtccgattcaatgttggtcgaggcccgggaggcctctgaagaagatctgctggtggtccatacacgcagatatctgaacgaactcaaatggagctttgcagtagccaccattaccgagattcccccagtgatcttccttcccaattttctggttcagcgaaaggttctgaggccgctaaggactcagacgggtggaacaatcatggcaggtaaactggccgttgagcgtggatgggccattaacgtggggggcgggttccatcactgcagcagcgatcgagggggtggcttttgtgcctacgctgacattacgttggctatcaagttcttatttgagagggttgagggtatatcacgggccacgatcatcgatctggacgcgcatcagggtaacgggcacgaacgcgacttcatggatgacaaaagagtgtacattatggatgtctataatcgacatatctatccaggcgatagatttgctaaacaggcgatacggcgcaaagtggaattggagtggggcacagaagacgatgagtacctggacaaagtggaaaggaatattaagaaatctctacaggagcacctgccggatgtcgtagtttataatgccgggaccgatatccttgaaggggacagactaggcggcctgtctatctcacccgcaggcatcgtgaagagggacgagctggtctttaggatggtcagaggccgaagagttccgattctgatggtaacctcaggcgggtatcagaagcggaccgcgaggatcatagcagactccatcctcaatctattcggtctgggcctcataggccctgagtcccccagcgtgtccgcacagaactcagacacaccgctcctaccacccgcagttccatag

SEQ ID NO: 24417 - DNA, 711 bp, synthetic construct
  misc_feature 1..711: note = Description of Artificial Sequence: Synthetic coding sequence
  source 1..711: mol_type = other DNA
atgggcctggagaagctgcaccccttcgacgccggcaagtggggcaaagttatcaatttcctcaaggaagagaagctactgagtgattctatgcttgttgaagctcgggaggctagtgaagaggatctgctcgtggtgcacacccgcagatacctaaacgagctgaagtggagctttgcggtggctacaattactgagattccaccggtgatcttcctccctaactttttggtgcaaaggaaagtacttcggccgctgaggacacaaacaggaggcaccatcatgggtgtcgccagtactacagcgcctgctaccgtcgctggcgctagtgtccccatgcggacctctagatctccttcttccttctgcctgtccgtgtggagagcctcccctggtctcccatctctgattctgatgcccatccgggctatgggaatgtccgaaaccagctggacaacctccgtttgtacttcctggatgtccactacggcaacgagcacccaaggcaccgctctgccctccaggcccagtgggggacgttggtcctggtcgggcgctcagaggatgatgtccacctggattaggtggcgtgggacgtcgcggaatccaagccgctcaacctgtccgacttggtggtacactatgcaggcccctacctcatcacggggcacggcattagggggctgtccaagcgcacagcgggccagttag

SEQ ID NO: 24418 - DNA, 960 bp, synthetic construct
  misc_feature 1..960: note = Description of Artificial Sequence: Synthetic coding sequence
  source 1..960: mol_type = other DNA
atgggcctggagaagctgcaccccttcgacgccggcaagtggggcaaggtcattaacttcttgaaagaggagaaactcctttctgactctatgttggtcgaggcaagggaagcctcggaggaagatcttcttgtggtccatacgcgcaggtatctgaacgagctgaaatggtctttcgccgtggcgacaatcactgagatacctccagtcatcttcctccctaattttcttgttcagcgcaaagtgctcaggcccctgcggactcaaactgggggcactatcatggccgggaaactcgccgtggaacggggctgggccatcaacgttggcggaggctttcaccactgctccagtgatcgcggcggcggcttctgcgcctatgccgacattacactggccattaaattcttgttcgaaagggtagaagggatttcgagagctacgattattgacctcgacgcccatcaggggaacggccacgaacgcgacttcatggatgacaagagagtgtacatcatggatgtttataaccgacatatctatcctggagatcgcttcgcaaagcaggcaattaggcgcaaagtcgagctggagtggggcaccgaggatgacgagtacctagacaaggtggagcggaacataaaaaaatccctccaggaacacctgcccgatgttgtagtctataatgccggaactgacattctggaaggggatagactgggaggactgagcatcagccccgccgggatcgtaaagcgcgacgaactggtgttccgcatggtgcgtgggaggagagtacccatcctcatggtcacatcaggcggctaccagaagcgcacagctcgcattatcgccgactctatactaaatctgttcgggttgggcttaatcgggcccgaaagtccgagtgtgtccgcgcagaactccgatacccctttattgcctcctgccgtgccgtag

SEQ ID NO: 24419 - DNA, 468 bp, synthetic construct
  misc_feature 1..468: note = Description of Artificial Sequence: Synthetic coding sequence
  source 1..468: mol_type = other DNA
atggacgacaagcgggtgtacatcatggacgtgtacaaccggcacatttacccaggggacagattcgcaaagcaggcgatcaggagaaaagtggaactcgaatggggtacagaagatgacgaatatctggacaaagtggagcggaatattaagaagtctctccaagaacatctgccagacgttgtcgtgtacaatgcagggaccgacattctagaaggggaccggctcggagggctgtctatcagcccggccggcatcgtgaaacgagacgagctcgtattcagaatggtgcgcgggcggagggtccctatcctgatggtgacttccggaggatatcagaagcgaacagcaaggattatcgccgattccattctaaatctcttcgggctcggattgatcggtccggagtcaccctccgtctcagcccagaactccgacacacctctgctcccccccgctgtgccctag

SEQ ID NO: 24420 - DNA, 891 bp, synthetic construct
  misc_feature 1..891: note = Description of Artificial Sequence: Synthetic coding sequence
  source 1..891: mol_type = other DNA
atgggcctggagaagctgcaccccttcgacgccggcaagtggggcaaagtgatcaattttctgaaagaggaaaagctcctgtcggactcaatgctggtggaggccagggaggcgtctgaggaagatttgctcgttgtgcacaccaggaggtacctgaacgagcttaaacggaaggtactgagacctctcagaacacagactgggggaacgattatggccggcaagttagccgtggaacggggctgggcaatcaacgttgggggcggcttccaccattgctcctctgaccggggcggtggattctgtgcctacgcagatattactctcgctattaagtttttattcgagcgcgttgagggcatcagtcgcgctacaataatcgacttagatgcccatcagggtaatggtcacgagagagacttcatggatgataaaagggtctatatcatggacgtctataatagacatatttatcctggcgatcgcttcgccaaacaggcaatcaggcgaaaggtagaattagaatggggcaccgaagacgatgaatacctggacaaagtggagcgcaatattaaaaagtctctccaagaacatctccccgatgtagtagtctacaacgctggaactgacatactcgagggcgaccgtctaggtggattgagcatctcacctgccggaatcgtgaagagagatgagctcgtttttaggatggtgcggggccggcgggtgcccattctgatggttacctctggcgggtaccagaagcggacggccagaataatcgccgactccatattaaacctattcgggcttggactgatcggtcctgaatctccttccgtgtcagcccaaaactccgacactccgctgctccctccagcggtgccctag

SEQ ID NO: 24421 - DNA, 1377 bp, synthetic construct
  misc_feature 1..1377: note = Description of Artificial Sequence: Synthetic coding sequence
  source 1..1377: mol_type = other DNA
atgaagccccaccggatccggatgacccacaacctgctgctgaactacggactctataggaaaatggaaatctatagaccacacaaagccaccgctgaagaaatgacaaagtatcatagcgacgaatatataaagttcctgcggagtataagacccgataacatgtccgagtattctaagcaaatgcagaggttcaacgttggtgaagattgccctgtgttcgatggactgttcgagttttgccagttgagcacggggggaagtgtggctggtgctgtgaagcttaaccggcagcagacagatatggcagtgaattgggcaggcggtctgcatcatgcaaagaagagtgaggcaagtggcttttgttatgtgaacgacatagtcctcgctatcctcgagttacttaaataccatcagagagtcctgtatatcgatatcgatatacaccacggggatggagtggaggaagctttttacacaactgaccgcgtgatgacagtgagcttccataaatatggagagtactttccagggaccggcgatctaagggatattggtgcaggcaaggggaagtattatgctgtcaatttcccaatgcgcgatggcatcgatgatgaaagttacggccagatctttaaaccaattatctccaaagtaatggaaatgtaccagccaagcgcggtggtactacaatgtggcgctgatagcctatctggcgacaggctgggatgcttcaatcttacggtgaagggacatgccaagtgcgtggaggtggtcaagactttcaacctgccgctgctgatgctgggtgggggcggctacactatccgcaacgtggcacggtgttggacatacgaaaccgcagtggcattagactgtgagatcccgaatgagcttccatataacgactacttcgaatacttcggtccagattttaagctgcacattagcccatcaaatatgaccaaccaaaatacacctgaatacatggaaaagattaagcagcggttattcgagaatctccgcatgttgcctcacgctcccggggtgcagatgcaggcaattccagaagatgcagtgcacgaagattcaggcgacgaagatggagaggatcctgataaacgcatctcaatccgcgcatccgacaaacgtattgcctgcgatgaagaattcagtgactctgaggatgagggagaaggcggccgccgaaacgtggccgaccataaaaagggggccaaaaaagccaggattgaagaggataagaaggagacagaagataaaaagacagatgtgaaggaggaagataagtccaaagataatagcggcgagaagaccgacaccaagggcactaagtccgaacagttgagtaacccatag

SEQ ID NO: 24422 - DNA, 1749 bp, synthetic construct
  misc_feature 1..1749: note = Description of Artificial Sequence: Synthetic coding sequence
  source 1..1749: mol_type = other DNA
atgcggagccccccctgcggcctgctgcggtggttcggcggccccctgctggcctcttggtgtcggtgccatctgcgcttcagggcatttggcactagtgctggctggtatcgcgcattccctgcacctcctccactgctgcctcctgcctgccccagtccccgcgactaccgccctcacgttagcctgagtccatttctgtcgcggccctccaggggcggaagctcctcctcgagcagcagcaggcgccggagccctgtggcagccgtggccggcgagccgatggcctattcgcaggggggaggcaagaagaaggtttgttactactacgatggagacattgggaactattattatggccaaggacatcccatgaaacctcaccgcattcgcatgacccataatcttctgcttaattacggcctgtataggaagatggaaatttaccgaccgcacaaggctaccgctgaagaaatgacaaagtaccatagcgacgaatatatcaagttcttaaggtccataaggcccgataacatgtcagaatattctaaacagatgcagcgctttaacgtgggggaggactgtcccgtgttcgatgggcttttcgaattctgccagctttctaccggagggagcgtcgcaggggcagttaagcttaatagacaacaaaccgatatggctgttaattgggctggtggcctccaccacgccaagaaatccgaggctagtggattctgttacgttaacgatatagtgctcgccatcctggaactgctgaagtatcaccagcgcgtgctctacattgatatcgacatccaccatggagacggggtcgaggaggccttctacacaacggaccgcgtcatgacagtgagttttcacaaatatggagagtactttccagggacaggggatctgcgggatatcggtgctggaaaggggaagtattacgcagtcaactttccaatgagggacggcatcgatgacgagtcctatgggcaaatcttcaaacctatcatttccaaggtgatggagatgtaccagcccagcgctgttgtgctgcaatgcggggccgacagtttatccggagatcgcctcggctgttttaatctgacagttaagggccatgccaaatgtgtcgaagtggtgaaaacctttaatctccccctattaatgctgggaggggggggatacactataagaaacgtggctaggtgttggacgtatgagaccgccgtagctctggattgtgagatccctaacgagctgccatacaatgactatttcgaatacttcggaccagactttaaacttcatatttccccgtcgaatatgacaaatcagaacacccctgagtatatggagaagatcaagcagaggcttttcgagaacctgcgtatgctgccccatgcccctggcgtacagatgcaggctattccggaagatgccgttcatgaagattcgggtgatgaagacggggaggacccagataaacggataagtatcagagctagcgataagcgcattgcctgcgacgaggagttttcagatagcgaggacgagggtgaagggggacggcggaacgtcgccgaccataaaaagggcgctaagaaggctagaatcgaagaggataagaaagaaacagaagacaaaaagaccgacgtcaaggaagaagacaagtcaaaagacaattcgggagaaaaaaccgatacaaaggggacaaagtcagaacagctgagtaacccgtag

SEQ ID NO: 24423 - DNA, 1467 bp, synthetic construct
  misc_feature 1..1467: note = Description of Artificial Sequence: Synthetic coding sequence
  source 1..1467: mol_type = other DNA
atggcctacagccagggcggcggcaagaagaaggtgtgctactactacgatggtgatataggtaattattattatggtcaggggcatcctatgaagccccatcggatcaggatgacccataatcttctcctgaactatggactgtaccgcaagatggaaatctatcgacctcacaaagctaccgccgaggaaatgaccaagtatcactccgacgagtacatcaaattccttaggtccatccgtcccgacaatatgtcagaatattcgaaacagatgcagcgtttcaatgtgggcgaggactgtcctgtgtttgacggcctcttcgagttttgccagctgtccacaggaggaagcgtggctggggcggtaaagctgaatcgccaacagaccgacatggcggttaattgggccggcggcctgcaccacgccaagaagtcagaggcatctgggttttgctacgtaaacgacattgtgctggctatcctagagctgctgaagtatcatcagcgagtcctctacatcgatatcgatatccatcacggagacggcgtggaggaagctttttataccacagaccgggtgatgactgtgagttttcataagtatggagagtacttcccaggcactggcgacctacgagacatcggcgccggtaaaggtaagtactacgctgtcaactttcctatgagagacgggatcgatgacgagtcttacggccagatttttaaacccatcattagtaaggtcatggaaatgtatcagcccagtgcagtggtcttacagtgcggtgccgacagcttatcgggcgatcggctaggttgtttcaatctaaccgttaaagggcacgcaaagtgtgtggaagtggtaaagacatttaatctaccgctgctcatgctgggtggcggcggttacaccattaggaatgttgcgaggtgttggacctatgagactgcagtcgccctggactgcgagatccccaacgagctcccatacaacgactactttgagtatttcgggcccgactttaaactacacatcagccctagtaacatgaccaatcagaacaccccggaatatatggaaaagatcaagcagagactgtttgagaacctgaggatgttgccgcatgcaccaggcgtccagatgcaggccattcctgaagatgctgttcacgaggactccggggatgaagacggcgaggatcccgacaaacggataagcattagagcatcagacaaacggatcgcctgtgacgaggaattcagcgatagcgaagatgagggggaggggggaaggcgtaatgtggcagatcacaaaaagggcgccaagaaagccaggatcgaggaggataagaaagagactgaggataaaaaaaccgatgtcaaagaagaggataaaagtaaggacaatagtggcgaaaaaaccgatactaagggcacaaagtctgagcagctcagcaatccctag

SEQ ID NO: 24424 - DNA, 1377 bp, synthetic construct
  misc_feature 1..1377: note = Description of Artificial Sequence: Synthetic coding sequence
  source 1..1377: mol_type = other DNA
atgaagccccaccggatccggatgacccacaacctgctgctgaactatgggctctaccgaaagatggagatttatcgtccccacaaggccacggcagaggagatgactaagtaccactcggatgagtacatcaagtttttgagaagcatccgaccagataacatgtcagagtattctaagcaaatgcagcgcttcaatgtaggagaggattgccctgtgtttgacggattgtttgagttctgtcagctctctactggggggtccgtagcaggagcagtcaaactgaacaggcagcagacagacatggcagtcaattgggccggcggcttgcaccatgccaaaaagtcagaggcttctggattctgctacgtgaatgatatcgtgctagccatcttggagctgctcaagtatcatcagcgcgtgctttacatagacatcgatatccatcacggagatggtgtggaagaagcattttacaccaccgatagagtgatgaccgtatcctttcacaagtatggcgagtactttccagggacaggagatttgcgagacattggagctgggaaaggtaagtattatgccgtgaatttccctatgcgggacggtattgatgacgagtcatatggtcagatctttaagccgatcatctccaaggttatggagatgtaccagccgagcgccgtggtgctgcagtgtggggcagatagcttgtctggagaccgcctcggctgtttcaatctgacggttaaagggcacgctaagtgtgtggaagtggtcaaaacgtttaatctgcccctacttatgctcggcgggggaggttacacgatccgaaatgtggccagatgctggacctatgaaacggccgttgctctggattgtgagataccgaacgaactgccctataacgactactttgaatatttcggacctgatttcaaactgcatattagcccaagcaatatgacaaaccagaatacacctgaatatatggagaagattaagcaaaggcttttcgagaacctgcgcatgttgccacacgcccctggggtacagatgcaagcgataccggaggacgccgtgcacgaggactcaggcgatgaggacggggaagacccggacaaaagaataagcatccgagcgtctgataaacgtatagcttgtgatgaggagttttctgacagcgaagatgaaggagaaggcggacgccggaatgtcgcagaccataagaagggggccaaaaaggccagaatcgaggaagacaagaaggaaacagaggataagaaaacagatgtcaaagaggaagataaatccaaggacaatagcggggaaaaaaccgacaccaaagggacaaaaagcgagcaattgtcaaacccctag

SEQ ID NO: 24425 - DNA, 1287 bp, synthetic construct
  misc_feature 1..1287: note = Description of Artificial Sequence: Synthetic coding sequence
  source 1..1287: mol_type = other DNA
atggccaagaccgtggcctacttctacgaccccgacgtgggcaacttccattacggcgctggtcatcctatgaaaccccatcgtctggccctgactcacagtctcgtgctccactacggtttgtataaaaagatgattgtattcaaaccgtaccaggcttcccagcacgacatgtgccgattccattccgaggattatattgatttccttcaaagggttagcccaaccaacatgcagggttttacgaaatcactgaatgcattcaacgtgggagatgactgtcccgtttttcccggcctcttcgaattttgcagccggtataccggagcatccctgcagggagcaactcagctgaacaataagatttgtgatattgcgattaactgggctggcggtttacatcatgcaaaaaaattcgaggcttccggtttttgttacgttaatgacatcgtgattgggatccttgaactgcttaaatatcacccacgggtactgtacattgatatcgacatacatcatggggacggcgtacaggaagccttttacctgaccgaccgcgtgatgaccgtgtccttccacaagtacggcaactatttttttccaggcaccggcgatatgtacgaggtcggagccgaatctggtaggtactactgtcttaatgtgcccctgcgggacggaattgatgaccaatcatataaacatctgttccaacccgtgatcaaccaggtagttgatttctatcagcccacctgcattgtgctccagtgcggcgcggacagcctgggatgtgacagattaggttgctttaacctttccatccgtggccacggagagtgtgtggaatacgttaagagcttcaacatcccactgctggtgctgggcggggggggttacactgtgagaaacgtggcacgatgctggacctatgaaacctctcttctcgtcgaagaagccatatcagaggagctgccctactcagagtactttgagtactttgctcccgattttacactccatcccgatgtctccacccgcattgaaaaccagaattcacggcagtacctcgaccagataagacagacaatttttgagaacctgaagatgttgaaccacgccccaagtgtgcaaatccatgatgtgccagctgacttgttaacttacgataggacagatgaagcagacgcagaagagcgaggtcctgaggagaactactccagacccgaggcccccaacgagttctatgatggcgaccatgacaatgacaaggagagcgacgtggagatttag

SEQ ID NO: 24426 - DNA, 3255 bp, synthetic construct
  misc_feature 1..3255: note = Description of Artificial Sequence: Synthetic coding sequence
  source 1..3255: mol_type = other DNA
atgagcagccagagccaccccgacggcctgagcggccgggaccagcctgtggaacttctcaaccctgcccgcgttaatcatatgcctagcaccgtggatgtcgcgacagccctccctctccaagtggctccatccgcagttcccatggatttgcgtctggatcatcaattttccctgccagtggctgagcctgccttgcgggaacagcagctgcaacaggagctcctggctctaaagcagaaacagcagattcagaggcagatactgatcgcagagtttcagagacagcacgaacaactgagccgtcagcacgaggctcagcttcatgaacatattaagcaacagcaggagatgttggccatgaaacaccagcaagaactgctggaacatcagcggaagctggagagacaccggcaggaacaggaactggaaaagcagcacagagaacagaagctgcagcaactgaaaaacaaggagaaaggaaaggagtcggccgtcgcttcgactgaggtgaagatgaaactgcaggagttcgtcctcaacaagaagaaagcgctcgcccaccgcaatctcaatcattgtatctcctctgatccgcggtattggtacgggaaaacccaacattcctctctggaccaatcctcaccgccacagtcgggagtctcgactagttacaaccaccctgtcttgggaatgtatgacgctaaggacgattttcccctgcggaaaacagccagcgaacctaacctgaagctgcgatcgcgcctgaaacaaaaggttgctgaaagacggagctctcccctactgcggagaaaggatggacccgtggtgacagcactgaaaaagcgtcctctggacgtgaccgattctgcctgctcctctgctcccgggagcggtcccagctctcccaacaattcatcggggtcggtatctgccgaaaatggtattgccccagcagtgccatctatccctgccgaaacctccctggcacacagactcgtcgcaagggagggttcagccgcccccctgcccctgtacacttctccaagcctgcctaacattacccttgggctgcctgcaaccgggccatccgccgggacagctggacagcaggacgcagagcgcctgacactgccggctctccagcagcgcctgagcctgtttcccggcacacatctgaccccctatttatccaccagccccctggagagggatgggggcgctgcccattccccactactgcagcatatggttttgctcgagcagcccccggcacaggctccactggtcacagggctgggcgctctgccactacacgcacagagccttgtcggagcagaccgggtgtccccctcgatccacaaactgcgacagcatcgccccctgggccgtacccagtcagcccctctgccacagaatgcacaagcattgcagcatctggttatacagcaacaacatcaacagtttttggagaagcataagcagcagtttcagcaacagcaactgcagatgaacaaaattataccaaaacccagcgagcccgccagacagccagagtcccaccccgaagaaaccgaggaagagctcagagaacaccaagctttactggatgaaccctaccttgaccgattgcccggccagaaagaggcgcacgctcaagccggggtccaggtcaagcaggagccaattgaaagcgacgaagaagaagccgagccccccagggaagtggaaccaggtcaacgacagccatcggagcaggaactcctgtttcgccaacaggccctcctcctcgagcagcagaggatacatcagctgcgtaattaccaggcaagcatggaagccgccggtatcccagtctcattcggaggtcaccgacccctcagccgcgcccagagcagccctgccagtgcgacattccctgtctccgtgcaggagcctcccacgaaaccccggtttaccacgggactggtgtatgacactcttatgctcaaacaccagtgcacttgcggaagttcttcctcccatcctgaacatgccgggcgcatccagagcatctggtcaaggctgcaggaaactggactccgagggaagtgcgagtgtataaggggcagaaaggcgacactggaggaactacaaactgtgcatagtgaagcacatacactgctgtacggcacgaacccccttaatcgccagaagctcgacagcaagaaattgctgggatcccttgcttctgttttcgtgcggctgccctgtggaggcgtgggcgtagactccgacactatttggaatgaagtgcacagcgctggtgccgccagactcgcggtagggtgtgtcgttgagctggtgtttaaagtggctaccggcgaactgaagaacgggttcgcagtggtgagaccccccggtcatcacgccgaggaaagcacgccaatgggattttgctactttaattctgtggcggtggctgccaagctcctccagcagcgactgtctgtgagcaagattttaatcgtggactgggatgtccaccatgggaacgggacccagcaggccttttattccgatccctcagtactctacatgagcttacacaggtacgatgacgggaatttcttcccaggatcaggcgcaccagacgaggtgggcacgggccctggcgttggcttcaacgttaacatggccttcacgggtggactggaccctcctatgggggatgctgagtacctcgccgcttttagaaccgtggtgatgccaattgcatcggaattcgctccggacgtggtccttgtgagctcaggctttgacgctgtggaagggcacccaactcctttgggcgggtacaacttgagtgcccggtgttttgggtacctgaccaaacagctgatgggtctggccggcggccggatcgttttggcactagagggggggcacgatctgaccgcgatctgcgatgcctccgaggcctgcgtatctgccctgctaggtaacgagctggatcctctcccagagaaggtgctgcagcagcgacccaatgctaacgccgtgcgcagcatggaaaaggtcatggagatccactcaaaatattggaggtgcctgcagcggacaacctcaactgctggtcgttcgttgattgaggcccagacctgtgaaaacgaagaggctgaaacagtaacggcaatggcaagcctgtccgtgggtgttaaacccgctgaaaaacggcccgacgaagagcctatggaagaagagcctcccctgtag

SEQ ID NO: 24427 - DNA, 1941 bp, synthetic construct
  misc_feature 1..1941: note = Description of Artificial Sequence: Synthetic coding sequence
  source 1..1941: mol_type = other DNA
atgctggccatgaagcaccagcaggagctgctggagcaccagcggaagctcgagaggcaccgacaagagcaagagcttgagaagcagcatcgggagcagaaattacaacaactgaagaacaaagagaaggggaaggaatccgctgtggcttctaccgaagtcaagatgaagctgcaggagtttgtgcttaacaagaagaaggcactggcacacagaaacctaaatcattgcatatctagcgatcccagatattggtacggtaaaacgcagcattcttccttagaccagagtagccccccccagagtggggtgtccacatcatataatcaccctgtgctgggaatgtacgacgccaaagatgattttcctctgagaaaaactgctagcgagcccaatctaaaattgagatcacgcctaaaacaaaaggtggccgagagacgcagcagtcccctgctgagacggaaggacggccccgtcgtgactgcgcttaagaaaagaccactcgatgtgacagacagcgcatgtagttctgcccccgggagcggcccctcttcacccaataactccagtggtagtgtctcggcggagaatggaatcgctcctgccgtgccctctattcccgctgagaccagtctggcacacaggcttgtggctagggaaggttctgcggccccattgccgttgtacacctcgccatccctccccaacatcacactcggacttccagcaactggcccttcagctggtactgctggtcaacaggatgcagaaagactcaccctgccggcacttcagcagaggctttctctgttccctggcacccaccttacaccttacttgtcaactagtccactggagcgcgatggcggtgctgcccactccccccttctgcagcatatggtgctcctggagcagccacctgcgcaagcccccctcgttaccggactcggcgcgctgcccctgcatgcacagagtcttgtcggggcggaccgggtgtcaccttcaattcacaagcttaggcagcacaggcctctgggccgcacccagtcagctcctctcccccagaacgctcaggccttacaacacctggttatccagcagcagcaccagcagttcctggaaaagcacaaacaacagttccagcagcagcagctgcaaatgaacaagattatacccaagccttcagaaccagcgaggcaaccggaaagccatcccgaagaaacagaggaggagctgcgggaacaccaggccctcctagatgagccatatctggaccggctgccagggcagaaggaggcacacgctcaggcaggggtgcaagtgaagcaggagccgattgagagcgacgaggaggaagcagagcccccccgcgaagttgagccgggccaaagacaaccatctgagcaggaactcctgttccgccaacaggccctgctgctcgaacaacaacgtatccatcagctgagaaactaccaggcgagcatggaagccgcaggaatccccgtctcttttgggggacatcgcccacttagtagggctcagagctccccagcttcagccacattccccgtcagtgtgcaggagcctcctaccaagcctcgcttcactactgggctcgtctacgacaccctgatgcttaagcatcagtgcacctgtggatcttcatctagccatcctgaacatgctggaaggatccagtctatctggagcaggctgcaggagaccggactgaggggcaagtgtgagtgcatcagaggacgtaaagccactttagaagagttgcaaacagtgcattctgaggctcatactctcctatacggaacaaatccactgaatcggcagaaacttgacagcaagaaactgctggggagcctcgcaagcgtgttcgtgcggctgccatgcggcggagtaggcgtctctgttccgctgatgtgcaagtag

SEQ ID NO: 24428 - DNA, 2919 bp, synthetic construct
  misc_feature 1..2919: note = Description of Artificial Sequence: Synthetic coding sequence
  source 1..2919: mol_type = other DNA
atgctggccatgaagcaccagcaggagctgctggagcaccagcggaagctcgagcggcaccggcaagaacaagagctggagaaacagcaccgggagcagaagttacagcagctgaagaataaggagaagggcaaagaaagtgccgtggccagcacagaggtcaaaatgaagttgcaagaatttgtccttaataaaaagaaggctctagcgcaccggaacctaaatcactgcatttcctcagatccccgctactggtacggcaaaacccagcactccagcctggatcagagcagtccaccacagagcggggtctcaaccagctacaaccatccggtcctcggcatgtatgacgccaaagatgactttccacttcgcaagaccgcctctgaacccaatctgaagttaagaagccgcttgaagcagaaggttgcagagagacgttcatctccgttgctgaggcgtaaggatggtcctgtagtgacagccttgaaaaagagaccccttgacgttacggactccgcttgtagttctgctcccgggtccgggccatcttcccctaacaatagctcaggctcagtctccgccgaaaatgggattgcaccagcagtccctagcatcccggcagaaacatctctggcacacaggctggttgcgcgtgaggggtccgccgccccacttcctttatacacctcaccgagtctcccaaacattaccctggggctgccagctactggacctagcgccggtactgccgggcagcaggatgcagagcgacttacccttcctgccctacagcagcgtctgtccctgtttcctggtactcatctgactccttaccttagtactagcccacttgaacgcgatggaggcgctgctcacagtccgttgctacagcacatggtcttactggagcaacctcctgcacaggctcctctggtgaccgattggtatcttagcggcctgggcgcactgcctctccatgcgcagtctctggtgggcgccgatagggtgagcccctcaatccacaaactgaggcagcacagacccctggggagaacacagagtgcccctcttcctcagaacgcacaggccctccagcatctcgttattcaacagcaacaccagcaattcttggaaaaacataagcagcagtttcagcagcagcagctgcaaatgaataagattatccctaagccatcagaaccagctcggcaacccgaatcccacccggaggagaccgaagaggagctgagagaacaccaggctcttcttgatgagccatacttggaccggctgcccggacaaaaagaggctcacgcccaggccggtgtgcaggtgaaacaagagccaattgagagcgatgaggaggaagccgaacccccgcgggaggtcgaacctggacagcggcaacctagtgaacaagagcttttatttagacaacaggcattactgctcgagcagcagcgtatccatcaactgcgtaactaccaggcgtctatggaggccgccgggatccccgtcagctttggcggccatcgcccgctcagcagggcacagagctcgccggcttccgccacgttccccgtgtctgtgcaagagccaccgaccaagccaaggtttacaaccgggctcgtatatgatacactaatgctgaagcatcaatgcacatgcggaagctcctcctcacaccccgaacacgctgggaggattcaaagtatttggtcccggcttcaggagactggactcagaggtaagtgtgagtgtataaggggacgtaaagccacgctggaagagctgcagactgtgcacagcgaggcacacacccttctttacgggactaatccgttgaacagacaaaagctagacagcaagaaactgctaggaagtctggcctccgtgttcgtgcgactcccgtgcgggggggtgggcgtggattccgatacaatatggaacgaagtgcattctgcaggggccgcaagacttgctgtaggatgtgtcgttgaactggtgttcaaagtggctactggagaacttaagaacggcttcgcagtggtcaggcctccggggcatcacgccgaggagtcaactcctatgggtttctgctattttaacagtgtcgcagttgccgcgaaactgttacagcagagactctcagtttcaaaaatcctgatagtcgactgggatgtacaccacgggaacggaacccagcaggcgttttactcagaccctagtgttctgtacatgagcctgcacaggtacgacgatgggaatttctttcctggttcgggcgccccagatgaagtaggcaccggacccggagtcggtttcaatgttaacatggctttcacaggcggactggatccacctatgggggacgccgaatacctggctgcttttcggactgtggttatgcccatcgcctctgagttcgctccagacgtggtactggtaagctcgggattcgacgctgtagaaggccaccctacaccactcggggggtataacctgtctgctcgttgctttggctatcttacgaagcagctcatgggactcgctggcggccgtatagttctggcgctcgaaggaggccacgatctgacagccatctgcgatgcgtccgaagcctgtgtgtctgccctactgggcaacgaactggaccctctgcctgagaaggtgctgcaacagagacccaacgccaacgctgtaagaagtatggagaaagtgatggagatacactctaagtactggaggtgcctgcagcggactacctctaccgcaggacgttctcttatcgaagcgcagacatgcgagaatgaggaggctgagaccgtcaccgcaatggcaagcctttccgtaggagtgaagcctgccgagaaacgtcccgatgaggagcccatggaggaggagcctcctttgtag

SEQ ID NO: 24429 - DNA, 2214 bp, synthetic construct
  misc_feature 1..2214: note = Description of Artificial Sequence: Synthetic coding sequence
  source 1..2214: mol_type = other DNA
atggacgtggccaccgccctgcccctgcaggtggcccccagcgccgtcccaatggacctgcggcttgatcaccagttttctctccccgtagcggagcccgcccttcgggagcagcagctccagcaggaactgctagctttgaagcagaaacagcagatccagcggcaaatcctcatcgccgagttccagcgccagcatgagcaactttccagacaacacgaagcccagttgcacgagcacatcaaacagcagcaagaaatgttggccatgaagcaccagcaggagctactggaacatcagagaaagttggaaaggcatcggcaggaacaggagctagaaaaacaacatcgcgagcagaaactgcaacagctcaaaaacaaggagaagggtaaggaatccgcagtggcctctacggaggtcaagatgaagttacaggagttcgtgttaaacaagaaaaaggcactggcccaccgcaacctaaaccattgtatcagttcagatccacgctactggtacggtaagacacagcatagcagtctggatcagtcctcacccccacaatcaggtgtttccacttcctacaaccaccccgtgctgggtatgtatgatgctaaagacgatttccctctcagaaagaccgccagtgagccaaatttgaagctcaggagtcggctgaagcagaaagtggcggaaagacgctcctcccccttgctccgccggaaggacgggcctgtggtgactgcactgaaaaaaaggcccctcgatgttaccgattcagcctgctcctctgcaccaggtagcggcccctcatcacccaataacagctcagggagcgtctctgctgagaacggcattgctcctgccgtgccctccatccctgccgagacatctttggcccacaggcttgtcgcccgggagggctccgctgctcctctccccctttacaccagtccttcccttcccaacatcacgctgggactgcctgccaccggtccctcagcaggcaccgcaggccagcaggacgctgagagactcaccctgcctgccttacaacagagactgtctttgtttccaggtactcacctcaccccctacctgagcactagccccctagagagagacgggggtgcagcccactcccctctgctgcagcacatggtgctgctcgaacaaccccccgcccaggcacctcttgtcactgattggtatctgtctggtcttggagcactacccctgcacgcccaatctcttgtcggagcagacagagtttcccctagcattcacaagttacgccagcaccgaccgctcggcagaactcagtctgcgcctctgccccagaatgcgcaagcattgcagcatctagtcatccagcagcagcaccaacagttcctggaaaagcacaagcaacagttccagcaacagcagttacagatgaacaagatcattcctaaaccctctgagccagcccgccaacccgagtctcatcccgaggaaaccgaagaagagttacgggagcaccaagccctgctggacgaaccttacctcgatcggctgcccggtcaaaaggaagcccacgcccaagcaggggtacaggtcaagcaggaacctatcgagtccgacgaggaggaggctgaaccccctcgcgaggtggaacctgggcagcgccagccatctgagcaggagctactctttagacagcaggctcttctacttgagcaacagagaatccatcagctgcgtaactaccaagctagcatggaagcggccgggattcctgtctcgttcggcggacataggcctctgtccagggcccagagctcccctgccagtgctacgttcccagtgtccgtgcaggaaccaccaactaaaccacggtttactaccggcctcgtgtatgacacactcatgctgaaacaccagtgtacttgtggctcctcttccagccatccagagcatgctggtaggatacagagtatctggagcaggctgcaggaaactggtcttcgcggtaaatgtgagtgcattcggggacgcaaggccactctggaagagctgcagacagtccacagtgaagcgcatacactcttgtacggtaccaatcctctcaatcgccagaaacttgactccaaaaaacttcttgggagtctcgctagcgtgttcgttcgcctcccctgcgggggcgtcggggtttcggtacccctgatgtgcaagtag

SEQ ID NO: 24430 - DNA, 2007 bp, synthetic construct
  misc_feature 1..2007: note = Description of Artificial Sequence: Synthetic coding sequence
  source 1..2007: mol_type = other DNA
atggtgctgctggagcagccccccgcccaggcccccctggtgaccggactaggcgccctcccactgcatgcccaatctctggttggcgctgacagggtttccccatctatccataagttaagacagcaccggcccctcggccggacccagtctgccccactgcctcaaaacgcccaagccctgcagcacttggtgatccagcagcagcaccagcagtttttggaaaagcataagcaacagtttcagcagcagcagctacagatgaacaaaatcattcccaagcctagtgagcctgctcgacagcctgagtctcatccggaggaaacagaagaggaactgcgtgagcatcaggcgctgttagacgagccatatcttgataggctgcccggccagaaagaagcccacgcacaagccggtgttcaggtaaagcaggagcctattgaatcagacgaagaagaggccgaacctcctagggaggtggagccgggtcagagacagccgagtgaacaagaactcctttttaggcagcaagccctccttctagaacaacagagaattcatcaactccggaattaccaggcgtcaatggaggctgctggcattccagtgtcatttggaggccacaggccgctctcccgggcacagtcaagccccgcctcagcaacctttccagtgagcgtgcaggagccaccaactaaacctaggttcacgaccggcctcgtgtacgacacgcttatgctgaaacaccagtgtacatgtgggtctagttcctcccaccctgagcacgccgggcgcatccagagcatctggagccgtctgcaagaaactggcctgcggggaaaatgtgaatgtatccgcgggcggaaggctactcttgaagaactgcagaccgtacattcggaggcccacaccctgttatatggcaccaaccctctgaatcggcaaaaactggattcgaagaagctcctaggctctctggcatccgtgtttgtgaggctcccatgcggcggggtaggcgtggattccgacaccatatggaacgaggtccactctgccggggctgctcggctggcagtggggtgtgtggtggaactagttttcaaagtggccactggagagttaaagaacggcttcgcagtggtccggcctcccggtcaccatgccgaggagagcactccaatggggttttgctattttaactctgttgcggtggctgctaagttattgcaacagaggctgtccgtatccaagatcttaattgtggactgggatgtgcaccatggcaatggcacccagcaggctttttactccgaccctagcgtcttgtatatgtcattacataggtacgatgacggaaactttttcccaggctccggggccccagacgaagtgggcactgggcctggcgtgggtttcaatgtcaacatggcattcaccggaggactggatccccctatgggtgatgctgaatacttagcagccttccggacagtagttatgccgattgcaagtgagtttgctcccgacgtggtgctcgtgtcaagtggatttgacgctgtggagggacaccccacacctttaggaggatataacctctccgcgcggtgtttcggctatctgacaaaacagctcatgggactcgccggcggacgaattgttctcgccctcgaaggtggtcacgatctgacggctatctgtgatgcgagcgaggcctgcgtttctgctttgctcggcaacgagctggacccattgccagaaaaggtgctacagcagcgaccaaacgcgaacgctgttaggagcatggagaaggtgatggaaatccacagtaaatactggcgctgcctgcaaagaactacatcaaccgccggacgaagcctcattgaggctcaaacatgtgaaaacgaagaagcagagacagtgactgcaatggcttcactcagtgtgggggtcaaaccagcggagaaaagaccagacgaagagcccatggaggaggagccacctctgtag

SEQ ID NO: 24431 - DNA, 90 bp, synthetic construct
  misc_feature 1..90: note = Description of Artificial Sequence: Synthetic coding sequence
  source 1..90: mol_type = other DNA
atgagcagccagagccaccccgacggcctgagcggccgggaccagccagttgaactcttgaaccccgcgcgggtgaaccacatgccatag

SEQ ID NO: 24432 - DNA, 3648 bp, synthetic construct
  misc_feature 1..3648: note = Description of Artificial Sequence: Synthetic coding sequence
  source 1..3648: mol_type = other DNA
atgaccagcaccggccaggacagcaccaccacccggcagcggcggtcaaggcagaatcctcagtcccctccgcaggactcttcagtgaccagtaagaggaatattaagaaaggcgccgtgccccgcagtataccaaatctcgcagaagtaaaaaagaaaggtaaaatgaaaaagttgggtcaggcaatggaggaggacctgatcgtaggtttgcagggaatggatttgaacttagaggctgaggcgcttgctggaaccggtctcgtgttggacgagcagctcaacgaattccactgcctgtgggatgactccttccccgaaggacccgagagactccatgctataaaggaacagctgatccaagagggcttactggatcgctgcgttagcttccaggctcggtttgccgaaaaagaagaactgatgctggtccattcattggagtacattgatctgatggaaaccactcagtatatgaacgaaggggagctccgggtcctcgccgatacctatgattctgtgtatcttcaccccaactcctattcttgtgcttgcttggccagcggatccgtgctgagactggtggacgccgtactgggggctgaaatcagaaacggcatggccattattcgtccccctggccaccatgcccagcactccttaatggatggatattgcatgttcaatcacgtcgcagtcgcagccaggtatgcccagcagaagcatcggatccggcgcgttctaattgtggattgggacgtgcaccatggccaaggaacacagttcactttcgaccaggacccctccgtcctgtatttttccattcacaggtacgagcagggacggttctggccacatctgaaagccagcaattggtccactacagggttcggtcagggacagggctacaccattaatgtgccatggaaccaggtagggatgcgggatgcagattatattgctgcattcctccatgtgctgctgcccgtagccctcgaattccagcctcagttagtcctcgtggccgcgggcttcgacgcattgcagggtgaccccaaaggcgagatggcggctaccccggcaggctttgcacagcttacccatctgctgatgggcttagctggcggcaagcttatcctgtccctggaaggtggctacaaccttagggcgctcgctgagggagtttcagccagcttgcatactctgcttggtgacccgtgccctatgctggaaagcccaggggctccatgcagatctgcgcaggcctcagttagttgtgccctggaagctttggagcccttttgggaggtgttagtcaggagcactgaaacagtggagcgggacaatatggaagaagataatgtggaggagtccgaagaggagggaccatgggaacctccagtgctgccaatattgacctggccggtcctccagtcgagaacaggtttagtttacgaccagaacatgatgaatcactgcaatctgtgggattctcatcaccccgaggttccgcaaagaattctgaggatcatgtgccgcctcgaggagctggggctcgcggggaggtgcctaacgttaacaccccgtccagccacagaagcggagctcctgacctgtcacagcgcggaatatgtgggtcatctccgggccaccgaaaagatgaagactagagagcttcatcgtgaaagcagtaactttgattctatctacatttgtccttccacctttgcctgcgctcagcttgccacgggggccgcctgcagactggtggaagccgtgctgtctggtgaagtgctgaacggggctgcagtcgtgcggccacctggccaccacgcagagcaagatgcagcatgtggtttctgttttttcaacagcgttgcagttgctgccagacacgctcagactatcagtggtcacgcgcttcgtattctgatcgtggattgggacgtgcaccacggtaacggcacccagcatatgttcgaagacgatccctcggtgttgtacgtgtccctgcatcggtatgaccatggtactttttttccaatgggcgatgagggtgcttccagtcaaatcggaagagccgctgggactggctttacggttaatgtggcctggaacggccccaggatgggggacgcagattatctcgcggcatggcatcggctggtcctccccatagcatatgagtttaaccccgagcttgtcctggtgtcggccggttttgacgctgcaaggggtgaccctctcggggggtgccaggtctccccagaaggctacgcccacctgacccatctcctgatgggattagcgagtgggcggattatcttgatcttggagggaggttacaacctgacctcaatttcagaatccatggcagcctgcacacgatctctgctgggagatcctcccccgctgcttacactgccaagaccaccactttccggtgcattagctagcataacggaaacgatccaggtgcatcggaggtattggagaagcctccgagtcatgaaggttgaagaccgggaaggtcctagtagttccaagctggtgacaaagaaggcaccccagcctgccaagcctaggctggccgagcgcatgaccactcgggagaagaaggttctggaagctggtatgggaaaggtgacctcagcaagcttcggcgaagaatcaacccctgggcagacaaatagcgagacagctgtggtagcacttacccaagatcagccatcagaagctgctactggcggtgctacactggctcaaaccatcagcgaagccgccattggcggtgctatgctggggcagacaacaagtgaggaagccgtcggtggtgccacccctgatcagactacatccgaagaaactgtaggaggtgctattctggaccagaccacatcagaggacgcggtgggcggcgccactctcggtcagaccacatccgaagaggctgtgggaggagccaccttggctcaaaccacatcagaagcagctatggagggcgccacactggatcagactactagtgaagaagctccaggcggcaccgagctgatccaaactccactggcctcatccactgaccatcagacgcccccgactagcccagtacagggcaccaccccccagattagcccgtcaacactgatcggttcgctccggacattagagttggggtctgaaagtcagggagcatcggaatcacaggcccccggggaggaaaacctcctgggagaagccgcgggcgggcaggacatggcggactccatgttgatgcagggcagccgtggactgacagatcaggccatattctacgctgtgacccctctgccctggtgcccccacctggtggcagtgtgccctattcctgctgcaggtctcgacgtaacacagccgtgcggagactgtggcacgattcaagagaattgggtgtgcctgagctgttatcaggtctactgtgggcggtacattaatggtcatatgttgcaacatcatggcaacagcggtcacccccttgtgctcagttatatagacctgtctgcatggtgttactactgtcaagcttatgtccatcatcaagccctcttggatgtcaagaatattgcccaccagaataagtttggcgaggacatgccgcacccccattag

SEQ ID NO: 24433 - DNA, 633 bp, synthetic construct
  misc_feature 1..633: note = Description of Artificial Sequence: Synthetic coding sequence
  source 1..633: mol_type = other DNA
atgaccagcaccggccaggacagcaccaccacccggcagcggcggtctaggcagaacccgcagagccccccacaggactcctccgtgacctctaagagaaatatcaagaagggtgcagtccccagatccatccctaacctagcagaggtcaagaaaaaaggtaagatgaaaaagctggggcaggctatggaagaggatttgatcgttggccttcaggggatggaccttaatttggaggccgaggctcttgctgggacaggtctggtcctcgatgaacagctgaatgagttccactgcctctgggatgactctttccctgagggacccgagcgactccacgccatcaaggaacagttaatccaggagggcctgctggatcgatgtgtttcattccaggcccgctttgctgagaaggaagagctaatgctggttcactctctggaatatatcgacctgatggaaaccacccagtacatgaacgaaggtgaactgcgggtgctcgctgacacatatgacagcgtatatctacacccaaactcttacagctgtgcctgtctggcgtcaggatccgtgctgcgtctggtagacgccgtgcttggggcagagatccgaaatggcatggccatcatatag

SEQ ID NO: 24434 - DNA, 3648 bp, synthetic construct
  misc_feature 1..3648: note = Description of Artificial Sequence: Synthetic coding sequence
  source 1..3648: mol_type = other DNA
atgaccagcaccggccaggacagcaccaccacccggcagcggcggtctcgtcagaacccccagtctcccccacaggacagtagcgtcaccagtaaacgaaacattaagaaaggagccgtgcctcgctccattcctaacctcgctgaagtgaagaagaagggaaagatgaaaaagttggggcaggcaatggaggaggatctcattgtcggtctgcagggcatggacctgaacctcgaagccgaagccctcgccgggacggggctcgtgctggacgaacaacttaacgagttccactgtctgtgggacgactctttcccagagggaccggaaagactccacgccattaaggaacaactcatccaagaaggcctgttagaccgatgcgtgtcattccaggcccgttttgctgagaaggaggaattgatgctggtgcactcactggagtacattgatctcatggagacaacccagtatatgaatgaaggcgagctgcgggtgctggccgacacgtatgacagcgtctacttgcatccaaattcctactcgtgcgcctgcctggcgtcaggttcggtgctgaggctcgtagacgccgtgctgggcgccgaaatacggaacggaatggctatcataaggccacccggacaccacgcacagcacagcctgatggacggatactgtatgttcaatcatgtcgccgtcgccgctcgctacgctcagcaaaagcacaggatacggagggtcctgatcgtggattgggatgtgcaccacgggcaagggacacagttcacattcgatcaggacccctcagtgctctacttctctattcaccggtacgaacagggccggttttggccccacttaaaagcctccaattggagcacgacaggcttcggccagggtcaggggtacactatcaatgtgccctggaatcaggtaggaatgcgcgatgcagattatatagcagcatttttacatgttctcctacccgtcgccctggaatttcaaccacagctggttcttgtcgcggccgggtttgatgcccttcagggtgatcctaagggcgaaatggcggccaccccagccggctttgctcagttgacccatctattgatgggtcttgctggcggcaagctgattctaagtctcgagggaggttacaacctgcgggccctggccgagggtgtgtctgccagcctgcacacactgctcggcgacccatgccccatgctggaatcaccaggcgcaccctgcaggagcgctcaagcctcggtaagctgcgctctcgaggccttggaaccattttgggaggttctggtaagaagcaccgaaactgtggagcgcgacaacatggaggaagacaatgtggaagagagcgaagaagagggcccatgggaaccacctgtattgcctatcctgacttggcctgtgttacagtccagaactggcttagtgtacgatcagaacatgatgaaccactgtaatctttgggacagccaccaccctgaagtgcctcaaagaatactgcgcatcatgtgtagactggaggagctgggcctcgcagggcggtgcttgacgcttacccctcgacctgctaccgaagcagagctcttaacatgccacagcgctgaatatgttggccatttaagagcaacagaaaagatgaagacgagggagctgcaccgagaatcgtctaacttcgacagtatctacatctgtccatccacattcgcttgcgcccagctggctacaggagcggcctgcagacttgttgaggctgtgctgtctggagaggtgttaaatggtgctgccgtggttaggccaccaggccaccacgctgagcaggatgcagcctgcgggttttgtttcttcaacagcgtggccgttgccgctagacacgctcaaacaattagcggccacgcactgaggatcttaatcgtggactgggacgtacaccatggcaatggtacccaacacatgtttgaggacgacccatccgtgctctatgtctcccttcacagatatgatcatggcacgtttttccctatgggcgacgagggagccagcagccagattggcagggctgccggcactggcttcacagtcaatgtcgcatggaacggtcctcgtatgggcgatgccgattacctcgccgcatggcatcggctcgtgttacccatcgcttacgagtttaaccccgagttggtgctggtgtcagccggattcgatgctgccaggggggatccgctcggaggctgccaggtatctccggaaggttatgcccatctgactcacctgttgatgggactggcttctggtcgcataatactcatactggagggcggctacaatcttacatcaatttccgagagtatggctgcatgcacgaggtcactgttgggcgatcccccccccctgttgacattaccaaggccccccctgtctggggccctggccagcatcacagagacaattcaggtgcaccgacggtactggcgcagcctccgcgtgatgaaggtggaggacagagagggcccgagctcctcaaagttggtgaccaaaaaggctccccagccagccaaacccaggcttgcggaacggatgactacaagagagaaaaaggtgctagaagctggcatgggaaaggtcacgagtgctagtttcggtgaagaatccaccccaggccagactaacagcgagaccgctgtggtggccctcactcaggatcaaccatctgaggccgctacgggaggggccacactcgcccaaacaatctccgaagccgccatcggaggtgctatgcttggtcagaccacgagcgaggaggcagtcggtggggctactccagatcagaccaccagtgaggagacagtgggaggtgctatcctcgaccagacaacctcagaggacgctgttgggggggcgacactcgggcagaccacttccgaggaggcagtagggggcgcaaccctcgcacagaccaccagcgaggcggcaatggagggggctacactggaccagaccaccagcgaggaagcccccggtggcacagagctgattcagactccactggccagctcaaccgatcaccaaacaccgcctacttcaccagtgcaaggcactacccctcagatctccccgtcaacgctgattggctctctgcgcaccctcgaacttgggagcgaatctcaaggtgccagcgaatcccaggccccgggtgaagaaaatttgctgggcgaagccgccggggggcaggacatggccgacagcatgctcatgcaaggcagtaggggtctgacggaccaggctattttctatgccgttactccactgccctggtgccctcatctggtggcagtgtgtccaattccagcggccggtctcgacgttacccagccttgtggggactgtggaaccatccaagagaactgggtttgtctgtcttgctatcaggtgtattgtggaaggtacatcaatgggcatatgctacagcaccacggtaatagcgggcaccccctggtgctgagctatatcgacctgtccgcttggtgctactattgccaagcctacgtgcaccaccaggccctgctggacgtcaagaatattgcccaccaaaataagttcggagaagatatgcctcaccctcactag

SEQ ID NO: 24435 - DNA, 633 bp, synthetic construct
  misc_feature 1..633: note = Description of Artificial Sequence: Synthetic coding sequence
  source 1..633: mol_type = other DNA
atgaccagcaccggccaggacagcaccaccacccggcagcggcggtccagacagaatccccagtctcccccccaggacagcagtgtgacttccaaacgcaatatcaaaaagggcgcagtgccacgatccatcccaaacctggccgaagtgaagaaaaaaggcaagatgaaaaagctcggccaagctatggaggaggacttgatcgtcggactgcaggggatggatctcaatctcgaagctgaggctttggctgggacaggactggtgctcgacgagcagctcaacgagtttcactgcctttgggacgattcatttcccgaaggccccgaacggctgcatgctataaaagaacagcttatccaggaaggattgctcgataggtgtgtgagcttccaggcacgctttgccgagaaagaagagctcatgcttgtccactccttagaatatatcgacctgatggagacaacacagtacatgaacgaaggcgagctccgtgtcctggccgacacctacgattcggtgtacttgcacccaaacagctatagctgtgcttgcttggcctccggatccgtgctccgcctggtcgacgcagtgctaggagcagaaatccggaatggaatggctatcatttag

SEQ ID NO: 24436 - DNA, 891 bp, synthetic construct
  misc_feature 1..891: note = Description of Artificial Sequence: Synthetic coding sequence
  source 1..891: mol_type = other DNA
atgaagaagctgggccaggccatggaggaggacctgatcgtgggcttacaaggcatggacctcaacctggaagcagaggctctagcaggaacaggactagttctggacgaacagctcaacgaatttcactgtctgtgggatgattcttttcccgaaggtcccgagagactccacgcgatcaaggaacaactaattcaggaaggactcttggatcgctgtgtttccttccaggcacgcttcgcagagaaggaagagctgatgttagtccacagcctggagtacattgatttgatggagaccacacaatacatgaacgagggagaactgagggtgctggctgacacgtacgattccgtctacctgcacccgaatagctactcttgtgcctgtctggctagcggctctgtgctgcgactggtcgatgcagttctgggggcagaaataaggaacggcatggccatcatccggcctcctgggcaccacgcccaacattctctgatggatggctattgcatgttcaaccatgtggccgtagccgcccgctacgcccagcagaagcaccgaatccgacgcgtactgattgtagactgggacgtgcaccacggacagggcacccagtttaccttcgaccaggacccgtccgttctgtatttcagcattcacagatatgagcagggccggttctggccccaccttaaggccagcaattggtccaccactgggtttggtcagggccaaggatatacgatcaatgtcccttggaatcaggtggggatgcgtgacgcagattacatcgcggcctttttgcatgtcctgttgcccgtcgctctcgaagttctcggcatttggggagttctcggcggaggagtggcattaaaggtgcggctctag

SEQ ID NO: 24437 - DNA, 429 bp, synthetic construct
  misc_feature 1..429: note = Description of Artificial Sequence: Synthetic coding sequence
  source 1..429: mol_type = other DNA
atgaccagcaccggccaggacagcaccaccacccggcagcggcggagtcggcagaaccctcagtcccccccccaagactcaagtgttacaagcaagcggaatatcaaaaagggcgctgtgcctcgctctattccgaacctggcagaagtgaaaaagaagggaaagatgaagaaactgggacaagcgatggaagaggacttgatcgtgggcttgcagggaatggacctaaatctcgaggccgaggccttagccggaaccgggttggtcttagatgagcagttgaacgagtttcactgcctgtgggacgactccttcccggagggccccgagcgactccacgcaataaaagagcagctgatacaggaaggcctgctcgatagatgcgtcagctttcaggcacgatttgccgaaaaggaggagctcatgtag

SEQ ID NO: 24438 - DNA, 810 bp, synthetic construct
  misc_feature 1..810: note = Description of Artificial Sequence: Synthetic coding sequence
  source 1..810: mol_type = other DNA
atgaccagcaccggccaggacagcaccaccacccggcagcggcggtcacggcagaaccctcagtccccgccacaggacagctctgtgacaagcaagaggaatattaaaaagggcgccgttccccgatccatacctaatctcgccgaagtgaaaaaaaaaggcaagatgaaaaagctaggccaggcaatggaagaagatctaattgtggggctgcagggcatggatctcaacctcgaggccgaagccctggccggcacaggactggttctggatgagcagctgaacgagtttcactgcctctgggacgatagctttcccgagggccctgaaagactgcacgccataaaggagcagctcatccaggagggcctgcttgaccgctgcgttagcttccaggctaggtttgcggaaaaggaggagctgatgcttgtacactccttagagtatatcgacttgatggagactacacagtacatgaacgagggcgagttgcgggtgctggccgatacttatgacagtgtgtacctgcatccgaatagctactcttgtgcttgcttggcctctggtagtgtattacggttagtcgatgcagtgctgggcgccgaaatacggaatggtatggctatcataaggccaccaggccatcacgctcaacattctctcatggacggatactgtatgtttaaccacgtggccgttgccgcaaggtatgcgcagcagaagcatcgtatcaggagagtgctaatagtcgattgggacgtgcatcatggacagggtacacaattcacttttgaccaggatccaaggtag

SEQ ID NO: 24439 - DNA, 2454 bp, synthetic construct
  misc_feature 1..2454: note = Description of Artificial Sequence: Synthetic coding sequence
  source 1..2454: mol_type = other DNA
atgaccagcaccggccaggacagcaccaccacccggcagcggcggagtcgtcaaaacccacagtcgcccccacaggactcaagcgttacaagtaagaggaatatcaaaaagggagcagtaccccgctccatccccaaccttgccgaggtcaagaagaaaggtaaaatgaaaaagctcggccaggccatggaggaggatctgatagtggggctccagggcatggacctgaatctggaggccgaagccctcgccggtacagggctggttctggacgagcaacttaatgaatttcattgtctatgggatgacagttttcccgagggccctgagcggctccacgccatcaaagaacaactgattcaggaggggctgcttgatcgctgtgtgtcctttcaagccagattcgcagaaaaagaggagttgatgctggtccactctctggagtacattgacctgatggaaactacgcaatacatgaatgagggcgaactccgcgtactcgctgatacttacgactctgtatatttacaccccaacagttactcctgtgcttgcttggccagcggctccgtgttgagactggttgacgccgtccttggagccgaaattagaaatggaatggcaattatccggccccccggacatcatgctcagcactcactgatggacggatactgcatgttcaatcacgtggccgtcgccgccagatacgcccagcaaaaacacaggataagacgggtacttattgtggactgggacgtgcaccacggccagggtactcagtttacattcgatcaggacccgtccgtgctctatttttctattcaccggtacgagcagggccgcttctggcctcacctaaaggcctcgaactggtctacgacagggttcggccagggccaaggctatactattaacgtcccttggaatcaggtgggcatgcgcgatgcggactacatagctgccttcctccacgttttgctgccagttgcgctggagttccagccccagcttgtcctggtcgctgcggggtttgacgccctccagggggatcctaaaggcgagatggcagcaactccagcaggcttcgctcagctcacccatctgctcatgggactggctgggggaaaactaatcttgtccttggagggcggctataatctccgggctcttgccgagggggtatctgctagcctgcatacccttctcggggatccctgtccaatgctcgagtcaccgggggcaccctgtcgcagcgctcaagcaagtgtttcgtgcgctctggaagcacttgaacccttttgggaagtactcgtacgcagtaccgagaccgttgaaagggacaacatggaggaggacaacgtagaggagtctgaagaggagggtccgtgggaaccacccgtgttgcccatcctcacatggcctgtgctgcagtccagaacaggccttgtgtatgaccagaatatgatgaatcattgcaatctgtgggattcacaccacccagaagtgccgcagcgtatcctccggattatgtgcaggctcgaggaacttggcttagccggacgctgcctcactttaacaccgcgcccagccactgaagcggagcttctcacctgtcatagcgccgaatacgtgggtcacctgcgagcgaccgaaaagatgaagacacgcgagctgcatcgagaatcttccaattttgattccatctacatctgtcctagtacgttcgcttgtgcccagctcgccactggagctgcatgccggctggtggaggcagtactttcaggggaggttttgaacggagcagcagtcgtacgcccgccgggtcaccacgcagaacaggatgccgcctgcggcttttgcttctttaattctgtggctgtggctgcccggcatgcacaaacaatttccggccacgcccttagaatcttgatagtggattgggatgtgcaccatggcaacggtacgcaacacatgttcgaggatgatccaagcgtactctatgttagtttgcaccgctatgaccatgggacgttttttcccatgggggatgaaggcgcgtcttcacagataggtcgcgcggccggcactggcttcactgtaaacgtggcctggaacggacctcgcatgggcgacgcagattacctcgccgcatggcatcgactcgtattgcccatcgcatatgagtttaatccagagttggtcttggtttcagccgggtttgacgccgcccgtggggacccactcggtggctgtcaggtgagtcccgagggatatgcacacctgacgctgccaatcgcgtgcctgcgggggacaacaaccccagcccagaaagaacgcggggcagctcagtggccacaggaaggagctgacattatgaggattaccctggccggaggggaactcaccggacggcatggcaaagtggcctacgtgatcaagtacaaattgtag

SEQ ID NO: 24440 - DNA, 156 bp, synthetic construct
  misc_feature 1..156: note = Description of Artificial Sequence: Synthetic coding sequence
  source 1..156: mol_type = other DNA
atgaccagcaccggccaggacagcaccaccacccggcagcggcggtcgagacagaacccacaaagcccaccacaagatagctccgtcactagtaaacggaatattaagaaaggggcagttcctcggtcaattcctaaccttgcagaggttaagtag

SEQ ID NO: 24441 - DNA, 516 bp, synthetic construct
  misc_feature 1..516: note = Description of Artificial Sequence: Synthetic coding sequence
  source 1..516: mol_type = other DNA
atgaccagcaccggccaggacagcaccaccacccggcagcggcggagtcgacagaatcctcaatcgccaccacaggactctagcgtaacatcaaagcggaatatcaaaaagggggcggtaccccgctcaatacctaatctcgcggaagtgaaaaagaaggggaagatgaagaaactcggccaggccatggaagaagatctaattgtgggcctgcaggggatggatctgaatcttgaagccgaggcgttggccggcacaggtttagtgcttgatgagcagttgaacgagttccactgtctgtgggatgactccttccccgagggcccggagaggctccacgccatcaaggagcaattgatccaggaaggattgttggataggtgcgtgtccttccaagccagattcgccgaaaaagaagaactcatgctcgtccactcgctggagtacatcgatcttatggagactacccagtatatgaatgaaggtgagctgcgggttctcgctgacacctactag

SEQ ID NO: 24442 - DNA, 486 bp, synthetic construct
  misc_feature 1..486: note = Description of Artificial Sequence: Synthetic coding sequence
  source 1..486: mol_type = other DNA
atgaccagcaccggccaggacagcaccaccacccggcagcggcggtctcgccagaaccctcagtcaccaccccaagatagcagcgtgaccagcaagcgcaacattaagaaaggagccgtgcctaggtccatccccaaccttgctgaggtaaagaagaagggaaagatgaagaagctggggcaggccatggaggaagatctaattgtggggctccaagggatggacctgaacttggaggccgaagcactggcaggcaccgggctcgttctggatgaacagctcaatgagttccattgtttgtgggatgattctttcccagagggtccagaacgtcttcacgctattaaagagcagcttatacaggaaggcctgctagacagatgcgtgtcttttcaggcaaggtttgcagaaaaagaagagctgatgctagtgcactcgttagaatacatagacctcatggagactacgcagtacatgaacgagtag

SEQ ID NO: 24443 - DNA, 504 bp, synthetic construct
  misc_feature 1..504: note = Description of Artificial Sequence: Synthetic coding sequence
  source 1..504: mol_type = other DNA
atgaccagcaccggccaggacagcaccaccacccggcagcggcggagccgacagaatccccaatcccctccgcaagattctagtgtgacgtctaagcggaatatcaagaagggagctgttccacgctcaataccgaacctggccgaggttaaaaagaaggggaagatgaagaagttgggccaagccatggaggaggaccttatcgtaggccttcagggcatggacctcaatcttgaagcagaagcccttgctgggacaggtctggtactggacgagcagctgaacgagttccactgtctttgggatgactcatttcccgaaggcccagagcgcctgcatgcaatcaaagaacagctgatacaggagggcttgctggaccgctgtgtcagcttccaggcgaggtttgcagagaaagaggagctgatgctggttcattctttggaatacatcgatcttatggagaccactcagtatatgaatgagggcgagttgcgggtactatag

SEQ ID NO: 24444 - DNA, 3690 bp, synthetic construct
  misc_feature 1..3690: note = Description of Artificial Sequence: Synthetic coding sequence
  source 1..3690: mol_type = other DNA
atgagcggcgccaaccggggccggggccaggccagcagcaccatgaccagcaccggccaggacagcaccactacacggcagcgcaggtctaggcagaatcctcagagtccccctcaggacagctccgtgacgtccaaacgaaatatcaaaaagggagctgtcccgagatccatcccaaacctcgctgaggttaaaaagaaggggaagatgaaaaaactgggccaagccatggaggaagacctcattgtcgggttgcagggcatggacctgaatttagaggccgaagctcttgctggcacaggtcttgtcctggacgaacagcttaacgaattccactgcctgtgggatgacagtttccccgaggggccagagaggctgcatgccatcaaggagcagttgattcaggagggcctgcttgatcggtgcgtgtcgttccaggctagattcgccgagaaggaggagcttatgctagttcattccctggaatacatcgacctgatggagaccacccagtacatgaatgaaggagaactccgggtcttggcagacacttacgattctgtgtatctgcaccccaactcctactcgtgcgcttgtctggccagcggcagcgtactgagactggtggacgcagtcctcggggctgagatccgcaacggtatggcgatcatccgccctcccgggcatcacgctcagcatagcctcatggacgggtattgtatgtttaatcacgtcgcagttgcggctcgttatgcacagcagaaacaccgcatccgtagagtgctgattgtcgactgggacgttcatcatggccagggaacccagttcacctttgatcaggacccaagcgtgctgtacttttcaattcatcgctacgaacaagggcggttttggccacatctcaaagcctcaaattggagcactacaggctttgggcaaggccaagggtacaccatcaacgtcccctggaatcaggtcggaatgcgcgacgcggattatatcgcagctttcctgcacgtgctcttaccagtggctcttgagtttcagccacagctggtgctggtggcggctggatttgacgcacttcagggcgaccccaagggtgagatggctgctactcctgctggctttgcacagctcacccatcttctgatgggcctggccgggggcaaactgattctgtctttagagggaggctataatttacgcgccctggctgaaggcgtgtccgcaagcctgcacacattactgggagacccatgccctatgctagagtcaccgggagcaccctgtaggtctgctcaggcctcggtttcttgtgcgctggaagctctcgagcccttctgggaagttctagtgcggtcaaccgagaccgtggaaagagataacatggaagaagacaacgtcgaggaatctgaggaggagggaccttgggagcctcctgttctgcccatactcacttggcctgtactccagtcacggaccggactggtgtacgatcaaaatatgatgaaccattgcaacctttgggatagtcaccacccagaagtaccccagcggatcttgcggataatgtgccggctggaagagctcggactggccggcagatgtctaacgctcacaccaaggcccgccacagaggcagagctcctgacgtgccattccgccgaatacgtcgggcacctccgcgccacagaaaaaatgaagaccagggagctgcaccgggagagctccaacttcgatagcatttacatctgtccttctacgttcgcatgtgcgcaattagctaccggggccgcttgtaggcttgtcgaggccgtactgtctggtgaggtacttaacggcgctgcggttgttcggccccccggccatcacgccgaacaggatgccgcttgtggtttctgcttctttaattctgtggccgtggctgctaggcatgcgcagaccatttccggccacgccctgcgtatactgatcgttgactgggacgttcatcacgggaacgggacccaacacatgttcgaggacgatcccagcgtcctttacgttagtctgcacaggtacgaccacggcacttttttccccatgggggacgagggtgcatctagccagatcggccgcgccgccggcacaggctttaccgttaacgtcgcatggaacgggcccagaatgggcgacgccgactatctagccgcttggcatagactggtgctccccattgcctatgagttcaatcccgagttagtgttagtgtcagccggttttgatgctgcccgcggcgatccccttgggggctgtcaggtgagcccggagggatacgcccacctgacccatctgctgatggggctagcctcgggacgcatcatacttatcctcgagggcggctacaacctgacgagcatctccgagtccatggccgcatgtacaagatctctgctgggtgaccccccccctctgctcactcttcctcgaccacctctcagtggagcactggcaagtattactgaaactatccaggttcacagacgctactggcgcagccttcgggtaatgaaagtggaggaccgggaaggcccttcgagttctaagctggtgaccaaaaaggctccacaaccagctaagccacgattggccgagcggatgacaacacgagagaagaaggtgctggaggccggcatgggcaaggtaacctcggctagcttcggcgaggagagcactccgggccagactaatagtgaaacagccgtcgttgcactgacgcaagaccaaccaagcgaagcagccaccggtggggccacccttgcccagaccattagcgaggcggcgataggcggcgctatgctcggccagacgacatccgaggaggccgttggaggcgccacccccgaccagactacatcggaagagacagtgggcggagccattcttgatcagaccacatccgaggatgccgtgggaggggctactctggggcagactacatcagaagaagcagtgggcggtgccaccctggcacaaaccacatccgaggctgccatggaaggcgccacactggaccagactacctctgaagaggccccaggggggacagaacttatccaaactcccctggcaagttccaccgatcatcagacacccccaaccagcccagtgcagggtaccaccccccaaatttcaccatccaccctgattggctccttgagaactctggagcttggatccgagtcccaaggcgcctccgaatcccaggcacctggcgaggagaaccttctgggcgaagctgccggagggcaagacatggcagatagcatgctgatgcagggctcaagaggactgacggatcaagcaatcttttatgccgtaacccctctgccctggtgcccccacttagtcgctgtgtgccctatcccggctgctggtctggatgtgacacaaccctgcggcgactgtggaacaattcaggagaattgggtgtgtttgtcatgctaccaggtatactgtgggcggtatataaacgggcacatgctacagcaccacggaaactcaggacatccacttgtcttaagttatatcgatctgagtgcttggtgctactattgccaggcgtatgtgcaccaccaggcgctgttagatgttaaaaatattgcccatcagaacaagttcggtgaggacatgccacatccacattag

SEQ ID NO: 24445 - DNA, 2976 bp, synthetic construct
  misc_feature 1..2976: note = Description of Artificial Sequence: Synthetic coding sequence
  source 1..2976: mol_type = other DNA
atgcacagccccggcgccgacggcacccaggtgagccccggcgcccactactgttctcccactggggccggatgtccacgaccgtgcgctgacactcccggaccccagcctcaaccaatggatctccgagtcggccagagaccacccgtggaacctcctccggaacccaccctcctcgctctgcaaagaccccagcgccttcatcaccacctttttctcgcaggcttgcaacagcagcggagtgtggaacctatgcgcctatctatggatactcccatgccagaactgcaagtgggcccacaggagcaagagcttagacagctgcttcataaggacaagtccaaaagatccgcggtggcgagctcagttgtaaagcagaagctggcagaagtcatcttgaaaaagcaacaggcagcccttgagagaaccgtgcaccccaacagccccggtatcccttatcgtaccctggaaccgctggagactgagggtgctacccgctcaatgctctcttcttttctgccaccggtgccctcactgccctccgatccccccgagcactttccccttcgcaagaccgtctccgaacctaacctcaaactgcggtataaacctaaaaagagcctggaacgccgaaagaacccattgctgcgcaaagagagcgccccaccctcattacggcgtcggcccgccgaaacactgggagattcgtccccttcgagctcctcaacacccgcctccggatgctccagtcctaacgattctgaacacggtcctaatccaatcctcggctcagaggccctgttggggcagaggcttcgcctccaagagacctcagtggcccccttcgccttaccgaccgtgagcctgcttcccgctattacactgggtttgccagcgcctgccagggccgacagcgacagaagaacccaccctaccctgggcccaaggggccctatcctcggatccccccatactcccctgttcctgcctcatggcctggaacccgaagccggtggtaccttgccctctcggctgcaaccaattctgttacttgacccaagtgggtctcatgcccccctgctgacagtacccggcctcggtcctctgcccttccattttgcacaaagccttatgaccaccgagagactgtcagggtcaggccttcactggccgctgtccagaacgcgttccgaacccctcccccccagcgccaccgcaccccctcctcccggccccatgcagccccggcttgaacaactcaaaactcacgtgcaagttatcaagcgttccgcgaagcccagtgagaagcctcggctgcgccagattccctccgctgaggacctcgaaaccgacggtggcggccccggtcaggtggtggacgacggcttggaacaccgcgagttggggcatggccagccggaggcacggggaccagcacctctccagcaacacccgcaggtgctgttatgggagcaacaacgactcgccggtagacttccacggggctctaccggggacacggttctgctaccgcttgcccagggtggccatcgtccgctgtcgcgtgcccagtcgtcccccgcggcaccagcaagcctgagcgccccagagccagccagtcaggccagagtgttaagctcaagcgagaccccagctaggaccttgccgttcactaccggccttatttatgattctgtaatgctgaagcaccagtgctcttgcggcgataactcccgccaccccgaacacgctggtagaattcaatccatttggagccggctgcaggagcggggtctgagatcgcaatgtgaatgcttgaggggaagaaaggcaagtctggaggagctgcagtccgtacatagtgaacgacatgtactgctctacgggacaaatccactatcccgcctgaaactggataatgggaagctggctggcctcctggctcagcgtatgttcgtgatgttgccctgcggaggggttggagtagatacggacacgatttggaacgagctccactcatcgaatgctgcccgctgggctgctgggagcgtgactgacctggccttcaaggtggcatctagggagctgaagaacggcttcgcagttgtgcgcccccctgggcaccatgcagatcatagcacagctatgggattttgcttcttcaatagcgtggcgatagcctgtaggcagctgcagcagcagtccaaggcaagtaagatcctgatagttgactgggatgtccaccacgggaatggtacacagcagacattctaccaggatcccagcgtgctttatattagtttgcatcgtcacgacgacggcaattttttccctggctctggagccgttgatgaggtgggggcgggaagtggagagggtttcaatgttaatgtggcgtgggcaggggggctcgacccaccgatgggcgatccagaatacttagcagcgttccggatcgtggtgatgcctattgcacgcgaattttccccggatctggtgttggtcagcgcggggttcgacgccgctgaaggacaccctgcccccttgggaggctaccacgtgtctgccaagtgttttgggtatatgacacagcaactgatgaatttggccggaggcgcagtcgtcctggctctcgaaggcggtcatgacctcacggccatctgtgatgccagcgaagcgtgcgtcgccgccctgctcggcaaccgggtcgacccactcagcgaagaaggctggaagcagaaacccaatcttaatgcaattcgcagtctggaagcggttattagagtccatagcaaatactggggttgtatgcaaaggcttgccagttgccctgatagctgggtgccccgggtgcccggtgcagacaaagaagaagtcgaagccgttaccgccctcgcgtccctttctgtaggaatactggctgaagatagaccatcggagcagctggtcgaggaagaggaaccgatgaatctttag

SEQ ID NO: 24446 - DNA, 2865 bp, synthetic construct
  misc_feature 1..2865: note = Description of Artificial Sequence: Synthetic coding sequence
  source 1..2865: mol_type = other DNA
atgcacagccccggcgccgacggcacccaggtgagccccggcgcccactactgtagccctactggtgctgggtgcccacggccttgcgcagacacccctggacctcagccgcaaccaatggatttgcgggttggacagcggccgcccgtggagcccccgcccgagcctacccttctggcactccagcgcccacaacgcctgcatcaccacctctttctcgccggtctccagcagcagagatctgtggagcccatgagactaagcatggacacccctatgcccgaactccaggtaggcccgcaggaacaagaattgcgtcagctgctgcacaaagataagtccaagcgctctgccgtggccagttcggtggtcaagcagaaactggccgaagtgatactcaagaagcaacaggccgctcttgaacgcaccgtccacccaaacagccccggaattccttaccgcaccctggagccgctcgaaaccgagggagcaaccagaagcatgcttagcagtttcttgccacctgtccctagcctgccatctgacccccctgaacattttccgttacggaagactgtcagtgaacccaatctgaaattgcggtacaagcccaagaaatccctggaaagacgtaagaatcctctgcttcgcaaagaaagtgctcctccgtctttgaggcgcaggcccgctgaaacgctgggtgactcgagcccctcttcatcatctacacctgcaagcgggtgcagctcccctaacgattcagagcacggacccaatccaattcttggctccgaagccgactcggatcgccgcactcatccaacactgggccctaggggcccaattctcggatcgcctcataccccactgtttctcccccacggtctggaaccagaggcaggggggacactgccatcccgcctgcagccaatcctgcttctggatccctcaggatcacacgctcccttgctgaccgtgcctggcctcgggcctctgcccttccatttcgctcagagtctgatgaccacggaacgactgtccggatcgggcctccattggcccttgagtcgcaccaggtcagagccattgccacctagcgccaccgctccacctccacccgggcccatgcagcctaggctcgaacagctcaagacccatgtgcaggtgattaagagaagcgctaaaccatctgaaaagcctcgactccggcagatcccatctgccgaagatttggagacagatgggggagggcccggtcaagtcgtagacgatgggctcgagcatcgcgagctcggtcacggtcaacccgaggctagagggcccgcgcccctgcagcagcatccacaggtgctgctgtgggaacagcagcggttggctggtaggttgcccaggggtagtaccggagacacggttttgctacccctggcacagggaggtcaccgccccctgtcccgggcgcagtcttctccagccgcccccgcgagcctgtccgccccagaaccggcgagccaagctcgtgtcctgagctccagcgaaacacccgcacgcactctgcccttcaccaccggcctgatttacgacagtgtaatgttgaaacaccagtgtagctgcggagataacagccgacatccggagcatgctgggaggattcaaagtatatggtcacgcttgcaggaacgtggcctcagaagtcagtgcgagtgcctcagagggcgtaaggcctcactggaggagttgcagagcgtccattcagaaagacacgtgctgctatatggcaccaatcccctgagtcggctgaaactggacaacggcaaactggccggccttctggctcaaagaatgtttgtaatgctaccatgcggtggagttggagtcgacacagatacgatatggaacgagttgcactcctccaatgcagctaggtgggcagctggaagcgtgaccgatctggccttcaaggtagcgagccgggagctcaaaaatggtttcgccgtcgttcgcccccccggacaccacgctgaccatagcactgccatggggttttgcttttttaattcagtggctatcgcgtgtagacagctgcagcagcaatcaaaggcctctaagatcctaattgtggattgggacgtgcaccacggtaatgggactcaacagacattctatcaggacccctcagtattgtatatcagcctccaccggcacgacgacgggaattttttccccgggtctggcgctgttgacgaggttggagcaggcagcggagagggctttaacgtgaatgtggcctgggcaggcggcttagacccccctatgggtgatccggagtatctggctgctttcagaatcgtcgtcatgcccatcgcgagagagttctcgcctgatttggtactggtgtcagctgggttcgatgctgcggagggtcaccccgctccactgggaggataccatgtaagcgccaaatgctttggctatatgactcagcagcttatgaacctggcgggcggcgccgtggtccttgccctggagggcggccatgatcttacagcaatctgcgatgccagcgaggcttgcgtagccgcattattaggaaaccgagtggaccctttatccgaggaaggctggaagcagaagcctaatctgaacgccatccggtcgttggaggctgtcatcagggtgcactccaaatattggggctgcatgcagcggctggcctcatgtccggatagttgggtcccgagggttccgggagccgacaaagaggaagtggaggccgtcacagcacttgcctcccttagtgtggggatactcgctgaagatagaccatctgagcaacttgtggaggaagaagagccaatgaatttgtag

SEQ ID NO: 24447 - DNA, 3045 bp, synthetic construct
  misc_feature 1..3045: note = Description of Artificial Sequence: Synthetic coding sequence
  source 1..3045: mol_type = other DNA
atgagcgacctgcggaagcgggagctgggcgccctgttcaccagcagaggtaccgggggcgtggaatgggatgggacgcaagtgagtcctggggcgcattactgttctcccaccggagccggttgtccccggccgtgtgccgacacacccggccctcagccccaacccatggacttgcgcgtcggccagcgccccccagtggaacccccgcccgaaccaactttgctagccctccagcgcccccaacgcctccaccaccacctgttcctcgcgggtctccagcagcagcgcagtgttgaaccaatgagactgtctatggatacacccatgcctgaactccaagtggggccccaggagcaggagttgcgccaactactacataaagacaagagtaaaaggtcagctgtggcctcctctgtggtgaaacaaaagctggccgaagtaattctcaaaaagcagcaggccgccttagagaggaccgtgcatcccaactctccaggcattccgtaccgcacactcgaacccctcgagactgagggtgcaacacgatccatgttgagttctttcttgcctcccgttcctagtctcccgtccgaccccccagagcactttccattgagaaagaccgttagtgaacccaacctgaaactccgatacaagcccaagaagtctcttgaacggcgcaaaaatcccttgcttcgcaaggagtcggcaccaccttccctcagacggaggcctgctgagacactgggcgacagcagtccatctagttcatcaaccccggcatcagggtgctcctctcctaatgactccgagcacggccccaatccgatcttggggtccgaagcactgctggggcagcgcctgaggttacaggagacctcagtggctcccttcgcactaccaacggtaagcctcctccccgcgatcacactggggctgcctgccccagcccgggccgattccgaccggcggacccaccccaccctaggtccaagaggacccatcctgggttcacctcatactcctctttttcttccccatggattggagcccgaagccggcggaaccctaccatcccgtttacagcctatcctgttactggaccctagcgggtcacatgcccctctcctgacagttcccggcttgggtcccctcccctttcacttcgcccaaagcctgatgacaaccgagcgcctctccggaagcggcctccattggccgctgagccggacaagatctgagcccctgccaccatctgcaaccgcccccccacctcccggcccaatgcagccgagactggagcagctgaagacacatgtgcaggttatcaagcgctccgctaaaccttcggagaaaccaagacttcgtcaaattccaagtgctgaggatttggagacagacggggggggtcccggacaggttgttgatgacggcttggagcaccgagagttgggacatggccagcctgaagcgaggggccccgctcccctgcagcagcatcctcaggtgcttttgtgggagcagcaaagactagcaggccgcctgcccagagggtccacaggtgacaccgtccttcttcccctcgcccagggcgggcatcgaccactctcccgggcccagtcgagtcctgcagcgcccgcgtctctgagcgcacctgagcccgcaagtcaggctcgagtgctttcctcctccgaaactccagcccgcaccctgccctttaccacaggcctaatctacgatagcgtaatgctgaaacatcagtgcagctgtggggacaatagcaggcaccctgaacacgctggcagaatacagtctatctggtccaggctgcaggagaggggactgcggtcccagtgcgagtgccttcggggtcggaaagccagtctggaagagctgcagagcgtccattcggagcgccacgttcttctatatggtacgaatcccctgtctagactgaaactcgacaacgggaagctcgccgggcttttggcccaacgaatgttcgtgatgctaccatgcggaggagtaggggttgataccgacaccatctggaacgagctccattcaagcaatgccgcaaggtgggccgctggaagtgtgacagacctggcattcaaggtggcctccagagagctcaaaaatggttttgccgttgtccgacctccgggtcatcatgcagaccactccaccgcaatgggtttttgctttttcaactccgtcgctattgcctgtcggcaacttcagcaacagtctaaggcctcgaaaatactaattgttgactgggatgtgcatcacggcaacggtactcagcagactttttaccaggatcctagtgttctttatataagcctgcatcgtcacgacgacggtaacttcttcccagggagtggcgcagtggatgaggtgggggcaggatcgggagagggtttcaacgtaaacgtggcttgggcagggggactggaccctccaatgggcgatccagagtatctggccgcgttccgtattgtggtcatgcctattgccagggagttctcccctgacctggttttggtgtctgctgggtttgatgcggctgaagggcatcctgcaccactgggcgggtaccatgtgtccgctaaatgttttggctacatgactcaacagttgatgaacctggctgggggcgcagtggtcctggcactggaagggggtcacgacttaaccgcaatttgtgacgcaagtgaggcttgcgtggcggccctgttgggaaatcgggttgatcccctgtctgaagagggatggaaacagaaacctaatcttaacgcaatcaggtcactcgaggccgttatccgtgtgcacatgggtgcactgacactctctcagattcccgggcacggatcctcccagcaacaggccggaggcgcctttagctggcctggacatccttgtcgagctgcggtggtgatggtgaataccggcgccgcctgtagcgcatggcccccagttcagaccccaggctgtcttgagtgtcaggggctgacaaagaaaaaatggaggcagtag

SEQ ID NO: 24448 - DNA, 402 bp, synthetic construct
  misc_feature 1..402: note = Description of Artificial Sequence: Synthetic coding sequence
  source 1..402: mol_type = other DNA
atgcacagccccggcgccggctgcccccggccctgcgccgacaccccaggcccccaaccacagccaatggacctaagggtgggccagcgacccccagtggaacccccccctgagcctacgctcctggcgctgcagagaccccagcgtttgcaccatcatttattcctggctggcctgcagcagcagagatcagtcgaaccgatgcgcctctccatggatacccccatgcctgaactgcaggttggtccccaagagcaggaacttaggcagctcctgcataaagacaagagcaaaagaagcgctgtggcgtcatcagtggtgaaacagaaactagccgaggttatactgaaaaagcagcaagctgccctggagcggactgtccatccgaattctcctgggtag

SEQ ID NO: 24449 - DNA, 2859 bp, synthetic construct
  misc_feature 1..2859: note = Description of Artificial Sequence: Synthetic coding sequence
  source 1..2859: mol_type = other DNA
atggacctgcgggtgggccagcggccccccgtggagcccccccccgagcctacacttctagcccttcaaaggccacagagactgcaccatcacctgttcctggctgggctgcagcagcaacggtccgtcgagccgatgagactgagcatggacacccccatgccggagctgcaagttggcccccaggaacaggaactacgccagttactgcataaagacaaaagcaagcgctcagccgtagcctcctcagtagtcaagcaaaaactcgccgaagtgattctaaaaaaacagcaagccgcacttgaaagaaccgtgcaccctaactctcccggcatcccttacagaacccttgagccactcgagactgagggtgccactaggtctatgttgtcatccttcctccccccagtccccagtctgccttccgaccctcctgaacacttccccttgaggaagaccgtctccgaaccaaatctgaaactgagatacaagcccaagaaaagcctagagcgacgaaagaaccctttgttgaggaaagaatccgcacctccctccctccggcgcagaccggcagagaccctgggtgatagctcacccagttcaagcagcacccccgcctcagggtgctctagcccaaatgacagcgaacacggcccaaatccaattttaggatctgaggccctgttgggccagcgactgaggcttcaggaaacctctgtagcgccatttgcactgcctacagtttctctcctcccagctataacactgggccttccggcaccggcccgggccgattcagatagacgaacccatccgacactgggcccaaggggacccatcctcggctccccacatacaccactgttccttccccatgggttagagcctgaggccggaggtacccttccctctcgattacagccaattttgcttcttgacccatccggatcgcacgccccactactaaccgtccctggtctcggccccctcccatttcatttcgctcagtcattgatgacaactgagagactgtcagggtcaggcctccattggccactgtctcgaactagatccgaacctctaccgccctccgctactgccccgcctccaccgggccccatgcaaccccgcttggaacagttaaaaacacatgtgcaagttatcaaaagatcggccaagccgagtgaaaagcccaggctgcggcagattccctctgctgaggacctggaaactgatggaggcggtcccgggcaggtggtggatgatggacttgaacaccgcgagcttggtcacggccagccagaggctcgcggcccagccccactgcagcagcacccccaggtgctcctgtgggagcaacagaggctggcaggccgcctgccccgtggaagcaccggagacaccgttttgttacccctggcccaaggaggccacagacctctgtcaagagcacaatcctctcctgccgcacctgcgagtctatcagccccagagcccgccagccaggcacgcgtcctgtccagctccgagactccagctcgcactctgccttttaccacaggacttatttacgactccgtcatgctgaaacaccagtgctcgtgcggggacaattctcggcatccagagcacgctggcaggattcagagcatttggtcacgactgcaagaaagaggcctgcgcagccagtgtgagtgtctcaggggccgcaaggctagcttggaagagctgcaaagtgtgcattccgaacgccatgtcctgctttacggcacaaatcctctgtctaggcttaaactggataatggtaagctcgctggactacttgcgcagaggatgtttgttatgctcccatgcgggggcgtcggtgtcgatacagacactatctggaacgaactgcactctagtaatgcagcccgatgggccgccggctccgtcactgatttggcgtttaaggttgctagccgtgagctcaagaacggatttgctgtagtccggccgcctggtcaccatgccgatcatagcacagccatgggattttgttttttcaactcggtcgccatcgcctgtcgccagctgcagcaacagagcaaagcctctaaaattttaattgtggattgggatgtacaccacggaaacgggacccaacagactttctaccaggacccaagcgttctttatataagtctacaccgccacgatgatggcaactttttccccggcagcggagccgtggacgaggttggggctggatctggggaggggttcaacgtgaatgtggcttgggccggaggtctggatccaccgatgggagacccagagtatctggcagctttcaggatagtggtaatgcccatcgccagggagttctccccggatctcgtgctagtgtctgcaggattcgacgcggcagagggacatcccgcccccctcggaggctatcacgtgtcggccaaatgcttcggctacatgactcaacagctgatgaacttagccggtggcgccgtggtcctggcactggagggcggacatgatttaactgccatctgcgacgctagcgaggcttgcgttgccgccctcttggggaatagggttgatcccctgtcagaggaggggtggaaacagaagccaaatttgaatgcgatcagaagtttagaggctgtgataagagtgcacagcaagtattggggttgtatgcaaaggctggcgagctgccccgatagctgggtaccgcgcgttccaggcgccgataaggaggaggtcgaagcagtgacagccttggcttccctgagcgtggggatcctagcagaggaccgacctagtgaacagctcgtggaggaagaggagcctatgaatttgtag

SEQ ID NO: 24450 - DNA, 2925 bp, synthetic construct
  misc_feature 1..2925: note = Description of Artificial Sequence: Synthetic coding sequence
  source 1..2925: mol_type = other DNA
atgcacagccccggcgccggctgcccccggccctgcgccgacacccctggtcctcagccacagcccatggacctgcgagttgggcagcgcccacccgtcgaacctccacctgagcctacactgcttgccttgcagcgcccccaaagactgcaccaccacctgttcctcgccggtctgcagcagcaacgctcagtagagcctatgcggttaagcatggacacacctatgcccgagttacaggtggggccacaggagcaggaactgcgccagctactgcacaaagacaaatctaagaggagcgccgtcgcatccagcgtggtgaaacagaaattggccgaggtgatattgaaaaaacaacaagccgccttagagcgtaccgtgcacccaaactctccaggcattccttacaggacattggaaccactcgagaccgagggagcaacaaggagtatgctgtcgtcttttctgcccccagtgccatccctgccaagcgacccgccagaacacttcccacttagaaagactgtgagtgagcccaacttaaaactgaggtacaaacctaaaaagtctctcgaacgaaggaaaaaccctctgctccgaaaagaaagtgctcctcctagtctgcgccggagaccagcagagacactcggtgattctagtcccagctcttcatcaacccccgcctctgggtgctcctcccccaatgacagtgagcatggaccgaatcctatcctcgggagtgaagctttgctgggccagcgcttgcggttgcaagagacgtccgttgccccattcgcacttcccacagttagtttgcttccagcgatcactctgggcctgccagcgcccgctcgagcggatagcgaccggcgaacccacccaaccctgggaccacggggccccattctcgggagtcctcatacgcccttgttcctcccccacggcctggagcctgaggctggaggaacccttcctagtcgcctacagcccattttattgctagacccgtccggaagccatgccccgctgctgactgttcctgggttaggccctctccctttccatttcgcccagtccctgatgaccaccgaacgcctgagtggctctggtcttcactggcccttgtctcgcaccagatcggaaccattgcctcccagcgccacagcaccccctcccccagggcccatgcagcccaggctcgaacagctgaagacacacgtacaggtgattaagcggagcgccaagccaagtgaaaagcctagactaaggcagatccccagtgctgaagatctggaaactgatggcggtggccctggacaggtggtggacgacggcctggaacaccgggagctgggacacggacaacctgaggctcgaggacctgctccactgcagcagcacccccaggtgctcttgtgggaacagcagcgattagctggccgactcccacgcggcagtacaggggacacagtgttattgccactggcacagggaggccatagacctctttctagggctcagtcctctcctgccgcccccgcaagcctttccgcacctgagcccgccagccaggcaagggtgctcagcagctcagagacccccgcccgaacgctccccttcaccacgggcctgatctacgattctgttatgctgaaacaccagtgcagctgtggagacaattcaagacatccggagcacgcgggcaggattcagagtatctggagtcgtctgcaggaacgggggctgcgttctcagtgtgagtgcctccgcggccggaaagctagtcttgaagaattgcagtccgtgcacagcgagcggcatgtgctgctctatgggaccaacccactttcacgcctgaagcttgacaacggaaaactggcaggtctgttggctcagagaatgttcgtaatgctcccatgcgggggcgtcggtgtggataccgacacaatctggaatgagctgcattcgagtaatgctgccaggtgggcagcaggctctgtcacggatctggcttttaaagtcgcgtcacgtgaattaaaaaacggcttcgctgtggtccgacctccggggcaccatgccgaccactctaccgccatgggattttgtttctttaattctgtcgccatcgcgtgtcgtcagctgcagcagcagtctaaagccagcaagattctgatagtcgactgggatgtgcaccacggcaatggcacgcaacagacattctatcaggatccctccgtcctgtatatcagtctccatcgccacgatgatgggaacttcttccccggtagcggggcagtagatgaggtgggcgccggttcaggagagggctttaacgtgaatgtcgcttgggccgggggcctggatccgcccatgggcgatccagaatacttggctgcttttcgaatcgtggtcatgcccatcgcaagagagtttagccctgacctcgtcctggtctcagccgggtttgacgcggcagaaggccaccctgcaccccttgggggataccacgtgagcgccaaatgttttggatatatgacacagcagctcatgaatctggccggaggagccgttgtgttagccctagaaggaggccatgatctcactgcgatttgcgacgcctccgaagcatgtgttgcggccctcctgggaaatagggttgaccccctttccgaggaggggtggaagcaaaaaccaaatctcaacgccattaggtctctggaagctgttataagagttcatagtaaatactgggggtgcatgcagcgcctcgcatcatgccccgattcctgggttccccgggtccctggcgccgataaagaggaggtggaggcggtcaccgcactggcttctctctcagtcggcatcctcgcagaagatagaccaagtgaacagctcgttgaagaggaggaacctatgaacctttag

SEQ ID NO: 24451 - DNA, 819 bp, synthetic construct
  misc_feature 1..819: note = Description of Artificial Sequence: Synthetic coding sequence
  source 1..819: mol_type = other DNA
atggaggagcccgaggagcccgccgacagcggccagagcctggtgcctgtgtacatatactcccctgagtatgtctccatgtgtgactccctggccaagatcccaaaacgggcttctatggtgcactcactgattgaagcctacgccctccataagcagatgaggattgtgaagccaaaggtggctagtatggaagaaatggcgacgttccacactgatgcctacctgcaacacctccagaaggtgagtcaggagggagacgatgatcatcctgactccattgaatatggcctggggtacgactgcccagccactgagggcatctttgattacgctgcagccatcgggggagctacaatcactgctgcccagtgtttgatagacggaatgtgcaaggtagcaatcaactggagcggtggatggcatcatgcaaagaaagatgaggccagtggcttttgctatctcaacgatgcggtgctaggcatcctgcgcctgcgtcgcaaattcgagagaattctctatgttgacctcgatctccaccatggtgatggggtggaggatgcatttagtttcacatcaaaggtaatgactgtctccctgcataagttcagtcctggcttcttccctgggaaatcggacgtgtctgatgtcggattagggaagggaaggtattactcagtaaacgttccaatccaggacggtattcaggacgaaaagtactatcaaatctgtgaaagcgtcagaacttcatgcccaaagtcaagacctgtcgaggctgccgcagccgcctgtctgcctcacttacattctttggtctag

SEQ ID NO: 24452 - DNA, 1134 bp, synthetic construct
  misc_feature 1..1134: note = Description of Artificial Sequence: Synthetic coding sequence
  source 1..1134: mol_type = other DNA
atggaggagcccgaggagcccgccgacagcggccagagcctggtgccagtgtatatctattctcctgaatacgtgagtatgtgtgatagtctagccaagattcctaaacgtgcgtctatggtccattccttaatcgaggcatatgctttacataaacaaatgcggatcgttaaacccaaggtggcgagtatggaggagatggctacttttcatactgacgcttacttgcagcacctgcagaaggtctcacaggagggcgatgatgatcatccagactctatcgagtacggactgggttacgactgcccggctactgaaggcatatttgactacgccgctgcaattggcggcgccaccattaccgcggcccaatgtctcatagatggtatgtgtaaggtggctataaattggagcggtggctggcatcatgccaaaaaagacgaggccagcggattctgctacctgaatgacgctgtactgggcatcctgagattgcggagaaagttcgagcgtatcctctacgttgatctggatctgcaccacggcgacggcgttgaagatgcattctcattcaccagtaaagtgatgaccgtcagtctgcataaattttcacctgggtttttcccgggcacaggggacgtatccgacgtgggcctgggaaagggacggtactacagtgtcaacgttcctattcaggacggcatccaagatgaaaagtattatcagatctgtgaaagcgtgctcaaggaagtgtatcaagctttcaatcctaaagctgtcgtcctgcaacttggagccgatactatcgcgggggatcccatgtgctccttcaacatgactccagttggcatcggaaaatgtctgaagtacatcctgcagtggcaactagctacattgattctgggtggaggtgggtacaatctggctaacactgcgcggtgctggacctacttaacaggagtgatactgggtaaaaccctgtcaagcgagatccctgatcatgagttttttacagcttatggtcccgattatgtattggaaattacaccgagctgtagacctgatagaaatgaaccccatcggatacagcaaatcctcaactatataaagggcaatctgaaacacgtggtctag

SEQ ID NO: 24453 - DNA, 861 bp, synthetic construct
  misc_feature 1..861: note = Description of Artificial Sequence: Synthetic coding sequence
  source 1..861: mol_type = other DNA
atggaggagcccgaggagcccgccgacagcggccagagcctggtgcccgtatatatttactctcctgagtacgtgtctatgtgcgacagcctggccaagatccctaagcgcgcatccatggtccacagcctaatcgaagcctatgcactccataagcaaatgcgagatgaagcctctggcttctgttacctgaacgacgccgtgctaggaatcttgcgcctccgtaggaagtttgaacgcatcctgtatgtagacctggacctgcaccacggcgacggcgtagaagatgcctttagcttcaccagcaaggtgatgacagtgtctttacataaatttagcccgggcttttttccaggaaccggagacgtgtccgacgtggggctcggaaagggcagatactactctgtgaacgtccccattcaggacgggatccaagatgagaagtactaccaaatatgcgaaagcgtgctgaaggaagtgtatcaggctttcaatcctaaggccgtggtccttcagttgggggctgataccattgccggagacccaatgtgcagctttaacatgactcccgtggggatcggtaaatgtctgaaatacattctgcagtggcagctggctaccctgatcctcggcggcggagggtacaatctggctaatacagctcgttgctggacatatctgaccggcgtgattttagggaaaacccttagctctgagattcccgaccatgagtttttcaccgcttacgggcccgactatgtgctcgagattacaccgagctgccgtccggatcgtaatgaaccccaccggatccaacaaatactgaactatatcaaaggcaaccttaaacacgtggtgtag

SEQ ID NO: 24454 - DNA, 549 bp, synthetic construct
  misc_feature 1..549: note = Description of Artificial Sequence: Synthetic coding sequence
  source 1..549: mol_type = other DNA
atgaccgtgagcctgcacaagttcagccccggcttcttccccggcaccggcgatgtgtcagacgtgggccttggcaagggacggtattattcagtgaacgttcccattcaagacgggatccaagatgagaaatattatcagatttgtgaatcggtcctgaaagaggtgtatcaggcgttcaatccaaaagccgttgtactgcagctaggcgccgacaccatagcgggcgatcctatgtgtagctttaacatgactccggttggcatagggaagtgcctaaaatatatacttcagtggcaactggctacactcattctgggcggcggcggatacaacctggctaataccgcaagatgctggacctatcttactggggtgattctcggaaagacattaagctcagaaatcccagaccatgagttctttactgcttacggacctgattacgtgttggaaattacccccagctgccgccccgatagaaacgagccgcaccgcatccaacaaattctgaactacatcaagggtaaccttaaacacgtcgtgtag

SEQ ID NO: 24455 - DNA, 441 bp, synthetic construct
  misc_feature 1..441: note = Description of Artificial Sequence: Synthetic coding sequence
  source 1..441: mol_type = other DNA
atggaggagcccgaggagcccgccgacagcggccagagcctggtgcccgtctacatttacagcccagagtacgtgagtatgtgcgactccttagctaagatcccaaaaagggcttccatggtccatagcctcatcgaggcttatgctctgcataaacagatgcgtattgtgaagcccaaggtggcttctatggaagagatggcgacgttccacacagatgcatacctgcagcatcttcagaaagtgagccaagagggcgacgacgaccacccagactcaatagaatacgggcttggatacgactgtccagcaacagagggtatctttgattatgcggctgctatcggaggggctaccatcaccgccgcacagtgcctgattgacggtatgtgcaaggtggcaattaactggtcggggggatggcatcacgcaaaaaaatag

SEQ ID NO: 24456 - DNA, 477 bp, synthetic construct
  misc_feature 1..477: note = Description of Artificial Sequence: Synthetic coding sequence
  source 1..477: mol_type = other DNA
atggaggagcccgaggagcccgccgacagcggccagagcctggtgcctgtctatatctactcccctgagtacgtgagcatgtgcgactcactggccaaaatcccaaagagggcctctatggtgcattctctgatcgaggcctatgctctccacaaacagatgcgaatcgtgaagccaaaggtagcatcgatggaagagatggctacctttcatacagatgcctacctccaacacctgcagaaggtgagccaggaaggtgacgatgaccatcctgattcaatcgaatacggcttgggttacgattgtccagctacagaagggattttcgattatgctgcagcaatcgggggtgccacaatcactgcagcccagtgtctgatcgacggcatgtgcaaggttgctataaattggtccggaggctggcatcatgccaagaaagaaacatgcgtgtacgtggctctctacaaagctttttag

SEQ ID NO: 24457 - DNA, 420 bp, synthetic construct
  misc_feature 1..420: note = Description of Artificial Sequence: Synthetic coding sequence
  source 1..420: mol_type = other DNA
atggaggagcccgaggagcccgccgacagcggccagagcctggtgcctgtgtacatttatagccccgagtatgtctccatgtgtgacagcctcgccaagatacccaaaagagcctcaatggtgcactcactaatcgaagcctacgccttacacaagcagatgagggacgaagcgtccggtttctgctacctgaatgacgccgtgttgggcattctgcgtctgcgcaggaagtttgagcggattctgtacgtggacttggatttacaccatggcgacggcactggagatgtgtcagacgtgggactcgggaagggcagatactacagcgtgaacgtccctatccaggatgggattcaggatgagaagtattaccaaatttgcgaacgttacgagcctccagcccccaatcctgggctgtag

SEQ ID NO: 24458 - DNA, 771 bp, synthetic construct
  misc_feature 1..771: note = Description of Artificial Sequence: Synthetic coding sequence
  source 1..771: mol_type = other DNA
atggaggagcccgaggagcccgccgacagcggccagagcctggtgcccgtttatatctatagccctgagtacgtgtctatgtgcgactctctcgcaaaaattccaaaacgcgctagtatggtgcacagtctgattgaagcctacgccctgcacaaacagatgcgaatagttaaacccaaagtggcatctatggaggagatggcaaccttccacacagatgcctacctgcaacacctccagaaggtgtcacaggaaggagacgatgatcaccctgactccattgagtacggcctcggatacgactgccccgccacggaggggatattcgattatgccgccgccatcgggggcgccactatcaccgccgctcagtgcctgatcgacgggatgtgcaaggttgccatcaattggtctggtgggtggcatcatgccaagaaagacgaggccagtggattctgttacctgaatgatgcagtgctggggatcctcaggctgagaaggaagttcgagcggatcctctatgtcgacttggacttacaccacggcgacggagtcgaagacgctttcagctttacttcaaaggtcatgactgttagcctgcataaattctcccctgggttcttccctggcaccggcgacgtaagtgatgtcggattgggcaagggacggtattattccgttaacgtgcctatacaggacgggattcaggacgaaaaatattaccagatctgcgaacgttacgagccgccagcccccaacccaggattgtag

SEQ ID NO: 24459 - DNA, 831 bp, synthetic construct
  misc_feature 1..831: note = Description of Artificial Sequence: Synthetic coding sequence
  source 1..831: mol_type = other DNA
atggccggccccgccgccctgagcgccgccgccgccgccgccctggccgccgctttgttgctgctgcggcgggaggaccccggacccggcgccggtcccagtatggccgaaaccgaggcgctgtcaaaactgagggaagattttaggatgcagaacaagtccgtgtttatcttgggcgccagcggagaaacaggcagggtcctcctgaaggagatcttagagcagggccttttctccaaagttacactgatcggtaggaggaagctgacttttgatgaagaggcatataagaacgtaaatcaagaagtcgttgatttcgagaagctcgatgactacgcatctgctttccagggacacgacgtcggcttttgctgtctggggaccactcgagggaaggcaggtgcagaagggtttgttagggtggatcgcgactatgtgctgaaatccgctgagttggccaaggccggcggttgtaagcactttaacctgctgtctagcaagggcgccgataaaagttccaatttcctgtacctccaggtgaaaggagaggttgaagccaaagttgaagagctgaaatttgaccgttactccgtgttccgcccaggcgtgcttctttgtgacagacaggaatccaggccaggagagtggctagtgcgaaaattctttgggtccctccccgattcctgggcatccggccatagtgtcccagtggtgacggttgttagagctatgttaaataatgtggtgaggcctcgtgacaagcagatggagcttctcgaaaacaaggccatccacgatctgggaaaggcacacggatctctcaagccttag

SEQ ID NO: 24460 - DNA, 729 bp, synthetic construct
  misc_feature 1..729: note = Description of Artificial Sequence: Synthetic coding sequence
  source 1..729: mol_type = other DNA
atggccgagaccgaggccctgagcaagctgcgggaggacttccggatgcagaacaaatccgtgttcatccttggggccagtggtgaaacagggagagtgttgctgaaagagatccttgagcaggggctgttctcaaaagtcacattaattggtagaaggaaactaacgtttgatgaggaagcctacaagaatgtgaaccaagaagtagttgatttcgaaaagcttgacgactacgcatccgcttttcaggggcacgatgtcggattttgctgcctaggcacaacccggggcaaggcaggcgctgaaggatttgtgcgcgtagaccgggactatgtcctcaaatctgccgagctcgctaaggccggtggatgtaagcactttaatctactatcaagcaaaggagcagataagagttctaacttcctttatctccaggtcaagggagaagtcgaagccaaagtggaggagctgaaatttgatcgctattccgtgtttaggcccggagtgcttttatgtgaccggcaggagtcccgccccggtgaatggctagtcagaaagttttttggatccctcccggattcttgggcctcaggccacagtgttccggtggtcacagttgtccgcgcgatgctcaacaacgtggtccgccccagggacaagcagatggaacttctcgagaataaggccattcacgacctcggcaaggcccatgggagcttgaagccttag

SEQ ID NO: 24461 - DNA, 729 bp, synthetic construct
  misc_feature 1..729: note = Description of Artificial Sequence: Synthetic coding sequence
  source 1..729: mol_type = other DNA
atggccgagaccgaggccctgagcaagctgcgggaggacttccggatgcagaacaagtccgtattcatccttggtgcctctggcgagaccggcagggtcctcctcaaggagatcttagagcagggattgttctcaaaggtcacccttatcggacggagaaagctgaccttcgatgaagaggcatataagaacgtcaaccaggaggtcgtcgactttgagaaactggacgactacgcctctgcatttcaaggccacgacgtcggattttgttgcctcggaactactaggggcaaagcgggagcagagggcttcgtcagggtggaccgagactacgttcttaagagcgcggagctggcgaaagcaggcggctgcaagcacttcaatctgctttccagcaagggggccgacaaaagtagcaacttcctctacctgcaggtgaaaggcgaagtcgaggcaaaggtggaagagctgaagttcgataggtacagcgtgttccggcctggtgtactactgtgcgataggcaggagtcccgtccaggagagtggctggttcggaaattcttcgggtctctccctgactcttgggcttctggccactctgtccctgtagtcaccgtggttagggccatgctcaataacgtagttaggccacgggataaacagatggagctgcttgagaacaaagccattcacgatttgggtaaggctcatggctccctaaagccttag

SEQ ID NO: 24462 - DNA, 729 bp, synthetic construct
  misc_feature 1..729: note = Description of Artificial Sequence: Synthetic coding sequence
  source 1..729: mol_type = other DNA
atggccgagaccgaggccctgagcaagctgcgggaggacttccggatgcagaacaaatctgttttcattctgggggcctctggggaaaccgggcgagtacttcttaaggagattctggagcaggggctcttttcaaaagtgaccttgatcgggagacgtaagctgacattcgacgaagaagcgtataagaacgttaatcaggaggtggttgatttcgaaaaattggatgactacgccagcgcctttcagggccacgatgttgggttctgctgtctgggaacaacgcggggcaaagctggcgctgagggatttgttcgcgtcgatcgggattacgtgctcaaatccgccgaactcgccaaggcaggaggctgcaagcatttcaatcttctgagctcaaaaggagccgataaaagtagtaactttctttatctacaggtaaaaggggaagtagaagctaaagtcgaagagcttaaatttgaccgttatagtgtgtttaggcctggcgtgctgctctgtgacagacaggaaagtcggccaggggagtggctagtgcggaagttttttggatcacttcctgacagttgggcctctggccacagcgttccggtggtgacagtggtgagggccatgctgaataatgttgtgcgcccgagagacaaacagatggagctgctggaaaataaagctatccatgacctgggtaaggcccacggcagcttaaagccatag

SEQ ID NO: 24463 - DNA, 402 bp, synthetic construct
  misc_feature 1..402: note = Description of Artificial Sequence: Synthetic coding sequence
  source 1..402: mol_type = other DNA
atggccgagaccgaggccctgagcaagctgcgggaggacttccggatgcagaacaagtccgtgtttatcctcggcgcttcaggcgagaccggacgggtcctactcaaggagatcctggagcaaggccttttcagcaaggttaccttgattgggcgccgcaagttgacctttgacgaagaagcctacaagaacgtaaatcaggaagtcgtggacttcgaaaaactggacgactacgcttccgcctttcagggccacgacgtcgggttctgctgcctaggtaccactcggggtaaggcaggtgcggtgagaaaggcctatgccttattccccttctgttggccggtgatttccagaattctgtttctgctgacgttattcctttgtgcatgctgtaacgcctag

SEQ ID NO: 24464 - DNA, 402 bp, synthetic construct
  misc_feature 1..402: note = Description of Artificial Sequence: Synthetic coding sequence
  source 1..402: mol_type = other DNA
atggccgagaccgaggccctgagcaagctgcgggaggacttccggatgcagaacaagtccgtttttattttaggagcgtcaggtgagactggacgcgttttgcttaaggagatcctggagcagggactcttttctaaggtgactttaatcggacgacgaaaactgacctttgatgaagaggcgtacaagaatgttaatcaggaagttgtagatttcgagaagctcgatgactacgcgagcgctttccagggccacgacgttggattctgttgcctagggacaacccgcggcaaagctggcgcagttcgcaaagcctacgccctcttccccttctgctggccagtgatttctcggatcctctttctgttaacattatttctatgtgcctgctgtaatgcgtag

SEQ ID NO: 24465 - DNA, 402 bp, synthetic construct
  misc_feature 1..402: note = Description of Artificial Sequence: Synthetic coding sequence
  source 1..402: mol_type = other DNA
atggccgagaccgaggccctgagcaagctgcgggaggacttccggatgcagaacaagtcagtctttattttaggtgcttcaggcgagactggtagagtgctcctcaaggagatcctggaacaagggctgttctcaaaagtaactctgataggaagacggaaactgacattcgatgaagaggcatacaagaacgtcaaccaggaggtggttgatttcgagaagctggacgactatgcaagcgcgttccagggccacgacgtgggattttgctgcttgggaactacacggggcaaagcaggggccgtgcggaaggcatacgccctattccccttctgctggccagtaatatcccggatcttattcctgcttactttgttcctttgcgcctgttgtaacgcttag

SEQ ID NO: 24466 - DNA, 1080 bp, synthetic construct
  misc_feature 1..1080: note = Description of Artificial Sequence: Synthetic coding sequence
  source 1..1080: mol_type = other DNA
atggccgagcacggcgcccacttcaccgccgccagcgtggccgacgatcagccctcaatttttgaggtggtggcgcaggattcattgatgactgctgtacggcctgccctgcagcatgtcgtgaaagtgttggcagagtctaatcccacacactatggcttcttatggcgatggtttgatgagattttcaccctacttgacctgctcttgcagcaacattatctgagccggacctctgctagcttctctgagaatttttatggactgaaacggatcgttatgggggacacacataaatcacagcgtctcgcttccgcaggtctccctaaacaacagctttggaagtctatcatgttcctcgtattgcttccatacctaaaagtgaagctggaaaagctggtctcctcgcttcgggaggaggacgaatactcaatccaccctccctctagtcggtggaagaggttctatcgcgcatttttggcagcctaccccttcgtaaatatggcctgggaggggtggttcttggtccaacagctgcggtatatcctgggaaaggcccagcatcactcccccctactgcgcctggcgggcgtgcagttaggccggctaacggttcaggacatacaagccctggagcataaaccagccaaggcgtctatgatgcagcagcctgcccggtctgtaagtgaaaaaattaacagcgccctgaagaaagccgtcgggggggtggctctatctctgagcaccggcctgagcgtcggtgtgttcttccttcaatttctcgactggtggtacagtagcgagaaccaggagactatcaaatcgttgacagcgctgcctacccccccccctccagtgcacctagactacaattccgacagccctcttttgcccaaaatgaagactgtttgccccctttgtcgtaaaactagggttaacgataccgtgctcgctacttcgggatatgtgttctgctatagatgcgtcttccactacgtgcgctcccatcaggcctgtccaatcacaggctatcccaccgaagtccaacatctgataaaactgtatagccccgagaattag

SEQ ID NO: 24467 - DNA, 1374 bp, synthetic construct
  misc_feature 1..1374: note = Description of Artificial Sequence: Synthetic coding sequence
  source 1..1374: mol_type = other DNA
atggtgagcaagctgaccagcctgcagcaggagctgctgagcgccctactctcctctggcgtgaccaaggaagtgctagtccaggcactcgaagagttactcccctctccaaactttggggtcaagctggagacccttccgctgagtcctggtagcggagcagaaccagatacaaaacctgtttttcatactctcaccaatgggcacgctaaggggaggttgtccggagacgaaggcagcgaggatggcgacgactatgatacgccacctatcctgaaggagctgcaggccctgaacacagaagaggccgctgaacaaagagcagaagttgataggatgctgagcgaggatccatggagagcagccaagatgattaaaggctatatgcaacagcataacatccctcagagggaagtggtcgacgtgactggcctcaaccaaagtcacttgtcgcagcacttaaacaaaggtacccctatgaaaacacagaaacgggcagccctgtacacttggtacgtccgcaagcagagggagatccttcgccagttctcacagcagagccacggcccaggccagtccgatgacgcatgttcagaacctacaaacaagaagatgcgccggaataggtttaaatggggcccagcctcccaacagattctctaccaagcatatgacagacagaagaatcccagcaaggaagagcgcgaggccctcgtcgaagagtgcaatcgtgccgagtgtttgcagaggggtgtttcgccttcaaaggcccatgggctggggtctaatcttgttacagaagtcagggtttacaattggtttgcaaataggagaaaggaggaggcttttcgccaaaaactggccatggacgcctatagctcgaatcagacacattcccttaaccccctgctatctcacggcagccctcatcaccagccaagttcaagccctcctaacaagctgagtggggtcagatatagccaacaggggaacaatgagatcactagtagcagtactatatcacaccacggaaactctgcgatggtgaccagccagtcggtactgcagcaagtgtctccagcctcacttgacccagggcacaatctcctttctcctgatggcaagatgatctccgtgagcggaggtggcttgccacctgtgagcaccctaaccaatattcactcactgagccatcataatcctcagcaatcccagaatctgatcatgactcccttgagcggggtgatggctatcgcccagatgtccagtacctccttagtgatgcctactcatcacctgctccgcgctcagcaacagggaccttgttttccacatcaccaccccctgggctcttgtcatggaaaggctcagtag

SEQ ID NO: 24468 - DNA, 1338 bp, synthetic construct
  misc_feature 1..1338: note = Description of Artificial Sequence: Synthetic coding sequence
  source 1..1338: mol_type = other DNA
atgctgagcgaggacccctggcgggccgccaagatgatcaagggctacatgcagcagcataacattccccagcgggaagtggtagacgttacagggcttaaccagtcccatctctctcagcacttgaacaaaggaacccccatgaaaacgcaaaaacgggctgcgctgtacacatggtacgtgcggaaacaaagagaaatcctgcgacaatttaatcagacggtgcagagttccggaaacatgaccgataaatcttcccaggatcagcttttgtttttattccctgagttttcacagcagtcacacggccctggacagtccgatgatgcctgtagcgaaccgacaaacaaaaagatgcgtagaaacaggtttaaatggggtcctgcgtcgcagcagatcctctaccaggcgtacgatcgacagaagaatccgagtaaggaagagagagaggctcttgtggaagagtgcaatagggccgagtgtctccagagaggtgtatccccttcgaaggctcatggtctcggatccaacctagtcacagaagtgcgggtgtacaactggtttgccaaccggcggaaggaagaagccttccggcagaaactagccatggacgcctattccagtaatcagacccattcgctaaaccccctcttaagccacggcagccctcatcaccagccttccagcagtccacctaataagctctcaggtgtcagatattcgcaacaaggcaacaacgagatcacttctagttctacgatctctcatcacggaaattctgccatggtgacctcacagagcgtgctccaacaagtgagccccgcatccctggacccgggtcataatctcctgagccctgatgggaagatgatcagtgtgtccggtgggggcttacctccagtgagcacccttactaacatccacagtctgtcacatcacaaccctcagcaatctcaaaatctgattatgacacctctcagcggagtgatggccattgcgcagtccctgaatacgtcacaggcccagagcgtgccagtgatcaattctgtcgcggggtccctggcagctctacagcccgtccagtttagccagcagctgcactcaccgcaccagcagcccttgatgcagcagtcacctggaagtcatatggcccagcaaccgtttatggctgctgtcacacaacttcaaaactcacatatgtacgcacacaagcaggagcctccccagtatagtcatacaagcagattcccttcggctatggtcgtaactgacactagtagtatctcaactctcaccaacatgagctcgtctaagcagtgtcctttgcaggcctggtag

SEQ ID NO: 24469 - DNA, 1278 bp, synthetic construct
  misc_feature 1..1278: note = Description of Artificial Sequence: Synthetic coding sequence
  source 1..1278: mol_type = other DNA
atggtgagcaagctgaccagcctgcagcaggagctgctgagcgccttgctctcatcaggggtgaccaaagaggtcctcgtgcaggcccttgaggaactcctcccaagccctaatttcggggttaaactggaaaccctacctcttagccccggttccggagctgagcccgacactaagcccgtgttccacacactgactaacggccatgccaaggggagattatccggggacgaagggtcggaagacggggacgactacgatactcctcctatcctgaaggagcttcaggctctgaatactgaggaagcagccgagcagagggcagaggtggatcgaatgctgagtgaagacccttggagggccgctaagatgataaaagggtatatgcaacagcataacatccctcagcgggaagtcgtcgacgtaaccggcttaaaccagtcccatctgagtcagcatttgaataaaggtacacctatgaagactcagaagcgcgccgccctgtacacgtggtacgtgaggaagcagagagagatcttacgccagttcaatcaaaccgtccaatcgagcgggaacatgacagacaagtccagccaggaccaactcctgttcttgtttccagagttcagccagcagtcgcatgggcctggccagtccgacgacgcctgctcggaacctacgaataagaagatgcgtcgcaatcggtttaagtgggggcccgcctcacagcagattctgtatcaggcctatgatagacagaaaaatccttcgaaggaagaaagggaggctctggtagaggaatgtaacagggctgagtgcttacagcgcggtgtgagcccgtcaaaagcacacggcctcggatcaaacctggtgacagaggtcagggtctacaactggttcgccaacagacggaaggaagaggcctttagacagaagctggctatggatgcctactcatccaatcagacccattcccttaaccccctcctcagccacggcagcccgcatcaccagccaagctcctcacctcccaacaaactgtcaggcgtccggtatagccagcagggtaataacgaaattacttcatccagtacgatctcccaccacgggaacagtgcaatggtgacttcacaatccgtcctgcagcaggtctcacccgcttctcttgacccagggcataatttgctatcgcccgatggaaagatggacttgagcctgcgaaggcggtttgcaccttcccagcacttagacgagtaccctcaacctctgcccccctag

SEQ ID NO: 24470 - DNA, 1596 bp, synthetic construct
  misc_feature 1..1596: note = Description of Artificial Sequence: Synthetic coding sequence
  source 1..1596: mol_type = other DNA
atggtgagcaagctgaccagcctgcagcaggagctgctgagcgccttgctctcttccggggtgacaaaggaggtgttggttcaagctctggaggaactactgccatcccccaacttcggggtgaaactcgagaccctgcccttatctcctggatctggggccgagcccgataccaaaccggtcttccacactctgacaaatgggcatgcaaaggggagactgtcaggagatgagggatcagaagacggagatgattatgacacccccccaatcctgaaggagctgcaggccctgaacaccgaagaggctgccgaacaacgggccgaagtcgaccgcatgctgtcagaggacccgtggcgggctgccaaaatgatcaagggctatatgcagcaacacaatatacctcaacgagaggtagtcgacgtgaccggtttgaatcagagccatctcagccagcacctgaataaaggaacccctatgaaaacacagaagcgagccgcactatatacctggtatgtgcggaaacaaagagagatactgcgccagttttcacagcagagccacggccctggacaatctgatgacgcctgcagcgagcctacgaacaagaaaatgagaaggaaccgtttcaaatgggggccggctagccagcagatcttataccaagcgtacgaccggcagaagaatccaagcaaggaggagagggaagctcttgtggaagaatgcaaccgcgcagagtgccttcaacggggagtctcgccttcaaaggcccacggactgggatccaacctcgtcactgaggtgcgggtttataattggtttgcgaatcgacgcaaagaagaagcattccggcaaaaactggctatggatgcatactcaagtaatcagacccactcccttaatccactgttgagtcacggatcgccacaccaccagccgtccagcagcccaccaaacaagctgtccggcgtgcgctactcccagcagggtaacaacgaaatcacatcttccagcactatctctcaccatggaaactctgctatggtgactagccaaagcgtgctacagcaagtgtcaccagcttcactggacccgggtcataacctgttgagccctgacgggaagatgatatccgtttcaggcggcggtctgccaccagtgagcaccctgaccaacatccactcactatcccatcacaatccacagcagtcacagaatctgataatgacaccactgtcgggagtcatggcgatcgctcagagcctgaatacctcacaggcccaatcggtgccggtgatcaactcagtggctggttccctggccgccttgcagccagtgcagttttctcaacagctgcactcgccccatcagcagcctctgatgcagcaaagccctggatcacacatggcgcaacaacctttcatggcagcggtcacccagctgcagaacagccatatgtacgcccataagcaggaacctccccagtactctcatacttcccgcttcccttccgccatggttgtcacggatacatcatctatctcaacccttaccaatatgagcagcagtaagcagtgcccccttcaggcatggtag

SEQ ID NO: 24471 - DNA, 843 bp, synthetic construct
  misc_feature 1..843: note = Description of Artificial Sequence: Synthetic coding sequence
  source 1..843: mol_type = other DNA
atgaagttccgggccaagatcgtggacggcgcctgcctgaaccacttcactagaatcagcaatatgattgccaagctggccaagacatgtactcttagaatcagccctgataagcttaactttattctgtgtgataaacttgccaatggcggggtaagtatgtggtgcgaattggagcaggaaaacttctttaatgagttccagatggagggtgtgtcagccgaaaataacgagatctatctggaactgacatccgaaaacttatctagagctctgaagacagcacaaaatgccagagccctgaagataaaactgacgaacaaacactttccttgcctgacagtcagcgtcgaactcctttccatgtctagttccagccgaatagtgacgcacgacataccaatcaaggtgatcccacggaaactatggaaggatctacaagagcccgtagtgccagaccccgatgtctctatttatctaccggttctcaagacgatgaagagcgtggttgagaaaatgaaaaacatctccaatcacttagtgattgaagccaatttggacggtgagctaaatctgaaaattgaaaccgagcttgtgtgtgtgactactcattttaaggatttaggtaacccacctctagcgagcgagtccacacacgaagatagaaacgtagagcatatggctgaagtacacatagatatcaggaagttgctccaattccttgcaggccaacaggtgaatcctaccaaggctctgtgcaacattgtcaacaataaaatggtccatttcgacctcctacacgaggacgtatctttacagtattttattcctgcgttgagctag

SEQ ID NO: 24472 - DNA, 780 bp, synthetic construct
  misc_feature 1..780: note = Description of Artificial Sequence: Synthetic coding sequence
  source 1..780: mol_type = other DNA
atgatcgccaagctggccaagacctgcaccctgcggatcagccccgataaactcaatttcatcctttgtgataaactagccaatgggggtgtgtccatgtggtgcgaattggagcaagaaaatttctttaacgagtttcagatggagggcgtgtccgccgaaaacaacgaaatttatctggaactgacctctgagaatttaagccgagcgctgaagacagctcagaatgcaagggctctgaagatcaagctcacaaacaaacatttcccatgcttgactgttagcgtcgagctgcttagtatgagctcctctagtaggatcgtaacacatgatatcccaatcaaggtaattcctcgcaaattatggaaggacctgcaggagccagttgtgcctgatcccgacgtgtccatttatctacctgtgctaaaaaccatgaagtcagtggtagagaagatgaagaatatttcgaaccacctggtgattgaagcaaacctcgacggcgagctcaacttgaagatcgaaactgagttggtatgtgtgaccacgcactttaaggatctcggtaatcctccattagcctcagagtctacacacgaagaccggaatgtagagcacatggccgaggtgcacattgacattcgcaaactcctgcagtttttagctgggcagcaggtgaaccctaccaaggctctatgcaacattgttaataacaagatggtgcacttcgacttactccacgaagacgttagcttacagtacttcattcccgcactaagctag

SEQ ID NO: 24473 - DNA, 843 bp, synthetic construct
  misc_feature 1..843: note = Description of Artificial Sequence: Synthetic coding sequence
  source 1..843: mol_type = other DNA
atgaagttccgggccaagatcgtggacggcgcctgcctgaaccactttactaggatctctaatatgatcgccaagcttgcaaagacctgtaccctaagaatcagcccagacaagctcaattttattctgtgcgataagctagctaacgggggggtcagtatgtggtgtgaacttgagcaggagaactttttcaatgaatttcagatggagggagtgtctgctgaaaacaacgagatctacttggagctgacgtcagaaaacctgtccagggccctgaaaactgcacagaacgcgcgcgctttgaaaatcaagttaacaaataaacactttccctgtctgacagtatcagtggaacttcttagtatgagctcaagttctcggatcgtaactcacgatattccgatcaaggtgattccccggaagctgtggaaggatctacaggagcccgtcgtccccgacccagatgtttctatctacctgccagtcttgaaaacaatgaaatcagttgttgagaagatgaaaaacattagtaaccacttagttatcgaggcaaacctggacggcgaattaaatctgaagatcgagacagaactggtgtgtgttactactcactttaaggacctcgggaatccaccactggcctctgagtccacacacgaggaccgaaatgtagagcatatggctgaggttcatatcgacattcgcaaactcctgcagttcctggctggacagcaggtaaatcctaccaaggccctctgcaatatcgttaataataagatggtgcacttcgacctcctgcatgaggatgtaagcctgcagtatttcattcctgcactgagctag

SEQ ID NO: 24474 - DNA, 780 bp, synthetic construct
  misc_feature 1..780: note = Description of Artificial Sequence: Synthetic coding sequence
  source 1..780: mol_type = other DNA
atgatcgccaagctggccaagacctgcaccctgcggatcagccccgacaaactcaactttatcctgtgcgacaagctcgctaatggcggggtgtcaatgtggtgtgaactggaacaggagaactttttcaacgaattccagatggagggcgtttcggccgagaataatgagatttatctggagctaacttccgagaacctgtctagagcacttaagactgcgcagaacgcccgtgctcttaagattaaactgacaaacaagcacttcccatgtctgacagtctctgtggaactcttgagtatgtccagctcctcgcgcatcgtgacccacgacatcccaattaaagtaatacctcggaagctgtggaaagatttgcaggaaccagtagtcccggaccctgacgtgtccatttatctccccgtgctgaagaccatgaaaagcgtggtggaaaagatgaagaatatatcaaaccatctcgtaattgaagccaatctggatggagaattaaacctcaagatcgaaacggaactcgtgtgcgtgaccacccactttaaagaccttggtaatcccccactggcctccgagtcgacccacgaagataggaatgtggaacacatggcagaagtccacatcgacatccgcaagctgcttcaattcctggccggtcaacaagtaaatcccacaaaggctttgtgtaatattgtaaataataaaatggtgcacttcgacttactccatgaggatgtgtctctgcagtactttatcccagctctgagctag

SEQ ID NO: 24475 - DNA, 2130 bp, synthetic construct
  misc_feature 1..2130: note = Description of Artificial Sequence: Synthetic coding sequence
  source 1..2130: mol_type = other DNA
atgagcttccccaaggcccccctgaagcggttcaacgaccccagcgggtgtgccccttcccccggagcttacgacgtgaagactttggaagtcctgaagggcccagtgtcctttcagaagagtcagcggtttaagcagcaaaaggagtctaagcagaacctcaatgtagataaggataccacccttccagcttccgcaagaaaggtgaaaagtagcgaatccaaaatccgcgtgctgctgcaggagagaggtgcccaagaccgaaggatacaggatttggaaaccgagttggaaaagatggaggcaaggcttaacgccgccctcagggaaaaaacgtcactctctgccaacaatgcaacattggaaaagcagctgatcgagcttacccgcactaatgagctgctgaaatcaaagttcagcgagaatggcaaccagaaaaatctgaggatcctctcacttgagctgatgaagctgcgaaacaagagggagactaaaatgcgtggcatgatggccaagcaggagggcatggagatgaagttgcaagttacccagcgctccctagaggaaagccaaggtaagatcgcacaactggagggaaaattagtctccattgaaaaggaaaagattgatgagaagtcagagacggaaaagctgctagagtatatcgaggaaatcagctgtgcctctgatcaggtcgagaaatacaagctcgacatcgcacaactggaggaaaacctcaaagagaagaacgatgaaattctctctttgaaacagtccctggaggagaacattgtgatcttgagtaagcaagtcgaagatctgaatgtgaaatgccagctgctggagaaggagaaagaagaccatgtcaatagaaaccgggaacataacgaaaatctgaatgcagagatgcaaaacctgaagcaaaaatttattttagagcagcaggaacgggaaaaactccagcagaaggagcttcagatcgacagtcttctgcaacaggaaaaagagcttagttccagtctgcaccagaagctttgtagtttccaagaggagatggttaaggaaaagaatctcttcgaagaggaactcaagcaaactctggacgaactggataagctgcaacagaaggaggagcaagctgagagactcgtgaagcagctggaagaggaggctaagtctcgggctgaagagcttaaactgctggaggaaaagcttaaggggaaggaggctgaattggagaagtcttcagccgcacatacacaagcaactctgcttctccaggaaaagtacgactcaatggttcagtcactggaggatgtcaccgcacaattcgaatcttacaaggcgctgacagccagtgagattgaagatcttaagctggagaacagtagcttgcaagagaaggctgctaaggccggcaagaatgccgaggacgttcagcaccagatcttggccacagagtccagcaatcaggagtatgtaagaatgttgctggacctgcagacgaaatccgcccttaaggaaacagagattaaggagatcacggtgtccttcttgcagaagatcacggacttacagaaccaattaaagcaacaagaggaggattttaggaaacaactggaagatgaggaaggtcgaaaggccgagaaagaaaacaccacagccgagctgacggaggagattaacaaatggcgtttgctttatgaggagctttacaacaagaccaaaccttttcaactgcaacttgacgccttcgaggtagaaaagcaggctctcctaaacgaacacggggcagcccaggagcagttaaacaaaatacgcgattcctatgccaaactcctgggtcatcagaacctcaaacagaagattaaacacgtggtaaaattaaaggacgagaacagccaacttaagtctgaggtgtccaagctgcggtgtcagctggccaagaagaagcaatccgaaactaagttacaggaggagcttaataaggtgctcggaatcaaacacttcgatcctagcaaggccttccaccatgagtccaaagaaaacttcgcgcttaaaacacctcttaaggagggcaacaccaactgctaccgagcgccaatggaatgccaggagtcctggaaatag

SEQ ID NO: 24476 - DNA, 2175 bp, synthetic construct
  misc_feature 1..2175: note = Description of Artificial Sequence: Synthetic coding sequence
  source 1..2175: mol_type = other DNA
atgagcttccccaaggcccccctgaagcggttcaacgaccccagcggttgtgccccaagtcctggtgcatatgatgtgaaaacccttgaggtgcttaaagggcccgtctcctttcagaagagccagagattcaagcagcagaaagaatcaaaacagaatcttaacgtggataaagacaccaccttacctgctagtgcgcggaaggtcaagagctccgaaagcaaagaaagccagaagaatgataaagacctcaagatcctggagaaagagatcagagtgcttttgcaggagcggggggcccaggatcgccggatacaggatcttgagaccgaactcgagaagatggaagctaggctgaatgccgccttaagggaaaagacatccctctcagcgaacaacgccacactggaaaagcagctcattgaactgacaagaaccaatgagttactgaagtctaagttcagtgagaacgggaaccagaaaaacttgcggatcctgtccctggagctcatgaagttgaggaacaagagggagacaaaaatgcgagggatgatggcaaaacaggagggaatggagatgaagttgcaggtgacccagcgcagtctcgaggaaagtcaaggcaaaatcgcccagttagaggggaaacttgtgtctatagaaaaagaaaagattgacgaaaagtccgagactgagaagctgctcgagtacattgaggaaatatcctgcgctagtgatcaggtagaaaaatataagctggacatcgcccagctggaggagaatttgaaggaaaagaatgatgagatactgagtctgaaacagagtttagaagaaaatatcgtcattctgtcaaaacaggtcgaggaccttaatgtgaaatgccaactgctggaaaaggagaaagaggaccatgtgaaccgcaaccgcgagcacaatgagaatctcaatgctgagatgcaaaatctgaagcaaaaattcatcctagagcagcaggagagggagaagctccagcaaaaggaacttcagattgactccttgctgcagcaggaaaaggaactcagctcatccctacatcagaagctctgcagttttcaggaagaaatggtaaaggaaaagaacctctttgaagaagagctgaaacagacacttgatgagcttgataaactacagcagaaggaggagcaagcagagcgcctggtaaagcaactggaggaagaagcgaaatcccgtgcggaagaacttaagctgctggaagagaagctaaagggaaaggaagctgagctggagaaatcaagcgccgctcacacacaggccacgttgctactgcaggagaagtatgatagcatggtccaatccttagaggacgtgaccgcccagttcgagagctataaggctttgaccgcctctgagatcgaagatctgaaactggagaattcgagccttcaggagaaggcagccaaagcaggcaagaatgctgaagatgttcaacaccagattcttgctactgaatcctctaaccaggaatatgtgagaatgctcctggatctgcagactaagtcagccctcaaggaaacagaaattaaagagataactgtttccttcctccagaaaatcaccgacctgcagaatcagcttaagcagcaagaagaggactttcgcaaacagcttgaagacgaggagggacgcaaggcggaaaaggagaacacaacagccgaattgacggaggagataaacaaatggcgtttgttgtacgaggagttgtacaataagacgaaaccattccagctgcagctggatgcgttcgaggtcgagaagcaggccctgttaaatgaacatggagcggctcaggaacagctgaacaagattagagattcatacgctaaactgctggggcatcagaatctcaagcagaagataaaacatgtcgtcaagttgaaggacgaaaactcgcagctgaaatccgaagtgagcaagctgaggtgtcagctggccaagaaaaaacagtctgaaaccaaattacaggaggagctaaacaaggtgctcggaattaagcacttcgaccctagtaaggcttttcaccatgaaagcaaagaaaacttcgcactgaaaacaccacttaaggaaggtaacaccaattgctatcgagcccccatggagtgccaggagtcatggaagtag

SEQ ID NO: 24477 - DNA, 2178 bp, synthetic construct
  misc_feature 1..2178: note = Description of Artificial Sequence: Synthetic coding sequence
  source 1..2178: mol_type = other DNA
atgagcttccccaaggcccccctgaagcggttcaacgaccccagcggctgcgcaccatctccaggggcctatgacgtgaaaacactggaggtcctcaagggccctgtgtcgtttcaaaaatcccagagattcaaacagcagaaggaatccaagcagaaccttaacgtggataaagacacaaccttaccagcgagcgcccgtaaggtcaagagcagtgagagcaagaaggagagccaaaaaaacgataaggacttgaaaatcctggaaaaggaaatccgggtcctgctccaggagcgcggcgctcaagaccgaagaattcaggacctggagacggaactggaaaaaatggaggctcgcctgaatgccgccctgagggagaaaacttccctttccgccaacaacgccacactcgagaaacagctcatcgagctgaccaggacgaatgagctgctgaaaagtaaatttagcgagaacgggaaccagaagaatcttcgcatactctctctcgagcttatgaaactccgcaataaaagggaaacaaaaatgaggggcatgatggctaaacaggagggcatggagatgaagctgcaggtgacacagcgctccctcgaagagtcacagggtaagatcgcacagcttgaaggcaagttggtgtctattgagaaggagaagatcgacgaaaaatcggagactgaaaagttgctcgagtacattgaagagatatcttgcgcttctgaccaggtggaaaagtacaagcttgacatcgcgcaacttgaggagaatttgaaggagaagaatgacgaaatcctcagtttaaagcagtccctcgaagagaatatcgtaatcttgagcaagcaggtagaagacctgaatgtcaaatgccaacttctggagaaagagaaggaggaccatgtgaacaggaaccgcgaacacaacgaaaacctgaacgcggagatgcagaatctgaagcaaaagttcatcctggagcagcaggagagggaaaaactgcagcaaaaggaactacagatcgacagcctgctgcagcaggagaaggaactctcctcctccttgcatcagaagctgtgtagcttccaagaggagatggtgaaggagaagaacctttttgaggaggagctgaaacaaacgctggacgaactggataaactgcagcaaaaagaggagcaggccgagcgcctggttaagcaactggaggaggaggcaaaatcgcgggctgaggagctgaagctgctagaggaaaaactgaagggtaaagaggcagaattagaaaagagcagcgccgcccatacacaggctactcttctcctgcaagagaagtacgattccatggtacagtcactggaggatgtgacagcacagttcgagagctacaaagccttaaccgcatctgagatcgaagatctcaaactggagaattccagcttgcaggagaaagcagccaaagctggaaaaaatgcagaggacgtacagcaccaaattttagccacggaatcatctaaccaggaatatgtgagaatgctgctggacctgcagactaaatccgccttgaaagagactgagatcaaggaaatcacagtgagcttcctgcagaagatcaccgaccttcagaatcagctcaagcaacaggaagaagacttcaggaagcagctcgaggatgaggaaggacgcaaagcagagaaagagaacacaactgctgagctgaccgaagaaatcaataagtggcgattattatatgaggagctgtataacaagacaaaaccctttcagctccagctcgacgccttcgaggtggaaaagcaggccctgctgaatgagcacggcgccgcgcaggagcagcttaacaagatccgggattcatatgccaaactgctcggccatcagaacctcaaacagaagattaagcatgtggtcaaactgaaggatgagaattcacagctaaagagcgaggtgagcaaactgcggtgccagctggcaaagaagaaacaatctgagacaaagctacaggaggaattgaataaggttcttggcatcaagcacttcgatccgagcaaggcttttcaccacgagtctaaggaaaacttcgccctgaaaacgcccttgaaggaagggaatactaattgctatcgggctcctatggaatgtcaggaaagttggaagtag

SEQ ID NO: 24478 - DNA, 2106 bp, synthetic construct
  misc_feature 1..2106: note = Description of Artificial Sequence: Synthetic coding sequence
  source 1..2106: mol_type = other DNA
atgagcttccccaaggcccccctgaagcggttcaacgaccccagcgggtgtgctcctagtcccggcgcctatgacgtgaaaacgttagaggttttaaagggacccgtatccttccagaagtcccagcgattcaagcagcaaaaagaatctaagcagaatctcaatgtggataaggataccaccctgcctgcaagcgcccgcaaggttaagagcagtgaatccaaaaaggaaagccagaaaaatgacaaggacctcaagatactcgaaaaggagatacgcgtgctgctccaggaacgtggagcacaggacaggaggatccaggatctggaaacagaactggagaaacagcttattgagctgactaggacgaatgaactgctgaagagcaaattttccgagaacgggaatcaaaagaatctgaggatcttaagcctggaactgatgaaactcagaaataaacgggaaactaagatgcgagggatgatggctaagcaggagggtatggagatgaaactccaggtgacccagcgatcgttggaagagagtcaaggcaagattgcacagctggaaggtaaactggtctctattgagaaagagaagatcgatgaaaaatctgagacagagaagctgttagagtatatcgaagaaatctcttgtgcctctgaccaagtggagaagtacaagttggacattgctcagctggaggagaatctcaaagaaaagaatgatgagatactgtccctgaagcagagtttagaggagaatatagtgatactgagcaaacaagttgaggatcttaatgtcaaatgccagctgcttgaaaaggaaaaggaggaccatgtgaatcgaaaccgggaacacaatgaaaacctcaacgccgagatgcaaaacttgaagcagaagtttatcctcgagcaacaggagcgagagaagctgcaacagaaagaactccagattgattcactgctgcagcaggagaaagagctcagctcctctctccaccagaagctgtgctcctttcaggaggagatggtgaaggagaagaatctcttcgaagaggagctgaagcagaccttggatgagctagacaagctccaacagaaagaggagcaggcagagcgcctcgtgaagcaactagaagaggaagccaaaagcagggctgaagagctgaagctacttgaggaaaagttgaaaggaaaagaggcagagctggagaagtcttccgccgcacatacgcaggccaccctgctccttcaggagaagtacgattctatggtccagtccctggaagatgttaccgcacaattcgaaagctacaaagccctgactgcttccgaaattgaagatctgaagctggagaactcttctttgcaggagaaagctgcaaaagctggcaaaaacgcagaagacgtgcagcaccagatccttgccacagagtcctccaatcaagagtatgtgaggatgctgttggacctccagactaaaagcgcactgaaagagacggaaatcaaggaaatcacagtgtcctttctgcagaaaataaccgacctccagaatcaattaaagcaacaggaggaagacttcagaaaacagttggaagatgaagaaggcaggaaggcggagaaggagaacacaactgcggaactaaccgaggaaataaataagtggcgcctcctctacgaagaactgtataataagaccaaaccttttcagcttcagctagacgcatttgaagtggagaaacaggctctgctcaacgaacacggtgccgcccaggagcagttaaataagattagggattcctatgcaaagctgcttggccatcagaacctcaagcagaaaatcaaacatgtggttaaactgaaagatgaaaacagccagctgaaaagcgaagttagcaagttaaggtgccagctggccaaaaaaaagcagtccgaaactaagctccaggaagaactgaataaagtccttgggatcaaacactttgacccatcaaaagcatttcatcacgagtcaaaggaaaatttcgcactgaaaaccccactaaaagaaggcaatactaattgttatagagctcctatggagtgtcaggaaagttggaaatag

SEQ ID NO: 24479 - DNA, 1917 bp, synthetic construct
  misc_feature 1..1917: note = Description of Artificial Sequence: Synthetic coding sequence
  source 1..1917: mol_type = other DNA
atgaccctgctgatccgggtgctgctgcaggagcggggcgcccaggacagaaggattcaggacctggagactgagctggagaaaatggaagccagactcaacgccgccctcagggagaagacctctctgagcgctaataacgctacgctagagaagcaattgatcgagttgacccgtacgaacgagctcctgaaatccaagttcagtgaaaatggcaaccagaagaatcttcggatattgtcccttgagcttatgaagcttcggaataagcgggagaccaaaatgcgcggcatgatggccaagcaggaggggatggaaatgaaactacaggtgacccagcggtcactcgaagagtcacagggcaagattgctcagctcgaaggcaagctcgtatcgatcgaaaaggaaaaaatcgacgaaaagtcggaaacagaaaaactcctcgagtacatcgaggagattagttgtgcatccgaccaagtagaaaagtataagctcgatatcgcccagctggaggaaaatctgaaagaaaagaacgacgagattctctccctgaagcagagcttagaagagaatatcgtgatcctgagtaaacaagtcgaagacttgaacgtcaaatgccaactattggagaaggagaaagaggatcacgttaacagaaatcgagagcataacgagaacctgaatgccgaaatgcaaaatctcaaacagaagttcatcttggaacagcaggagagagagaagctccaacagaaggagcttcaaatcgacagtctactgcaacaggaaaaggagctgagttcgagccttcaccagaaactgtgctcctttcaagaggagatggttaaggaaaaaaacctctttgaggaagagttgaaacagactctcgacgagctagacaaactccagcagaaagaggaacaggcagagcgcctggtgaagcagctcgaagaggaggccaaaagcagagctgaggagcttaagctgcttgaagagaagttaaagggaaaagaggccgagcttgaaaaaagctccgccgcacatacgcaggccaccctgttactgcaggaaaaatacgactccatggttcaatcacttgaggatgtgaccgcccagtttgagtcttacaaagccctgaccgcaagcgaaatcgaagatctaaagcttgagaacagttcactgcaagagaaggctgccaaggcgggcaagaatgccgaagacgtgcagcaccaaatattggccacggagtcttctaaccaagaatacgtgaggatgttgctcgatttgcagaccaagtcagcattgaaggagactgagattaaggagattaccgtgtcgttcctgcagaaaattaccgacctgcagaatcagttgaagcagcaggaggaggacttcagaaagcagctcgaagatgaggaaggaagaaaagctgagaaagaaaacacaaccgcagagttgaccgaggagattaataagtggcggctgctgtatgaagagctatataacaagactaaacctttccagctgcagctggacgcctttgaggtcgagaagcaggctctcctcaatgaacacggcgcggctcaggagcagcttaacaaaatccgcgactcctacgccaagctgctggggcatcaaaacctcaagcagaagatcaagcacgtcgtcaagctcaaggatgaaaatagccagctgaagtccgaggtgagcaagctcagatgccagctcgctaaaaaaaagcaaagcgaaacaaaattgcaggaggagctaaacaaggtactcggcattaagcacttcgacccttctaaggcgttccaccacgagtctaaagagaactttgctctgaagactcccctgaaggaaggcaacacgaattgttaccgcgcgccaatggaatgccaggagtcttggaagtag

SEQ ID NO: 24480 - DNA, 996 bp, synthetic construct
  misc_feature 1..996: note = Description of Artificial Sequence: Synthetic coding sequence
  source 1..996: mol_type = other DNA
atgagcttccccaaggcccccctgaagcggttcaacgaccccagcggatgtgcacctagtcctggagcctatgacgtgaaaacactcgaagtcctgaagggcccggtgagttttcagaagagtcagcggttcaagcaacagaaagaatctaagcagaacttaaacgtcgataaagacacaacactgccagcttcagccagaaaagtgaaatcatctgaatcaaagattagagtactgttacaggagaggggggcccaggatcggcgaatacaagatctggaaaccgagctagagaaaatggaagccaggctaaacgccgctctgcgagagaagacatcgctgtccgccaacaatgccacacttgagaaacaactgattgagctcacccggacaaacgagctgttgaagagcaagttctcagaaaacgggaaccagaaaaacctccggatcctcagtctagaactcatgaagctccgcaataaaagggaaacaaagatgagggggatgatggccaagcaggaaggtatggaaatgaaacttcaggttacacagcggtccctagaagagtctcagggcaaaatcgctcagctcgaaggcaagctggtgtccattgagaaggagaagattgacgagaagtcagagaccgagaagctgctggagtacattgaggagatctcgtgcgcaagtgaccaggttgaaaagtataagctcgacatagcacagctggaagagaacctgaaggagaaaaatgatgagatcctgagcctgaagcagagcttggaggaaaacattgtgattctgtcaaagcaggttgaggatctcaacgttaaatgtcagttattggaaaaggaaaaggaagatcatgttaaccgtaatagagaacataatgagaatttaaatgcagagatgcagaacttgaaacagaaatttatcctcgaacagcaggagagagaaaaactgcagcagaaaaaaaagcaaatgaggagaaaaaagtag

SEQ ID NO: 24481 - DNA, 537 bp, synthetic construct
  misc_feature 1..537: note = Description of Artificial Sequence: Synthetic coding sequence
  source 1..537: mol_type = other DNA
atgcacgtgaacggcaaggtggccctggtgaccggcgccgcccagggaataggcagagcctttgctgaagccttgctgctgaagggagcaaaggttgcgctagtggactggaatctggaggctggagtgcaatgcaaagccgctttggacgaacagtttgaacctcagaagaccctcttcattcaatgcgacgtggctgatcaacaacagctgcgggacacctttaggaaggtcgttgaccactttggacgactggacattctggtcaacaacgcaggggtcaacaacgagaaaaattgggagaaaacccttcagataaatctcgtgtccgttatctccggcacgtacctaggtctagactatatgtccaagcaaaatggcggagaaggcggcatcatcataaatatgtcctctttggcaggcctgatgcccgtggcacaacagcctgtttactgtgcttctaaacacggcatcgtgggtttcacgcgtagcgctgctccgacaattgattgccaatggattgataacacgcactag

SEQ ID NO: 24482 - DNA, 801 bp, synthetic construct
  misc_feature 1..801: note = Description of Artificial Sequence: Synthetic coding sequence
  source 1..801: mol_type = other DNA
atgcacgtgaacggcaaggtggccctggtgaccggcgccgcccagggaattggtcgggcgtttgcagaggcactgttgctgaaaggtgccaaggtggctcttgtggactggaacctggaggccggcgttcagtgcaaggcagccctagatgagcagtttgaaccccagaagacattatttattcagtgcgacgtcgccgaccagcagcagctgcgggatactttccgcaaggtggtagaccactttggcagactggacattttagtcaataacgccggagtaaataacgaaaagaactgggaaaagaccctccagataaacctcgtaagcgttatttccggcacatacttgggcctcgattatatgagtaagcagaacggcggtgaggggggcatcatcataaatatgtcatctttagctggacttatgcctgtggcacagcagccagtgtactgcgcctctaagcacggcatcgtaggtttcaccaggagcgctgcactggctgcaaatctgatgaacagcggggttcgcctgaatgctatctgtcctggctttgtaaatacagctattttagagagtatagagaaggaagagaatatgggccaatacatcgaatataaagatcatatcaaagacatgataaaatactacgggatcctggatccacccctgatcgcgaacggcctaatcactctcatcgaagatgacgctctgaacggggccattatgaagataactacctcaaaagggattcactttcaggactatgatactacaccttttcaggctaaaacccaatag

SEQ ID NO: 24483 - DNA, 438 bp, synthetic construct
  misc_feature 1..438: note = Description of Artificial Sequence: Synthetic coding sequence
  source 1..438: mol_type = other DNA
atgagcaagcagaacggcggcgagggcggcatcatcatcaacatgtcaagcctcgcggggcttatgcctgtggctcaacaacccgtctattgcgcgtccaagcatggaatcgtcggattcacccgatctgcagcgctcgccgccaacctcatgaactctggcgtgaggttgaacgccatctgcccgggatttgtaaacaccgcgatcctggaatcgattgagaaagaagaaaacatgggccagtacatcgaatacaaggatcatattaaggacatgatcaagtattacggaatactagatccacctttaatagcgaatggcctgattaccctgattgaagatgatgccctcaatggggccatcatgaaaatcactacttctaagggcattcactttcaagattacgataccacaccgtttcaggctaagacgcagtag

SEQ ID NO: 24484 - DNA, 438 bp, synthetic construct
  misc_feature 1..438: note = Description of Artificial Sequence: Synthetic coding sequence
  source 1..438: mol_type = other DNA
atgagcaagcagaacggcggcgagggcggcatcatcatcaacatgtcttctttggcaggtttaatgccggtggctcagcagccagtctattgtgccagcaagcatggcattgtgggctttacacggagtgcagcactcgctgccaacctcatgaattccggagttcggctgaatgccatatgtccaggattcgtgaacaccgctatcctggaatccattgagaaggaggagaatatgggacagtacatcgagtacaaggatcacatcaaggacatgattaagtattatgggatcctggatccaccgttgatcgcgaacggcctgattacacttatcgaggacgatgctcttaatggagctatcatgaagattacaacaagcaaggggattcacttccaagactatgacacgacaccgtttcaggccaagacccagtag

SEQ ID NO: 24485 - DNA, 432 bp, synthetic construct
  misc_feature 1..432: note = Description of Artificial Sequence: Synthetic coding sequence
  source 1..432: mol_type = other DNA
atgcacgtgaacggcaaggtggccctggtgaccggcgccgcccaggggatcggaagggcttttgcagaggctctgctgcttaaaggcgccaaggtcgctctggtggattggaacctggaggccggcgtgcaatgcaaagctgccctcgatgaacagtttgaaccccagaagacattgttcattcagtgtgatgtggccgaccaacagcagctccgagacacctttcgcaaggtggtggaccacttcgggcgtcttgacattctcgtgaataacgccggggttaataatgagaagaactgggagaaaacactccagatcaatctggtgagcgtcatctccggaacctacctgggcctggactatatgtccaaacagaacggtggggaaggaggcataatcatcaacatgagctcacttgcggcgcatcactag

SEQ ID NO: 24486 - DNA, 2202 bp, synthetic construct
  misc_feature 1..2202: note = Description of Artificial Sequence: Synthetic coding sequence
  source 1..2202: mol_type = other DNA
atgaccttccccgaggccgacatcctgctgaagagcggcgagtgcgccggccaaacaatgctggacactatggaggcgcctggtcattctcgccagctacttctgcagttgaataatcagcggactaagggatttttatgcgatgtcatcatcgtcgtccaaaacgccctgtttagagctcacaagaatgtgctggcggccagctcagcatacttaaagagcctagtcgtgcacgacaatctgcttaatttggatcatgacatggtgtctcccgcagtattcaggttagtactggactttatctacacaggtcgcctcgctgacggggcagaagcagcggccgctgcagcagtggcaccaggtgccgagccaagtttaggggcggtattggcagcggcatcgtacctgcagatccctgacctggtcgctttatgcaagaagagattaaaaagacacggcaaatattgccacctgaggggtgggggcggtggtgggggcgggtacgctccatacgggaggccaggacgcggactccgtgccgccacccctgtcattcaggcctgctacccctctcccgtgggcccaccgcccccacccgctgccgaaccaccctccggcccagaggccgctgtcaatacgcattgtgcagaactgtacgcctccggcccaggccccgccgcggctctctgtgcatcagagagacggtgcagcccattatgcggactggatctgagcaaaaagtcacctcctggcagcgcagccccagagcggccactcgcagaacgcgagttgccccccaggcctgactccccaccatctgcgggccctgcggcttacaaagagccgcccctcgctctcccaagcctaccaccgctgcccttccagaaattagaagaagcggctcctccctctgacccctttcgcggaggatctgggtcccctggacctgagcccccgggcaggccagatggaccatcacttctatacaggtggatgaaacacgagcccgggttggggagttacggcgacgagctgggacgagagaggggttctccatcggaacgatgtgaagaacgcggaggcgatgccgctgtcagcccaggcggacccccactgggtctggcccccccacctcggtacccgggtagcctcgacgggcctggcgctggcggcgacggggacgactacaaatcgtcctctgaagaaaccggctccagcgaggatccctccccacctggcggtcatctggagggctatccttgtccacacctcgcgtatggcgaacccgagagcttcggagacaatctctacgtgtgcataccgtgcggcaaaggattcccctcaagcgagcagttgaatgctcacgtggaagctcacgtagaggaagaggaggcgctgtacggacgcgcggaagctgcagaggtggccgctggagccgccggcttaggaccacccttcgggggtggcggcgataaggtggccggggccccgggtgggctcggcgaacttctgcgcccatacagatgtgcctcctgtgataagtcatacaaagatccagcaacactcaggcagcacgagaagacgcactggctgacccggccatatccatgcactatctgtggcaaaaagtttactcagcgcggtaccatgacccgacatatgcggagccacctgggactcaaaccttttgcgtgcgacgcctgtgggatgcgttttactagacagtatcgactcaccgaacacatgcggatccatagcggcgagaaaccttacgaatgtcaggtgtgtggtggcaaatttgcacagcaaaggaatctgatatcacatatgaagatgcacgcggttggaggcgccgctggggccgcaggagccctcgcaggactggggggcctgcccggcgtccccggacctgatggaaaaggtaaactggatttcccggaaggcgtttttgcagtggcccggctgaccgccgagcagcttagcctgaaacagcaagataaggctgccgcggctgagctgcttgcccagaccacacatttcctccacgaccccaaggtcgccctggagagtctgtaccctctggcaaaatttactgccgaattaggcctgtcaccggataaggccgccgaggttctaagccaaggagcccacctcgcggccggccccgacggaagaactatagatcgctttagtccgacatag

SEQ ID NO: 24487 - DNA, 2145 bp, synthetic construct
  misc_feature 1..2145: note = Description of Artificial Sequence: Synthetic coding sequence
  source 1..2145: mol_type = other DNA
atgctggacaccatggaggcccccggccacagccggcagctgctgctccagctgaataaccagcggactaaagggtttctctgtgatgttatcatcgtggtgcagaatgccctgttccgagcccataagaacgtgctggctgcgagctccgcgtacctaaagagcctggttgtgcacgataaccttctcaacttagaccacgacatggtgtctcctgctgtgttcaggctggtccttgattttatatatacagggaggctagccgacggcgcggaagcagccgctgcagcggccgtggcccctggtgccgagccatctctcggcgccgttttagccgcagccagctacttacagattcctgacctagtcgctctctgtaaaaaaagattaaaacgacacggcaagtattgccatttgcgaggtgggggcggcggcggggggggctacgctccttatggaagacctgggagggggctgagggctgcgacccccgtgatccaagcttgctacccatctcctgtgggtccaccccccccaccagctgccgaacctcctagcggtcccgaagctgccgtaaacacccactgtgcagaattgtacgctagcggacccggcccagcggccgccctgtgcgcatcagaacggaggtgctcacccctgtgtggcctcgacctgagcaagaaaagccctcccggcagcgccgcaccagagcgccctctcgcagagagagaactgccgccccggcccgatagcccgcctagtgccgggccagccgcatataaggaaccacctctcgctctgccctccctgcctccgctgccgtttcagaaattggaagaagctgctcccccttcagacccttttagaggcgggtcaggctcccccggtccggagcctccaggccggccagacgggccctccttattgtaccgctggatgaagcatgagcctggcctggggtcgtacggcgacgagcttgggagggagcgaggtagcccttccgaacgctgcgaagagagaggcggcgatgccgcggtttctcccggcggcccacccctcgggctggccccccccccccgttaccctggtagtctggacggacccggcgcaggaggcgacggtgatgattacaagtccagcagcgaagaaactggcagttccgaggaccctagccctcctggtgggcatttagaaggatatccctgcccccatctggcctacggggaacccgagtccttcggcgacaatctttatgtttgtataccttgcggaaaaggcttcccctcaagtgaacaactcaacgctcatgtagaagcgcatgtggaagaggaagaagccctgtacggccgtgcagaagcagccgaggtggccgctggggccgcaggcctgggacctccattcgggggggggggcgataaggtcgccggcgccccaggaggattgggagagctattaaggccttacagatgcgcgagctgtgataaatcttacaaggaccctgccacgctgaggcagcacgagaaaactcactggctgacacgtccctacccctgtactatctgcggaaaaaaatttactcaacgcggcaccatgacccggcacatgcggtcccacctggggctcaagccttttgcttgtgacgcatgcggcatgcgattcacccgacagtacagactaaccgagcacatgcgaattcacagtggagagaagccttatgaatgccaggtctgtggcggcaagtttgcacaacagcgcaatctgatatctcatatgaaaatgcacgccgtgggaggcgcagctggagccgcgggggccttagccggcctgggaggcctgcccggtgttcccggtcccgacggaaagggaaagctcgacttccccgagggcgtgttcgctgtcgctagactgaccgctgaacagttgtctctcaagcaacaggataaagctgcggccgctgaattgttggcccagaccacacactttctgcacgaccccaaagtggcccttgagagtctttatcctctcgcgaagtttacggcagaactcgggttaagcccagataaggccgcagaggtcttatcgcagggcgcgcacctcgcagccggtcctgatgggagaaccattgacaggtttagcccaacttag

SEQ ID NO: 24488 - DNA, 2208 bp, synthetic construct
  misc_feature 1..2208: note = Description of Artificial Sequence: Synthetic coding sequence
  source 1..2208: mol_type = other DNA
atggagggcgccggcggcgccaacgacaagaagaagatcagcagcgagaggcggaaagagaaatctagagatgccgctaggagccgtaggtctaaagagtccgaggtgttttacgaactggcccaccagctcccccttccacataacgtgtcctcccatcttgacaaggcttctgtcatgagactgaccataagctatctccgtgtccgcaagctgctggatgcaggtgatttagacattgaagatgatatgaaagcccagatgaactgcttttacttaaaagccctcgatggtttcgtgatggtgctgactgatgacggcgacatgatttacatcagcgacaacgtgaacaagtacatgggcctgacccagttcgagttgaccggtcattccgtttttgatttcacacacccctgcgatcacgaggagatgcgcgagatgcttacccatcgaaatggactggtgaagaagggtaaggagcagaacacacagcgcagcttcttcctgcgcatgaagtgcacattgacctccagggggagaaccatgaatattaagtctgccacttggaaggtcctccactgcacaggacatattcacgtctacgacactaactctaaccagccacagtgcggctataagaagccaccgatgacctgcctggtcttaatctgcgagccaataccccatccaagcaatatagaaatccccctagacagcaagactttcctatcccgtcactccctagatatgaagttctcgtactgtgatgagagaatcaccgagctgatgggctatgaacctgaggagctactaggtagatccatttacgagtattaccatgcccttgactctgatcaccttaccaagactcatcatgacatgtttaccaaggggcaggtgaccacaggccagtacagaatgctggccaagaggggaggttacgtgtgggttgagacacaggcaactgtcatttacaacaccaaaaactctcagccccagtgcattgtgtgtgttaattatgtagtcagcgggataatacagcatgatctcatctttagcctgcaacagacggagtgtgtgttgaaacctgtagaatccagcgatatgaaaatgacacagttattcaccaaggtggaaagcgaagatacctccagcctgttcgacaaactcaaaaaggagcctgatgccctgactcttttggcacccgcagctggcgataccattatctccctcgattttggctccaatgacacagagactgatgaccagcagctggaggaggttcctctgtataacgacgtcatgctgccatcacctaatgaaaaacttcagaatatcaacctcgccatgagtcctctgcctaccgcagaaacaccaaaacccctgcgcagttcagccgaccctgcactgaatcaggaggttgctctgaagctggagcctaatccggaatccctggagctgagcttcacgatgcctcaaatccaggatcagacccctagtcccagcgacgggagcaccaggcagagttcgccagaacccaattccccttccgaatactgcttctacgtggattctgacatggtgaacgaattcaaattagagctggttgagaagctgttcgccgaggatacggaggccaagaatccttttagcacccaggataccgatctcgacctggagatgctggcaccctacatacctatggacgatgacttccaactccgctccttcgaccaactctctccgctggaatcgtcctctgccagtcctgagagtgctagcccgcaatccacagtcaccgtgtttcagcagacccagatacaggaacctactgccaacgcgacaaccaccaccgctaccaccgacgagttaaagacggtcaccaaagatcgcatggaagacattaagattctgatcgcaagtccctcccccacacacattcacaaggagacaacttctgcgacgtccagtccttatcgcgatactcagtctaggacagcttcacccaacagggccggtaaaggggtaatagagcagactgaaaaatcacatcctagaagcccgaatgtgctgtccgttgccctgagtcagagaacaacggtgcccgaggaagaactgaatcctaaaatcctagcactccagaacgcacagcgcaagcgcaagatggaacacgatggctctctcttccaggctgtcggcatcatttag

SEQ ID NO: 24489 - DNA, 2481 bp, synthetic construct
  misc_feature 1..2481: note = Description of Artificial Sequence: Synthetic coding sequence
  source 1..2481: mol_type = other DNA
atggagggcgccggcggcgccaacgacaagaagaagatcagcagcgagaggaggaaagaaaagtcaagagatgcagccaggtccagacgtagcaaggagtcggaggtgttctatgaattggctcaccagttacccttaccacataacgtgagttcccatctagataaagctagcgtgatgcggctgacaatctcctatctgagggtgaggaaactccttgacgcgggggaccttgacatcgaggacgacatgaaagctcagatgaactgcttctacctcaaagctctggacggttttgttatggtcctgaccgacgatggtgacatgatctacattagcgataacgtgaacaagtacatgggcctgactcagttcgaactgacgggccacagcgtgtttgatttcacgcacccttgtgatcacgaggagatgcgggagatgctcacccatagaaatggactcgtcaaaaagggaaaggagcagaatactcagaggagcttctttttacggatgaaatgcaccctgaccagccgcgggaggactatgaatataaagagcgccacatggaaggttctgcactgcactggtcacattcatgtgtatgacactaattctaaccagccccagtgcggttataagaagccccccatgacatgtctggtgctgatttgtgaacctattccccatccatctaatatcgaaattcccttggactccaaaacctttctcagtcgtcacagcctcgatatgaaattcagttattgcgatgaaaggatcactgagcttatgggatatgagccagaggagctgctcggtcgcagtatctacgaatactatcacgccttagactccgatcatctcactaagacccaccatgatatgtttaccaaaggccaagtcactacaggacagtatcgcatgcttgctaaaagaggcggctacgtctgggtggaaacacaggctacggtgatctacaatacaaagaactcccagccccagtgcatcgtgtgtgtgaactatgtggttagtggcattatacagcacgacctgatcttttccttgcagcagaccgaatgcgtgttaaagcctgtcgagtcatctgacatgaaaatgactcagttgtttacaaaggtggaatccgaggacacaagcagcctgttcgacaaactgaagaaagagccagatgcattgaccctcctggccccagcggctggagacacgattatttccttggacttcggcagtaacgatactgaaacagacgatcagcaactagaggaagtgccattatacaacgatgtcatgctgccttcaccaaacgaaaagctacaaaatatcaacctggccatgtctccactccctaccgccgagaccccgaagccgctgcgttccagtgccgaccctgcacttaaccaagaggttgcactcaagctagagcccaatccagagagccttgaactaagcttcactatgccacagattcaggaccagaccccatctcccagcgatggtagcaccagacagagttctcccgagcctaactctccttccgagtactgcttttatgtggactccgacatggttaacgaatttaagctggaactggtggaaaaactttttgccgaggacactgaagcgaagaacccattttcaactcaggataccgatctggacttggagatgctggccccttacatccccatggacgatgatttccagctgagatcctttgaccagctttctcccctggaatccagtagcgcttcccccgaatctgcttccccccagtcgacggtgactgtgtttcagcagactcagatccaggaaccaactgccaatgctactactaccactgccacaacagacgaattgaagaccgtcaccaaagatagaatggaggacatcaagatcttgatcgcgagtccaagtcctacccacatccacaaggaaactacctctgctacgtcatccccctaccgagatacccagagcaggaccgcttcccctaacagagctggcaaaggagtaattgaacagacagaaaagtctcaccccagatctcccaatgtactgagcgtggctctcagccagcgcacaacagtgccagaagaagagctgaatcctaagattcttgccctccagaatgcccagagaaagcgtaagatggaacatgacggctcactctttcaggctgtcggcattggcacactgctccagcaaccggatgatcatgcagctacaaccagtctgtcctggaagagggtgaagggatgtaaatcctctgagcaaaatggaatggagcagaagaccattatcctaattccctccgacttggcatgtcggctcctcggtcagtctatggatgaaagcggactgccccaattgacatcttacgattgtgaagttaatgcaccaattcaggggtcacgcaacctcctgcagggggaggagctcctgagagcactcgaccaggtgaattag

SEQ ID NO: 24490 - DNA, 2304 bp, synthetic construct
  misc_feature 1..2304: note = Description of Artificial Sequence: Synthetic coding sequence
  source 1..2304: mol_type = other DNA
atgcggctgaccatcagctacctgcgggtgcggaagctgctggacgcaggtgacctggatatcgaggatgacatgaaggctcagatgaactgcttctatctcaaggccctggacgggtttgtaatggtgctgacagacgatggtgacatgatctacattagcgataatgtcaacaagtatatgggtcttacacaattcgagttaactggtcattccgtgtttgatttcacccacccttgcgatcatgaggagatgcgcgaaatgcttacccatagaaatggactggttaaaaaagggaaggagcagaatacccaaaggagcttctttttaaggatgaagtgtactttgacctcccgggggcggaccatgaacattaagtctgcgacctggaaagtgttgcattgcacggggcacattcacgtgtacgacacaaattcaaaccagccccaatgcggatacaaaaaacctccaatgacatgcctggttctaatatgcgagcccattcctcatccgagcaatatcgagataccactcgactcaaaaaccttcctgtctaggcactccctagacatgaagttctcctactgcgacgagagaataactgaacttatgggctacgagcctgaggagcttctgggcagatcgatttacgaatactaccatgcactggacagtgaccacctcacaaaaacacaccatgatatgttcacaaagggtcaggtgacgaccggtcaatacagaatgttggcaaaacggggcggctacgtttgggtggagactcaggcgacagtgatctataatactaagaattctcagcctcagtgtatcgtctgcgtgaactacgtggttagcggaattatccagcacgatctgatcttcagcctgcagcaaactgagtgcgtgctgaagcccgtggaaagcagcgacatgaagatgacccaactgtttaccaaagtggagtcagaggacaccagcagcctgttcgataaactgaagaaagagccagacgccctcactctgcttgcaccagctgccggcgacacaattatttctttggattttggttctaatgatacggagacggatgaccagcagctcgaagaagttcccctgtacaatgacgttatgttgccaagccccaacgagaagctgcagaatatcaatcttgctatgagccctctaccaacagcggagacccctaaacccctgcgttcgtccgccgaccccgccttaaatcaggaggtggcattgaagctggagcccaacccagagtcactcgaactgtccttcaccatgccacagatacaagaccagacgccgtcgccaagtgacgggtccactcgacagtctagccctgaacccaactccccatccgagtactgtttttacgttgattccgacatggtcaacgaatttaagttggagctcgtggaaaaactgttcgcagaagacaccgaagctaaaaacccctttagcacacaggacacagacctggatctggaaatgcttgcgccctacatccccatggacgatgacttccagctgcgatcatttgaccagttgtccccgttggaatcctcctcagcgtccccagaaagtgccagccctcagtctaccgtaacagtcttccagcagacgcagattcaagaaccgacagctaacgctacaaccacaactgccacaaccgatgagcttaaaactgtcacaaaggatcggatggaagatatcaagatcctaatcgcgagcccctctccaacacatattcataaggagacgacctctgcgacatctagtccctaccgggatactcaatcccggacagcgtcccctaacagagcagggaagggcgtgatcgagcagacagaaaaatctcacccccgatctcccaacgtgctgtctgtggccctatcccagcggacaactgtccccgaagaagagttgaatcccaagatactcgccttacaaaacgcacagagaaaacgcaagatggagcatgacggctccctgtttcaagctgttgggatcggcacactgctgcagcaaccagatgaccatgcagctactacttctctgtcctggaaaagagtgaaggggtgtaagagcagtgaacagaacggcatggagcagaagactatcatcttaatccccagtgatttagcatgcaggttgcttgggcagtcaatggatgagtccggtctgccccagctcaccagttacgattgtgaggtgaacgcacctatccagggcagccggaatctcctacagggtgaagagctgctccgagccctcgatcaggtcaactag

SEQ ID NO: 24491 - DNA, 2484 bp, synthetic construct
  misc_feature 1..2484: note = Description of Artificial Sequence: Synthetic coding sequence
  source 1..2484: mol_type = other DNA
atggagggcgccggcggcgccaacgacaagaagaaccggatcagcagtgaacggagaaaagaaaagtctagggacgctgcgagaagtcgtcgctccaaggaatccgaggtgttttatgaattagcccaccaactgccattacctcataatgttagctctcacctcgataaagctagtgtgatgcggctgaccatcagctaccttcgggtgcgaaagctactcgacgcaggagacttggatattgaggatgatatgaaggctcagatgaactgcttctacctgaaagcactggatgggttcgtgatggtgcttaccgatgatggagatatgatctatatctctgacaacgtaaacaaatacatgggactgactcagtttgaactcaccgggcattccgtcttcgatttcacgcacccctgcgaccacgaagaaatgcgcgagatgctcactcaccgcaatgggctggtaaagaagggaaaggaacagaatacgcagcgatcgttcttcttacggatgaaatgcactctgacatccaggggccgtactatgaatatcaaaagcgcaacctggaaggtcctacattgcaccgggcatatccatgtgtacgatacgaacagtaatcagcctcagtgcggctacaagaaaccacccatgacctgcctggtcctgatctgtgagccaatccctcatccctcgaacattgaaattccactggattcaaagacctttctgtcaaggcacagtctggacatgaagttctcctattgtgacgaacggattacagagcttatgggctacgaaccagaggagctgctcggacggtctatctacgaatattatcatgcactggacagtgatcacctcaccaagacacaccacgacatgtttacaaaaggccaggtgacaaccggacagtaccggatgctagctaaacgcgggggctatgtctgggtggaaactcaagcgaccgtgatctacaacacaaagaatagtcagcctcagtgcatcgtatgcgtgaactacgttgtgagcggtattattcagcacgatctcatattctccctgcagcaaaccgagtgcgtcctcaaacccgttgaaagctccgatatgaaaatgacacagctcttcaccaaagttgagagcgaggacacatcgtcactgtttgacaagctgaaaaaagaaccagatgccctaacgcttctggcacccgccgcgggggacaccataatctccctggacttcggatctaatgacactgaaactgatgatcagcagctggaagaggtccccctgtacaacgacgttatgcttccctcaccaaatgagaagcttcaaaatatcaacctggccatgtcacctctgccaactgcagaaacacctaagcccctcagaagctcggcagaccccgccctcaaccaagaggtggccttgaaactagagccaaacccagaatcgctggaactctcttttactatgccacagatacaggaccagactccatcgccttccgacgggtccacacggcagagttcacccgagccaaacagcccctccgagtattgcttttatgtcgattccgacatggtcaatgaatttaaattggagttggtggaaaaattgttcgccgaggatacagaggccaagaaccctttttctacgcaggatacagaccttgacctggaaatgctggccccatacatccccatggacgacgattttcagctaaggtctttcgaccaattaagtcccctcgaatcctctagtgcaagcccggaatccgctagcccccagtccactgtcaccgtattccagcagactcagattcaggagcctaccgctaacgcaactacaaccacagcaacaactgacgagctaaagactgtcaccaaggaccgtatggaagatatcaagatactaattgctagtcccagccccactcatatccacaaggaaactaccagtgccactagctcaccttaccgggacacgcagagtagaaccgcgtctcccaatcgggccgggaagggtgtgatcgaacagacagagaaaagccatccacggtcacccaatgttctcagtgtcgccttatcccagaggactaccgtccccgaagaagagctgaaccccaagattctggcgctgcagaatgcccagcggaaacgtaagatggagcacgacggatcactgtttcaggctgtaggcatcggcaccctgcttcaacagcccgacgatcacgcggccacaaccagtctctcctggaagagagttaaggggtgcaaaagttccgagcagaatgggatggaacagaagactattattttgatccccagtgacctggcatgtcgacttcttgggcagagcatggatgagtcaggtctcccccagctcaccagctacgattgcgaggtcaacgcccctatccagggcagcagaaatctgctccaaggggaagagctcctcagggcactggatcaggttaattag

SEQ ID NO: 24492 - DNA, 2553 bp, synthetic construct
  misc_feature 1..2553: note = Description of Artificial Sequence: Synthetic coding sequence
  source 1..2553: mol_type = other DNA
atgagcagccagtgccggagcctggagaacaagttcgtgttcctgaaggaagggctaggaaacagcaagcccgaggaactcgaggaaatcaggatcgagaacggacggatttcttccgagcgtagaaaagaaaaaagcagagacgcggccagatctaggcggtccaaggagtccgaggtgttttacgagttggcacaccagctgccactgcctcacaatgtatccagccacctggataaagcgagcgtgatgcgcctgacaatcagttatctgagggtacgcaaactgcttgacgccggcgacctcgatatagaagacgatatgaaggcacagatgaactgcttttacctcaaggcgctcgatgggtttgtgatggtcctgaccgatgatggggacatgatctatatctccgacaacgtcaataagtacatggggttgacccaatttgagctgaccggccactctgttttcgactttacacacccatgcgaccacgaagagatgagggaaatgctgacgcaccggaatgggctggtaaaaaagggtaaggagcagaacacgcagcgatctttctttttgcgtatgaagtgcacactcacctctcggggcagaaccatgaacatcaagtcggccacttggaaagtcctgcattgcacagggcatatacacgtgtacgacacaaatagcaaccagccccagtgtgggtacaagaaacctccaatgacctgtttggtgctgatatgcgagcccataccccatccttccaacattgagattcccctagactccaaaaccttcttaagccgacatagtctggacatgaagttctcttactgcgatgaacggattactgagttgatgggctacgagccagaggaacttttgggcagaagcatttacgaatactatcacgccctggattcagaccacttaacaaaaacgcaccacgacatgtttaccaaggggcaggtgaccacaggccagtatagaatgctggctaagagagggggctacgtgtgggtcgagacacaggccaccgttatctacaatacgaaaaatagccagcctcagtgtatagtttgcgttaactatgtagtttcagggatcattcagcacgacttgatcttttccctgcagcagaccgagtgtgtgttaaaacctgtagaatcgagcgacatgaagatgacacaattatttaccaaggtggaatcggaagatactagttcactttttgataaattgaaaaaagagccagacgcactcaccctgctggctcctgctgccggcgacaccataatctctttggacttcggtagcaacgacacagagacagatgatcagcagctcgaagaggttccactgtacaatgatgtgatgctgccatcaccgaacgagaaattacagaacattaaccttgccatgagcccgctgcccaccgcagaaacccctaaacctcttaggtctagtgccgatccggccctgaaccaggaagttgcgcttaagttggagcccaacccagagagtttagaactgagttttaccatgccgcagatacaagaccagacccccagcccatctgatggctcaacacggcagagctcacccgaacccaatagcccttctgagtactgcttctatgttgattcagatatggtcaatgagtttaaactcgagctagtcgagaagctcttcgctgaggatacagaagcaaagaatcccttctcaactcaagacactgacctggacctggagatgttggctccgtacatccccatggacgatgatttccagctgcgaagtttcgatcagctgtccccacttgagtccagcagtgcctctcctgagagcgctagcccacagagtaccgtcactgtgtttcagcagacacagattcaggaacctaccgccaatgctaccaccaccactgcaacaacagacgaactgaaaacagttactaaggataggatggaggatatcaaaatccttattgctagtccgtctcctacacatatccacaaggagaccactagtgcaactagcagtccttatagagatacacagagtaggactgcatccccaaatagagcagggaagggcgtgattgagcagacagagaaatcccaccctaggagtcccaacgttctatcagtggctctcagtcaacgtaccaccgtcccggaggaagagctcaacccaaagattctggctctacagaatgcacaaaggaagcgaaagatggaacatgatgggagcctgttccaggctgttggaatcggaactctgctccaacaaccagacgaccatgctgccactaccagtctctcctggaaaagggtcaagggatgcaagagctccgagcaaaacgggatggagcagaaaaccatcattctgattccgagtgatctggcatgcagacttctgggtcaaagcatggacgaaagcggtctaccacagctaaccagctacgattgcgaagtcaatgcccccatacaggggagtcgcaatctgctacagggtgaggagcttctgcgagcccttgatcaagtgaattag

SEQ ID NO: 24493 - DNA, 1734 bp, synthetic construct
  misc_feature 1..1734: note = Description of Artificial Sequence: Synthetic coding sequence
  source 1..1734: mol_type = other DNA
atgaagttcagctactgcgacgagcggatcaccgagctgatgggctacgagccagaggaactcctcggaagatccatctacgagtactaccatgcattggattccgatcacctgacgaaaacccaccacgatatgttcaccaaggggcaggtcaccacagggcaatacagaatgctggccaagcggggcggttacgtttgggtggagacacaggccaccgtcatttacaacaccaaaaactcgcagcctcagtgtattgtttgtgtgaactatgtagtgtctgggatcattcagcacgacctgatcttctctctgcaacagacagagtgcgttctgaagccagtggagtccagtgacatgaagatgactcagctttttacaaaggtggagagtgaagataccagctccttgttcgacaagttgaaaaaagaaccagatgcccttacgctgctggcccccgccgctggagacacaatcatctcactcgactttggcagcaatgacaccgagacagacgatcagcagctggaggaagtgccactctacaacgatgtcatgctccccagtcccaacgagaagctccagaacatcaatctggccatgtcacccctccctacagcggagaccccgaaacccctgagatctagtgctgatccagccctgaatcaggaagtggccctgaagctcgaacccaatcccgagtcgcttgaactgtcctttacaatgccacaaattcaggaccaaactccaagcccaagcgatggctccacacgacagtcttcgcccgagccgaacagcccaagtgaatattgtttctacgtggattctgacatggtgaacgagttcaagctcgaactggtcgaaaaactttttgctgaagatacagaggctaaaaaccccttctctacacaagataccgatctcgacctcgaaatgctggccccttatatacccatggacgatgatttccagctgcgctcctttgatcagctgtcgcccctagaatcatccagcgcttctccagagtccgcttccccacagtctaccgtgaccgtgtttcagcaaacacaaattcaggaaccaacggccaacgctaccaccactaccgccacaaccgatgaactcaagacagtcaccaaggaccgaatggaggatatcaagattctgattgcgagcccatcccctactcatatccacaaagaaactaccagtgccacatcttccccataccgagacacccagagcaggactgcttctcccaaccgggcagggaagggggtgatcgaacagacagagaaatctcatcctcggtcacccaacgtgttaagcgtggcactgtcacagcgaactaccgttccggaagaagagctaaaccctaagatccttgcactacagaatgctcaaagaaaaaggaagatggagcatgacggtagcctattccaggccgtgggaatcggaactctgttacagcagccagatgatcacgccgctaccacctcgttgtcctggaagagggtgaaggggtgtaaaagttccgaacagaatggcatggaacaaaaaacgattattctgattccaagcgatctggcgtgtagactgttaggccagtccatggacgagtccggccttccgcagctgacatcatacgattgcgaggttaacgccccgatccagggatcccgtaacctgttgcagggtgaggaactgctgagggcactcgatcaggtcaactag

SEQ ID NO: 24494 - DNA, 2304 bp, synthetic construct
  misc_feature 1..2304: note = Description of Artificial Sequence: Synthetic coding sequence
  source 1..2304: mol_type = other DNA
atgcggctgaccatcagctacctgcgggtgcggaagctgctggacgcaggagatctggatatagaagacgacatgaaggctcagatgaactgtttctacctaaaggcactggacgggttcgtgatggtgctaactgacgacggagacatgatatacatctcagacaacgtaaacaagtacatgggtctgacgcagttcgagctaaccggccatagcgtgttcgacttcactcacccctgcgaccacgaggagatgagggagatgctgactcacaggaacggccttgtgaaaaaaggcaaagaacagaacacccagcgctctttctttctgagaatgaagtgtaccctgacctcaaggggtcgaaccatgaatataaagagtgctacctggaaagttttgcattgcaccggacatatccatgtgtatgataccaacagtaaccaaccacaatgcgggtataaaaaaccccccatgacatgtctggtgctgatttgtgaacctataccccatccaagcaatattgaaattcccttggattctaaaacatttctctctaggcattcccttgatatgaagttctcctactgcgatgagcgaatcacggaactgatggggtacgaacctgaggaactgctgggaagatccatctatgagtactatcacgctcttgattccgatcacttaaccaagacccatcacgacatgttcaccaagggacaggtgaccaccggccaatacaggatgttggctaaaaggggaggatatgtctgggtcgagactcaagccaccgttatatataacacaaaaaacagccagccccagtgtattgtgtgcgtgaattatgtggtgagtggtattattcagcatgacctgatcttttccctgcaacagaccgaatgcgtactgaagccagtcgagtcttctgatatgaagatgacgcagctattcaccaaggtcgagagtgaagatacaagcagcctgttcgataagctgaaaaaagagcccgacgcgctgacactcctcgcacccgcggcgggggatacaatcatctcattggatttcgggtctaacgacaccgaaacagacgaccagcagctcgaagaggtacccctgtataatgacgtgatgctgccttccccaaatgaaaagctgcagaatatcaacttggccatgagccctttacccaccgcagagacacccaagccgctgcgctcctctgcagacccagccctgaaccaggaggttgccttgaagctcgagcctaaccctgagagtctcgagttatcgtttaccatgccacagattcaggaccagaccccatccccctcagatgggtccactcgccagtcctctcctgagccaaatagcccctccgagtattgcttctacgttgactctgacatggtaaacgagttcaaactggagcttgttgaaaaacttttcgcagaggataccgaggccaagaaccccttttctacacaggacacagacctggacttggagatgctagcaccttatatcccaatggacgatgattttcagttgagatcattcgatcagttatcccccttggaaagtagctcggcgtccccagagtctgcaagcccacaaagcaccgttactgtgtttcaacaaacgcagatccaagaaccgactgccaatgcaaccaccacaacggctaccactgacgaactgaaaaccgtaaccaaggatcgtatggaggatattaaaatcctgatagccagcccaagcccgacccacatccataaggagacgacatccgccacttctagtccatatagagatactcagtctagaacggccagtcccaaccgcgcaggcaaaggtgttattgagcagacagaaaagtcccacccccgcagcccgaacgtgttatccgtggccctgtcacagcgtaccactgtgccagaagaagagttgaaccctaagatcctggcactccagaacgcacaaaggaaacgcaaaatggaacatgatggatcattattccaggccgtggggatagggactttgttgcaacagccagatgatcacgccgcaacaacatctcttagttggaagagggtaaaagggtgcaagtcatccgagcaaaatgggatggagcagaagactatcattctgataccaagcgacctcgcatgcaggttgctgggacagtccatggatgaaagcggcttgccccagctaacgagctacgactgtgaggtgaacgcccccattcaggggtctaggaatcttttacagggagaagaactcctgagggctttggaccaggtgaactag

SEQ ID NO: 24495 - DNA, 1296 bp, synthetic construct
  misc_feature 1..1296: note = Description of Artificial Sequence: Synthetic coding sequence
  source 1..1296: mol_type = other DNA
atggaggacatccagaccaacgccgagctgaagagcacccaggagcagtcggtcccagccgagagcgccgccgtgctcaatgattattctctcaccaaaagccacgagatggagaacgtcgattccggggaagggcctgcaaacgaggatgaggacataggcgatgattctatgaaggttaaggacgaatactccgagagggacgagaacgttctcaagagtgaacccatgggaaacgccgaggagcctgaaattccatactcttactcacgcgagtacaacgagtatgaaaacattaaattggagaggcacgtggtctccttcgacagttcacgccctacttccggaaagatgaactgtgacgtatgtggcctttcctgtattagcttcaacgttctgatggttcacaagcggagccatacaggcgagcgaccattccagtgcaatcagtgcggagccagcttcacacagaaaggcaacctactcaggcacatcaagctgcacactggcgagaagccgtttaaatgtcatctgtgtaactatgcctgtcaaaggcgagacgctttaacagggcatcttcgcacacacagcggtgaaaaacgacactgttttgatgtcaattacaactcttcttacatgtacgaaaaggaatccgagctcatccagactcggatgatggaccaggccataaacaatgcaattagctatcttggggctgaagctcttcggccgctggtacagactccccctgcccctacaagcgagatggtccctgtgatttcgtccatgtaccccatagcacttacccgggcagagatgagtaacggagcccctcaggaactagagaagaagtcaatacacctgcctgagaagtccgtgcccagcgaaagaggtctgtctcccaataactcagggcatgattctaccgacaccgattctaatcacgaggagcgtcagaatcacatttaccagcagaaccacatggtgctgtccagagcccgcaatgggatgcccctactcaaagaggtgccccggagttatgaactcctgaagcctcctcccatttgccccagggacagtgtcaaagtaattaataaggagggtgaggtcatggacgtgtaccgatgcgatcattgccgtgtgctcttcctggattacgtgatgttcacgatacacatgggctgccacgggtttcgagatcccttcgaatgtaacatgtgcggctatcgctcccatgataggtacgaattctcctctcatatcgcaaggggagagcatagggcactgttgaagtag

SEQ ID NO: 24496 - DNA, 1245 bp, synthetic construct
  misc_feature 1..1245: note = Description of Artificial Sequence: Synthetic coding sequence
  source 1..1245: mol_type = other DNA
atggaggacatccagaccaacgccgagctgaagagcacccaggagcagtcagtgcctgcggaatctgctgccgtgctgaatgactattcactgactaagtcacatgaaatggagaatgtggacagtggggaagggcccgctaatgaagatgaggacatcggcgatgattcaatgaaggtcaaagatgagtacagtgagcgggacgagaacgtcctcaagtcggagccgatgggaaatgcggaggagcccgaaatcccctattcctacagcagggaatacaatgaatatgagaacataaaacttgagaggcacgttgtctctttcgattcatcacgccccaccagcgggaagatgaattgcgatgtatgtggcctgagctgcatcagctttaatgtgctgatggtgcataaacgctcacatacggccagtgccgaggcacgccacattaaggcggagatgggctctgagcgagccttggtgcttgacagacttgcctctaatgtcgccaaaagaaagagttcaatgcctcaaaagttcattggtgagaagcgtcattgtttcgacgttaactacaatagctcgtacatgtatgagaaagaatcagaactaattcagactcgaatgatggatcaagctattaacaacgcgatctcgtatctgggggccgaggcacttaggccgctggtgcaaaccccccccgcccctacctcagagatggtgcctgtgatcagcagtatgtatccaatcgcattgaccagggccgaaatgtcaaatggggccccccaagaactggaaaagaagtcaattcatctcccggagaaaagcgtgccgagtgaacgcggattatctccaaacaactccggccacgattccacagacacagactctaaccacgaagaacggcaaaatcacatttaccagcaaaaccatatggtgctctcaagagccaggaatggcatgcccctgttgaaagaggtccctcggagttatgagttgctcaagcctcctccgatttgcccaagagattccgtaaaagttatcaacaaggagggggaggtcatggacgtctaccggtgtgatcactgccgtgttcttttcctggattatgttatgtttacgattcacatgggatgccatggttttagggaccccttcgaatgcaatatgtgcgggtacaggagccatgacagatacgagttcagttctcacattgctaggggtgagcatcgggccttgctcaaatag

SEQ ID NO: 24497 - DNA, 1413 bp, synthetic construct
  misc_feature 1..1413: note = Description of Artificial Sequence: Synthetic coding sequence
  source 1..1413: mol_type = other DNA
atggaggacatccagaccaacgccgagctgaagagcacccaggagcagtctgtcccagcggagtcagcggccgtgctcaatgactacagtttgaccaaatcacatgaaatggaaaatgtggattccggagagggacccgcaaacgaagacgaggatatcggcgatgattctatgaaggttaaggacgagtatagcgagagagacgaaaacgtgctgaaatcagagcccatgggaaacgctgaagagcccgagataccatattcatacagtagagagtataacgagtatgagaacattaagctggagaggcatgtggtttctttcgattcttcccggcctacttctggtaaaatgaattgcgatgtctgtggcctgtcttgcatatcatttaacgttctgatggtgcataaacgctcacataccggtgagaggcctttccagtgcaaccagtgcggggcatctttcactcagaagggtaatctcctgcgccacatcaagttacacactggcgagaagccgttcaaatgtcacctatgcaattacgcctgccagcgccgagacgctcttaccgggcaccttcgtacacactcagtagaaaagccctacaagtgtgaattttgtgggaggagttataaacaaagatcaagcctggaggaacataaagagaggtgcagaactttcctccagtcaaccgatccgggggatacgggagagaagcgtcattgctttgacgttaactacaactcgagctatatgtacgaaaaagaaagcgagctgatccagacaagaatgatggatcaggccattaataacgccatctcttatttgggcgcggaagcactccgcccacttgtgcagaccccgcctgccccaacctctgagatggtgcccgttataagtagtatgtatcccattgcactgacgcgagctgagatgtcaaacggcgccccacaggaactggaaaagaaatcaatccatctcccagagaaaagcgtaccatccgagagaggcctctccccaaataactccgggcatgattcaacagacacagatagcaaccatgaagaacggcaaaaccacatataccagcagaatcacatggtgctgtcacgggctcgtaatggaatgccactactcaaagaggtgcccaggtcttacgagttgctcaagcccccaccaatatgccctcgcgatagcgtgaaggtgatcaataaggaaggagaggtgatggacgtctataggtgtgatcattgcagagtcctcttcctcgactatgtgatgtttactatacacatgggatgccacggctttagagacccatttgaatgcaatatgtgtggctacaggtcgcacgaccgatacgagttcagctcgcacatcgcacgcggagagcaccgtgctctgctgaagtag

SEQ ID NO: 24498 - DNA, 1413 bp, synthetic construct
  misc_feature 1..1413: note = Description of Artificial Sequence: Synthetic coding sequence
  source 1..1413: mol_type = other DNA
atggaggacatccagaccaacgccgagctgaagagcacccaggagcagagcgtgccagcagagtctgcagctgtcctcaacgactactcattgaccaaatcacacgaaatggaaaatgttgacagcggcgaggggccagcaaatgaggacgaggatatcggagacgattcaatgaaagtcaaggatgagtatagtgagagagacgaaaacgttttaaagtctgaacccatgggaaatgccgaggagccagaaattccatacagttatagtcgagagtataacgagtacgaaaacataaagttggaacgtcacgtggtttcatttgacagcagccggccaacctccggaaaaatgaattgcgacgtctgtggtctatcatgtattagctttaatgtgttgatggtccacaagagatcccatacaggggaacggccatttcagtgtaaccaatgcggcgcttcttttacacaaaaaggcaacttgctgaggcatatcaaacttcacacaggtgaaaaaccattcaaatgtcatttgtgtaattacgcttgccagcgccgcgatgccctgacagggcatctgcggactcattccgcctcagccgaagcgcgccatataaaggccgagatggggagcgagcgcgcactggtccttgacaggctcgccagcaatgtggcgaaacgaaaatcttctatgccccagaaattcattggagaaaagcgccattgttttgatgtgaattacaactcttcatacatgtatgagaaagagtcggaactgatccagacaagaatgatggatcaggcgatcaataatgccatttcctatctaggggcagaggcccttaggccgttggtgcaaacaccccccgcgccaacgtcagagatggttcccgtgatttcttctatgtatccaatagccttgaccagagctgagatgtccaacggtgccccgcaggagttagagaaaaagtctatacatcttcccgaaaaaagtgttccgtcagagcgcggactatcccccaacaatagtgggcatgacagcactgacacagattccaatcacgaggaaagacagaaccacatttatcagcaaaaccacatggttttgtcacgcgccaggaacggtatgcccctgctgaaggaagtgcccagaagttatgaacttcttaaaccgcctcctatatgtcccagagactcggttaaagtgattaacaaggaaggtgaggttatggatgtctaccgttgcgaccactgtcgcgtgttgtttctagattacgttatgttcacgatccacatgggatgccatgggtttcgagaccctttcgagtgtaacatgtgcggctatagatcccacgatcgttacgagtttagctctcatatcgctcgcggagagcaccgcgctctgctgaagtag

SEQ ID NO: 24499 - DNA, 1101 bp, synthetic construct
  misc_feature 1..1101: note = Description of Artificial Sequence: Synthetic coding sequence
  source 1..1101: mol_type = other DNA
atggaggacatccagaccaacgccgagctgaagagcacccaggagcagagcgtcccagcggaaagcgccgcagtccttaacgactattcgctcacaaagtctcacgaaatggagaatgtggacagtggagagggacccgctaatgaggacgaggacataggggttgagaagccctacaagtgcgaattttgtggccgctcgtacaaacaaaggtccagtttggaggagcacaaggagcgatgccgtaccttcctccaaagcacagaccccggggacacagctagtgccgaggccagacatataaaggccgagatggggtcagagcgcgcactagttctggaccgcttggcctcaaacgttgccaagcggaagagttcaatgccgcagaaatttattggagagaagaggcattgttttgacgtaaattacaactcttcctacatgtacgaaaaagaatccgaactgatccagaccagaatgatggaccaggccataaacaatgctatcagctaccttggtgctgaagcgttaaggcctcttgtacaaactccgccagcaccaacatctgaaatggtccctgttatcagctccatgtaccctattgctctcacaagggccgaaatgtcaaatggcgcccctcaagagctggaaaaaaagagcattcacctacccgagaaatcagtacccagcgagaggggcctctctcccaacaactcaggacacgatagtaccgacactgattcgaatcacgaggagcgccagaaccatatttatcagcagaaccatatggtcctttctcgcgcccggaatggaatgccactactcaaggaggtgccacggtcttacgaattactgaaacctcctcccatttgccctcgagactcggtaaaagttataaataaggaaggagaggtgatggatgtgtaccgatgtgaccactgccgagtgttgtttctggattatgtaatgttcacaatccacatgggctgccatgggttccgtgatccattcgagtgcaatatgtgcggttatcggtcccacgaccgttatgaattttctagccatattgccaggggggaacatagggccctgttaaagtag

SEQ ID NO: 24500 - DNA, 1128 bp, synthetic construct
  misc_feature 1..1128: note = Description of Artificial Sequence: Synthetic coding sequence
  source 1..1128: mol_type = other DNA
atggaggacatccagaccaacgccgagctgaagagcacccaggagcagtccgttcccgcagaatccgcggcagttctaaatgactactcactgactaagtctcatgaaatggagaatgtggactcaggggaggggccagctaatgaggatgaagatatcggagatgactccatgaaagtcaaggatgaatattctgagcgagacgaaaatgtgttgaaatcagagccaatgggtaatgccgaagaaccggagattccgtatagctattcgcgcgagtacaatgagtacgagaatattaagcttgagagacatgtcgtctctttcgattctagccgtccaactagtggcaaaatgaattgtgacgtgtgcgggcttagttgtatttcattcaatgtgctgatggtgcacaaaaggagccataccggtgagaagcgccattgcttcgatgtgaactacaacagctcttacatgtacgaaaaagagagcgagttaatccaaacacgaatgatggaccaagccattaacaacgctatcagctacctgggcgcggaggctctaaggcctctcgtccagacaccccccgcccctaccagcgaaatggtgccagtgatctcatctatgtatcccatcgccctcactagggccgagatgtcgaacggggctccccaagagctagagaaaaagagcatacacctccccgaaaagtccgtaccaagcgagaggggtctgagccccaacaactctggccacgattctaccgatacagactccaatcatgaagagagacagaatcacatttatcagcagaatcatatggtgctgagccgagcacggaacggaatgccgctgctcaaggaagtcccgcggtcctacgagcttctcaagcccccgccaatttgcccccgggactccgttaaggtaattaacaaagagggcgaagtgatggacgtgtaccgttgcgaccactgccgggtgctgtttcttgactatgtgatgtttaccatccatatgggttgccacggattccgggacccgtttgagtgcaatatgtgcgggtataggtctcacgacaggtatgaattttccagtcacattgcacgtggcgagcatagagcacttttgaaatag

SEQ ID NO: 24501 - DNA, 867 bp, synthetic construct
  misc_feature 1..867: note = Description of Artificial Sequence: Synthetic coding sequence
  source 1..867: mol_type = other DNA
atggaggacatccagaccaacgccgagctgaagagcacccaggagcagagtgtgcccgccgagtctgcagctgtcctaaatgattattcgctcacaaaaagccacgagatggaaaacgttgatagcggcgagggcccggcaaacgaggacgaagacatcgggggagagaagcgacattgcttcgatgtaaattataacagctcatacatgtacgagaaagagtccgagctgatccagactagaatgatggaccaggcaattaataacgctatcagctacctgggagcagaggctttacgacccctggtccaaacaccacctgccccgacttcagaaatggtgcccgtgattagctccatgtatccgatcgccctgacgcgtgccgaaatgtcaaatggagctcctcaagagcttgagaagaagagtattcatttaccagaaaagagcgtgcctagtgagagagggctgtcacctaataatagcggacatgacagcacagacactgactcaaaccacgaggagcggcagaatcacatctaccagcaaaatcacatggttctgtcacgtgctaggaacggtatgcctctcctgaaagaagtcccccgttcctacgaattgttaaaaccacctcctatctgtccgcgggatagtgtgaaagtgatcaacaaagagggcgaagttatggacgtgtataggtgcgaccattgccgtgtgctgtttctcgactacgtgatgttcacaatacacatgggttgccatggatttagggatcctttcgagtgtaatatgtgtggttatagatcccacgacagatacgagtttagctcccacatcgctcgaggcgagcatcgagccctgttgaagtag

SEQ ID NO: 24502 - DNA, 1269 bp, synthetic construct
  misc_feature 1..1269: note = Description of Artificial Sequence: Synthetic coding sequence
  source 1..1269: mol_type = other DNA
atggaggacatccagaccaacgccgagctgaagagcacccaggagcagtctgtccccgccgaatcagctgcagttctcaatgactacagtcttacgaagagccacgaaatggagaatgtcgattccggagagggacctgctaatgaggatgaggatatagggggagaacgacccttccagtgcaatcaatgtggggccagttttacacagaagggcaacctgctgcgacacattaaactgcacaccggcgaaaaaccttttaaatgccatctgtgcaactacgcttgccagcggcgagacgccttgactggacatttgcgtactcactctgtcgaaaagccttataagtgtgaattttgtggcagatcctataagcagcgaagcagtttagaagagcacaaggagcgatgcaggaccttcctccagtccacagatccaggtgacaccgcatctgcagaagccagacacataaaagcagagatgggatcggagcgcgctttggtcctggatcggctggcttctaacgtcgctaaacgcaaatctagcatgccacagaagtttatcggcgaaaaaaggcactgttttgacgtcaactacaactcttcatacatgtacgaaaaagagagcgaactgatacagacaaggatgatggaccaggcgatcaataatgccatctcctatctgggagctgaggcgctgcgcccactcgtccagactccgccggcccccaccagtgaaatggtcccagtaatctcttccatgtatccgatagccttgacaagggctgagatgtctaatggcgctccacaggagctggagaaaaaaagcattcatttgccagagaaaagtgtgcccagcgagcgtggtctgagcccaaataactcaggacatgatagcaccgatactgattccaaccatgaggaacggcaaaatcacatttaccagcagaatcacatggtcctgagcagagctcgcaacggcatgccactgctcaaggaagtcccccgatcgtatgaactcctgaaacccccccctatttgcccccgggactcagtgaaggtgattaacaaggagggcgaggtcatggacgtttacaggtgcgatcattgccgagtgctgttcttggactacgtaatgttcaccatccatatgggctgtcacggatttagagacccatttgagtgtaacatgtgcgggtatagatcccacgatcggtatgaattcagctctcacatcgcacgaggcgagcaccgagccctgttgaaatag

SEQ ID NO: 24503 - DNA, 984 bp, synthetic construct
  misc_feature 1..984: note = Description of Artificial Sequence: Synthetic coding sequence
  source 1..984: mol_type = other DNA
atggaggacatccagaccaacgccgagctgaagagcacccaggagcagagtgttcccgcagagtccgccgctgtgctaaatgactactcactcaccaagtcccacgagatggagaatgtcgactccggcgagggacctgccaacgaggacgaggacataggcgcatctgccgaggccaggcacattaaagcagagatgggtagcgagcgggcgctcgtgttagatagactggcaagcaatgtggccaaacgcaaatccagcatgccgcagaaatttataggggaaaaacgccactgttttgacgtcaattataactccagctacatgtacgaaaaagaatccgagttaattcagacgagaatgatggaccaagctattaacaacgctatcagctatctgggggccgaagctctacgacccctggtccagactcctccggcccctacatccgaaatggttcccgtgatctcctcaatgtaccccattgccttgacccgagcagagatgagtaatggcgctcctcaggaactggaaaaaaagagcattcatcttcctgaaaagtccgtgccatctgaaaggggactgtctccgaacaacagcggtcatgactctacagacactgactctaatcatgaggaacgccaaaaccatatataccagcagaaccatatggtgttgagtagggctcgcaatggaatgcccttactcaaagaggtgcctcgcagctatgagctcctgaaacccccgcccatctgtccaagagattctgtgaaagtaattaataaggagggagaggtaatggacgtgtacagatgcgatcattgtcgggtactttttctggactatgtcatgtttacaattcatatgggttgccacggattcagggaccccttcgagtgtaacatgtgcggatatagaagccatgaccgatatgaattttcctctcatatcgcgaggggagagcaccgagcacttctgaaatag

SEQ ID NO: 24504 - DNA, 1392 bp, synthetic construct
  misc_feature 1..1392: note = Description of Artificial Sequence: Synthetic coding sequence
  source 1..1392: mol_type = other DNA
tgacaggagcagagcgtgcccgccgacgacagcatgaaggtgaaggacgagtacagcgaacgagacgagaatgtgctgaaatctgagcctatggggaatgccgaggaacccgagatcccttatagttacagcagggaatacaacgaatacgaaaatatcaaactggaacggcatgtggtctctttcgattcctcccgaccgacatccgggaagatgaactgtgatgtctgtgggttgtcctgtatttctttcaatgtgctaatggtgcataagcggagccacactggggaacgcccattccagtgtaatcagtgcggtgcatccttcacccagaagggtaacctcttgcgccacattaagttacatacaggggagaagccctttaaatgtcacctctgtaactatgcttgccagcgtagggatgctttgactggacacctcagaacacattccgttgagaagccttacaagtgcgagttctgcgggcgctcctacaaacagagaagttctttagaggaacacaaagagagatgccggacattcttgcagtcgacggaccctggtgacactgcgagcgccgaagcccgtcatataaaggcagaaatgggaagtgagcgcgccctggtgttagacaggttagctagcaatgtggcgaagaggaagagttctatgccccagaagttcatcggtgagaagcgccactgcttcgacgtcaattacaactcgagctatatgtacgaaaaggagtctgagctgatccaaaccaggatgatggatcaggctatcaataatgccatcagttacctgggcgctgaggcattacgaccactcgtgcaaacgcccccagcacctaccagtgagatggttcccgtcatatccagcatgtaccctatcgctttaactagagctgaaatgtcaaacggtgccccccaggagctggaaaaaaaatcaatacaccttccggagaaatctgtgccaagcgaaagaggcttgtctccaaacaactccgggcatgactctactgacaccgactcgaatcatgaagagagacaaaatcatatttaccaacagaatcatatggttttatccagggcaagaaatgggatgccactgctgaaggaagtgccaaggtcgtatgaactgcttaaaccacctcctatttgccccagagattctgttaaggttataaacaaggagggagaggtgatggatgtgtataggtgcgatcactgcagagttctattccttgattacgtgatgtttacaattcatatgggctgtcacgggtttcgggatcccttcgaatgcaacatgtgcggttatcgcagtcatgacagatatgagttctccagccacatcgcaagaggcgagcacagggccctgcttaaatag

SEQ ID NO: 24505 - DNA, 1275 bp, synthetic construct
  misc_feature 1..1275: note = Description of Artificial Sequence: Synthetic coding sequence
  source 1..1275: mol_type = other DNA
tgacaggagcagagcgtgcccgccgacgacagcatgaaggtgaaggacgagtattctgaaagggacgagaacgtgctgaagagtgagcctatggggaatgcagaagaacctgagatcccttactcatactccagggagtacaatgaatacgaaaacatcaagttggaacgccacgtcgttagttttgattcaagcaggcctacttcaggaaagatgaattgtgacgtttgcgggctcagctgtatatcattcaacgtgcttatggtacacaagagatcccacactggtgaaaggccattccagtgcaaccaatgtggggctagcttcacccagaaggggaacctcctacgccacatcaaactgcacaccggtgaaaaacctttcaaatgtcacctgtgcaattacgcatgtcagcgccgagatgccctcaccggtcacttaagaacacacagtgcctctgctgaagcgagacatatcaaagccgagatggggtctgaaagagcactcgttctagaccgactggctagcaacgtggcgaagcggaaatccagtatgccacagaagttcattggagaaaagcggcattgttttgatgtcaattataatagctcatacatgtacgagaaggaatcggagttgatccagacgcgcatgatggatcaagctatcaacaacgccatcagctacctgggtgccgaagcactccggcccctggtacagaccccccctgccccaaccagcgaaatggtaccagtaatctccagcatgtatccaatagcgttaactagagccgaaatgtcaaacggtgcaccacaggagcttgagaaaaaaagcattcacctgcccgaaaagtccgtcccatctgagcgaggcttatctcccaacaactcgggacacgactccaccgatacggacagcaaccacgaagagaggcagaatcacatttatcaacagaatcatatggtgttaagtagggcccgaaatggaatgcctctcctgaaggaggtcccccgcagctacgaactactgaagccccccccaatttgtccccgcgactccgtgaaggtgatcaataaagagggcgaagtgatggatgtgtaccggtgtgaccactgccgcgtgcttttcttggattatgttatgttcactatccacatgggatgtcatgggttccgagatcctttcgagtgtaacatgtgcggttaccgttcccacgacagatatgagtttagctctcatattgctagaggcgagcacagggctctgcttaagtag

SEQ ID NO: 24506 - DNA, 1362 bp, synthetic construct
  misc_feature 1..1362: note = Description of Artificial Sequence: Synthetic coding sequence
  source 1..1362: mol_type = other DNA
atggaggacatccagaccaacgccgagctgaagagcacccaggagcagtcagtccccgctgagtctgccgcggttctgaacgattacagtctgactaagtcccacgagatggagaatgtggactccggcgaggggccagccaacgaggacgaagatatcggggatgacagcatgaaagtaaaagatgagtactctgagcgagacgagaacgtgctgaagtcagagccaatgggcaacgccgaggaaccagagatcccctactcctatagccgggaatataatgagtacgaaaacatcaaattggagaggcacgtggtatcattcgactccagccgaccaaccagcggcaagatgaactgtgacgtctgtggcctttcttgcatctccttcaacgtgttaatggttcacaagagatcccatactgtggaaaaaccgtataaatgtgagttctgcgggcgttcatacaagcagcgctcctccctggaggagcataaggaacgctgccgcacattcctacagagtacagatcccggcgataccgcgtctgctgaggccagacacatcaaggctgagatgggaagcgagcgggccctcgtgcttgaccgcctggccagcaacgtggcaaaaaggaagagctccatgccccagaaattcattggcgagaagaggcactgctttgacgttaactacaattcatcatacatgtacgagaaagagagtgaactcatccaaacccgtatgatggaccaagccatcaataatgccatatcttatctgggagctgaagcattgcggcctcttgtccagactcctccagctcctaccagcgagatggttccagtgatctcgtccatgtatcccattgcactgacacgcgccgaaatgtccaacggcgcacctcaggaactagaaaagaagtccatacacttacctgagaagtctgtgcccagcgagcggggcctctcaccaaacaatagcggacatgattccaccgatactgattcaaatcatgaggagagacaaaaccatatttatcaacaaaatcacatggtgctgtcccgggcccgcaacgggatgccactgctcaaagaggtaccacggtcttacgagctcctgaaacccccgcctatctgtcctcgggactcagtgaaggtgatcaataaagaaggcgaggtgatggatgtctacaggtgcgaccactgcagagtacttttcctcgactacgtgatgttcacaatacatatgggatgccacggattcagagaccctttcgaatgtaacatgtgtggttaccggtctcacgatcggtatgagttttcctcgcatattgccaggggtgagcaccgcgccctcctgaaatag

SEQ ID NO: 24507 - DNA, 1530 bp, synthetic construct
  misc_feature 1..1530: note = Description of Artificial Sequence: Synthetic coding sequence
  source 1..1530: mol_type = other DNA
atggaggacatccagaccaacgccgagctgaagagcacccaggagcagtctgttcccgctgaaagcgcagccgtgctgaacgattattctctcaccaaatctcacgagatggagaacgttgattctggtgagggccctgctaatgaggatgaggacattggggatgactctatgaaggtcaaagacgagtacagcgagcgcgatgagaatgtgctgaagagcgaacccatgggtaacgccgaggaacctgagatcccatatagctacagcagggagtataatgaatatgagaatatcaagctggagcgccacgttgtctcgtttgacagtagcaggccaactagtggaaaaatgaactgcgacgtgtgcggactgagttgtatctccttcaacgtcctgatggtgcacaaacgtagtcacaccggcgagaggcccttccagtgcaaccagtgcggagcgagtttcacccagaagggcaatctgctccgccatatcaaactgcacaccggtgaaaagccattcaagtgtcacctctgcaattatgcctgccagcgacgcgatgctttgactggccaccttcggacgcacagtgtggagaaaccctataagtgcgaattctgcgggagatcatataaacaaagatcgtcactcgaggaacataaagaacgctgcaggaccttcctacaatcaaccgatcccggagacactgcctcggccgaggccaggcacatcaaagcggagatgggaagcgaacgagctttagttctggataggctggcatcgaacgtcgccaaacgcaagagtagcatgcctcagaagtttatcggggaaaagcgccattgcttcgatgtcaattacaacagtagttacatgtatgaaaaggaatcagagctcattcaaactcgtatgatggatcaagcgatcaataatgccatctcctatctgggggctgaagcccttagacctctggtgcaaactccccctgctcccacgtccgagatggtcccggtcatttcctcaatgtatccaatcgcactgactagggccgagatgtcgaacggcgctccacaggagctggaaaaaaagtccatccacttgccagagaagtctgtcccctctgagaggggtctatcaccaaacaacagtggccacgatagtaccgacacggactccaatcacgaggaacggcagaaccatatttaccagcagaaccacatggtgttaagtcgggcccgtaatggcatgcctctgctcaaagaggtgcctcgatcatatgaacttctcaagccacccccgatttgccccagagacagcgtaaaggttatcaataaagaaggagaagtgatggacgtttatcggtgtgatcattgcagagtgcttttcctcgattatgtgatgttcaccattcacatgggttgccacggctttagagaccctttcgagtgcaacatgtgcggttatagaagccacgatcgttacgagttttcctcccacatagctcgaggagagcacagagcgttattaaagtag

SEQ ID NO: 24508 - DNA, 1428 bp, synthetic construct
  misc_feature 1..1428: note = Description of Artificial Sequence: Synthetic coding sequence
  source 1..1428: mol_type = other DNA
atggaggacatccagaccaacgccgagctgaagagcacccaggagcaatctgtccccgctgacgatagtatgaaggttaaagatgaatacagtgagcgagacgagaatgtcctcaagagcgaacccatgggaaatgctgaggaacccgagattccgtactcttacagtagagaatataacgaatatgaaaatattaagcttgagcgtcacgttgtgtcattcgatagctcccgaccaaccagtggcaagatgaattgcgacgtctgcggattatcatgtatctcgtttaacgtcctgatggtgcacaagagatcccatacaggagagagaccattccagtgcaatcagtgtggtgctagttttacacaaaagggaaatcttctgaggcacatcaagctgcataccggcgaaaagccctttaagtgccatctctgtaactatgcatgccaacgccgagacgccctcaccggccatctgcggactcacagcgtcgaaaagccatacaagtgcgagttttgcggcaggtcatataaacagcgaagttctttagaggaacacaaggagcgatgccgaaccttcctgcagagtactgacccaggtgacactgcaagcgctgaggccagacacattaaggctgagatgggaagcgaaagagctttagtgttggacagactggccagtaacgtggctaagcgcaagagttcgatgccccaaaagtttattggcgagaaacgacactgttttgacgtgaattacaactcatcctatatgtatgaaaaagaaagcgagctgatacagacccgcatgatggatcaggcgatcaacaacgctatttcatatctgggagcggaggctctgcgaccacttgtacagaccccccccgcccccacgagcgaaatggtgcccgttattagtagtatgtatccaatcgccttaacccgggcagaaatgtctaatggcgccccccaggagctggagaagaaatccatccatctcccagaaaagtcagtgccatccgagcgcgggctgtcaccgaataattcgggtcacgacagtaccgatacagacagtaaccatgaggagagacagaaccacatttaccaacagaatcacatggtgttgtcaagagcccgcaatggaatgcctttgctcaaggaagtcccgcggtcatacgagttgctcaagccaccacccatctgccctcgcgacagtgtgaaggtgattaataaggaaggggaggtcatggatgtctataggtgtgaccactgccgggtcctctttctggactacgtgatgtttaccatccatatgggctgccacggcttcagggatcccttcgagtgtaatatgtgtgggtacagatcccatgatagatacgaattctcttcgcacatcgccaggggggagcatcgagccctgcttaagtag

SEQ ID NO: 24509 - DNA, 450 bp, synthetic construct
  misc_feature 1..450: note = Description of Artificial Sequence: Synthetic coding sequence
  source 1..450: mol_type = other DNA
atgaaggtggccagcggcagcaccgccaccgccgccgccggccccagctgtgccctgaaagcaggcaaaacagcaagcggcgccggtgaggtggtccgctgcctgagtgagcaaagtgtggctatctcccggtgcgctgggggtgccggagcacgcttgccagccctgcttgacgaacagcaggtgaacgttttactatatgatatgaacggatgttactcgcgactgaaagaactggtgccaactcttccccagaacaggaaagtttctaaagtagaaatcctacagcatgtgatcgattacattcgcgatcttcaactggagcttaacagcgaatcagaagtcgggaccccaggtggacgggggctgcctgtgcgcgctcccctcagcactcttaacggagagatatccgctttgactgcagaggtgaggagtagaagcgaccactag

SEQ ID NO: 24510 - DNA, 468 bp, synthetic construct
  misc_feature 1..468: note = Description of Artificial Sequence: Synthetic coding sequence
  source 1..468: mol_type = other DNA
atgaaggtggccagcggcagcaccgccaccgccgccgccggccccagctgtgccctgaaagccggtaagaccgcctctggtgccggcgaagttgtccggtgcctttcagagcaaagtgttgcaatctcaagatgcgctggtggggcaggcgcccgcctgcctgcccttttagacgaacaacaggttaatgttctcctctacgacatgaacggttgctactcacggctcaaagagctggttccaactctgcctcaaaaccgcaaagtctccaaggttgagatccttcagcacgtcattgactatattagagacctgcaacttgaactcaattccgaatctgaggttgggacacccggcggtcggggtttaccagtcagggctccactgagtacactcaacggcgagatctctgcccttactgccgaagccgcatgcgtgccagccgatgatcggattctatgccggtag

SEQ ID NO: 24511 - DNA, 738 bp, synthetic construct
  misc_feature 1..738: note = Description of Artificial Sequence: Synthetic coding sequence
  source 1..738: mol_type = other DNA
atggccgccggcatgtacctggagcactacctggacagcatcgagaatttgcctttcgaactgcagcgtaactttcagcttatgagggacttggaccagaggaccgaggacctgaaagccgagattgataagctggccaccgaatatatgtcctcagcacgtagtttatcttctgaggagaagctcgctttgcttaagcagatacaggaagcctacgggaagtgtaaagagtttggcgatgacaaagtacagttagctatgcagacatatgaaatggtcgataagcacatacgccgactggacactgatttagccaggttcgaggccgatcttaaagagaaacagattgaaagctccgactacgacagttcatcctccaaagggcggactcaaaaagagaaaaaggccgctcgggctaggagcaaagggaagaactcagatgaggaagccccgaaaaccgcacagaaaaagctgaagctggttcgtaccagcccagaatacggaatgccgtcagtaacctttggaagcgtgcatccctctgatgtactcgacatgccagttgaccctaatgagccaacttactgcctgtgccaccaagtgtcctacggggaaatgattggttgtgacaaccctgactgctcaattgaatggttccacttcgcctgtgtcggacttacaaccaaacccagggggaagtggttctgcccacgctgcagccaagagcgtaaaaagaaatag

SEQ ID NO: 24512 - DNA, 840 bp, synthetic construct
  misc_feature 1..840: note = Description of Artificial Sequence: Synthetic coding sequence
  source 1..840: mol_type = other DNA
atgctgagccccgccaacggcgagcagctgcacctggtgaactacgtggaagattacctcgattcaatcgaaagcctgcctttcgacctccaacgcaacgtctcactgatgagggaaattgacgccaaatatcaggaaatccttaaagaactggacgaatgctacgagcgatttagccgcgagaccgatggagctcagaaacgccggatgctgcactgtgtccaaagggccctgattcgcagtcaagagttgggggacgagaagattcagattgttagccagatggtggagctggttgagaatagaaccaggcaggtcgattctcacgtcgaactgtttgaagcgcagcaggagctcggcgatactgcgggaaactctggtaaggctggcgctgatcggccgaagggtgaagccgcggcacaggctgataaacccaactcgaagcggtcccgcaggcagaggaacaatgaaaatagggagaacgcgtcgagcaaccacgaccacgacgacggggccagcggaacccctaaagaaaaaaaggccaagacctcaaaaaagaagaaacgctcaaaagcaaaggccgagagggaggctagccctgccgacctgcctattgatcctaacgagcctacttactgtctttgtaaccaagtgagctatggcgagatgattggctgtgacaatgatgaatgccccatagagtggttccattttagctgcgtggggttaaaccataagccgaaagggaagtggtattgtcccaaatgtcgtggagagaacgagaaaaccatggacaaggcgctagagaaaagcaaaaaggaaagagcctacaaccggtag

SEQ ID NO: 24513 - DNA, 708 bp, synthetic construct
  misc_feature 1..708: note = Description of Artificial Sequence: Synthetic coding sequence
  source 1..708: mol_type = other DNA
atggagatcctgaaggagctggacgagtgctacgagcggttcagccgtgaaactgatggagcacaaaaaaggcgtatgctgcattgcgtccagcgggcacttatccgatcccaggaactgggcgatgaaaagatccagattgtgtctcaaatggttgagttagtggaaaacaggacacgccaagtggacagccatgtggaattgtttgaagcgcagcaggagctgggggacaccgcaggcaattcaggcaaggctggagctgacaggcccaaaggggaggcagccgctcaggccgataaacccaatagcaaaaggagcagaaggcagaggaataatgagaatcgtgagaacgcctcctcaaaccacgatcacgatgacggagcctctggtactccaaaggagaagaaggccaagacatccaaaaaaaaaaaacggtcaaaggcaaaggccgaacgagaggccagccccgctgatctgcccatcgatccaaatgaaccaacctattgtctgtgtaatcaagtgtcttacggagagatgatcgggtgcgacaatgatgagtgtccgatcgagtggttccatttctcctgcgtggggctcaaccacaaacctaaaggcaagtggtattgtcccaaatgcaggggagagaatgagaagaccatggataaggcgctcgaaaagtcaaaaaaggaaagggcctacaataggtag

SEQ ID NO: 24514 - DNA, 1269 bp, synthetic construct
  misc_feature 1..1269: note = Description of Artificial Sequence: Synthetic coding sequence
  source 1..1269: mol_type = other DNA
atgagcttcgtggagtgcccctaccacagccccgccgagcggctggttgccgaagccgacgagggggggcctagcgctataacaggtatgggcctatgcttccggtgtctgctgttttctttcagcgggcgttccggagttgaaggcgggcgtgtcgatctgaatgtttttgggagtctgggcctgcagccgtggatcgggagttccaggtgttggggtgggccatgtagcagtgccttacggtgcggctggttttcatcgtggcctcccccttcaaagtctgcgatccccatcggaggcggctccaggggcgccggaagggtatctaggtggccacccccccattggctagaagcttggcgtgttagccccctgcccctgtccccactgtcccccgcgaccttcggcaggggctttatcgctgtggcggtaatccccggtctatgggcgcgagggagaggttgttcctcagaccggctgcctaggcctgctgggccagcacggaggcaatttcaggcagcctctcttttgactcgcggctggggcagggcatggccttggaaacagatactgaaggaactagacgagtgctacgagaggttctcacgtgagacagatggggctcagaagcggagaatgctacactgtgtgcagcgcgctctgattaggagccaagagttgggggacgaaaagattcaaatcgtgtctcaaatggtggagctggtggagaacaggacgcgccaggtggattctcacgtggaactgtttgaggcccagcaagagttgggagataccgccggtaactctggtaaggccggcgctgatcgaccaaagggtgaagccgctgcccaggcggacaagcctaacagcaagcgttcacgcagacagcgcaataatgagaatcgcgagaatgcttccagcaaccacgatcacgatgacggggctagcgggacgccgaaagaaaaaaaagctaagacctcgaaaaagaagaagcgatctaaagccaaggccgagagggaggctagtccagctgatctgccaatagatcccaatgaaccaacatactgcctgtgtaaccaggtgagctacggagagatgatcgggtgtgacaatgacgagtgtcccattgagtggttccacttttcctgcgtaggcctgaatcacaagccaaagggaaaatggtactgtcccaaatgcaggggtgaaaatgaaaaaactatggataaagcattagagaaatctaagaaagagcgggcgtacaaccggtag

SEQ ID NO: 24515 - DNA, 633 bp, synthetic construct
  misc_feature 1..633: note = Description of Artificial Sequence: Synthetic coding sequence
  source 1..633: mol_type = other DNA
atgctgcactgcgtgcagcgggccctgatccggagccaggagctgggtgatgagaagatccagatagtctcccagatggtcgagcttgtggagaaccgcacccgccaggtagactcccatgtcgagctgttcgaggcccagcaggagcttggggacaccgccgggaattctggcaaagcaggagcagatagaccaaaaggggaggccgctgcgcaggccgacaaacctaacagcaagagaagtaggcgtcagcgtaacaacgagaaccgagagaatgcttcctcaaaccacgatcacgatgatggtgcctctggcacccctaaagagaaaaaggccaaaactagcaagaaaaaaaagagaagtaaggccaaagcagagcgcgaagcttctcccgcagatctgccgattgatcccaacgaaccaacttactgcctgtgtaatcaggtgtcttacggagagatgattggttgtgataatgatgaatgcccaattgagtggtttcacttcagttgcgtaggtctgaatcataagccaaaggggaaatggtactgccccaaatgtaggggagaaaatgagaaaacgatggataaagctctcgagaagagcaagaaagagcgggcttacaaccgctag

SEQ ID NO: 24516 - DNA, 747 bp, synthetic construct
  misc_feature 1..747: note = Description of Artificial Sequence: Synthetic coding sequence
  source 1..747: mol_type = other DNA
atggccgccggcatgtacctggagcactacctggacagcatcgagaatctcccattcgaactgcagcgtaattttcaattaatgcgagacctggatcagaggacagaagaccttaaggccgagattgataagctagctaccgaatatatgagctcagcccggtcgctgagctccgaagagaagttagccctcctcaaacagatccaagaggcatatggcaagtgcaaagagtttggcgatgataaggtccagctcgctatgcagacgtacgaaatggtggacaaacacataaggagattggacacagatctggcaaggtttgaagcagatctgaaggagaaacagatcgaaagctccgattatgattcttcttcttcaaagggaaagaagtcgcgtacccagaaagagaaaaaagcagccagagctcgtagcaagggcaagaacagtgacgaggaggcccctaagaccgctcagaaaaagttgaaacttgtccgcacttccccggaatatggcatgccctccgtgaccttcgggtctgtgcatcccagcgacgtgctggatatgccagtcgatcccaatgaaccaacctattgtctttgccaccaagtttcttatggagaaatgataggctgtgataatcctgattgttctatagaatggtttcatttcgcttgcgtgggtctcactacaaagccacgtggcaaatggttctgtccaaggtgctcccaagaaaggaagaagaaatag

SEQ ID NO: 24517 - DNA, 750 bp, synthetic construct
  misc_feature 1..750: note = Description of Artificial Sequence: Synthetic coding sequence
  source 1..750: mol_type = other DNA
atggccgccggcatgtacctggagcactacctggacagcatcgagaacctcccctttgagctgcaacgtaacttccaactcatgagagatttggatcagcggactgaagacctgaaagccgaaatcgataaacttgcgacagagtatatgtctagtgcccgatccttgtctagcgaggaaaaactggcccttctgaaacagatccaggaggcatatggtaaatgtaaagagttcggagatgataaggtgcaactggctatgcaaacatacgaaatggttgacaagcatatacggagactggacaccgacctggcgaggttcgaggccgacttaaaagaaaagcaaatagagagttccgattatgactcatcctcgtcaaaaggtaagaaaaaagggcgcacgcagaaggaaaagaaagccgccagggcccgttcaaagggaaaaaattccgatgaggaagctcctaagaccgcccagaagaaattaaagctcgtccgcacatcaccagagtatggtatgccaagcgtaacgtttggcagcgtacacccgagcgacgtgctcgatatgccagttgatccaaatgagcccacttattgcttatgccatcaagtttcctatggcgagatgattggttgcgataacccagattgctcaattgaatggtttcactttgcatgtgtgggactcacgacaaagccacgcggtaagtggttctgtccccggtgcagccaggaacgtaagaagaaatag

SEQ ID NO: 24518 - DNA, 741 bp, synthetic construct
  misc_feature 1..741: note = Description of Artificial Sequence: Synthetic coding sequence
  source 1..741: mol_type = other DNA
atggccgccggcatgtacctggagcactacctggacagcatcgagaacttacccttcgagctccagcggaattttcaactcatgagagatctggaccagcgtactgaagatctgaaagccgagatagacaagctggctaccgaatacatgagcagcgctagaagcctttccagcgaggagaagctagccctcttgaagcagatacaggaggcttacggcaagtgtaaggagttcggagatgataaggtgcagctggctatgcagacgtatgagatggttgacaagcatattcggcggctcgacacagacctggccagattcgaggccgacctgaaggaaaaacaaattgagagcagtgactatgactccagctcctccaaagaaggtagaactcaaaaggaaaagaaggctgcacgggcgcgaagcaagggcaagaacagcgatgaagaggcacctaaaactgcacagaagaagctcaagttagtgcggacatcccccgaatatgggatgccctcagtcacatttgggtcagtgcatcccagcgacgtgctggacatgccagtagatcccaatgaaccaacttactgcctgtgccatcaagtgtcttacggagaaatgatcggatgcgacaaccccgattgtagcatcgagtggttccattttgcctgcgtcggactgacaacgaagcccagaggcaaatggttctgtccacgttgcagtcaagagcgcaaaaaaaagtag

SEQ ID NO: 24519 - DNA, 540 bp, synthetic construct
  misc_feature 1..540: note = Description of Artificial Sequence: Synthetic coding sequence
  source 1..540: mol_type = other DNA
atggccgccggcatgtacctggagcactacctggacagcatcgagaacctgcctttcgagctgcagcgtaatttccagcttatgagagaccttgatcaaagaaccgaggacttgaaagcagagatcgacaagttagcgacagaatacatgtcctctgccagatccctgtctagcgaggaaaagctggccctcttaaaacagattcaagaagcctacggcaagtgtaaagagtttggcgacgacaaggtgcagcttgctatgcaaacatatgaaatggtggacaagcacatccgtcgcctcgatactgatttagcacgatttgaggccgatctcaaggagaagcagattgagtcgtccgactacgatagtagcagttctaaaggtaagaaaaagggccgtacccagaaagagaagaaagccgctagggccagatcgaagggcaagaatagcgacgaggaggcacccaagactgcccaaaagaaactgaaactggtccgaactgtcccactatctggatctattcttcccgtgtggggctag

SEQ ID NO: 24520 - DNA, 678 bp, synthetic construct
  misc_feature 1..678: note = Description of Artificial Sequence: Synthetic coding sequence
  source 1..678: mol_type = other DNA
atggccgccggcatgtacctggagcactacctggacaacctgaaggcggagatcgacaaacttgccactgaatatatgtcaagcgctcgcagtctgtcttccgaggaaaaactcgctctgctgaagcagatccaggaggcgtacggaaaatgcaaagaatttggagacgataaagtccaacttgccatgcagacgtatgagatggtcgacaaacacattcgccgtcttgatacggatctggccagatttgaagccgaccttaaagaaaaacagattgaatccagcgattatgacagctcctcctctaaaggaaagaaaaagggccgaacacagaaggaaaagaaagctgcccgggcaaggtcaaaaggtaagaactctgatgaagaagcccccaagaccgctcagaagaaactgaagctcgtgcgaaccagcccggagtacggtatgccttctgtgacttttggcagcgtgcacccttccgacgtgctggatatgcccgttgatcccaatgagcccacatattgcctttgccatcaggtatcctacggcgagatgattgggtgtgacaaccccgactgctctatcgaatggttccacttcgcttgcgttggactgacgactaagccaagggggaaatggttttgtcctagatgttcccaggaaaggaaaaaaaaatag

SEQ ID NO: 24521 - DNA, 3729 bp, synthetic construct
  misc_feature 1..3729: note = Description of Artificial Sequence: Synthetic coding sequence
  source 1..3729: mol_type = other DNA
atggccagcccccccgagagcgacggcttcagcgacgtgcggaaggtcggctatctcagaaagcccaagtccatgcataaacgctttttcgtgctgagggctgcatccgaggcaggaggaccagcccgcctggagtattatgagaacgaaaagaaatggcgacacaagtcatccgctccaaagcgttctatacccctggaaagctgttttaacattaacaaaagggccgatagtaaaaacaaacacttagtagccctgtacacccgcgacgagcacttcgcgattgctgcagatagcgaagccgagcaggactcttggtaccaagctttactgcagctccataacagggctaaaggtcaccatgatggcgccgcagccctgggtgcgggggggggagggggctcctgcagtggtagctctgggctcggcgaggcgggagaggacctgtcctacggagacgtgccaccagggcctgcattcaaggaggtgtggcaggtaatcttgaaacccaaagggctgggtcagaccaagaacttgatcggaatttacagactgtgtttgacctccaagacaatatcattcgtgaagctgaacagcgaagccgccgcggtcgtcctgcagctcatgaatatccgacgctgtggtcactctgagaactttttctttattgaagtgggccggagcgccgtaacaggtcctggtgaattttggatgcaagtggacgactcagtcgtggcccaaaacatgcatgagaccatactggaggcgatgcgcgcgatgtctgatgaattcaggccaagatccaaaagtcagtctagctcaaattgcagtaatccaatcagtgttcccttgcggagacatcacttgaacaaccctccccccagtcaggtggggctgacccgtagatctcgtacggaaagtataaccgccacgagccccgcatcaatggtgggaggaaaacctgggagcttccgcgttcgggcttccagcgacggcgaggggacgatgagtcggcccgccagtgtagacggctctcccgtttcaccgagtactaatagaacccacgcacatcgacaccgggggagtgcccgcctgcatccacctctgaatcacagtagatccatcccaatgcctgcatctagatgctccccatctgcaacatctcctgtcagcctcagctcgtccagtacaagtggccatggcagtacatcagactgcttgttcccgcgacgatcttctgcgagcgtaagtggctctccttcagatggggggttcatctcctctgatgaatacggatcatccccatgtgattttcgtagcagttttaggtccgtcactcctgattccctgggtcatactcctccagcgcgtggcgaagaagaactgtctaactatatttgtatgggaggaaaggggccaagcactcttaccgctcctaatgggcactatattcttagtcggggcggtaatggccatcgctgtactcccggcaccggtctgggcacctccccggcgctcgccggagatgaggctgcctccgctgcagatctggataaccgcttccgcaagcggactcattctgcaggaacttccccaaccatcacccaccagaagaccccttcgcagtcttcagtcgcctcaattgaagaatacactgagatgatgcctgcctaccctcctggaggtggctctggcgggagactccctggacatagacacagcgcattcgtcccaacccggagttacccagaggagggcttagagatgcaccctctggaacgccggggcgggcaccacagaccagattcctctaccctgcacactgacgatggatacatgcctatgtcccctggagtcgcgccagtgccttcaggtaggaaaggctctggggactacatgcccatgtcaccaaagagtgttagcgcccctcagcagattataaatcctatcagacgccaccctcaacgggtggaccctaatggctatatgatgatgtctccatctggaggctgcagccctgacataggaggaggaccgtcctcgtcaagctcaagtagtaatgccgtgcccagtggaaccagctacgggaagctgtggactaatggtgtgggcggacaccattcccatgtgctgcctcacccaaagcctcctgtggaatccagcggggggaagcttttaccctgtaccggagattatatgaacatgagcccagtgggcgactccaatactagctctcccagcgactgttattatgggcctgaggatccacagcataagcctgttttgagctattactcattaccccggtcatttaagcacacacagcgccctggggagcccgaggagggagcacgccaccagcatttgagactgtccactagctccgggcggctgctttacgctgccactgctgatgattccagcagtagcacctcaagcgacagcttaggaggtggatattgcggggcaagacttgagcctagcttaccgcacccccatcaccaggtgctccagcctcatcttcctcgcaaagtggataccgccgcacagaccaactctaggctggcaaggccaacaagactaagtctgggtgaccccaaagcgtcaaccctacccagagcccgggaacaacaacagcagcagcaacccctgctccacccacccgagccaaagagtcccggcgaatatgtaaatatcgaatttgggagcgatcagtccggctacctctcgggaccagtcgctttccactcaagcccaagcgtcaggtgcccttctcagttgcagcccgcgccacgcgaggaggagaccggtacagaagagtacatgaaaatggacttaggacccggcaggcgggccgcttggcaggaatcaactggcgttgagatggggcgtcttggtcccgcccctcccggggcggcaagcatttgccgtccaactagagctgtgccatcgagcagaggggattatatgaccatgcaaatgtcttgcccgaggcaatcctatgtggacacctcgcccgcagcgccagtttcctacgctgacatgcgcactggaatcgcagccgaagaagtctctctccctagggcgaccatggccgccgcgtcatctagctctgccgcctccgcgtcccccactgggcctcagggcgctgcagaactcgccgcccactctagcctcttaggagggccccagggacccggtggaatgagcgccttcaccagggtgaacctcagcccaaaccgcaatcagtctgcgaaggtcatccgcgcagaccctcagggatgtcgccgcagacactcttcagagactttcagctcgactccttccgccaccagggtaggaaataccgtgcccttcggggcaggggcggctgtgggaggtgggggagggtcatcatccagtagcgaggacgtgaaaagacactcaagcgcatctttcgaaaatgtatggctgcggccaggtgaattaggcggcgcgcccaaagagcctgcaaagctctgtggcgcggctggcgggctggagaacgggctcaattacatcgacctggaccttgtgaaggactttaagcagtgtcctcaggagtgtactcccgagccccagccaccgcctccgccgccacctcatcagcctttgggttctggggaaagttcctcgacacgccggagctccgaggatttaagcgcttacgcctccataagcttccagaagcaacccgaggatcgacagtag

SEQ ID NO: 24522 - DNA, 588 bp, synthetic construct
  misc_feature 1..588: note = Description of Artificial Sequence: Synthetic coding sequence
  source 1..588: mol_type = other DNA
atgggcaagatcagcagcctgcccacccagctgttcaagtgctgcttctgcgacttcctgaaggtcaagatgcacacaatgtcgagtagccatctgttctatctcgcactctgtctcttaacctttacctctagcgccactgccggtcccgagactttatgcggagctgaactggtggacgcgttgcagttcgtttgtggagatcgggggttttattttaataagccaactggatacgggagcagcagcagaagagctccgcagaccggtatcgttgacgagtgctgtttcaggtcatgtgacctacgacgcctcgagatgtactgcgcgcctcttaaaccagcaaaatcagctcgaagtgtccgagcccagagacacactgacatgccaaaaacccagaaataccagccgccctccaccaataaaaacacgaagtcccagaggaggaagggctggcccaaaacacacccaggcggtgagcagaaggagggcacagaagcatcactgcagatcaggggaaagaaaaaggagcagcgtcgcgagataggctccaggaatgccgaatgtcgcggaaagaaaggcaagtag

SEQ ID NO: 24523 - DNA, 462 bp, synthetic construct
  misc_feature 1..462: note = Description of Artificial Sequence: Synthetic coding sequence
  source 1..462: mol_type = other DNA
atgggcaagatcagcagcctgcccacccagctgttcaagtgctgcttctgcgacttcttgaaagtgaagatgcacaccatgtcctctagtcatctattttatctcgcgctctgtctactgactttcacatcgtctgccactgccggtcccgagacattatgtggtgcagagctcgttgacgccttgcagttcgtgtgtggcgatcgtgggttctatttcaataaacccacgggctatggaagtagctccaggagagctccacagactggtattgtggacgagtgttgcttccgaagctgcgacctacgaaggttggagatgtactgtgcccccctgaagcccgctaagagtgcccggagtgtgcgtgctcagaggcatacagacatgcccaaaacacagaaggaagtgcacctaaagaacgcaagccggggctccgccgggaataaaaactatcgcatgtag

SEQ ID NO: 24524 - DNA, 477 bp, synthetic construct
  misc_feature 1..477: note = Description of Artificial Sequence: Synthetic coding sequence
  source 1..477: mol_type = other DNA
atgggcaagatcagcagcctgcccacccagctgttcaagtgctgcttctgcgattttctgaaggtcaagatgcacactatgagctcatcacatctcttctacttggcgctgtgtctgttgactttcaccagtagcgcgaccgccgggcccgagacactgtgcggggcagagctagtggacgcactccaattcgtgtgcggtgaccgcgggttttactttaataagccgactggttatgggtctagctcgaggagagccccgcagactggcatcgtagatgagtgttgttttcgctcctgtgatctcagacggttagaaatgtattgcgctccactgaagccggctaagtctgcccgctccgtgcgcgctcagcggcacacagatatgcctaagacccaaaaatatcagccaccttcaaccaataagaacacaaagagtcagcgcaggaagggctcaacattcgaggagagaaagtag

SEQ ID NO: 24525 - DNA, 420 bp, synthetic construct
  misc_feature 1..420: note = Description of Artificial Sequence: Synthetic coding sequence
  source 1..420: mol_type = other DNA
ctgaaggtgaagatgcacaccatgagcagcagccacctgttctacctcgcactttgcctgctgacattcaccagctccgccaccgccggtccagaaactctctgcggcgctgaactggtggatgctcttcaattcgtgtgcggcgatcgcggattttacttcaataaacctaccgggtatggcagcagttcgagacgggcacctcagacaggaattgtagacgagtgctgtttccggagttgcgatctacggaggctggaaatgtactgcgctcccctcaagccagcgaagagcgcaagatccgtacgcgcccagagacataccgatatgcccaaaacgcaaaagtaccaacccccgtccacgaacaagaacacaaagagtcagaggcgcaaagggtccacattcgaagaacggaaatag

SEQ ID NO: 24526 - DNA, 414 bp, synthetic construct
  misc_feature 1..414: note = Description of Artificial Sequence: Synthetic coding sequence
  source 1..414: mol_type = other DNA
atgatcacccccaccgtgaagatgcacaccatgagcagcagccacctcttttacttagccttatgtttgctcactttcacatcctccgccaccgcaggacccgaaaccttatgtggcgcagaactcgtggacgctctgcagtttgtgtgcggggacagaggcttctacttcaacaagccaaccggatacggctctagttcccgcagagcacctcagacaggcatcgtcgatgaatgctgctttaggagttgcgatctccggcgactggagatgtattgcgcccctctcaagcctgcaaaatctgcaaggtcagtgagggctcagagacacaccgatatgccaaagactcaaaaggaagtgcaccttaagaacgctagccgcggcagtgcaggcaacaagaactatcgaatgtag

SEQ ID NO: 24527 - DNA, 477 bp, synthetic construct
  misc_feature 1..477: note = Description of Artificial Sequence: Synthetic coding sequence
  source 1..477: mol_type = other DNA
atgggcaagatcagcagcctgcccacccagctgttcaagtgctgcttctgcgacttcttgaaagttaagatgcacaccatgtcgagcagtcacctgttctacctggccctgtgcttattgacctttacttcaagtgcgactgcgggaccggagacactctgtggggcagagctcgtcgatgccctgcaattcgtatgcggcgatagagggttttacttcaataaaccaacaggatatggatcgagcagcagaagagccccgcagacaggcattgtagatgaatgctgtttccggtcctgcgatttgaggagactggaaatgtactgtgctcctctgaaacctgccaaatcagcccgtagtgtgagggctcagagacacactgacatgcctaagacccagaaatatcagcccccttccaccaataaaaatacgaaaagccagaggcggaaggggagtacctttgaggaaaggaagtag

SEQ ID NO: 24528 - DNA, 4104 bp, synthetic construct
  misc_feature 1..4104: note = Description of Artificial Sequence: Synthetic coding sequence
  source 1..4104: mol_type = other DNA
atgaagagcggcagcggcggcggcagccccaccagcctgtggggcctgctttttctgtctgcagcgctcagtctctggccgacctcgggggagatctgtggcccaggaatcgatattaggaacgactaccaacagctgaagcgcctcgagaactgcacagttatcgaaggctatctgcacattttgttaatatccaaggccgaggattataggagttatagatttcctaaactcaccgtgattacggagtatctgcttctgttccgagtcgcaggtttagagtcactgggtgatctcttccctaatctgaccgtgatccgaggttggaaacttttttataattacgcactggttatcttcgaaatgacaaatctgaaggatatcgggttgtacaatttaagaaacattacgcggggtgctatcagaattgagaaaaacgcagatctgtgttacttatcaactgttgattggagtctcatcctggacgccgtgtcgaacaactatattgtaggcaacaagcctccaaaggaatgcggggatttatgccccggcactatggaggaaaaaccgatgtgtgagaagacaaccattaataatgagtataattataggtgctggacaacaaatcggtgtcagaagatgtgtccatcaacgtgcggcaaaagagcatgcaccgagaacaacgagtgctgccatcccgaatgtttggggtcctgtagcgcccctgacaatgacacagcctgtgtcgcctgtcgccactactactacgcaggggtctgtgtgcctgcatgcccccccaatacgtatagatttgaaggatggcggtgcgtggatagggacttctgcgcaaacatactgagcgccgagagcagcgattccgaaggattcgttatccacgacggagaatgtatgcaggagtgtccatctggtttcattaggaacggctctcagtccatgtactgtatcccatgcgaggggccttgccccaaggtctgtgaagaagagaaaaagactaagactattgacagcgtaacctcagcacagatgctgcaggggtgcacaatatttaaggggaatctcttgatcaacatccgccgtggaaataacatcgcttcagagctggagaactttatgggtttgatagaagtggttactggctacgttaagataagacattcacacgcgcttgtgagtctatcattcctgaagaatctccggctgattctcggcgaagagcagctggagggcaactacagcttttacgtactcgacaaccagaatttacaacagttatgggactgggaccatcgaaatttaacaataaaagcaggcaaaatgtactttgcattcaatcctaagctgtgcgtttcggagatttatcggatggaggaagtcaccggcactaagggtcggcagagcaagggcgacattaatacaagaaataatggcgaacgagcctcgtgtgagtccgatgtgttgcatttcacctccactaccaccagcaaaaatcgtattatcattacgtggcaccggtacagaccaccggattaccgggacttaatcagttttaccgtgtattacaaggaagcccctttcaagaatgtaaccgagtatgatggccaagatgcttgtgggagtaattcttggaatatggtagatgtggacctgcccccaaacaaggatgttgagcccggtatccttctgcacggtctcaaaccttggacccagtacgcagtttacgtcaaggccgttactctcacaatggtggagaatgaccacatccggggtgcaaagtccgagattttgtatatcagaacgaatgcatctgtccctagtattccactcgacgtgctgtccgcgagcaactccagtagtcagctgattgtgaaatggaaccccccttcactcccgaacggaaacttgagttactatatcgttcggtggcagaggcagccacaggatggctatctctatcgccacaattattgctccaaagacaaaatccccatacgcaaatacgccgacggcacgattgatattgaggaggtgactgagaaccccaaaaccgaggtctgcggcggggaaaaaggcccatgttgcgcatgtccaaaaaccgaggcagagaagcaggccgaaaaggaggaggcggaatatagaaaagttttcgagaacttccttcataactccatttttgtgcccagacccgagagaaagagaagggacgtaatgcaagtggccaacaccacaatgagctcacgtagccgaaacaccacagcagctgacacttataacattaccgaccccgaggagcttgagaccgaatatcctttcttcgagtcccgagtcgacaacaaagagagaaccgtcatcagtaacctgaggcccttcactttgtacagaatcgacattcactcttgtaaccacgaggctgaaaagctcggctgttccgccagcaatttcgtttttgcccgaaccatgccagccgagggagctgatgatatacctggtcctgtaacatgggagcccagacccgagaatagcatcttcctcaaatggcccgaacccgaaaatcccaatggcctgatactcatgtacgagattaagtacggaagccaagttgaggatcagcgagagtgtgtttcacgccaagagtacaggaaatatggaggggccaagctgaacaggctcaaccctggtaactatactgccagaattcaagcaaccagtcttagtggcaacggctcttggaccgaccccgtctttttctatgttcaggcaaagaccggatacgaaaacttcatacatctgattatcgccttgccggtggccgttctgctcatagtgggcggcctggtaatcatgctctacgtcttccaccggaaacgcaataattcccgcctgggcaatggtgttttatacgcctctgtgaatccagaatacttcagcgctgctgacgtttacgtgcccgatgagtgggaggtcgctcgggagaagataacaatgtcaagagaactggggcagggaagctttggaatggtctacgaaggtgttgctaaaggggtggtgaaggacgaacctgagacgagagtggcaatcaaaacagtcaatgaagcagccagcatgcgagagagaattgagtttctgaacgaggcctccgtaatgaaggagtttaattgccatcacgtcgtccgactgctgggcgttgtgtcacaggggcagcctacactggttataatggagctgatgactaggggggatctgaagagctacctcagaagcttaaggcccgagatggaaaacaaccctgtgctcgcccccccaagcttgtccaaaatgatacaaatggcaggagagatcgcagacggaatggcctacctaaacgcaaataagtttgtgcaccgggatctggccgcacgaaattgtatggtagctgaagatttcacagtcaagatcggcgactttgggatgactcgggatatctacgaaactgattattacaggaagggggggaaaggtctactgccggtgcgatggatgagccctgaaagcctaaaggacggcgtgttcacaacgtacagcgatgtgtggtcgttcggagtggtgctgtgggagatagccacactagctgagcagccatatcagggactgagcaacgaacaagttcttcggttcgtgatggagggggggttacttgataagccggataattgcccagatatgctgtttgagttaatgcgcatgtgttggcagtacaaccctaagatgagaccgtctttcctagaaattatcagctcaattaaggaggagatggaacctgggtttcgtgaagtgagcttttattattctgaagagaacaaactgccagagcccgaagaacttgacttggagccagaaaacatggagtcagtgcccctagacccctccgcaagctcttcctccttacctttaccggataggcactccgggcataaagcggaaaacggaccaggacccggggtccttgttctgcgggcttcgtttgatgaacgacagccatacgcccatatgaatggaggcagaaagaacgagagagcgctgcctttgcctcagtcctctacatgctag

SEQ ID NO: 24529 - DNA, 543 bp, synthetic construct
  misc_feature 1..543: note = Description of Artificial Sequence: Synthetic coding sequence
  source 1..543: mol_type = other DNA
atgggcatccccatgggcaagagcatgctggtgctgctgaccttccttgcgttcgcctcttgttgcattgccgcataccggccatctgagacactgtgcggcggtgagctggtggatactcttcagttcgtgtgcggggaccggggcttttatttctcaagaccagcctctagagtctcacggagatctaggggcatcgtggaggaatgttgctttagaagttgcgacctggcgcttctagagacgtattgcgctacccccgcaaagagtgagagggacgtgagtacacctccaaccgtgctgcctgataacttcccaaggtaccccgtggggaaattttttcagtacgacacatggaagcagtctacgcagcgccttcgccggggactgcctgcactgctgcgcgcgaggcgggggcatgtcctcgccaaggagttggaagcatttcgcgaggctaaacggcatcgtcccctaatcgcactgcccacgcaagacccagctcacggtggcgctcctcccgaaatggccagtaaccggaagtag

SEQ ID NO: 24530 - DNA, 543 bp, synthetic construct
  misc_feature 1..543: note = Description of Artificial Sequence: Synthetic coding sequence
  source 1..543: mol_type = other DNA
atgggcatccccatgggcaagagcatgctggtgctgctgaccttcctcgccttcgcaagctgttgcattgcggcttacagacctagtgagaccctctgtggcggagagctcgtcgatactctgcagtttgtgtgtggcgaccgtggcttctacttcagtaggcctgcctctagggtaagccgcaggagtagggggatcgtcgaggaatgctgtttcagaagttgtgatctggcacttctggaaacttactgcgctactcccgccaaatcagaaagggacgtttccacacctccaactgtcttgcccgacaatttccctcggtacccggtaggcaagtttttccaatacgacacttggaagcaatccacccagcggctacgaagggggctgccagcactacttcgcgcgcggaggggccacgtgctggctaaagagttggaggctttccgagaggccaaaagacaccggccactcatcgctctgcccacgcaagatcctgcacatggaggtgccccccccgagatggccagtaaccgcaaatag

SEQ ID NO: 24531 - DNA, 552 bp, synthetic construct
  misc_feature 1..552: note = Description of Artificial Sequence: Synthetic coding sequence
  source 1..552: mol_type = other DNA
atgggcatccccatgggcaagagcatgctggtgctgctgaccttcctggcgtttgcttcatgctgtattgcagcttaccgcccttcggagactctctgcggaggcgagttggtggataccctgcagttcgtgtgcggggacagagggttctactttaggctgccaggccgtccagcctcccgggtgtctcggaggtccagagggatcgtagaggaatgctgtttccggtcatgcgacttagctctcctagaaacttactgtgccaccccggcaaagtccgagcgggacgtgagcactcctccaacagtcttaccagacaattttccacggtacccagtgggtaagtttttccagtatgacacgtggaagcagagcacacaacgtcttcggagaggtctgccggctttattgagggctagacgcggacacgtgctcgccaaggagctcgaggcattcagagaggcaaagcgacaccgaccgctgatcgcactacctactcaggaccctgcacacgggggcgccccccccgaaatggcgtcaaacagaaagtag

SEQ ID NO: 24532 - DNA, 552 bp, synthetic construct
  misc_feature 1..552: note = Description of Artificial Sequence: Synthetic coding sequence
  source 1..552: mol_type = other DNA
atgggcatccccatgggcaagagcatgctggtgctgctgaccttccttgccttcgcctcctgctgtatcgcggcctatagacccagtgaaacactttgtggcggagagttggtggatacactccagtttgtctgtggcgatcgcggattttacttccgactgccaggtagaccggcctcaagagtgagcaggcgctcacgaggaatcgtggaagagtgttgcttcagaagctgtgatctggccctgctcgaaacctactgcgccactccggctaaaagcgagagagatgtgtctacacccccaaccgtgctgcctgacaattttccacgatatccagtgggaaaattttttcagtacgatacatggaagcagtcaacccaaaggctgaggcggggtcttccagcactattacgagcgcggaggggacatgtcctggctaaagagctggaagccttcagggaggctaagagacacaggccattgattgcattacctacccaggaccccgctcacggcggcgctcctccagaaatggctagcaacaggaagtag

SEQ ID NO: 24533 - DNA, 543 bp, synthetic construct
  misc_feature 1..543: note = Description of Artificial Sequence: Synthetic coding sequence
  source 1..543: mol_type = other DNA
atgggcatccccatgggcaagagcatgctggtgctgctgaccttccttgccttcgctagctgctgcattgcagcttaccgcccttcggaaacgttgtgtgggggcgagctcgtcgacacactgcagtttgtttgtggagacagagggttttacttcagcaggccagcatcaagagtctccaggcgcagccgtggaatcgtggaggagtgttgctttcgctcttgcgaccttgcacttttggaaacctactgcgcaacgccagcgaagagcgaaagggatgtttcaacgcccccaacagttcttccagataatttcccgagatacccagtagggaaattctttcaatatgacacctggaaacagagcacccaaaggctgagacgtggactccctgcacttctgagggcccgcagaggccacgttctcgccaaagagcttgaagccttccgggaagccaagaggcatagacccttgatagccctgcccacacaggaccccgcgcatgggggcgccccaccggaaatggcctcaaaccgcaagtag

SEQ ID NO: 24534 - DNA, 552 bp, synthetic construct
  misc_feature 1..552: note = Description of Artificial Sequence: Synthetic coding sequence
  source 1..552: mol_type = other DNA
atgggcatccccatgggcaagagcatgctggtgctgctgaccttcttggcatttgctagctgttgcatagcagcctatcgtcccagcgagaccctctgtggtggagagttggttgacacacttcagtttgtgtgcggcgatcggggcttctatttccgccttcccggcaggcccgcctcccgggtttctcgcaggtctcgcgggatcgttgaagagtgttgtttccgctcgtgcgatttggccctcttggagacttactgcgcaacacccgcaaaatctgagcgagatgtttcaaccccccctacggtgctaccagacaactttcctcgctatccagtcggcaagttctttcagtacgacacttggaagcagtccactcagcggctgcggcgggggttacccgcattactaagagcgagacgaggtcacgtgctggcaaaagaactcgaggcattccgagaggctaagcgccaccggccactgatcgcccttcctactcaggacccggctcacgggggtgccccacccgagatggcttcaaatcggaagtag

SEQ ID NO: 24535 - DNA, 543 bp, synthetic construct
  misc_feature 1..543: note = Description of Artificial Sequence: Synthetic coding sequence
  source 1..543: mol_type = other DNA
atgggcatccccatgggcaagagcatgctggtgctgctgaccttcctcgctttcgcttcctgctgcatcgctgcttaccggccatccgagacgctctgcggtggcgaattagtggacacccttcagtttgtatgcggcgaccgtgggttctacttctctaggcctgccagcagggtctccaggaggtcccgaggaattgttgaagaatgctgtttccgcagttgcgacctggctcttctcgagacatactgtgctacacccgcaaaaagtgaacgggacgttagcacacctcctaccgtcttgcctgacaattttcccagatacccagtgggtaagttctttcagtatgatacttggaaacaaagtacacagaggctgagacggggactccccgccctgctgagagcccgcagaggccacgtattggcgaaggagttagaggccttccgcgaagcaaagcgtcacaggcccctgatcgctctgccaacacaagatccggcccacggcggcgcaccccctgagatggctagtaataggaaatag

SEQ ID NO: 24536 - DNA, 552 bp, synthetic construct
  misc_feature 1..552: note = Description of Artificial Sequence: Synthetic coding sequence
  source 1..552: mol_type = other DNA
atgggcatccccatgggcaagagcatgctggtgctgctgaccttcctggcctttgcgagctgttgcatcgccgcatacagaccgagcgaaaccttgtgcgggggggagctcgtcgataccctgcagttcgtgtgtggagatagaggcttctactttagactccccggccgcccagcttctagggtgtctagaaggtcccggggtattgttgaagagtgctgcttccggtcatgtgaccttgcactgttggagacgtactgcgccaccccagcaaaaagcgagagggacgtgtctacgcctcccactgtactcccagacaatttcccacgttatcctgttggcaagttcttccagtatgatacctggaaacaatctacacagagactccgcagagggcttccagccctgttgagggctcgccgggggcatgtgctggcgaaggagttagaagccttcagagaggccaaacggcaccgccctcttatcgccctgccaacccaagatcccgcacatggcggtgcgcccccggaaatggcctctaataggaaatag

SEQ ID NO: 24537 - DNA, 543 bp, synthetic construct
  misc_feature 1..543: note = Description of Artificial Sequence: Synthetic coding sequence
  source 1..543: mol_type = other DNA
atgggcatccccatgggcaagagcatgctggtgctgctgaccttcctggcctttgcgagctgctgcatagctgcctatagaccatctgagacgctctgtggtggcgagttagtcgacacattgcagttcgtgtgcggtgaccgtgggttctactttagtcgtcctgcgtcccgggtgtcgcgtcgatctagaggtattgtggaagaatgttgcttcaggtcctgcgatcttgcactgttggaaacgtattgtgcaacacctgctaagtctgagcgtgatgtatcaactccccctaccgtgctgcctgacaactttccaagataccccgtaggaaagttcttccagtacgatacctggaaacagtcaacacaacggctacggcgcggcctgcctgctctgttacgagctaggaggggccacgtccttgcgaaggagttggaagcgttcagggaggctaaacgacacaggcccctcattgcactccccacacaagaccctgcccacgggggagcacctcctgaaatggcctctaatcgtaaatag

SEQ ID NO: 24538 - DNA, 543 bp, synthetic construct
  misc_feature 1..543: note = Description of Artificial Sequence: Synthetic coding sequence
  source 1..543: mol_type = other DNA
atgggcatccccatgggcaagagcatgctggtgctgctgaccttcttggcgttcgctagttgttgtatcgccgcatatagacctagcgagacactgtgcggaggcgagttggtcgacaccctccagtttgtctgcggagaccgcggcttctatttctcacggcctgcctcccgggtatccaggcggagtcgaggtattgtggaggaatgctgttttcgaagttgcgatcttgctttgctcgaaacttactgcgccacacccgccaagagcgaaagggacgtgtctaccccgccaaccgtacttcctgataacttcccgcggtatccagtcgggaagttcttccagtatgacacctggaaacagtccacgcagaggctgaggcgcggcctgcctgcactgttacgcgccagaaggggccatgtcttagccaaagagctagaagcatttagggaggctaagcggcaccgaccactgattgcattaccgacccaagaccctgcacatggtggggctccccctgaaatggcatctaaccggaagtag

SEQ ID NO: 24539 - DNA, 711 bp, synthetic construct
  misc_feature 1..711: note = Description of Artificial Sequence: Synthetic coding sequence
  source 1..711: mol_type = other DNA
atggtgagccccgacccccagatcatcgtggtggcccccgagaccgagctggcttcaatgcaggtgcagcggaccgaggacggcgtgaccattattcagattttttgggtaggtagaaaaggagagcttctcagaaggacaccagtctcttccgcgatgcagacacctatgggaatccctatgggcaaatccatgctggttctattgacatttctggcctttgcaagctgctgcatcgctgcctatagaccaagcgagactctttgtgggggagaacttgtcgacactctacagttcgtgtgtggagacagaggcttttacttctctcgtcccgcttcccgagtatcccgcagatctcgagggattgtcgaggagtgctgtttcaggtcctgcgacttggcgctcttggagacttattgtgctacacctgccaagagcgagcgtgacgtgagcactccccccactgtactccccgacaactttccccggtaccctgtgggaaagtttttccagtatgatacctggaagcagtcgacccagcgtctcaggcgggggcttcccgccttactgcgcgctagaaggggccacgtgcttgctaaagagctggaagccttccgggaggctaagcgtcaccgaccactcatagcattgcctacccaggatcctgcccacggcggcgccccccctgaaatggccagtaaccggaagtag

SEQ ID NO: 24540 - DNA, 876 bp, synthetic construct
  misc_feature 1..876: note = Description of Artificial Sequence: Synthetic coding sequence
  source 1..876: mol_type = other DNA
atgcagcgggcccggcccaccctgtgggccgccgccctgaccctgctggttctgctaaggggtccacccgtggcgcgtgctggcgcttcgtccgctggtttgggcccggttgtgcgctgtgaaccatgcgacgcacgggctctggctcaatgcgctccacctcctgcagtgtgcgcggagctcgtgagggagccaggctgtgggtgctgtctgacctgtgctttgagtgagggtcaaccctgcggcatctacaccgaaaggtgcggttccgggctacggtgccagccctcaccagacgaggctcgaccgctgcaggccttgctagatggacgcgggctatgcgtcaatgccagtgccgtgtcacgactgcgggcgtacctgctgcctgctccacccgctccgggtaacgccagcgagagcgaggaagataggtccgccggctcagttgaatctccgtccgtgtcttctacacatagggtgagtgacccaaagttccatccattgcacagcaagattatcataattaagaaggggcatgcgaaggactctcaaaggtacaaggttgattacgagagccagagcacagatacccaaaatttttccagcgagtctaaacgcgagacagagtatggcccctgtcggagggagatggaggacaccctcaatcacctgaagtttctgaatgtgcttagccccaggggcgtgcatattcctaattgtgacaagaaaggcttctacaaaaaaaaacagtgcaggcctagcaagggacgaaaaagaggcttctgttggtgcgtagacaagtatggccagccgttaccaggctacacaacaaaaggcaaggaggacgttcattgttattcaatgcaaagcaaatag

SEQ ID NO: 24541 - DNA, 894 bp, synthetic construct
  misc_feature 1..894: note = Description of Artificial Sequence: Synthetic coding sequence
  source 1..894: mol_type = other DNA
atgcagcgggcccggcccaccctgtgggccgccgccctgaccctgctggttctcctgagaggcccacctgttgcccgggccggcgcctcaagcgccggcctgggacctgtggtgaggtgtgagccctgtgacgcccgggctctcgcgcaatgcgcccccccccctgccgtgtgcgcggagttggtgcgggaacctggatgcggctgttgcctgacttgtgctcttagcgagggccagccctgcggaatttacacagaaaggtgtgggtccggactgcggtgccagcctagcccagacgaagcgcggccccttcaagctctccttgacggcagggggctgtgtgtgaacgccagcgctgtcagtcggctcagagcttatttgcttcccgcccctcctgctcctggggagcccccggcacccggaaacgcgtcggagagtgaagaggacaggtccgcgggatcggtcgaaagtccctcggtctcctctacgcaccgcgtcagcgatcccaagtttcacccgctgcactccaaaatcatcattatcaagaaagggcacgctaaggattctcagaggtataaagtggattacgagagccaatcaaccgatactcaaaacttttcctctgaaagcaagagggagaccgagtacgggccttgccgcagggaaatggaggatacactcaatcacctgaagttcctcaatgttctgagcccgaggggagtgcacatcccgaactgcgataaaaaagggttttataagaagaaacagtgcaggccaagcaaggggcgaaagagggggttttgttggtgtgtggacaagtatggacagccattacctggttacaccaccaagggaaaggaggatgtacactgttatagcatgcaatcgaaatag

SEQ ID NO: 24542 - DNA, 585 bp, synthetic construct
  misc_feature 1..585: note = Description of Artificial Sequence: Synthetic coding sequence
  source 1..585: mol_type = other DNA
atgcagcgggcccggcccctgcaggccctgctggacggccggggcttatgcgtgaacgctagtgccgtgtcccggctgcgggcctacctgttacccgcaccacctgcgcctggcaacgctagcgaatcagaagaggaccggagtgcaggaagcgttgagtctccgtctgtgagctctacgcaccgtgttagcgaccctaagtttcacccactgcacagtaagatcataatcatcaaaaaagggcacgcaaaagatagccagcgctacaaagtggattacgaatcacagagcaccgatacacagaatttcagttccgaatccaaaagagaaaccgagtatggcccctgtcggagggaaatggaggatactttgaaccatcttaagttccttaacgtgttgagtccgcgcggagtccacatccctaactgcgacaaaaagggtttctacaaaaaaaagcagtgtcgcccaagcaaagggcgtaagcggggtttctgctggtgcgtggataaatatgggcagccactaccgggctacacaactaaaggaaaagaggatgtgcattgctattcaatgcagtctaagtag

SEQ ID NO: 24543 - DNA, 462 bp, synthetic construct
  misc_feature 1..462: note = Description of Artificial Sequence: Synthetic coding sequence
  source 1..462: mol_type = other DNA
tgaagcgaggaggaccggagcgccggcagcgtggagagccccagcgtttcctcgacccatagggtctctgaccccaagttccaccccttgcattctaagatcattatcataaagaaaggccacgcgaaagacagccagagatacaaagttgattacgagtctcagagcactgatactcaaaatttcagcagcgaaagtaaaagggaaacagaatacggaccttgccggcgcgaaatggaagataccctgaatcaccttaagttcttgaacgttctctcccctagaggcgtacacattcccaactgcgataaaaagggattttacaaaaaaaaacaatgtcgaccatccaaggggcggaaaagggggttctgctggtgcgtggacaaatacgggcagcccttacccggctacacaaccaaagggaaggaagacgtccactgctattctatgcagtcaaaatag

SEQ ID NO: 24544 - DNA, 432 bp, synthetic construct
  misc_feature 1..432: note = Description of Artificial Sequence: Synthetic coding sequence
  source 1..432: mol_type = other DNA
tgagagagccccagcgtgagcagcacccaccgggtgagcgaccccaagtttcatccactacatagtaagattatcatcatcaagaaaggccatgccaaggactcccagaggtataaagtcgattacgaatcccaatccactgacactcagaacttttcaagcgaatccaagagagagactgaatatggtccatgtcggagagagatggaagacaccctcaaccatttaaaattcctcaacgtgctatcccccagaggagtgcatattccaaactgtgacaaaaaaggcttttacaagaagaagcagtgccgtccgtctaagggaaggaaacgggggttctgctggtgtgtcgacaagtacgggcagcccctccctgggtatacaacaaaggggaaggaagacgtccattgttactccatgcagtcaaagtag

SEQ ID NO: 24545 - DNA, 792 bp, synthetic construct
  misc_feature 1..792: note = Description of Artificial Sequence: Synthetic coding sequence
  source 1..792: mol_type = other DNA
atgcagcgggcccggcccaccctgtgggccgcctgcgagccctgcgatgcccgggccctcgcacagtgcgccccccctccagctgtctgcgccgaactggtccgggaacccggatgtgggtgttgtctgacatgtgccctgtcggaaggacagccatgtggtatctatacggaaagatgcggcagtggcctcagatgccagcctagccccgacgaggcacgaccactgcaagcactcttggacgggcgcgggctgtgtgtaaatgcctcagctgtctctcgtttacgggcctaccttttaccagctcctcccgcacctggcaacgcctctgagtcagaagaagaccggtcagcaggatcagtggagagcccatccgtttcatctacacaccgagtgagcgaccctaaattccaccctctgcactccaagatcatcatcattaaaaaggggcatgccaaggactcccaaagatacaaggtggactacgaatcacagagcacagatacacagaactttagcagcgagtcgaaacgtgaaacagagtatggtccttgccggagggagatggaagacacccttaaccatttaaaattcctcaatgttttgtccccccgcggtgtgcatatcccaaattgcgataaaaaaggtttttacaaaaagaagcagtgcagaccctcaaaaggacgaaaaaggggcttttgctggtgtgtggacaaatatggccagcccctgccaggctatacaaccaaaggtaaggaggacgtccactgctatagcatgcagagcaaatag

SEQ ID NO: 24546 - DNA, 834 bp, synthetic construct
  misc_feature 1..834: note = Description of Artificial Sequence: Synthetic coding sequence
  source 1..834: mol_type = other DNA
atgcgggccctgcggctgggcgccgaggaccagcccctgcccgcctggatcccccagctgagagctgtgtactgccggcctataccggccaggccggcgtgccaagccgcctgccctggttgccggcgtcatgccgcaggagccacccatgccctaggacgctgcgccgatagcgcaggagcagcccctagagccgctggtggggctggctggagggaactgggcgggctgggttcaaggggcgcattgagggctgtgagacatcttcatcgtgcactactggacggtagggggttgtgcgttaacgcctctgccgtgagccggcttagagcctatttgcttcccgctccacccgctcccgggaacgcttcggaaagcgaggaagatcggagcgcaggcagcgtggagagtccttccgtgtcaagcacacatcgggtttctgatcccaagttccaccccctccacagtaagataattatcatcaaaaagggccacgccaaggacagtcaacggtataaagttgattacgaatctcagagtacagacacacagaattttagctcggagtctaaaagggaaacagaatatggcccctgccgacgagagatggaagatactttgaaccatctgaagtttctgaatgtcctttcaccacgcggcgtgcatatccccaattgtgataagaaaggcttttacaagaagaaacaatgtcggccatccaaaggacgtaagagaggattctgttggtgcgtagacaagtacgggcaacccctgccaggttacacaacgaagggcaaagaggacgtccactgttattctatgcagtcgaagtag

SEQ ID NO: 24547 - DNA, 570 bp, synthetic construct
  misc_feature 1..570: note = Description of Artificial Sequence: Synthetic coding sequence
  source 1..570: mol_type = other DNA
atgcagcgggcccggcccaccctgtgggccgccgccctgaccctgctagatggccggggactgtgcgcttatcttctccccgccccccccgcaccgggcaatgccagcgagtccgaggaagatcggtctgcaggatccgttgaaagcccctcagtatcttccacgcatcgggtttctgatcccaaattccaccctcttcactctaagatcattattatcaaaaaagggcatgctaaggacagccagagatacaaggtggattacgaaagtcaatccactgacacgcagaatttctcatccgagagcaagagggaaacagaatatggtccttgccgacgcgagatggaggataccctcaatcatctgaagtttctaaacgtccttagccctcgtggagtgcacattcccaattgcgacaagaagggattttataagaaaaagcagtgtcgcccttcaaaagggcgtaagcgtgggttctgttggtgtgtggataagtatggccagcctctgccgggctacaccacaaaaggtaaggaagacgttcattgttattctatgcagtcaaagtag

SEQ ID NO: 24548 - DNA, 807 bp, synthetic construct
  misc_feature 1..807: note = Description of Artificial Sequence: Synthetic coding sequence
  source 1..807: mol_type = other DNA
atgcagcgggcccggcccaccctgtgggccgccgccctgaccctgttggtgcttcttagaggtccccctgtcgcccgagccggtgcatcatccgctggcctggggccggtggtgcggcgcgaacctggttgcggctgctgtttgacatgtgcactgagtgaggggcagccctgcggcatttacactgagcgttgtggcagcgggttgcgatgccaaccgtcacccgacgaggcccggcctctccaggccctgctggacgggcggggactctgcgtgaatgcctcagcggtttccagactgagagcatatctcctgcccgccccacccgcaccgggcaacgcgagtgagagcgaggaggatagatcggccggcagtgtagagagcccttccgtatcgtctacccacagagtgagcgaccccaagttccatccgctgcactccaaaattattattattaagaaaggtcatgcaaaggactcacaaagatacaaagtcgactatgagtcccaatctacagacacccagaacttcagcagcgagtctaagcgagagactgagtacggtccttgcaggcgagaaatggaagacactctgaatcacctaaagttcctcaatgttcttagtccacgcggcgtgcacattcctaactgtgataagaagggcttttataagaagaaacaatgcaggccgagcaaggggagaaagagagggttctgttggtgtgtcgataagtatgggcagccactaccaggctatacgacaaaagggaaggaagacgtacattgctactctatgcagtcaaagtag

SEQ ID NO: 24549 - DNA, 978 bp, synthetic construct
  misc_feature 1..978: note = Description of Artificial Sequence: Synthetic coding sequence
  source 1..978: mol_type = other DNA
atgctgccccgggtgggctgccccgccctgcccctgcccccccccccccttctgcctctgctgctcctgttactgggggcatctggcgggggagggggggctcgggcggaagtgctgttccgctgtcccccatgtacacccgagagactcgctgcatgtgggcctccccccgtcgccccgcctgcagctgttgccgccgtggccggcggagctaggatgccctgcgctgagctagtgcgagagcccggttgtggttgttgctcagtatgtgcccgcctagagggtgaggcctgcggagtctacactccacgctgcggccaagggttgaggtgttatccccacccagggtctgaactgccgcttcaggctctggtcatgggtgaaggaacctgtgagaagagaagagacgcagagtacggcgcttctcccgagcaggtggctgacaatggggacgaccacagcgaaggaggtctggtggagaaccacgtggactctacaatgaacatgctcggtggtgggggtagcgctggacggaaaccactgaaatccggcatgaaagagctggccgtgtttcgagagaaagttactgagcaacataggcagatggggaagggcgggaagcatcatcttggcttggaagaacctaaaaagctgaggccaccaccagctcgtacaccatgccagcaggagctggaccaggtgttggaacgtattagcaccatgagactcccagacgagaggggcccactggagcacttatactcactacacattccaaactgcgataaacacggcctgtacaatctgaagcagtgcaaaatgagtctgaacggccagcgcggggagtgctggtgtgtgaatcctaataccggaaaactcatccaaggggcacccaccatccggggagatcctgagtgccatctgttttacaatgaacagcaggaggcccgcggcgtccatacacagagaatgcagtag

SEQ ID NO: 24550 - DNA, 3099 bp, synthetic construct
  misc_feature 1..3099: note = Description of Artificial Sequence: Synthetic coding sequence
  source 1..3099: mol_type = other DNA
atggcctgggaggcccggcgggagcccggcccccggcgggccgccgtccgagaaacagtgatgctgctgctgtgccttggggtgcctaccggccggccctataacgtggacacagaatccgcgttgctgtatcagggtcctcacaataccctgttcggatactcagtggtccttcattctcatggcgccaatcggtggctgctggttggcgctcctaccgcaaactggctggcaaacgcatccgtgatcaatcctggagcaatttacaggtgtcgcatcggcaaaaacccaggacagacctgcgagcagctgcagcttggaagccccaatggagagccgtgtgggaagacctgtctggaggaaagggacaaccagtggctcggtgtgacgctttctcgccaacctggagaaaacggctcaatcgttacttgcggccaccgctggaaaaacatcttctacattaagaacgagaacaagcttcccaccggcggttgctacggggtgccaccagatctcagaaccgaactaagtaagcgtattgccccttgttatcaagactatgtcaaaaaatttggggaaaactttgcaagttgtcaggcgggtattagctctttctataccaaggatttgatcgtcatgggcgcaccaggctcttcatactggactggatcgctcttcgtctacaatataaccacgaataaatacaaagcattcctcgataaacaaaaccaggtcaaattcggatcctaccttggctactccgtgggggccgggcacttccgctcccagcatactactgaggtggtaggtggagccccgcagcacgagcagattggtaaagcgtatatcttctctattgatgagaaagaactgaatatcctgcacgagatgaagggtaagaaactggggtcctatttcggagcaagtgtctgcgccgtagatctaaatgctgacggattctccgacctgctagtcggggcaccaatgcagtccaccatcagggaggaagggcgagttttcgtgtatatcaacagcggctccggagccgtcatgaatgctatggagacaaacctggtgggaagcgataaatatgccgctcgctttggcgagtcaatagtcaacctgggcgacatagataacgatggctttgaggacgtcgcaatcggggcgcctcaggaggatgatctgcaaggagccatttacatatataatggaagggccgacggaatctcatctaccttttcgcagcggatcgagggcttacagatctccaagagcctcagcatgtttggtcagtccatcagcgggcagatagacgctgataacaatgggtacgtggatgtggcagtgggcgctttcagaagtgatagtgcagtcctccttaggacaaggcctgtagtcatcgtagacgcatccctttcacacccagagtccgtgaataggacgaaatttgactgcgtggaaaatggttggccaagtgtttgcattgatctgacattgtgctttagctacaagggtaaagaagtgccgggctacatcgttctgttctataacatgtcgttggacgtaaaccggaaggcagagtcaccacctcgattctacttcagctcaaatggcacgagcgatgtgattacaggctccattcaggtctccagtagagaggccaactgtcgcactcaccaggcattcatgcggaaggatgtgcgggacattctgactccaatccaaatcgaggctgcataccatctgggcccacacgttatttcaaaaaggagcactgaggagttcccaccattgcagcccattctccagcaaaagaaggagaaggacataatgaaaaaaaccataaatttcgccaggttttgcgcacacgagaactgcagtgccgatctgcaggtgagcgctaaaatcgggttcctgaagccccatgaaaacaagacttatctcgcggtgggatctatgaagacccttatgttaaacgtttccctcttcaacgctggtgacgatgcgtacgagaccaccctgcatgtgaagcttcccgtaggactctacttcattaaaatactcgagctcgaggagaaacagattaactgcgaggtcacagacaattccggggtcgtgcagcttgattgtagtatcggatatatttacgtagaccatctctctcgaatagacatttcttttctcttggacgtgtcaagtctttcccgggcagaagaagatttatcaattactgtgcatgcaacgtgcgagaacgaagaggaaatggataacttgaagcactctcgcgtaactgttgctatacccttgaagtatgaggtcaagcttactgtacatgggtttgtcaaccccacctccttcgtgtacggatcaaatgatgaaaacgaacccgaaacatgcatggtggagaagatgaacctgactttccatgtgattaatacggggaattctatggctccgaacgtgtccgtggaaattatggtgcccaacagcttcagcccacaaacagacaagttgtttaatatcttggacgtccagaccaccaccggcgagtgtcactttgaaaattaccagcgtgtatgcgccctggaacagcagaaatctgccatgcagacccttaagggcatcgtccggtttttgtccaagacagataagaggctgctgtattgtattaaagcagatcctcactgcctcaatttcctgtgcaattttggcaaaatggagagtggtaaggaagccagtgtccatatccaattggaaggacgcccaagtatactggaaatggacgagacaagcgcactgaaatttgagattcgcgcgactggcttcccagaaccaaatccccgggttattgaactcaataaggatgaaaatgtggctcacgtgctgctggaggggctccaccaccaacggccaaagcgttatttcaccatcgtcatcatatcctcttcactcttgctaggtctgatcgtgctgttacttattagctacgtgatgtggaaggcaggcttttttaaacggcagtacaagagtatactgcaggaggagaataggcgcgattcctggtcgtacatcaattccaagtccaacgatgattag

SEQ ID NO: 24551 - DNA, 1854 bp, synthetic construct
  misc_feature 1..1854: note = Description of Artificial Sequence: Synthetic coding sequence
  source 1..1854: mol_type = other DNA
atggcctgggaggcccggcgggagcccggcccccggcgggccgccgtgcgggagactgttatgctgctgttgtgcctcggggtccccactggacgcccctacaacgtggacaccgagtccgccctgctgtaccaagggccgcacaatactcttttcggctatagcgttgtcctacattctcatggggcaaatagatggttactggtaggcgctcccacagctaactggctggccaatgcgagcgttattaacccaggggccatctaccgatgtagaattggcaagaaccctgggcagacatgcgagcagctgcagctggggtcaccaaatggcgagccctgcgggaagacttgcctggaggagcgcgataatcagtggcttggcgtgactttgagtcggcagcccggggaaaacggaagcatcgtcacctgcggacatcggtggaaaaacatcttttatattaaaaatgaaaacaagctccccacaggcggctgctatggggtgcctccagacctacgtaccgagctttcaaaaaggatcgcaccctgttaccaggactacgtcaagaaattcggagagaactttgctagctgtcaggcaggtatcagcagtttctacacaaaggacctcattgtgatgggtgctcctggaagctcctactggaccggtagtctgtttgtatataacatcactacaaataagtataaggcattcttggacaaacagaatcaagtcaagtttggcagctacttaggatatagcgtgggcgccggacactttcgatcacagcacacgaccgaagttgtgggtggcgctcctcagcacgagcaaattgggaaggcctatattttcagcatcgatgaaaaggagctcaacatcctccacgaaatgaaggggaagaaactggggagctatttcggcgccagcgtatgtgctgtggatcttaacgccgatggtttttcggacctgctggtgggcgcccccatgcagagtacaatccgggaagagggaagggtgtttgtgtatattaacagcggttctggcgccgtgatgaacgccatggagacgaaccttgtggggagtgacaagtatgctgcccggtttggggagagtatcgtgaatctgggtgatattgacaacgatggcttcgaagatgtcgctattggcgccccccaggaagatgatttgcagggggccatctacatctataatgggcgtgcagacggtatcagtagcacgttctcccagagaattgaaggactgcagatatcaaagtccctctccatgttcgggcaatccatcagcggacaaatcgatgcagacaacaatggctatgtcgacgtcgcagtgggggcctttcggtcagactcagccgtcctgctccgaacccgcccggtggtgatcgtggacgccagtctgagccaccccgaatcggttaatcgtacaaagtttgattgtgtggagaacgggtggccgagcgtgtgtatagacttaaccctatgcttctcctacaagggtaaggaagtgcctggttacatcgtgttgttctataacatgtcactagatgtcaaccgcaaagctgagtcccccccaagattctattttagcagcaacggcacctcagatgttatcaccggcagcatccaggtgagctccagggaagccaactgtcggacccaccaggccttcatgcgcaaagacgtgagggacattctgacacccatccagattgaagctgcctatcatcttggcccccatgtgatctcaaaacgcagcaccgaagagtttcctcccctgcagccaattctgcaacagaagaaggaaaaggatattatgaagaaaaccaaaaagtag

SEQ ID NO: 24552 - DNA, 3150 bp, synthetic construct
  misc_feature 1..3150: note = Description of Artificial Sequence: Synthetic coding sequence
  source 1..3150: mol_type = other DNA
atgggcagccggacccccgagagccccctgcacgccgtgcagctgcggtggggacctcgccgtcgtccacctctactaccgctgctccttctgctgcttccacccccaccaagggtaggtggctttaatctggacgccgaagcacccgctgtcttaagtggacccccggggtcctttttcggattctccgtggagttctatcgacccgggactgacggggtgtccgttctggttggggccccgaaggcaaatactagtcagccaggggtactgcaggggggggctgtttacttgtgcccatggggtgcatcacctactcaatgtacacctatcgagtttgacagcaaagggagtcggctacttgaatcatccctatcctcctccgagggggaggagcctgtggaatacaagtcactgcaatggttcggagctacagtaagagctcatggctcttcaatcctcgcatgtgcccccctgtatagttggaggacagagaaagaaccgcttagtgaccccgtaggcacttgctacttgagcactgacaacttcacccgtattctcgaatacgcaccatgccgatccgatttctcttgggcggccggtcagggttactgccagggaggattttccgcagagttcacaaagaccgggagggtagtgctgggcggtcccggttcttatttctggcagggtcagatcctttctgccacccaagagcaaattgcagagtcatactaccctgaatacttgattaatttggtgcagggacagctgcaaacgcgccaggcctcaagcatttatgacgactcctacttggggtattctgtcgctgttggggagttttctggagacgatacggaagattttgtggcaggtgtgcctaagggcaatcttacttacggctacgtgaccatcctcaacggttccgacatcagatccctttacaatttcagcggcgaacagatggcatcgtacttcggctacgccgtggctgctacagacgtcaacggagacgggttagacgatctccttgtaggagccccacttctgatggaccggaccccagacggcaggccccaggaggttggccgcgtttatgtttacctacagcacccagccggtatcgagcctactccaactctcaccctgactggccacgacgagttcgggcgatttggatctagtctgaccccactcggagacttggaccaagatggctacaacgacgtggctattggtgccccattcggtggagagactcagcagggagtggtcttcgtgttccctgggggacctggcggcctgggaagtaaaccctcacaggttcttcagcccctgtgggctgcgtcacacaccccggatttttttggtagtgccctcagaggtggccgtgacctggacggaaatggctatcctgatttgattgtaggctctttcggagtggacaaggccgtcgtctacaggggcaggcctattgtgtccgcttctgccagtctcacaatcttccctgccatgttcaaccccgaagagcggtcatgtagcctcgaaggaaacccagtcgcctgtatcaatctttctttttgcctcaatgcttcagggaaacacgtcgctgattcaatcggtttcacggtggaactgcagctcgattggcagaaacagaaaggtggagttaggcgggcactattccttgcaagcagacaggcaacgctgactcagactctgttaatccagaacggcgctcgcgaagactgtcgtgagatgaaaatctacctgaggaacgagtctgaattcagggacaagctgagtccgatccacatcgccctgaacttcagtttagatccccaagcacccgttgattcccacggcttgcggccggcacttcattaccagtccaaaagcagaattgaagataaagctcaaatcttgcttgattgtggagaagataatatctgcgtacccgatctgcagctggaagtgttcggcgagcaaaatcacgtgtatctgggagataaaaatgctctgaatctgacgttccatgcacagaatgtgggcgaaggcggtgcatacgaggccgaactgcgggttaccgcaccaccggaggcagagtacagcggcctggtgcgccaccccggcaatttcagtagcctgtcttgcgattatttcgctgttaaccagagtagactgctggtttgcgacttgggcaacccgatgaaagctggcgcgtctctgtggggaggcctgcggtttacagttccacatctgagagacaccaaaaagaccatccagttcgattttcagattctctcaaaaaacctgaacaatagtcaatccgacgtagtttcttttcgtctcagcgtagaagctcaagctcaggtcacactgaacggggtttcaaaacctgaagccgtgttgtttccagtgtccgattggcaccccagagaccagccccaaaaagaagaagacctgggcccagcagtacaccacgtttatgagttgatcaatcaggggccctccagtatttcgcagggagtgctggagctgtcatgtccccaggccttagaaggacagcaactgctctatgtgacacgagtgactgggctgaactgcacaaccaaccacccaattaaccctaaaggtctggaactggatcccgaaggctcattgcaccaccagcagaagcgcgaggctccgagtcgatccagcgcttctagcggcccacaaattttgaagtgccccgaagccgaatgtttcaggctgcggtgtgagctgggccccctgcaccaacaggagtcccagtcacttcaactccattttcgcgtatgggcaaaaacattcctccaacgggaacaccagcccttcagtcttcaatgcgaggccgtatacaaggccctgaaaatgccctaccggatccttccccgtcagctgccccagaaggagcgtcaggtggctacagcagtgcagtggactaaagctgaaggatcgtacggggtgcccttatggatcatcattctggctattctgtttggattattactcctaggattgctaatctatatcctgtataaattggggttcttcaagcgtagcctcccttacgggaccgccatggagaaggctcagttgaagccccctgccactagcgatgcatag

SEQ ID NO: 24553 - DNA, 3393 bp, synthetic construct
  misc_feature 1..3393: note = Description of Artificial Sequence: Synthetic coding sequence
  source 1..3393: mol_type = other DNA
atggccgccgccggccagctgtgcctgctgtacctgagcgccggcctgctctctcgtctcggcgccgcattcaatttggacacaagagaagataatgtgatcagaaagtacggcgaccccggcagcctgttcggcttcagcttggccatgcattggcagctgcagcccgaagataagcgcttactcctggtgggggcccctcgtgcggaggccctacctctgcaacgggcaaatcgcacaggcggcctttactcctgcgacatcacagcaagggggccttgcacccggatcgaattcgacaatgacgcagatccaacatctgaatccaaagaagaccagtggatgggcgttaccgtgcagtcccaagggcccggagggaaggttgtgacctgtgctcaccgttacgagaaaagacaacatgtgaacacgaaacaggaatcacgtgacatattcggccgatgttacgtgctcagtcagaaccttaggattgaggacgatatggatggaggggattggagtttttgtgacgggcggctaagaggacacgaaaagttcggttcatgtcagcagggcgttgcagctactttcaccaaggacttccattatatcgtgtttggcgccccaggcacctacaattggaagggcatcgttagggtggagcagaagaacaacaccttcttcgatatgaatatcttcgaagacgggccatacgaagttggcggggagacggagcatgatgaaagtctggtcccggtgcccgctaacagctatctgggactactctttctgaccagcgtctcgtatacagaccccgatcagtttgtgtataagactaggccaccacgcgagcaaccagataccttccctgatgtaatgatgaatagttacctgggattctcacttgattctgggaaagggattgtttctaaggatgaaatcacctttgtgtctggtgcccctcgggccaatcactcgggagccgttgtacttctgaagcgtgacatgaagtccgcccatcttctgccagaacatattttcgacggggaaggcctcgcatctagtttcggctatgacgtcgcagtagtagacctgaataaggacggatggcaggacatcgttattggcgcgccacagtactttgacagggacggcgaggtaggcggcgccgtgtatgtttatatgaatcagcagggtaggtggaataatgtcaagcccattcgactgaacgggactaaagacagtatgttcggtatcgcagtcaagaacattggggatattaatcaggatggctatccagacatcgccgtgggggccccttatgacgacttaggaaaggtcttcatctaccatggctccgcgaacggcattaacacaaaaccaacccaggtcctaaaaggtatttctccttacttcgggtattcaatcgccgggaatatggacctggatagaaatagctatccagacgtggccgtcgggagtctgtcagactctgtcaccattttccggtccagaccagtgatcaacatccagaaaactatcactgttactcccaaccggatcgacttgcggcagaagaccgcttgtggagccccttctggcatctgcctgcaagtgaaatcatgttttgaatatacagccaacccagccgggtataatcctagtataagcattgtggggacacttgaggccgagaaagaacgaagaaaaagcgggctgagtagccgggttcagtttcggaatcaaggatcggaacccaagtatacacaagagcttactctaaaacggcagaagcaaaaagtttgtatggaggagacactctggctacaggacaacattcgggacaagctgaggcccattcccatcacagcctccgtggagatacaagagccatcatccagacggcgcgtaaacagcctcccagaggtgctgcctatactgaatagcgatgaacctaaaaccgcccacattgatgtgcacttcctcaaggagggttgtggggatgacaacgtgtgtaattctaaccttaaactggagtacaagttctgcacccgtgaagggaaccaggacaaattttcttaccttccgattcagaagggcgttccggaattggttcttaaggatcagaaggacattgcacttgaaatcaccgtgacgaattccccttccaatccccgaaatcccaccaaagacggcgacgacgcccatgaggctaagctcatcgcaacctttcctgacaccttgacatactctgcctaccgcgaattgcgtgcattcccagagaagcagctatcttgtgtagccaaccagaacggatcacaagctgactgcgaattggggaatccttttaaacggaattccaatgtgactttttacctcgtgctgagtaccacggaagtgacattcgataccccggatctcgatattaacttgaagttggagaccacatccaatcaggacaacttggcgcccatcacagctaaggcgaaagtggtcatagagctcttactgtctgtgagcggggtggctaagccctcccaggtgtattttggcggcaccgtggtcggggagcaagccatgaaatctgaggatgaggtggggtcacttatcgagtacgagttcagggtgattaacctaggaaaaccgctaacgaacctgggcacagctactctgaacatccaatggccaaaggaaatttcaaatggcaagtggctactgtacctggtgaaggtcgaaagtaaaggactggagaaggtaacttgtgagccccagaaagagatcaattctttaaatctgaccgaatctcataattcgcgcaagaagcgggaaatcacagagaaacaaattgacgataaccggaagtttagcctgtttgcagaacgcaagtaccagacactcaattgctctgtgaatgttaactgtgtcaatatccggtgccctctgagaggactcgactccaaagcctcgctgatcctcaggtcacggttgtggaatagcaccttcctggaggagtattccaagttaaactacctagacattctcatgcgggcattcattgacgtcacagctgcggctgaaaatatccgcttacccaatgctggaacacaggttagagtgaccgtgttcccatcgaagaccgttgctcagtattcaggggtgccctggtggatcatcctggtcgcaattttggccggtatcctaatgctcgccttgttagtgttcatcttatggaaatgcggcttcttcaagcgctcaagatatgacgattccgtgcctcggtaccacgccgttcgcataagaaaggaagaaagggagattaaagacgagaagtatatcgacaatctcgagaaaaagcagtggattaccaagtggaatgagaatgaaagttacagctag

SEQ ID NO: 24554 - DNA, 3222 bp, synthetic construct
  misc_feature 1..3222: note = Description of Artificial Sequence: Synthetic coding sequence
  source 1..3222: mol_type = other DNA
atggccgccgccggccagctgtgcctgctgtacctgagcgccggcttgctctctaggcttggagccgccttcaatctggatacacgagaggataacgttattagaaaatatggagatccaggtagcctgttcggattcagcctcgcgatgcattggcagcttcaaccggaggacaaaaggctactgctggtgggggctccccgtgcggaggccctcccgttacagcgggcgaacagaacagggggcctgtacagttgtgacattactgcaaggggtccctgcacccggatcgaattcgataatgatgccgacccgacgtctgagtctaaggaagatcagtggatgggggtgaccgtacaatcccagggccctggtgggaaagtcgttacctgcgcacaccgatatgagaaaaggcagcacgtgaatacgaagcaagagtcccgggatatattcgggcgctgttacgtactgtctcagaaccttcgcatcgaggacgacatggacgggggcgattggtccttttgtgatgggagattgagagggcacgaaaagttcggctcctgtcagcagggggtcgccgcgacattcactaaggactttcattatatcgtgtttggcgccccaggcacctacaactggaagggaattgtgagggtcgagcagaaaaataatacattcttcgatatgaatatatttgaagacggcccctatgaggttggaggcgagacggaacacgacgagagcctggtgccggtgcctgccaattcctacctaggtttctcactggacagtggcaagggcatcgtatccaaggatgagatcacattcgtttcgggcgccccaagggcaaatcattctggagcggttgtgttgctgaaacgtgacatgaaatcagctcatctgctgcctgaacacatcttcgacggcgaggggctcgcctctagcttcgggtacgatgtcgctgtggtagatctgaataaagatggctggcaggatattgtgatcggcgcccctcagtactttgatagggacggagaagtaggcggggccgtgtatgtgtatatgaaccagcagggccgctggaataatgtgaagcctattcggctgaacggcactaaagactctatgttcggtatcgcggtgaaaaacataggtgatatcaatcaagatggctaccctgacattgcagtgggtgcgccttacgacgacctcggtaaggtgtttatctaccatggctctgcaaacggtataaacacgaagcctacacaggtactaaaaggcatatctccttactttgggtactccatagctgggaatatggacttagatcggaactcgtaccccgatgtagcggtgggcagcctctctgatagtgtgaccatctttcgaagccgtccagtaatcaacatccagaagaccattaccgtgacacctaacagaatagatctgagacagaagaccgcatgtggggccccgagtggcatttgcctgcaggtgaagtcttgctttgagtacactgctaaccccgctggctataatccttcaattagcatcgttggcactttagaggcggagaaagaacgtagaaagagtggcctaagcagtagggttcaatttagaaaccaagggtccgaaccgaaatacacacaagaactgactttgaagcgacagaagcagaaagtttgcatggaggagactctctggctccaggacaacattagagacaagcttcgccctatcccgataactgctagcgtggagatccaggagccaagctcccgccggagagtgaactctctgcccgaggtattacctatcctgaactcggatgaacccaaaactgcccacatcgacgtgcacttcctgaaagaagggtgcggtgacgacaacgtgtgtaacagtaatctgaaactggagtacaagttctgtactcgagaaggaaaccaagataagtttagctacctgccaatccagaagggtgtgccagagcttgtgctgaaggaccagaaagacattgccctggagatcaccgttactaacagtccgtcaaacccgcgcaatcccactaaggatggcgacgacgcccatgaagcaaagctcatcgccactttccctgatacgctcacgtatagtgcatacagggaactccgagctttccccgaaaaacagctgtcctgcgtggctaatcagaacggaagtcaggccgattgtgagctgggtaatccttttaagaggaactctaacgtgaccttctatctagtgctgtcaacgacagaagtcacatttgacacaccagatttggatatcaacctgaaactagagactacttccaaccaggataatctggctcccattacagcgaaggctaaggtggttattgagttgttgctatcggtgagcggagttgcaaaacccagtcaggtttacttcggcggcactgtggtgggggagcaggccatgaaaagcgaggatgaggtcggaagcttaatcgagtacgagttccgggttatcaatctcggcaaacctttaacgaacctaggtaccgcaacgctgaacatccagtggcccaaggagataagcaatggcaagtggttgctgtatctagtgaaagtcgagagcaaggggttagaaaaagtcacttgtgaacctcagaaagaaatcaattcacttaacctaaccgagagtcataattctaggaagaagagggagatcaccgagaagcagatcgacgataataggaagttctctttgtttgcagagcgcaagtaccaaactctaaattgctccgtcaacgtaaactgcgttaacattcgctgtccgctgaggggactcgattccaaagcatctctgatcctgagaagcaggttgtggaatagcacctttctggaagaatacagcaagctgaactatcttgacattctgatgcgcgcttttattgacgtaaccgccgcagctgagaacatacggctcccaaacgctggaactcaagtgcgcgttactgtgttcccttccaaaactgtggcacagtattctggggtcccatggtggatcatactggttgccattttggcaggaatcttgatgctcgccctgctggtgtttattctttggaaatgtgggttctttaaaaggaataagaaggatcactatgacgctacgtaccataaggcagagattcatgcccagcccagtgataaggagaggttgacctctgacgcctag

SEQ ID NO: 24555 - DNA, 3207 bp, synthetic construct
  misc_feature 1..3207: note = Description of Artificial Sequence: Synthetic coding sequence
  source 1..3207: mol_type = other DNA
atggccgccgccggccagctgtgcctgctgtacctgagcgccggcctcctttctaggctcggcgccgctttcaatcttgataccagggaggacaacgtgatcagaaagtatggtgaccctggaagtcttttcggattcagcctcgccatgcactggcagctgcagccggaggataagcggctcctgctggtgggggcccccagggcagaggctcttccactgcaaagagctaataggaccggaggtctgtacagttgtgatatcaccgctcgggggccctgtacacgtattgaattcgacaatgacgctgaccctaccagtgagtcaaaagaagatcaatggatgggagtcactgtacaatcccaaggaccaggggggaaggttgtgacatgtgcccaccggtatgaaaagcgacagcacgtgaacacaaaacaagaatcaagagacatctttgggcgctgctatgtgctatcacagaacttgcgcatcgaagacgatatggatggcggcgactggagcttttgtgacggccggttacgcgggcacgagaagtttggctcatgtcaacaaggcgttgcagccaccttcacaaaagactttcactacattgttttcggcgcacctggaacatataattggaagggactgctgtttctgacctctgtttcatacacggatcctgaccagtttgtgtacaaaactcggcccccaagggaacagcccgatacgtttcctgatgtcatgatgaattcctatctggggttctctcttgattctggaaagggcatcgtgagcaaggatgaaattaccttcgtttcgggtgcaccaagggcaaatcactccggcgccgtggttcttctgaaacgagatatgaagagcgcgcacttattgcctgagcacattttcgatggagaggggttggcttccagtttcggatatgacgtggccgtcgtggatctgaacaaggacgggtggcaggatatagtgatcggtgctccacagtatttcgacagagacggtgaagtcgggggcgcggtttacgtttatatgaatcagcaagggaggtggaacaatgtcaagccaattaggttaaacggcacaaaggactcaatgttcggtatcgccgtgaagaatattggtgacatcaaccaagacggatacccagacatcgccgtgggtgccccttatgatgatctgggcaaggtatttatctatcacggatccgctaacggaattaataccaaacccactcaggtcctgaagggaatcagcccctacttcggatatagtattgcaggtaacatggatctggatagaaactcttaccctgatgtcgccgtcggttcgctgtctgactctgtcacgatattccggagccgccccgtgatcaacatccagaagaccatcacagtgacacctaacagaatagaccttagacagaagaccgcttgtggcgctccgagtggcatctgcctgcaggttaaatcttgcttcgagtacacggccaatcccgccgggtacaatccatcgatcagtatcgtggggacattggaggcagagaaggagaggaggaagagcggactgtctagccgggtacagttcaggaatcaaggaagcgagcccaaatacacacaagaactaacacttaaacggcagaagcagaaggtttgcatggaggagaccctttggcttcaggacaatatacgtgacaaactccggcccattccaatcacagcttccgtagagatccaggagccttcatctcgacggagggtgaattccctgcctgaggtgcttccgattctcaattcagatgagcctaaaacggctcacattgatgtgcactttttaaaagaagggtgtggggacgacaacgtatgtaatagcaacctcaagctggaatataagttctgtactcgggaaggaaaccaggacaaatttagctatcttcctattcagaaaggggtgccagagcttgtgctgaaggaccagaaagacatagccctggagatcaccgtgacaaatagtccgtctaatcctcgtaacccgacaaaggacggagacgatgcgcacgaggcgaaactgatcgctacctttccagataccctgacttactctgcctaccgcgaactgagagcgttccccgaaaagcagttgtcctgcgtcgcaaaccagaatggatcccaggcagactgtgagttgggaaacccctttaaaagaaatagcaacgtgacgttctacctggtgctgtccactacagaagttacatttgatactccggatcttgacattaacctgaaactggaaacaacaagcaaccaggacaatttagctccaattaccgcaaaagcgaaagtcgttatcgagctactcctatcagtgtctggagtagccaagccaagccaggtctactttggcggcactgtagtgggcgagcaagctatgaagagcgaagacgaagtcgggtcacttattgaatacgaatttcgtgttatcaatctgggaaaacccctcaccaacctgggaacggcaaccctcaacatccagtggcctaaggagatttcaaatggcaagtggctgctctacctggtgaaggttgaaagcaagggtctggagaaggtaacctgcgagccgcagaaagaaattaatagcctcaatttgactgagagccataacagccggaagaaaagagagattacggagaagcagatagacgataatagaaagttctcgctttttgccgagaggaagtatcagacactgaattgctcagtgaacgtaaactgcgtgaatattcggtgcccccttcgcggacttgatagtaaggcaagcttgatcctgagatcccgcttatggaacagtacatttttggaggagtactctaaactgaactatctggacatcctcatgcgcgctttcatcgacgtgaccgctgcagcagagaatataaggctcccaaatgccgggacccaagttcgcgtcacagtttttccgtccaaaactgtcgctcagtatagcggcgtgccttggtggattatcctcgttgctatcctggcgggcattctgatgctggcactcctcgtcttcatcctgtggaagtgtggcttcttcaagcgcaacaaaaaggaccactatgacgctacttatcataaggctgagatccacgcacaaccatcagacaaggaaaggctgacatccgatgcctag

SEQ ID NO: 24556 - DNA, 3339 bp, synthetic construct
  misc_feature 1..3339: note = Description of Artificial Sequence: Synthetic coding sequence
  source 1..3339: mol_type = other DNA
atggccgccgccggccagctgtgcctgctgtacctgagcgccggcctccttagccgtctcggtgccgcttttaatctcgatacacgggaggacaatgtgatcagaaaatatggagatcccggaagcctgtttgggttctctctggcaatgcattggcagttgcaaccagaggacaagcgtttgttactagtaggggcaccgagagcagaagccttgcctctgcagcgagctaacagaaccggaggtctgtacagttgcgacattaccgcccgcgggccctgtaccaggatcgagttcgataatgacgcagatcctacaagtgagtccaaggaggaccaatggatgggggtcacagttcagtctcagggccccggtggaaaagttgtaacctgcgcacaccgctacgaaaaaagacaacatgtgaacacaaaacaggagtctagagacatctttgggcgctgttatgtgctgagtcaaaacttgcggattgaggatgacatggacggaggcgattggtccttttgcgatgggagattacgcggtcacgagaaattcggctcctgtcagcaaggtgtggccgcaacttttacaaaagatttccattacatagtctttggcgcaccaggtacctacaactggaagggaatcgtacgggtggagcagaagaacaatacatttttcgacatgaacattttcgaagacggaccttatgaagtcgggggagagacggagcacgatgaaagcctggtacccgtacccgctaattcatatctaggattactcttcttaacaagtgtctcttatactgacccagatcaatttgtgtacaagactagacctcccagagagcagcccgacacctttccagacgttatgatgaacagctaccttggtttctcactggactctggcaaaggcattgtcagcaaggatgagataacctttgtgtccggcgccccaagggcgaatcactctggcgccgtcgtcctgctgaagcgtgatatgaaatccgcgcatttgcttccagaacatatattcgacggtgagggattggccagctcttttggttatgacgtcgcagtagtcgacctcaataaggatggctggcaggacattgtgattggcgccccacaatactttgatcgcgatggcgaggtgggcggcgccgtttacgtttacatgaaccagcagggacggtggaacaatgtcaagccaatcaggctgaatgggaccaaggacagcatgttcggcatcgccgtgaagaacattggcgacattaaccaggatggatatccggacattgctgttggcgcaccttacgacgacctgggaaaggttttcatatatcatggctcggcaaacggaataaacacaaagcccacacaggttttgaaggggatcagcccatactttggctacagtattgccggtaacatggacctggaccggaactcctacccagacgtagccgtgggcagcctgtcagatagtgtaaccatcttccgcagccggcctgtcataaatatccagaaaacaattacggtgacaccaaaccggattgatctccgacaaaagacagcctgtggcgcgcccagcgggatatgcttgcaagttaaatcttgcttcgaatataccgccaaccctgctggttacaatcctagtatatctatcgttggtactttggaggccgaaaaggagaggcgaaaatccggccttagctcaagagtccagtttcgcaaccagggctctgaacctaagtatacgcaggaattgactctgaaacggcagaagcagaaggtctgcatggaggaaaccctgtggctccaggataacattagggataagcttcgccctataccaatcacagcatccgtggaaatccaggaacctagctcgagacgtcgggtgaactccctgcccgaggtgctcccgattctcaatagcgacgaacccaaaaccgctcatatcgacgtgcattttttaaaagaaggttgtggggatgacaacgtctgtaactccaacctcaagctggagtacaagttctgcacacgagaagggaatcaggataagtttagctaccttcctattcaaaaaggagtgcccgagttagtcttgaaagatcagaaagacatcgcactcgaaataaccgtgacaaactctccatcaaacccacgcaaccctactaaggatggcgacgacgcccacgaggctaagctcattgctaccttcccagatacccttacctactcagcctatagggagctgagagcttttcccgaaaagcagctctcttgcgtggcaaatcagaacgggtcacaggcagattgcgagctcggcaacccgttcaaacggaatagcaatgtcacgttctacctcgtgctgtcaacgaccgaagttactttcgatactcccgatcttgatattaacctcaagctggaaaccacctctaaccaggacaatctggctcctatcaccgccaaagccaaggtagtcattgagctactgttgtcagtgtccggggtggcgaagccctcccaggtgtacttcggaggcaccgtggtgggcgagcaagccatgaaaagtgaagacgaggtcgggtccttgattgagtacgaattccgcgtcattaaccttggtaaaccgctaaccaatctgggcaccgcaacactaaatatccagtggcccaaggaaatttccaatggaaagtggctgctatacctcgtgaaagtggaatctaagggccttgagaaggtgacttgcgaacctcagaaggagattaattctctgaacctgaccgaaagccacaactctcggaaaaagcgcgagattaccgagaaacagatcgacgataatcgcaagtttagcctcttcgcagaacggaagtaccagactctgaactgtagcgtcaacgtcaactgtgtgaatatcagatgtcctctgcgagggttagacagcaaagcgtcactcatccttcgcagccgtctctggaactcgaccttcctcgaggaatattctaagttgaattatctggacattttaatgcgggcatttatcgatgtaaccgccgcagcggagaatattaggctgcccaatgccgggacgcaggtaagagtgacagtattcccttccaaaaccgtggcgcagtactccggagtcccatggtggatcattctggtagctatcctggcgggaattcttatgctggctctgttagttttcattctgtggaagtgcggcttcttcaagcgcaataagaaggaccattacgatgccacttatcacaaggccgagatacacgcccagcccagcgacaaggagagacttacaagcgatgcctag

SEQ ID NO: 24557 - DNA, 3276 bp, synthetic construct
  misc_feature 1..3276: note = Description of Artificial Sequence: Synthetic coding sequence
  source 1..3276: mol_type = other DNA
atggccgccgccggccagctgtgcctgctgtacctgagcgccggcctgctgtctcggctcggcgctgcttttaacctggacactcgggaggacaacgtgatcaggaagtatggcgaccctgggtcactcttcgggttttcgcttgccatgcactggcaactccagccagaagacaagagattgctgttagttggcgcccctagagcagaggccctgcctctgcaacgtgcgaaccgtaccggcggactgtactcatgtgatataacagctcgtggcccctgcaccagaatcgagtttgataatgacgccgatccaactagtgaaagcaaggaggaccaatggatgggtgtgacagtccagtcccagggcccaggagggaaggttgtaacctgcgctcacagatacgagaaacgccagcatgtaaacactaagcaagaatccagggatatatttgggcggtgctatgttctatcacaaaacctaaggatcgaggatgacatggacggaggcgactggtctttctgtgacggccggctgcgtggccacgaaaaattcggatcctgccagcagggagtggccgccaccttcacaaaagactttcattacattgtgtttggggcccccggaacatacaactggaaggggattgtccgtgtggagcagaaaaataatacttttttcgatatgaatatcttcgaggacggtccatatgaagtgggaggggagacagagcacgacgagtctcttgtgccagtgcctgccaattcgtacttggggttctcattagatagcggtaaggggatcgtgagtaaggacgaaataactttcgtgagcggggctccaagggccaatcactccggcgccgtggtattgctcaaaagagacatgaaatccgctcacttacttccggagcatatcttcgacggggaaggcctggcctccagttttgggtacgacgtcgcagtcgtagatctgaacaaggacgggtggcaggacattgtgattggggcaccacagtactttgatagagatggtgaggttgggggcgcggtttacgtgtatatgaatcagcaaggccggtggaataacgtcaagccaatccggctgaacgggacaaaggacagcatgtttgggatagccgtcaagaatatcggagacatcaatcaggacgggtacccggatattgccgtcggggcaccttacgacgacctgggaaaagtgttcatttaccatggaagtgcaaacggaatcaataccaaacccacgcaggttcttaaagggatttctccgtatttcggatattcaatcgccggcaacatggatctcgaccggaattcctatcccgatgtagctgtgggaagcctttcagatagcgtaaccatatttagaagtcggcctgtcattaatatacagaaaaccatcactgtgaccccaaaccgaatcgacctcaggcaaaaaacagcttgcggagctccatcagggatttgtcttcaagtcaaatcctgtttcgagtatactgcgaatcctgcggggtataacccttcaatcagtatcgtgggaaccctcgaggccgagaaagaacgacgcaaatccggtctgtcctcacgcgtacagttccggaaccaaggatccgaacctaaatacactcaggagctcaccctcaagcgacagaagcagaaagtttgtatggaagagacgctctggctgcaagacaacatcagagataaactaagaccgattccgatcacagctagcgtggagatccaggaaccttcctcacggagacgtgtgaatagcctgcccgaagtgttgcctatactcaattctgacgaaccaaaaacagcccatatcgatgttcatttcctgaaggaagggtgcggtgatgacaacgtgtgcaattctaatctgaagcttgagtacaagttctgcacccgcgaagggaaccaagacaagttctcttatttgccaattcaaaagggagtccccgaattggtgctgaaggatcagaaagatattgccctagagataacggtgaccaactcgcccagcaatcctcgcaaccctacaaaggacggggatgatgcccacgaggccaagctgatcgccacattcccagacaccctaacatattccgcttatagagaacttcgggcattccctgagaagcaattgagctgcgtcgccaaccagaatggcagccaggctgactgtgaattggggaacccattcaagcgcaactctaatgtaaccttctatctcgtcctgagcacaactgaggtgacatttgacaccccagatctggacattaatttgaagcttgagacaacatcgaaccaggataacttagcccccattacagccaaagctaaagtcgtgatagagttattactgtcagtaagtggcgttgcaaaaccctcacaagtgtactttggaggaacagtggtgggcgaacaggctatgaaatccgaagatgaagtgggttcactcatcgaatacgaatttcgggtaataaatctcggcaaacctctgacaaatctcgggacggcaactctgaatatccaatggcctaaagagatctcgaatggtaagtggctactttatctggttaaagtggagtcgaagggccttgagaaagttacctgcgaaccacagaaagagattaactcacttaatctcaccgaatctcataatagtcgtaagaagcgcgaaattacagagaaacaaattgacgataataggaagttttcactctttgccgaaagaaagtatcagacacttaattgcagtgtcaacgtgaattgcgttaatattaggtgcccactccgtggattggactcaaaggctagtttaatcttgaggtcccgcctgtggaactcaactttcctcgaagagtacagtaaacttaattaccttgatattctaatgagagctttcatcgacgtgacggccgcggccgaaaatatacgcttgcctaacgccggaacacaggttcgggtcaccgtctttcccagtaagaccgtggcccaatactcgggcgttccatggtggataatcctggtggccattctggccggaatacttatgctcgcgttactagtatttatattgtggaaatgcggcttcttcaaacggtctcgttatgatgatagtgtcccccggtaccatgctgtcaggatacgcaaggaggagcgggaaatcaaggacgagaagtacattgacaatttagaaaagaagcagtggatcacgaagtggaatgagaacgaaagctattcgtag

SEQ ID NO: 24558 - DNA, 2865 bp, synthetic construct
  misc_feature 1..2865: note = Description of Artificial Sequence: Synthetic coding sequence
  source 1..2865: mol_type = other DNA
atgggcgtgaccgtgcagagccagggccccggcggcaaggtggtgacgtgtgcacatcgatacgaaaagcggcagcacgtgaatacaaagcaggagagccgcgatatcttcgggaggtgttacgtgttgtcgcaaaatcttagaattgaagatgatatggatggcggcgactggtctttttgcgacgggcgcttgagaggtcacgaaaaattcggctcctgccagcaaggggtagcggcaacctttacaaaggatttccactatatcgttttcggcgcccctggcacctataactggaagggattattgttcctcacatctgtgagttacaccgaccccgaccagtttgtttataagacacggccacccagagagcagccagatacatttccagatgtgatgatgaactcttacctgggtttttcattagactccggcaaggggattgtgagcaaggacgagatcacattcgtcagcggcgcccctagagcgaatcattctggcgccgtcgtgctcctgaagcgggatatgaagtctgcacatctgctgcccgaacacatattcgatggcgaaggcttggcctcttcttttggctacgacgtggccgtcgtggacttgaacaaagatgggtggcaagatatcgtaatcggggctccccagtacttcgatcgggacggggaagttgggggtgccgtttacgtttatatgaatcagcaagggcggtggaataacgtcaaacccattagacttaacggcaccaaggacagcatgttcggtattgcagttaaaaacattggcgacataaaccaggatggatacccagatatcgctgtgggagccccctatgatgatcttggtaaggtttttatctaccacgggtccgccaacggcatcaatacaaagcccacccaagttcttaaaggaatcagcccatactttgggtacagcatagccggcaacatggatctcgaccgcaatagttatcctgatgttgccgtggggtcactgtccgattctgtgactatctttaggagcagaccggtgatcaatatccagaaaaccattaccgtgacgccgaacagaattgatctacgccagaagacagcttgtggggctccctcgggcatctgtctgcaggtcaaaagctgtttcgagtatacggctaaccccgctggctacaacccttctatttccatcgtgggcaccttagaagccgagaaagaacggaggaaatccggtttgtctagtcgtgtccagtttcgaaaccaggggtccgaacccaaatatactcaagagctaactcttaaacggcaaaaacaaaaagtctgcatggaggagaccctgtggctccaagataatatacgagacaagctgagaccaatccctattaccgcgtccgtggagatccaggagccctcctcacggagacgcgttaacagtttgccagaggtgctcccaatcctgaactcagacgaacccaagactgcacacatagacgtccattttctcaaggaaggatgtggcgacgataacgtgtgcaattccaacctaaagctggagtacaaattttgtacaagagaagggaatcaggataaattttcatatcttcccattcagaagggcgttccagagctggtgttgaaagaccaaaaagatatcgcactggaaattacggttaccaattctccatctaacccccggaatcctactaaggacggggatgacgcgcatgaggctaagctgattgctaccttccccgacaccctgacctattccgcctatcgggagctccgggccttccctgagaagcagttgagttgtgttgcgaaccagaatggttcccaggctgactgcgagcttggaaacccgttcaagaggaactctaatgtgacattctacctcgtgctcagtaccaccgaggtcactttcgacacgcccgaccttgacattaacctgaaactggagaccacctcaaatcaggacaatctggcacctatcacggccaaagccaaagtggtaatcgagctccttctgtcagtgtccggtgtggcaaagccgtcacaggtttactttggtggcaccgtcgtgggggaacaggccatgaagtcggaagacgaggttgggtccttgatagaatatgagttccgcgtaatcaacttagggaagcctttaaccaatcttggcaccgccacactgaacattcagtggcctaaggagatcagcaacggcaaatggctcctttatctggtaaaggtcgagtccaaaggattagaaaaggtgacttgtgagcctcaaaaggaaatcaactccctgaatctgacggagagtcataacagccggaagaaacgagaaattactgaaaaacagatcgacgacaaccgtaagttcagcctgttcgctgagcggaagtaccaaaccctgaattgttccgtgaatgttaactgcgtcaacatcagatgtccattacggggtctagattcaaaggcatcactcatcttacggtcaagactctggaactctaccttcctggaggagtatagcaagctgaactacttagacatattgatgcgggccttcatcgacgtgacagcagccgctgagaacattcggctgcccaacgctggaactcaggtgcgcgtgactgtgtttccttcaaagaccgtcgcccaatattctggcgtgccttggtggatcatcctggtggccatattggcaggaattttgatgctggcgctattggtgttcattttgtggaagtgcggctttttcaagcggaacaaaaaagaccattacgatgctacctatcataaagcagagatacacgcacaacctagcgataaggagcggctgacatctgacgcatag

SEQ ID NO: 24559 - DNA, 3393 bp, synthetic construct
  misc_feature 1..3393: note = Description of Artificial Sequence: Synthetic coding sequence
  source 1..3393: mol_type = other DNA
atggccgccgccggccagctgtgcctgctgtacctgagcgccggcctgctgagcagattgggtgccgcctttaatctagacacgagggaagacaatgtcattagaaagtacggcgaccctggctctttatttggtttcagccttgcaatgcattggcagcttcagccggaggataaaagacttcttctggtcggcgccccgcgggccgaggcacttcctctgcagcgcgcaaaccggaccggcggtctttatagctgtgacatcacggcaagaggcccttgtacaaggattgagtttgacaacgacgccgatccgacttccgaatctaaagaggaccagtggatgggtgttaccgtgcagagccaagggcccggcggcaaggtcgtgacgtgcgcacaccggtatgagaaacggcagcacgtcaacacaaagcaggaatccagagacattttcggtagatgctacgtgctgagccaaaatctcaggatcgaagacgacatggatgggggggattggagtttctgtgatggacgactgcgggggcacgagaagttcggttcatgtcaacagggggttgccgctactttcacaaaggattttcactatattgtgtttggagctccgggtacctacaattggaagggcattgtcagagtggagcagaaaaacaacacattttttgacatgaatatttttgaggacggcccgtatgaggtggggggagagaccgaacacgacgagagtctggttcctgttcccgctaacagctatttaggtctgctgttcctgacaagcgtgagctacaccgacccagatcaattcgtgtacaagactcggccgccacgggaacagcccgacactttccccgacgtgatgatgaactcttatctgggtttctcccttgattcaggaaagggcatcgtatctaaggacgaaatcacattcgtcagcggggcaccccgggccaatcactctggagccgtggtgttgctaaagagggacatgaagagcgcccatctccttcccgaacacattttcgatggtgaaggcttagcctcttcatttggatacgatgtagccgtcgtcgatcttaacaaggatggctggcaggacatcgtgatcggagcacctcagtacttcgacagggatggggaagtgggaggagccgtctacgtatacatgaatcagcaaggtagatggaataacgtaaagcctattaggctgaacgggacgaaggactcaatgttcggcatagctgtgaagaacataggtgacatcaaccaagatggctacccagacatagccgttggagctccctatgatgacctgggcaaggtctttatctaccacgggtctgctaacgggatcaatacaaagcctactcaggtactgaaggggatttctccttacttcgggtattcaatcgccggcaacatggatctggatcggaattcctacccagacgtggctgtggggagcctttctgatagtgtaacgatttttagatctcgccccgtgattaacatacagaagactattacggtgacaccaaacagaattgatttgcggcagaagacggcttgcggcgccccctcaggaatttgcctgcaggtgaaatcgtgcttcgaatataccgcaaatccggcaggctacaatccgtctatcagtattgtcgggactcttgaggcggagaaagagaggcggaaaagtgggcttagcagcagggttcagttcaggaatcaaggctctgagcctaagtatacccaggagctgacgctgaagaggcaaaaacaaaaggtttgtatggaggagacgctctggctccaggataatatcagggacaaacttcgccccatccctattaccgccagcgtggagatccaagaaccctcatccagacggcgtgtgaactccctccccgaagtcctgccaatcctcaattccgacgagccaaagactgctcacattgacgtccattttctgaaggagggttgtggcgacgacaacgtttgtaacagcaatctgaagcttgaatacaaattctgcacaagagagggcaatcaagacaagttttcttacctgcctatccagaaaggtgtccccgaactagttctgaaggaccagaaggatattgcactggagatcaccgttaccaactccccgtcaaacccccggaaccctacgaaggacggggacgacgctcacgaagccaaactgattgctaccttccctgacactctgacatactctgcgtacagagagctgcgtgccttccccgagaagcagctgtcatgtgtcgctaaccagaatggctcacaagccgattgtgagttggggaaccccttcaagcgaaactcaaatgtcactttctacttagtcttgtctacaacggaagtgacgttcgacacgcctgatctagacattaacctgaaacttgagactacatccaatcaggataatcttgccccaatcaccgccaaagcaaaggttgtgattgaattgttactgagtgttagtggggtcgccaaaccctcccaggtgtacttcggcggcacagttgtaggtgagcaagccatgaaaagtgaggatgaggtggggtccctgattgagtatgaatttcgagttataaatttaggaaagcctctcaccaatctgggaaccgcaaccctgaacattcaatggcctaaagagatctcaaacgggaagtggctgttgtatctggtgaaggtcgaaagtaagggcttggaaaaggttacctgcgaaccccaaaaagaaattaacagcctgaatctaaccgaatcacacaatagccgaaagaaacgggagattaccgaaaagcaaatcgacgacaacagaaaattttccctctttgccgagcgaaaataccagacgttgaactgcagtgtgaacgtgaattgtgtcaatattaggtgcccactgagaggcctggactccaaggccagcttaattcttcgatcgagattatggaactcgacattcctcgaagagtacagcaagctcaattacctagacatcctgatgagagcttttatagatgttacagctgcagccgagaacattcggttacctaacgctgggacccaggtgcgcgttacagttttcccttccaaaacagtggcccagtacagtggtgtaccttggtggattatccttgtagcgattttggccggaatactgatgctggccttgttagtattcatcctgtggaaatgcggattcttcaagaggagcagatatgacgacagcgtgcctaggtatcacgcggtgaggattcgtaaggaagagagagagattaaagatgagaagtatatagataatctcgagaagaagcagtggatcacaaaatggaatgagaacgagagttatagctag

SEQ ID NO: 24560 - DNA, 3261 bp, synthetic construct
  misc_feature 1..3261: note = Description of Artificial Sequence: Synthetic coding sequence
  source 1..3261: mol_type = other DNA
atggccgccgccggccagctgtgcctgctgtacctgagcgccggcttgctgagccgtttaggcgccgcctttaacctggatacaagggaggataatgtgatccgcaagtatggggaccctggtagcctgtttggtttcagtctcgccatgcactggcagcttcagcccgaagacaagagactcctgctcgtaggggcccctagggctgaagcactgcctctccagcgggccaacagaacaggtggcctatactcctgcgacattaccgccaggggcccctgcacccggatagagttcgataatgatgcagaccccacatcagagagcaaagaggatcaatggatgggagtcacggtacagagccagggcccaggtggcaaagtggtaacttgcgcacaccgatacgaaaaacgtcagcacgtcaacaccaagcaggagtctagagacatatttggaaggtgttatgtgctaagccaaaatttgagaatcgaagatgatatggatggtggtgactggtcattttgcgacggccggctcagggggcacgaaaagttcggaagctgtcagcagggtgttgcagcaactttcactaaagacttccactacattgtattcggcgccccgggaacgtacaactggaaaggcctcctctttctgacatctgtgtcctataccgatcctgatcaatttgtgtacaaaacccgcccaccccgcgagcaaccagatacctttcctgacgtcatgatgaactcctacttagggtttagcctcgattctggtaagggtatcgttagtaaagacgagatcacattcgtgtcaggggcccctagggcaaatcacagcggggctgtggtcctgctgaagagggacatgaaatccgcccacttgctgccagagcatatttttgacggggaaggcttggcgtcttctttcggctacgatgtcgcagttgtggacctgaataaagatggctggcaagatatcgttatcggcgccccacaatacttcgatcgggacggggaagtgggcggggcggtctacgtctacatgaatcagcagggacgctggaacaatgtcaagcctatccggcttaatggaacgaaggactccatgttcggcatcgccgtcaaaaacataggcgatatcaaccaagacggatacccagatatcgctgtgggtgctccttacgatgacttagggaaggtctttatttatcatgggtccgctaacggcattaacacaaaacccactcaggtactcaaaggcatctccccctatttcgggtatagcatagccggaaacatggatctggacaggaattcatacccagatgttgctgtcggcagcctcagcgactctgttacaattttcagatcccgccccgtgattaatatccagaagacgataaccgtcacgccaaaccggatcgatttacgacagaaaaccgcgtgtggggcaccttcaggaatatgtttgcaggttaaatcctgttttgagtatactgccaacccagccggctacaatcctagtatttccatagtgggcaccctcgaggcagagaaggagcgaaggaaaagcggcctgagctctagggtgcaatttaggaaccaagggtccgaacccaagtacactcaagagctgactctcaagagacagaaacaaaaagtgtgcatggaagaaaccctgtggctacaggataatattagagataagttaagacccattcccattactgcaagtgtcgagatccaggaaccgagttctagaaggcgcgtaaattcgctgccggaagtcctccctatcctaaacagcgatgaacccaagacagcccacatcgatgtgcattttctaaaggagggatgtggcgacgataatgtgtgtaacagcaacctcaaactcgagtacaagttttgcacccgtgaggggaaccaggataaattcagctatctccctatccagaagggcgtgccagaactcgtattaaaggaccagaaggatatagcgcttgaaatcaccgttaccaattccccatctaatcctcggaaccccaccaaggatggggacgacgctcacgaggccaagttgattgccaccttccctgacacactgacctatagcgcgtacagagaactgcgcgcattccctgagaaacaactgagttgtgtagctaaccagaacgggtcccaggcggattgtgagttggggaacccctttaagaggaatagcaatgtcaccttctacctcgtcctctccacaacggaggtaacatttgacactccggatctcgacatcaacttgaagctggagacaacatcaaatcaggacaacctcgcaccaattaccgccaaggctaaggtggttatagagctgttgttgtccgtgtccggagtggccaagccctcccaggtgtatttcggaggcactgtggtgggtgagcaggccatgaagtcggaagacgaagtggggtcgctgatagaatatgagtttcgcgtaattaacctcggcaagccactaacaaatctagggacagccactctgaatattcagtggccgaaggagataagcaacggcaaatggctattatatctcgtgaaagtcgaatctaaaggactggaaaaggtcacctgcgaaccccaaaaggagatcaattcactaaatcttacggagagccacaattccaggaagaagcgcgagataactgaaaaacagattgacgataacagaaaattctcccttttcgctgaacgaaagtaccagacccttaattgctctgtcaatgtgaactgtgtgaacattcgctgccctctgcggggtctggactccaaggctagcctgatccttcgatccaggctgtggaattcaacttttttggaggagtactcaaagctgaactatctggacatcctgatgcgggcctttattgacgtgaccgccgccgccgagaacattagattgcctaatgcaggtactcaggttagagtgactgtattcccctctaaaaccgtggctcagtatagcggtgtgccctggtggatcattctggtggctatcctcgcgggaattctgatgcttgccctgttagtgttcatcctgtggaaatgtggattcttcaaacgtagcaggtatgacgattctgtaccccggtatcacgcggtgcgaattcgcaaggaggaaagagaaatcaaagatgagaagtacatcgacaacctggagaagaaacagtggattactaagtggaatgagaacgagtcctactcctag

SEQ ID NO: 24561 - DNA, 3414 bp, synthetic construct
  misc_feature 1..3414: note = Description of Artificial Sequence: Synthetic coding sequence
  source 1..3414: mol_type = other DNA
atggccggcgcccggagccgggacccctggggcgccagcggcatctgctacctgttcggcagccttctcgtggaattactgttttcaagggcggtggctttcaacctggacgtgatgggggcactgagaaaagagggggaacctggcagcttatttgggtttagtgtagctctgcatcggcagctccagccacggccccagagttggctattggtcggtgccccacaggctctggccctccccgggcaacaggccaaccgcactggaggcctgttcgcatgtcctttgagcctagaggaaactgactgctatcgagtcgacatagatcaaggcgcagacatgcagaaagagtccaaggagaaccagtggctaggtgtaagtgtacggagtcagggccctggcgggaagatcgtcacctgcgcacatcgctacgaggcccggcagcgggtggatcagattctggaaacacgggacatgatagggagatgttttgtactcagtcaggaccttgccatccgggatgaattggatgggggcgaatggaaattctgtgaaggccggccgcagggacacgagcagtttgggttctgccagcagggaactgccgcagccttttctccggatagccactacctattgtttggggcgcccggtacctataactggaaaggtctcctgtttgtaacaaatattgactcctctgatccagatcagcttgtctacaaaaccctggaccctgccgacagactgcccggcccagccggggatctcgcactgaactcgtatcttgggttcagcattgatagcggcaagggcttagttcgggcggaggaattgtcattcgtcgctggcgctcccagggcgaatcacaaaggagccgtggtgatcttgcgcaaggactcagctagccgcctcgtccccgaagtcatgctaagcggcgagcgactgacatctgggttcggctactccttggctgtggccgaccttaacagcgacggttggccagacttgatcgttggcgccccttatttctttgaaagacaggaagaattaggaggcgcagtgtatgtgtacctgaaccagggaggccactgggctggtattagccctctgcgcctgtgtggcagtcccgacagcatgttcggcatctccctggccgtgctaggagacttaaaccaggacgggttcccggacattgctgtgggagccccattcgacggcgatgggaaggtgttcatctaccatggctcttccctgggggtggttgctaaaccatctcaagttttggagggggaggccgtgggcatcaaatcattcggctacagcttgagcggttctttggacatggacggaaatcagtatcctgatctgcttgttggcagcctagcggataccgccgttctgtttcgggccaggcctatactccacgtgtcccacgaagtgtccattgctccccgatccattgaccttgagcagccaaattgtgccggcggccactcagtttgtgttgacctacgcgtctgcttctcatacattgcggtgcccagtagttactctccaaccgtagctctggattatgtgttggacgccgatacagatagaagactgagaggccaggtgcccagagtcacctttctcagccgaaatctcgaagagccgaagcatcaagcctcaggaaccgtgtggttgaagcaccaacacgaccgtgtttgcggagatgcaatgtttcagctgcaggaaaacgtcaaagataaactgcgggctatcgtggtcactctgtcttactctctgcagacaccacggctgcggaggcaagcacccgggcagggtctcccccccgtggcgccaattttgaatgcccaccaaccaagtacccagagagccgaaatccatttcctcaagcagggatgtggggaagataagatctgtcaatccaatttacaactggtacgggcccggttttgtacacgagtttcggatactgagttccagcccctgcccatggatgtggatggcaccacggctctatttgccctgtccgggcagcccgtgatagggctggaactaatggtcacaaacctgccttcagaccctgcccagccgcaagcagacggcgacgacgcccacgaggcccagttactggtgatgctgcctgacagcctgcactatagtggggtaagggcacttgacccagccgaaaaaccactttgcctctctaatgagaatgcctcgcatgtggagtgcgagctggggaacccaatgaagagaggagcacaggtgaccttctacctgatcctttcaacttctggcatttcaattgaaaccacagagctggaggtggagctactcctagctacgatctctgagcaggagcttcatcccgtatcagcccgagcaagggtgtttatcgagctgcctctttcaatcgcaggaatggcgattccccagcagttgtttttcagtggggtcgtgagaggggagagggccatgcagtctgagcgcgatgtgggcagcaaggtgaaatatgaagtaaccgtgtctaaccaggggcaatccttgcgaaccctgggttccgccttcctcaatataatgtggccccatgagatcgccaatggtaagtggttactgtaccctatgcaggtggaattggaaggtggccaggggcctggacagaaaggcctctgctctcctcgccctaacatcctgcatctcgacgtcgatagtagagataggcgtcgtagggaattggagcccccagagcagcaggagcctggcgaacgtcaagagccctcgatgtcctggtggcctgtctcctctgctgagaagaagaagaacatcacgctggactgcgctcggggtactgcaaattgcgtcgtcttcagctgccctctctatagcttcgatcgagcagcggtccttcacgtatgggggcgcctttggaatagcaccttcctcgaagaatactctgcagtgaaatcactcgaggtgatcgtacgcgccaatataaccgtgaagagttctattaagaatctgatgctccgggacgctagcactgtaatccccgttatggtgtacctggaccctatggccgttgtggctgaaggcgttccatggtgggtgatcctgctggcagtactggcgggtctgctggtcttagctctgctcgtcctgttactttggaagatggggtttttcaagagagcaaagcacccggaggctactgtgccgcagtatcacgcagtcaagattccacgggaggatcggcagcagtttaaggaagaaaaaaccggtaccatcttacggaacaactggggaagcccacgaagggagggacctgacgcccaccctatcctcgccgccgatggtcacccagagctgggtcctgatggccatcccgggccgggcaccgcctag

SEQ ID NO: 24562 - DNA, 3489 bp, synthetic construct
  misc_feature 1..3489: note = Description of Artificial Sequence: Synthetic coding sequence
  source 1..3489: mol_type = other DNA
atggccggcgcccggagccgggacccctggggcgccagcggcatctgttacctgttcggcagccttctggtggaactgctattctccagggccgtcgcctttaatctggacgttatgggggccttacggaaagaaggagagccaggatccctgttcggcttctctgtggcattgcacaggcagcttcagccaagaccacagagctggctacttgtgggcgcgccgcaggctctagctcttcccggacagcaggccaaccggaccggtggcttgttcgcttgcccgctctctttggaggaaactgattgctatcgcgtggacattgatcagggagccgacatgcaaaaggaatctaaggagaaccagtggctcggcgtgagcgtccgctctcagggccccgggggaaagatcgtaacatgtgcacacagatacgaggcaagacaaagagtcgaccaaatactggagactagagacatgattgggagatgcttcgtgctgtcacaggacttagcaatcagagatgaactggatggaggggagtggaaattttgcgaagggcggccccaggggcatgagcagttcggattttgtcagcagggcaccgcggccgccttctcacccgattctcactacttattattcggtgcacctggcacatataactggaagggcactgctcgtgtcgaactatgcgctcagggcagtgcagacctggcacaccttgacgatggtccatacgaggcaggcggggaaaaagaacaggaccccaggcttatccctgtcccggcaaactcttactttggccttctgtttgtgactaacatcgactccagtgatccggaccagctcgtgtataaaaccctggatcccgccgataggttacctggtcccgctggtgatttggcactgaacagttacctgggcttttccattgactcgggaaaaggccttgtaagggctgaagaattgtcattcgtggccggggcacctcgtgccaatcacaagggggctgtcgttattttgaggaaagacagcgcctccagactggtccccgaggtgatgctgtccggtgagcggttaaccagcgggttcggctattctttggcagtcgccgacctgaacagcgatgggtggcctgatctcatagtcggggctccctatttcttcgagagacaggaggaactgggcggggccgtttatgtttatctcaaccaggggggccactgggccggaatcagcccattgaggctctgcggatcccctgactccatgttcggcatatcactggcagttcttggtgaccttaatcaggacgggttcccggacatcgcagtcggtgcaccgtttgatggggatggcaaggtcttcatctaccacggttcttctctgggggtggttgccaagcctagccaggtgctggaaggggaagcagtgggcatcaagtcctttgggtactcactgagcgggtctcttgacatggatggcaatcagtaccccgacctgttggtagggtcactggcggatactgcagtcctttttagagcccggccgattctgcacgttagccatgaagtgagcatcgctcctcggtcaatagacctggaacaacccaactgtgccggaggccacagtgtctgtgtggacttgagagtctgctttagctacatcgctgtgccatcatcatattcacccactgtggcgctggactatgttctggacgcagataccgataggcgtctgcgcggacaggtgccgagggtgactttcctgagcagaaacttggaggagcctaaacaccaagcttccggcactgtatggctgaaacaccaacacgatcgggtttgtggggacgctatgtttcagctacaggaaaacgtaaaggacaagctgagagcaattgtggtgacactctcctacagtctgcagacgcctcgtctgcgccgacaagccccaggtcagggtctccctcccgttgccccgatccttaacgcacatcagccctccactcagcgggcagaaatccattttctgaaacaggggtgtggagaggataaaatttgccagtccaacctgcagctcgtgcgtgcacggttttgcacacgagtgtcagatacagagtttcagccattgcctatggatgtggacggtacgactgcactgttcgccctgagcggtcagcctgtgatcgggctagagttgatggttacgaacctgccatcggaccccgcccagccccaggctgacggcgacgacgcacatgaagcccaactgttggtcatgctgcctgactctttgcactactcaggcgtccgggctctcgacccggcagagaaacctttgtgtctgagcaatgagaacgcgtcacacgtcgagtgcgaactgggtaaccccatgaagaggggagcacaagtcactttttatcttatcctcagcacatctggtatcagcattgagactactgagctggaagtggagctgcttctggcaactatcagcgaacaagaattgcaccccgtgagtgccagagcacgtgtgttcattgaactgcccctgagcatcgcaggcatggcaattcctcagcagctttttttttcaggagtagtcaggggcgagcgggctatgcagtccgagcgcgacgtagggagcaaagtgaaatatgaagtgaccgtgagtaaccagggccaatctcttcgcacccttgggagcgcctttctcaacatcatgtggcctcacgaaatagcaaacgggaaatggctattgtatcccatgcaggtagagctagaggggggccagggcccaggtcagaaaggtctttgttctccccggcccaatattctgcatcttgatgtggatagcagggataggcgtcggcgcgaactggaaccccccgagcaacaggaacccggagaacgacaggaaccttccatgagttggtggccggtaagttccgcagagaagaagaagaacatcactctggactgcgcccgaggcaccgccaattgcgtagtattctcctgcccgctgtactcattcgaccgggcggccgtattgcatgtgtggggcagactttggaactctacctttctggaagagtacagcgctgtaaaatccctagaggtgattgtacgcgccaacattaccgtcaagtcctccatcaagaatctgatgttgagggatgccagcacagtgatccctgtcatggtgtacctggacccaatggcagtcgtggccgagggcgtcccttggtgggtgatccttttggccgtgctcgccggcctgttggtcttggcacttttagtgctgctcctgtggaagtgtggcttcttccataggagctcacaatccagctcatttcccactaattaccaccgggcctgtctggcggtgcagccgtcggctatggaagtgggcggtcccggcacggtaggttgggattcgtccaacggcagatccaccccccggcctccatgtccctcaactatgcgatag

SEQ ID NO: 24563 - DNA, 2976 bp, synthetic construct
  misc_feature 1..2976: note = Description of Artificial Sequence: Synthetic coding sequence
  source 1..2976: mol_type = other DNA
atggccggcgcccggagccgggacccctggggcgccagcggcatctgctacctctttggcagtcttctggtcgaactgctgttctccagggccgtcgcattcaacttggacgtaatgggggcattacgtaaggaaggtgaacctggttccctattcggcttcagtgtggcactgcacagacagttgcagccccggccccagtcctggctcctggtgggggctccccaggccctcgccttgcccggacagcaagcgaatcggaccgggggtctatttgcttgcccgctgagtttagaggagacagattgttaccgcgtggatattgatcagggagctgacatgcagaaggagtcaaaagagaatcaatggctgggagtcagtgtgagaagtcaaggccccggcggtaagattgtgacttgcgcccatagatacgaggccaggcagagagtggaccagatcttagagactagggacatgattgggcgatgtttcgtcctgagtcaggatcttgctatcagggacgagctcgatggaggagaatggaaattctgcgaaggtaggccccaaggccatgagcagttcggcttttgtcaacagggcaccgctgccgcttttagtccagattctcattaccttctctttggcgctccagggacttataactggaagggtactgcaagagtcgagctgtgtgctcagggaagcgctgacttggcccacctcgacgatggtccgtatgaggctggtggcgagaaagagcaggacccgcgattgatcccagtgccggctaattcctatttcggactcttgttcgttacaaacattgattctagtgatccagaccagctggtgtataaaacgttggaccccgcagacaggctgccagggccagcaggagatctcgcgctgaactcttacttaggatttagcatcgattccggcaagggactggtccgggctgaagaactgtctttcgtcgccggggccccgcgggccaaccataaaggagcggtggtaatcctgcggaaggattcggcatcgcgcctggtgcctgaagtgatgctgtccggggaacggttgacgtccggatttggatactccctggcggtggctgacctcaactcagatggatggcctgacttaattgtgggagcaccctactttttcgagagacaagaagagctgggcggtgcagtttacgtgtacttaaaccagggcggacactgggcgggcatttctcccctgaggctgtgcggaagtcccgattcaatgtttgggatttcgctcgctgtactcggtgatctgaatcaggatggatttcccgatatcgctgtaggcgccccttttgacggggatggcaaggttttcatctaccatggcagctcccttggggtcgtcgccaaacccagccaagtgttagagggagaggccgtagggattaagtcctttggatattcccttagtggttccctggatatggatgggaaccagtatcccgacctcctggtgggcagcctagccgacaccgccgtgctgtttagggccagacctatcttacatgtgtcccatgaagtctctatcgcgccccgatctatcgatctagagcagcccaattgtgcgggagggcattctgtgtgtgtagatttgagggtctgcttcagctacatcgcggtgccttcatcttacagcccgaccgttgcactcgactacgtactggatgccgatacagaccggaggctgcgcgggcaggtccctagagtgactttcttgagccgcaatctggaagaacctaagcatcaagccctggatcctgctgagaagcccctgtgcctctccaatgaaaatgctagccacgtcgagtgtgaactcgggaaccctatgaagaggggcgcccaggtcacattttacctgatcttatccacctcgggtatttccatcgaaaccacagaactggaagtggagttgttactcgctaccatcagcgaacaggagcttcaccctgtgtcggccagggctagggtctttatcgagctacctctgagcattgctgggatggccataccgcaacagctatttttttccggagtggtgcgaggagagcgggcaatgcagtctgagcgcgacgtaggatcgaaggtaaagtacgaggtgacggtttccaaccagggacagtccctcaggacactgggttctgcttttcttaacatcatgtggccccacgaaattgccaatgggaagtggcttctttaccctatgcaggtggagctggaaggcgggcaaggcccagggcagaagggtctgtgttcccctagaccaaacattcttcacttagacgtcgatagtcgggaccgccggagaagggagctggagccgcccgagcagcaggaaccaggcgagcgacaggagccaagtatgtcttggtggcctgtgtcttcagctgaaaagaagaaaaatattacactcgactgtgcacggggcaccgcaaactgtgtggtcttctcgtgccctctctacagctttgatagagctgccgtgctccatgtgtggggcagactgtggaatagcaccttccttgaggaatattctgccgtcaagtcactggaggtgatcgttagagccaacatcaccgtgaagagtagtatcaaaaacctcatgctaagagatgcctctaccgttataccagtcatggtgtatctggaccctatggcagtagtagcagaaggtgtgccttggtgggtaattcttcttgctgttctggctggactgctggtgctggctttactggtgctgctgctgtggaagtgtggattctttcatcggagttcacagagctcctcattccccacaaactaccaccgcgcgtgtttagccgtccagccctcggccatggaggtaggcgggcccggtacggtcgggtgggattctagtaatggtagaagcaccccacggcccccctgtccttccaccatgcggtag

SEQ ID NO: 24564 - DNA, 3357 bp, synthetic construct
  misc_feature 1..3357: note = Description of Artificial Sequence: Synthetic coding sequence
  source 1..3357: mol_type = other DNA
atggccggcgcccggagccgggacccctggggcgccagcggcatctgctacctgttcggctctctcttggtcgagcttttattttcacgagctgtggcgtttaacctggatgttatgggtgctttgagaaaagagggcgagcctggttcactattcggattttcggtggcgctccacaggcaactccagccccggccccaatcttggctgcttgttggcgcaccccaggctttggcccttcccggccagcaggcgaataggacaggtggcctgtttgcctgccccctgtcacttgaagagactgactgttacagggtggacatcgatcaaggcgctgacatgcagaaggagtctaaagagaaccagtggctgggggtgagtgtccggagccagggaccgggtggcaaaatcgtcacctgtgcccacaggtatgaagctcgacagcgcgttgatcagatactggaaacaagggacatgattggtagatgttttgtgctctctcaggatctggcaataagggacgagctggacggcggagagtggaagttttgcgagggaagaccacaaggccatgaacagtttggtttttgccagcagggtacggccgccgcgttcagccctgactctcattacctgctgtttggcgcccctggcacttataattggaaggggctgctgtttgtgacaaatattgacagctctgatccggatcagctggtgtataaaaccttagaccccgctgaccgcctgccggggcctgccggggacctggccttaaactcctatctcggatttagcatcgacagtggcaaaggactggtgagagcagaggagctgtcctttgtcgccggcgcgcctagagccaaccataagggggcggtcgtgatcctcagaaaggactcagcctcccggttagtgccagaagtgatgctgagcggtgagaggcttacatccggatttggctatagcctggccgtcgccgatttgaatagcgacggttggcccgacctgatagtgggagcaccatacttcttcgagcgccaggaggagctgggcggtgcagtctatgtttacttgaaccagggtgggcactgggccggtatctctcccctccggctgtgcggctctcctgactccatgttcgggatctccctggcagtcttgggtgacctgaatcaagatggcttcccagatatcgctgtgggagctccgttcgatggagatgggaaagtatttatttatcatggctccagccttggcgtagtggccaaaccatcccaggtcttagaaggcgaggctgtaggcattaagtcgttcggatacagcctgagcggtagcctagacatggacgggaatcaatacccagatttattggtcggctctttagcagacactgcggtgctgttccgagctcgccctatcctgcacgtgagccacgaagtctcaatcgctccccggagcatcgatctagagcagcccaattgcgctggagggcattccgtctgtgtggacctgcgggtgtgtttctcctatatcgcagtgccatccagctattcccccacagtggccctagactatgtgctcgatgctgacacagatagacggctcaggggacaggtgcctagggtcaccttcctgtcccggaatcttgaagagcctaagcatcaagcctccggaaccgtgtggcttaaacaccagcatgatagagtttgcggggacgctatgtttcagttgcaggaaaatgtaaaggataaactgagagctatcgtggtgactctaagctatagtctgcagactcccagactgaggagacaagctccaggccaggggctgcctcccgtggctcctatcctcaacgcacatcagccatccactcagcgggctgaaattcactttctcaagcaagggtgcggggaagacaagatctgtcagagcaacctgcagctggtacgggctcgtttttgtaccagagtctcagatactgaattccagccattgccaatggacgtcgatggaacgactgcactttttgccctgtcagggcaacccgtaatcggcctggaactgatggtgaccaacctcccaagcgaccctgctcaaccccaggctgacggtgacgatgcgcatgaggcccagctgctggtgatgctgccagattccctgcattactctggggtaagggctctggacccagcggaaaaacccctctgcctttccaatgagaatgcgtcacacgtggagtgcgaactgggtaaccctatgaaacgcggcgcacaagtgactttttatctgattctgtccaccagcggtatctccatcgagacaacagaattggaagtggaactcctcttagctaccatttcagaacaagaacttcatcccgtctctgcacgtgcgcgcgttttcatcgaattacccctttcgatcgcaggcatggccatccctcaacaactgtttttctccggagtggtgcggggggagcgggcaatgcagagtgaacgtgacgtgggaagcaaagtgaagtatgaagtcacagtgtcaaatcagggccagtcgctcaggacattggggagcgccttccttaacatcatgtggcctcatgagattgcgaatggcaagtggcttctctaccctatgcaagtagagctcgagggggggcaggggccgggccagaaaggtctgtgctctccacgacccaacatcttacaccttgatgttgattcgcgggatagacgtcgccgggaactcgaaccaccagagcagcaggagcctggcgagcgccaggaaccctcgatgtcttggtggcctgtctctagcgcggagaagaaaaaaaacatcactttagactgtgcaagaggcacggccaactgcgtggtcttctcttgcccactgtacagcttcgacagagctgcagttctccacgtttggggaaggctttggaatagcactttcctggaagagtatagcgcagttaagtctctagaagtgatagtacgggccaatatcactgtcaagtcgagtataaagaacctgatgttgagggatgcgtctacagtcattcctgtaatggtgtatttagatcctatggctgtagtggccgaaggtgtaccctggtgggtgatcctgctcgctgtcttagcgggactgctagtgctggctctgctggtgctgctcctttggaagtgcgggttttttcaccgctcctcacaaagttcctcctttccaactaactatcacagagcttgtctggccgtgcagccatccgcaatggaagtcggcggccctggcactgtggggtgggactctagcaatggccggagtacccctaggcctccttgtccctctacaatgcggtag

SEQ ID NO: 24565 - DNA, 3369 bp, synthetic construct
  misc_feature 1..3369: note = Description of Artificial Sequence: Synthetic coding sequence
  source 1..3369: mol_type = other DNA
atggccggcgcccggagccgggacccctggggcgccagcggcatctgctacttatttggctccctgctggtggagttgttgttctcaagggctgtggctttcaacctcgacgtcatgggcgccctgaggaaggagggcgaacctggatcgctgttcggatttagcgttgccctgcatcggcaattgcaaccccgcccccagtcttggctgctcgtgggagctcctcaagccctcgcgctgcctgggcaacaggcaaatcgtacagggggactgttcgcgtgccctttgtcccttgaagaaaccgattgctacagagtcgatatagatcagggtgcggatatgcagaaggagtctaaagagaaccaatggctgggggtatcagttagaagtcagggcccaggtggaaaaatcgtgacatgtgcacataggtacgaagctaggcagcgggtggatcagatactggagacgagggatatgattggacggtgctttgtcctctcccaggatctggcaatacgagacgagctcgatggaggtgaatggaagttctgtgaaggacgccctcagggccacgagcaattcggcttctgccagcagggaactgctgcggctttcagcccggactcccactatctgctgttcggcgcacccggcacatacaactggaaaggcacagctcgtgtcgaactgtgcgcccagggctcagctgacctcgcacatttggatgacggaccatacgaagcgggaggggagaaggagcaggatcccaggttgatcccggtccccgcgaattcttattttggcttctccattgattcaggtaaaggactggtccgcgctgaggagctctccttcgtggccggcgcgccacgcgctaatcacaagggcgccgttgtcattctgaggaaagacagcgcatctaggttagtgcccgaggtgatgttgtccggagagagattaacttcaggattcggatattccctggctgtggctgacctgaatagcgacggctggccagatctgatagtgggggcaccctacttcttcgagagacaagaggaattggggggggcagtctatgtctacctgaaccagggcggccattgggccggaatctctccattacgcctgtgcgggtctcctgatagcatgtttggaatttcactagccgtgctcggggacttgaaccaagacgggtttccagacatcgccgtgggggcccctttcgatggggacggaaaggtgtttatttaccacggctcttctctgggcgttgtcgccaaaccgtcacaggtcctggagggggaagctgttggcatcaagtcttttggatacagcttaagtggatccctggatatggatgggaaccagtaccccgatttgcttgtcggaagccttgccgatactgcagtgctgttccgcgccagacctattcttcacgtgtcccatgaggtgagcatcgcgccaagaagcattgatctggagcagccaaactgcgccggcggccattcagtgtgtgttgatctcagggtatgctttagctacatcgccgtgcctagctcatattcccctactgtggcgttggattatgtgctggatgccgatacagaccgtcggttacgcggccaggtgccacgcgtcactttcttgtctaggaacctcgaggagcccaagcaccaggcaagtgggaccgtctggcttaaacatcagcatgaccgtgtgtgtggagatgccatgttccaactgcaggagaacgtgaaagacaaactccgcgccattgttgtgacattgagctattccctgcagacacctcgcctgaggcgacaggcacctggacaggggctcccccctgttgcccccatccttaacgcacaccagccttccacgcagcgagccgagatacactttctaaagcagggttgcggagaagataagatctgccagtctaacctacaattggtcagagcccggttctgtacccgtgtgtccgacactgagtttcagcctcttccaatggacgtagacggcacaactgccctgttcgcattgagtggccagcccgtgatcgggcttgagctgatggtgaccaatcttccttcggatcctgcccagccgcaggctgacggggatgacgcgcatgaagctcagctgctggtgatgctccccgacagcctgcactatagtggggtaagggccttagaccccgctgaaaagccgctttgcctgtccaatgagaacgcctctcacgttgaatgcgagttggggaatcctatgaagagaggagcccaggtgaccttctacctgattctaagcacgtcgggaatttccatcgagacaaccgagttggaagtagagctgttgttggctacaatctccgagcaggagctgcacccggtctctgcccgcgctagggtcttcattgaactgcccttgagtatcgcaggaatggctatccctcagcaactattcttctcaggggtggtacgaggggaacgcgctatgcagtctgaacgggacgttggtagcaaagtcaagtacgaagtgaccgtctcaaaccagggtcagtcgctgagaaccctgggaagtgctttcttaaatatcatgtggccccacgaaatcgccaacgggaagtggttactgtaccctatgcaggtggagctggaaggcggtcaagggccaggccagaaagggctctgcagtccgcgccctaatattcttcatctggacgtcgattcacgcgacagaagacgaagggaactggaacctcccgagcaacaggaacccggagaaagacaggaaccctcaatgtcctggtggcccgtctccagtgccgagaagaagaagaacataaccctagactgcgctcgtgggacagctaactgcgtggttttctcctgtcctctatatagcttcgatagggctgccgtactgcacgtttggggaagattgtggaatagcactttcctcgaagagtactctgccgtgaaatccttagaggtgatagtccgagccaacattacagtcaagtcatctatcaaaaacctgatgctgcgggatgcctccaccgtaattcccgtcatggtctacctagatcctatggctgtagtggccgaaggggtgccatggtgggttatcctgctcgcggtgctcgcaggtctgctcgtgctggccttgttagtgttgttactgtggaaatgcggcttcttccaccgctccagccaatcctcttcattccccacaaattaccaccgcgcttgcctggcagttcagccaagcgcaatggaggtgggaggacccggaacagtgggatgggacagctctaatgggcgttccactcccagacctccatgcccctcaacaatgcgatag

SEQ ID NO: 24566 - DNA, 3135 bp, synthetic construct
  misc_feature 1..3135: note = Description of Artificial Sequence: Synthetic coding sequence
  source 1..3135: mol_type = other DNA
atggcccccttcgccacccccatggtgcaggccctgaccaccacccggatacagcgtcaggctgaaggttttcagtgctggagagaatgcgggacgcgcaggagcccttttgaaggaaaggaaacgtgcgcacacagatatgaagcccgccagagggttgaccagatcctggaaacccgtgatatgattggccggtgctttgtgttgagccaagacctggccatccgcgacgaactagacggaggagaatggaaattttgcgaaggcagaccccaggggcacgaacaattcggattctgccagcagggaacagccgccgcgttttcccccgactctcactatctgctctttggcgctcctggtacctacaattggaagggcaccgcgagggtggagctttgtgcccaggggagtgcagacttagcccacctggatgacgggccatacgaagccggaggagaaaaagaacaggacccacgcctgatcccagtgccggccaacagttactttggatttagtattgactccggtaagggcttggttagagcggaagaacttagcttcgttgctggggcgccccgggcaaaccacaagggggcagtcgtcatattgagaaaagacagtgcctctcggcttgttcctgaggtcatgctaagcggtgaacggcttactagtggcttcgggtatagcttggcggtagctgatctgaattctgacggatggcctgatctgatagtgggcgccccctactttttcgaaagacaagaggagctgggcggggccgtgtacgtctacctgaatcaggggggtcactgggctggaatctcaccattaaggctgtgcggatcccccgatagtatgttcggcataagcctcgcagtcctgggggacttaaaccaagacggctttccagacattgcagtcggagccccctttgacggagatggtaaggtgttcatctaccacgggtcatccttaggagtggtggcaaaaccttcacaagtcctcgaaggcgaggccgtgggtattaaatcctttggctattctctttcgggtagtctggatatggacgggaatcagtatccagacctgctggtagggagcctggccgacaccgctgtgttgtttagagcacggcctatccttcatgtgtcgcacgaggtgagtattgcacctcgttctatcgatctcgaacagccaaactgtgccgggggccatagcgtgtgcgtggatttacgcgtttgcttttcctacatcgcagttccatcgtcatattcgcctaccgttgccttggactatgtgctggatgccgataccgaccggaggcttaggggccaggttccccgcgtaacattcctctccaggaacctagaagagcctaaacaccaggcaagcggaaccgtgtggctgaagcaccagcacgatagagtctgtggggatgctatgttccagctgcaagaaaacgttaaagacaagctgcgagctattgtggtgacgttgagttactcactgcagactcctcggttacggcgccaggcccccggtcaaggcttgccacctgtggcccccatcctgaacgcccaccaaccttctacacagcgggctgaaatacatttcctcaagcagggttgcggggaagacaagatctgccaatcgaatcttcagttagtcagagccagattctgtacgcgcgtatctgacaccgagtttcagccgcttcctatggatgtggacgggacaacggcactgtttgctctcagcggacagccggtgatcggcctggagctcatggtgaccaacctgccttcagatcccgcccagcctcaggcggatggggatgacgctcacgaagctcaactgctggtaatgctgcctgactctcttcattattccggagtcagagccttggaccccgcagagaagccactctgtttgtccaatgagaacgcaagccacgtggaatgcgagctgggcaacccaatgaagagaggcgcgcaggttaccttttacctcatattatctactagtggaatttctattgagacaactgagcttgaggtggaactattgctcgccaccatttccgagcaggagttacatcccgtctctgcgagagctcgagtgttcatcgaacttcccctttcaatcgccggtatggccataccacagcagctgtttttttccggtgtcgtcagaggggaaagggccatgcagtccgaacgcgacgtggggtctaaggtgaaatacgaggtcacagtgagtaatcagggccaatcactcagaacactaggcagtgccttcctgaacattatgtggcctcatgaaatagccaatggtaaatggctgctgtatcctatgcaggtcgagctggaagggggccagggtccagggcaaaaaggactttgctctcctagaccgaacattttacatcttgatgtcgacagccgggatagaaggcggagggaattggagccccctgaacagcaggaacccggcgagcggcaggagccctccatgtcctggtggcctgtgagttcagctgagaaaaagaaaaatatcactctggactgcgcgcgggggacagctaattgtgtcgtgttcagctgccccctgtattcctttgatagagctgccgttctgcatgtgtggggaaggctgtggaactcaacattcctggaggaatatagcgctgtaaaatcactggaggttattgtgcgtgctaatatcactgttaagtcatccattaaaaatctcatgcttcgagatgccagtactgtaatacctgtgatggtataccttgatcccatggctgttgtagccgagggcgtcccatggtgggtgatcctgctcgcagtgctagccggcctactggtactggcgctgttggtgctgttgttgtggaagatgggattctttaaacgggcaaagcacccagaagccacagtgccccaataccatgccgtaaagattccccgcgaagacagacagcagtttaaagaggagaaaaccggcactatcctgcggaacaactggggatctcccagacgcgaggggccggatgctcatcccatccttgctgccgacggccaccccgaactgggtcccgacggacaccccggccctgggactgcatag

SEQ ID NO: 24567 - DNA, 3426 bp, synthetic construct
  misc_feature 1..3426: note = Description of Artificial Sequence: Synthetic coding sequence
  source 1..3426: mol_type = other DNA
atggccggcgcccggagccgggacccctggggcgccagcggcatctgttatctgttcggttctctgctcgttgaactgctttttagccgagcggtagcgttcaacctggatgtgatgggggccctgaggaaagagggagaacctggcagtcttttcgggttttcggtggccctgcaccgtcagctgcagcctagacctcaaagttggcttctggtaggggccccccaagcactcgctctccctgggcagcaagcaaatcggactggcggcttattcgcttgccccctgtcccttgaggaaaccgactgttaccgggtcgacattgatcagggagccgatatgcaaaaggaatccaaggagaaccagtggctgggggtttccgtgaggtctcaaggacctggcggaaaaatagttacctgtgcacacagatatgaggctagacagcgcgtggatcagattctggagacccgcgacatgattggcagatgcttcgtgctgagccaggatctggcaattagagacgaactggacggcggagaatggaaattctgcgagggcaggccacaggggcacgaacaatttggtttctgccagcagggtaccgctgcagcgttctctcctgatagtcactacctcctgtttggtgcccccggcacttacaactggaaagggaccgcgagagtagagttgtgtgctcagggttcagccgacctggctcatctcgacgatgggccatacgaggctgggggggagaaggagcaggacccacggctcataccagtccccgctaattcatatttcgggttctcaatagactcaggaaaggggctggtgagggccgaagagttgtctttcgtggcaggcgctccgagagccaatcacaagggtgcagtggtcattctgagaaaagacagcgcatccaggctggtacccgaggtgatgctgagtggcgagaggttgacttccggctttggctacagcctggctgtggcggatctcaactcagacggatggccagatctgattgtcggcgctccctactttttcgagagacaggaagagctgggaggcgccgtttatgtgtatctgaaccagggcgggcactgggcggggatctccccactccggctctgcggttcgcccgactccatgttcggcatttcactggccgtgctgggagacttaaaccaggacggcttccctgatatcgccgtcggcgcgccgtttgatggagacggaaaagtgtttatttaccatggcagtagcctgggggtggtcgcaaagccctcccaggtgcttgagggcgaggccgtcggtatcaagtcctttggatattcccttagcggatcgcttgacatggacggtaatcagtaccccgacttacttgtgggcagtctggccgacaccgccgtactctttcgggcccgcccgatactgcatgtcagtcacgaagtttccatcgcacccagatctatagatctggaacagccaaactgtgccggcggccattcagtctgcgttgatctgcgagtctgtttctcctatatcgctgttccctcttcctactcacccaccgtggcactagattacgtactcgacgccgatactgatcgtcggctgcgcggacaggtgcctcgagttaccttcctttcccgcaacctcgaagagccaaaacaccaggcctctgggacagtgtggttgaagcaccaacacgacagagtatgtggtgatgccatgtttcagttgcaggagaacgtgaaagacaaactgagagctattgttgtcaccttgagttacagcttacagacaccccggcttcgaagacaggcccctgggcaagggctgcctcccgtggcacccattttgaatgcacatcagccttcaactcagcgagctgaaattcattttcttaagcaaggctgcggcgaagataagatttgccagagcaatttacagctcgtgagagccaggttttgcaccagggtgagtgacactgagtttcagcctctgccaatggacgtggacggtactaccgcgttgtttgccctgagcgggcagcccgtcatcggcctggaactgatggtgaccaaccttccctcagatcccgctcagccccaggccgacggcgacgatgcccatgaagcccagctattggtgatgttgccagattctttacattactccggcgtgcgagcgctggatcccgctgaaaagccactttgtctaagcaacgagaatgcttcccatgttgagtgtgaattgggcaacccaatgaagaggggcgcacaggtaacattttatctgattctctccactagcgggattagcattgaaacaactgaactggaagtcgaactacttctggctactattagcgaacaagagctgcacccagtgtcagctcgcgcccgggtgtttatagaactaccccttagtatcgccggaatggcaatccctcagcaactattctttagtggcgtggtgcgaggcgaacgggccatgcagtccgagcgggacgtgggttcaaaagtgaaatatgaagttaccgtcagcaatcagggccaatcgctccggacactaggatcagccttcctgaacatcatgtggcctcacgagatcgccaacggcaaatggctgctttatcctatgcaggtggaactagaaggtgggcagggcccgggacaaaagggcctgtgtagccctcgtccaaatatactccatcttgatgtggattctagagaccgccggcgtcgggaactcgaaccccccgagcagcaggaaccgggagagcggcaggaaccatccatgtcttggtggcccgtttctagcgctgaaaaaaagaagaacatcaccctcgactgcgccagggggactgccaactgcgtcgtgttctcctgtccactctactcgtttgaccgggccgccgtgttacatgtgtggggacggctgtggaattctactttcctggaagagtacagcgctgttaaaagtctggaggtgattgtccgcgccaatattacggttaagtcaagcatcaagaatctgatgctgcgggacgcaagcacggttattcccgtgatggtctacctcgatcctatggcggtggtggcggagggggtgccctggtgggtgatcctgttggccgttcttgccggcctacttgtgctggcacttttagttctcttgctttggaagatgggttttttcaagagagcaaagcacccagaagcgactgtcccccagtatcacgcggtgaaaatcccacgggaggacagacaacagtttaaggaggagaaaactggaaccatactgcggaacaactggggctccccccgtcgtgaaggacctgatgcccaccccatcttggctgcagatggacatcctgaactaggacctgacgggcatcctgggcccggtactgcctag

SEQ ID NO: 24568 - DNA, 3546 bp, synthetic construct
  misc_feature 1..3546: note = Description of Artificial Sequence: Synthetic coding sequence
  source 1..3546: mol_type = other DNA
atggccggcgcccggagccgggacccctggggcgccagcggcatctgctatctgttcggcagtcttctggtcgagttgctgtttagccgtgcggtagcctttaacctggacgttatgggcgccttgaggaaggaaggcgagccaggcagcctattcggcttcagcgtcgctctccatcgtcagctgcagcctagacctcagagttggttactggtgggggccccccaggccctggccctgcctggacaacaggctaacagaaccggggggctttttgcctgcccacttagtctggaggaaaccgattgttacagagtggatatcgaccagggggcggatatgcagaaggagagcaaggaaaatcagtggctgggtgtcagtgttaggagccaggggcccggggggaagatcgttacctgtgcacatcgctacgaagctagacagcgggttgaccagattctggagacgcgtgacatgattggtagatgcttcgttctgagtcaagacctggccattcgggacgaattggacggcggtgagtggaagttttgcgaaggacgcccacaaggccatgagcagttcgggttctgtcagcagggaactgctgccgctttttcaccagatagccattatctcttattcggggcccccggcacttacaactggaagggcacggcacgcgttgagttgtgcgctcaaggttccgctgatctggcccatctggatgatggcccctacgaggccggcggagagaaggaacaggacccccggttgatcccagtgcccgcgaactcatattttggactgttgtttgtcactaacattgatagctctgatccggaccaactggtatataagactctggacccggcagaccggctccccggtccagcaggcgatctggcactgaatagctacctgggattcagtatcgattctggaaaaggtctcgtgcgagccgaggaattgagtttcgtcgccggcgctcctcgcgctaaccacaaaggggcagtcgtgatacttcggaaggacagcgccagtcgtctcgtacctgaggtcatgttgtccggcgaacgactgacaagcgggtttggttatagcttggctgtcgccgacctaaactcagatggttggcctgatctgattgttggagctccatattttttcgaaagacaggaagagttaggcggagcagtctatgtgtatttaaatcagggtggacactgggcaggcatttcccctctgcgcctatgtggcagtccggattctatgttcggcatttcccttgccgtcttaggcgacctgaatcaggacggatttccagacatagccgttggagctcccttcgatggggatggaaaagtcttcatctatcatggatctagcctgggagtcgtggcgaagccatcccaagtattagagggggaagctgtcggcataaagagcttcggctacagtctgtccggctccctggacatggacggaaatcagtaccctgatctgctggtagggagccttgccgacaccgcagtcttgttccgagcacggccaatcttgcacgtatcacacgaggtctctattgccccacgatccatcgatttggagcagcccaactgcgctggggggcattctgtgtgcgtggacttgcgggtttgcttcagttacattgccgtgcccagtagctacagccccactgtggctttggactacgtcctagacgccgacacggacagaaggctgcgaggtcaagtaccaagggtgaccttccttagccgcaacctggaagagcccaagcaccaggcctctggaaccgtgtggctgaaacaccagcatgatcgggtgtgtggtgatgcaatgttccagctccaggaaaatgtgaaggacaaattacgggctatcgtagtcaccctttcctactctctgcagacgccacggttgcggcgacaggccccagggcaagggctgccgcctgtggcgcctatccttaacgctcatcagccctctacacagcgcgccgaaattcacttcctaaagcaaggatgcggggaagataaaatttgccagagcaacctgcagctggtccgggcccgtttttgcacgagagtgagtgacacagaattccagcccctgcctatggatgtggatgggacgacagccctgttcgccttgagtggacagccggtgataggactggaactgatggtaaccaatctacccagcgaccccgcgcagccacaagcagacggggacgatgcccacgaagcccagttgttagtgatgttgcccgacagtctgcactattcaggcgtgcgcgcactggacccagctgaaaagcccttgtgcctgtcaaacgagaacgccagtcatgtggagtgcgaactgggtaatcctatgaagcgcggtgcacaggtcacgttctatctgatcctgtctacaagtggcatttccattgaaacgaccgagctcgaggtggagttattactcgccactatcagtgaacaagaactgcaccctgtctccgctcgcgcccgcgtcttcatagaactgcctctttccattgcgggcatggcaatcccacaacagcttttcttcagcggcgtcgtccgcggggagagggcaatgcagtctgagcgggacgtgggatcaaaggtcaaatacgaagtgacggtttcaaaccagggccagagcctgcgtacactagggtccgctttcctgaatattatgtggccacacgagattgctaatggaaaatggctcctgtaccccatgcaggtcgaactggagggcggacaagggcctggacagaaaggcctctgttcacctcggcccaatatactgcacctggacgtggatagtcgtgatagacgccgtagagagctagagccacccgagcagcaggaacccggagagcgtcaggaaccatccatgtcctggtggcctgtgtcttccgctgagaagaaaaagaatatcacattggattgtgccagaggaacagctaattgcgtggtgtttagctgcccactatattcttttgaccgagccgccgtgttgcatgtgtggggccgactgtggaattccacattcctagaggagtatagcgcagtgaaatctctggaggtgatcgtgagagcaaatatcacagtgaaatcgtccatcaagaacctgatgctgagagatgcttccacggttatacctgtgatggtgtatctggatccaatggcggtcgttgctgaaggagtgccttggtgggtgatcctcctagcagttttagctggcttgttagttttagccttacttgtactgttactgtggaaaatgggcttctttaaaagggccaaacaccccgaagccaccgtgcctcagtaccatgctgtcaagattccaagagaggatagacagcagttcaaggaggagaaaactggaaccattctgcgcaataactggggttccccaaggcgggagggacccgacgcccaccccatcctggcagccgacggccaccctgagctgggaccagatggccatccggggcctggcaccgcgtag

SEQ ID NO: 24569 - DNA, 3147 bp, synthetic construct
  misc_feature 1..3147: note = Description of Artificial Sequence: Synthetic coding sequence
  source 1..3147: mol_type = other DNA
atggccttccccccccggcggcggctgcggctgggcccccggggcctgcccctgctcctctctggcctattgctgcctctgtgccgcgcttttaacttggacgtggattctcctgcggagtactcaggccccgagggttcctacttcggtttcgccgtggatttctttgttccatctgccagcagcaggatgttcttactggtcggagcgccaaaggctaataccacccagccaggtattgtagagggcgggcaggtgctcaagtgtgattggtccagtacgcggcgttgccagccaattgagttcgacgctaccgggaaccgggattatgccaaggacgaccccctggaattcaaaagccaccaatggttcggggcttcagtgagaagcaagcaggacaaaattctggcttgcgccccgctctaccactggagaaccgagatgaaacaagagcgggagccggtggggacctgctttctgcaggatggaaccaagactgtggaatacgccccttgcaggtctcaggatattgacgccgatggtcagggcttctgccagggcgggtttagtatcgactttacgaaggccgatcgagtacttctgggcggccctggaagcttctactggcagggccagttaatatccgaccaggttgctgagatcgtgtccaagtatgatccaaacgtctattcaatcaaatacaacaaccagctagcaacccggacagcccaggctatctttgatgattcttacctcggctactccgttgctgttggcgactttaatggggacgggatcgacgacttcgtatcgggagtcccacgggccgcccgcactttgggtatggtgtacatatacgacggcaagaacatgagctcgctttacaacttcacaggagaacagatggctgcatactttggctttagtgtggctgccacagatattaatggcgacgactacgccgacgtttttataggagctccactcttcatggacagaggaagcgacggcaagctacaggaagtcggacaggtctctgtgagccttcagcgcgcgtccggcgacttccaaacaacaaagcttaacggtttcgaggtcttcgccaggttcggttctgcgattgctcccctgggagacttagatcaggacggctttaatgatatcgcaattgccgccccatatggaggagaggacaagaagggaattgtgtacatttttaatggccggagtacgggattgaacgccgttccaagccagattttggaaggtcagtgggccgcacgtagcatgccaccttcttttggatactccatgaagggcgccacagacatcgacaaaaacggttacccagatctcatcgtcggcgcctttggggttgacagagctatcctgtaccgagccagacccgtgattacggtcaacgccggtctggaagtttacccatcaatcctaaaccaagacaataaaacatgctctctcccgggaaccgccctgaaggtgtcctgcttcaacgtgagattttgtctgaaagccgatgggaagggagtcctcccaaggaagctaaattttcaggtggaactgctcctagacaagcttaagcaaaagggggccatccggcgcgcactctttctgtacagccgcagcccctctcatagcaagaatatgactatcagcaggggggggctaatgcagtgcgaggaactgattgcctatctgagggacgaatcagaattccgcgacaagcttacccctatcactatcttcatggaataccgactggattataggactgcggccgacaccacggggctgcagcctatcctgaaccaatttaccccagccaacatcagtagacaggctcatatcctgctagattgtggtgaggacaatgtctgtaagcctaagctggaggtgtccgtggactcggaccagaaaaaaatctacatcggcgacgataatcctctaacactgatcgtcaaagcccagaatcagggcgagggagcatatgaagctgaactaattgtgtccatccctcttcaggccgatttcattggggtcgtgcgaaataacgaggcgctagcgcggctttcctgcgccttcaaaacagaaaatcaaactcggcaagttgtctgcgacttgggaaacccaatgaaggcaggcactcagctgcttgccgggcttcggtttagtgttcaccagcagtccgagatggatacgagtgtgaaatttgacctgcagattcagtcctcaaatctatttgataaggtcagtcctgtggtctcccacaaggtggacctcgccgtcctggctgccgtggaaattcgcggagtctctagcccagaccatgtgttcctccctatccctaattgggaacacaaagaaaatcccgagaccgaggaggatgtgggccctgtggtacagcacatttatgaactgcgaaataacgggccatcctctttctccaaagctatgttgcaccttcagtggccttacaaatataataataatactcttctctatatactccactatgacatcgatgggccaatgaattgtacgtctgacatggagatcaatcctctccggattaaaatctccagcctccagactacagaaaaaaatgacaccgttgccgggcagggtgaaagagaccacctcattactaagcgcgacttagcactgagcgagggtgatatacacacactgggttgcggggttgctcaatgtttgaaaatcgtgtgccaggtgggacgcttagacagaggaaagtcggcaattctatatgtgaagtccctactgtggactgagacattcatgaataaagaaaaccagaaccactcgtacagtcttaaatcatctgccagcttcaacgtcatcgagttcccatacaaaaatcttcctattgaggatataactaactctactctggttacaaccaatgtgacctggggcatccaacccgctcccatgcccgtccctgtttgggtgattattctggccgttctggccgggctcttgctcctggctgtgctggtgtttgtgatgtataggatgggattcttcaagagggtccgcccgccccaggaagaacaggagcgcgaacaactccagccccacgagaacggggaaggtaactcagagacatag

SEQ ID NO: 24570 - DNA, 3039 bp, synthetic construct
  misc_feature 1..3039: note = Description of Artificial Sequence: Synthetic coding sequence
  source 1..3039: mol_type = other DNA
atggccttccccccccggcggcggctgcggctgggcccccggggccttcctttgttactctctggacttttgctacctctctgtagagcctttaatctggatgttgactcacccgctgagtactcgggccctgaaggatcatacttcgggtttgctgtcgatttcttcgtcccaagcgcctccagtcgaatgttcttattggttggggctcctaaagctaataccacacaaccaggaatcgtggaaggcgggcaggtgcttaagtgtgactggagcagtaccaggaggtgccagcctattgagttcgacgctaccgggaaccgcgactacgccaaggatgaccccctggagttcaaaagccaccaatggttcggcgcgtcagtgcgctctaagcaggataaaatcctggcttgtgctccgttatatcactggagaactgagatgaaacaggagagagaacccgttggcacctgcttcttgcaggacgggaccaaaacggttgaatacgcaccatgccgatcacgccaactgatctccgaccaggtagccgagattgtgagtaagtatgaccctaacgtatattctatcaagtacaataaccagttggcaactcgcaccgctcaagccattttcgacgactcatatctcggatatagtgtggctgtgggagattttaacggtgacggaatagatgactttgtgtcaggggtgccacgggccgccagaaccctggggatggtgtacatctatgacggtaagaacatgtcctctctgtacaattttacaggggagcagatggcagcatacttcggttttagcgtggccgccacagatataaatggggatgattacgctgatgtgtttattggtgcaccgttattcatggataggggcagcgatggcaagctgcaggaagtgggtcaggtcagcgttagcctgcaaagagccagtggagatttccagaccacaaaactgaacgggtttgaggtgtttgctcgttttggtagcgccatagcaccattgggggacctggaccaggatggctttaatgacatcgccattgccgccccctatggtggcgaggacaaaaagggcattgtgtacatttttaacggtcggtccaccgggctgaacgctgtgccctcccagatcctagagggacaatgggctgccaggtccatgcccccctcttttggttatagcatgaaaggggctacagatattgacaaaaacggctaccccgacctgatcgtcggtgctttcggggttgaccgcgcaattttgtaccgggcaagacccgtcataaccgttaatgccggcctcgaggtatatccctcgattctcaaccaggataacaaaacctgtagcctcccaggcacagccttaaaagtgtcgtgcttcaacgtgagattttgtctaaaggccgatggcaaaggcgtacttcctagaaaacttaactttcaggtggaattattgctcgacaagctaaagcaaaaaggcgccattaggcgcgcgctcttcctgtatagcagatctccttcccactctaagaatatgactatctctcgtggaggactcatgcaatgcgaggaactcatcgcctatcttagggatgaatcagagtttcgcgacaagttgaccccgataaccatctttatggagtaccggcttgactataggacagccgcagataccacgggtctgcaacccatcctcaatcagttcacgccggctaacatatcaagacaagctcatattcttcttgattgtggcgaggacaacgtgtgcaaaccgaaactagaggtctccgtcgatagcgaccagaagaagatatacataggtgatgataacccccttaccctgattgtgaaggctcaaaaccagggagagggggcttacgaagctgagctcatcgtgtccatcccactgcaagctgacttcatcggagtagtccgaaacaatgaagccttggctcggctgtcgtgtgcattcaaaactgagaatcagactagacaggttgtttgcgatttggggaaccctatgaaagcgggaacccagctgttggctgggttgcgatttagcgtgcaccagcagtccgagatggatacatctgttaaattcgatctgcagattcaatcctccaatttgttcgacaaggtttcgcctgtggtgtctcacaaggtggacctggccgtgctggctgccgtagagatccgcggcgtttcttcccccgatcacgtgttcttgccaatacccaactgggagcacaaagagaacccagaaacagaggaggatgtaggtcccgtggtccagcacatatacgaactgagaaataatgggccttcctctttcagtaaagcaatgctgcatctccagtggccttataaatacaacaataatacgctgctgtatattctccattatgacatcgacggacccatgaattgtacttctgacatggagatcaaccctttgaggattaagattagctcgcttcagaccaccgaaaaaaatgataccgtcgccggacagggcgaaagagatcaccttatcactaaacgggacctggccttgagcgagggggacatccataccctgggttgtggcgtggctcagtgcctgaagattgtgtgtcaagtggggagactcgacagaggtaaaagtgctatcctgtatgtgaagagcctactgtggacggagacctttatgaataaagagaaccagaaccacagctattcactcaagtcaagtgcaagcttcaacgtcatcgaatttccatataaaaatcttcctatcgaggatatcacaaacagcacactggtcacaaccaacgttacttgggggatccagcctgcgcctatgccagtgcccgtgtgggtgatcatactggcggtactggctggtctcctgctcctcgccgtgctggtgtttgtcatgtatagaatgggatttttcaaacgagtcagacctccccaagaagaacaggagcgcgagcaactgcagccacacgagaatggggaaggcaattcagagacctag

SEQ ID NO: 24571 - DNA, 3009 bp, synthetic construct
  misc_feature 1..3009: note = Description of Artificial Sequence: Synthetic coding sequence
  source 1..3009: mol_type = other DNA
atgctgctgggcaccctgctgctgatcctgtacatcctgatgctgtgcaggatgtttctgttagttggtgctccaaaagccaataccacccagccaggaattgttgagggcgggcaggtgctcaaatgtgattggtctagtacgcgcagatgtcaaccaattgagttcgatgccaccggaaatagggactacgcaaaggatgacccactggaatttaagagtcaccaatggttcggggccagcgtccggtcaaaacaggacaaaattctggcttgtgctcccctataccactggcggactgagatgaaacaggagagggaaccagtgggcacatgcttcctccaggatggaaccaagactgtggaatatgccccttgtcggagccaggacatcgacgcggacggacaaggcttctgccaggggggttttagcatcgacttcaccaaagccgaccgggttttgctcggcggtcccgggagcttctactggcaaggccaattaatttctgaccaggtagctgagattgtgagcaagtacgaccctaatgtctatagtatcaagtacaacaatcagctggcgacaagaacagcacaggccattttcgacgattcttatctgggctactcagtggccgttggagatttcaacggcgacgggattgacgatttcgtgtccggagtcccaagggcagcaagaactttgggcatggtatacatttacgacggaaagaacatgtcctctttgtataactttacaggtgagcaaatggctgcgtattttggatttagtgtagcagcaaccgacatcaatggagatgactatgcagacgtttttattggggcccccttatttatggatcgcggtagcgatggaaaacttcaggaggtcggccaagtctccgtctcactccagcgcgcgagcggggacttccagacaacgaagctgaatgggtttgaagtattcgcaagattcggatcagccatagcgccgttaggagacctcgatcaagatgggtttaacgacatcgctatcgccgctccatatggcggagaagataagaaagggattgtctatattttcaatgggaggtcaactggcttaaatgccgtgcctagtcagattcttgagggccagtgggcagcaaggagcatgcctccttcatttggctacagcatgaaaggcgcaacagacatcgataaaaacggctatcccgatctaatagtcggtgcatttggagtggatcgcgcaattctatatcgtgcaagacccgttattaccgtcaatgccggcctggaagtatatccatctattctaaatcaggacaataagacttgcagcttgcctggtaccgctcttaaagtgtcttgcttcaatgtgcgcttttgtctcaaagctgatggtaagggggtcctaccacggaagctcaacttccaggttgaattgttgctcgataagctgaaacagaagggcgctattcggcgagcgctgttcctctactcccgcagccccagccactcaaaaaatatgacaataagtcgcggtgggttaatgcagtgtgaggagttaattgcctaccttagagatgagtccgagtttagagataaactaacacctattacgatctttatggaatatagactggattatcgcacggccgccgatacaactggcctgcagccgatcctcaaccaattcacccctgccaacatcagcagacaggcccacatcctgctggattgtggtgaggataacgtctgcaagccgaaactcgaggtatctgtcgactctgatcagaaaaaaatttatatcggggatgacaacccactgactctgatcgttaaggcgcagaaccagggcgagggcgcctacgaggctgagctaatcgtaagtatacccctgcaggcggatttcattggagtagtgaggaacaatgaggcactggccagattatcttgcgctttcaagacagagaatcagacgaggcaggtcgtgtgtgaccttggaaaccctatgaaggcaggtacccaactgctcgcgggactgagattttcagtacatcagcagagcgaaatggatacctcagtgaagttcgatcttcaaatccaatcctcaaacttgtttgacaaagtttcccctgtggtgtcccataaggtggacttggcggtgctggccgccgtggaaatccggggcgtttcttcccccgaccacgtctttctgcctatccctaactgggagcataaagaaaaccccgaaaccgaggaggacgtcgggcctgtggtgcagcatatctacgaattacgcaacaacggcccatcgtcgttcagtaaggctatgctacacctccagtggccatacaaatacaacaacaatacactgctgtacatcctgcattatgacatcgacgggcccatgaactgtacctccgacatggagattaacccgctgcgtatcaaaatctcctctctgcaaaccacagagaagaatgacactgtggccgggcagggtgaaagggatcatctgatcactaagcgtgacctggccttgagtgaaggcgacatccataccctgggatgtggcgtcgcccagtgccttaagatcgtatgtcaggtgggtcggctcgaccgtggaaaaagtgcgatactgtacgtaaaaagcctcctgtggacagaaactttcatgaataaagagaaccagaaccattcctactccttgaaaagctcagcctctttcaatgtgatcgagttcccctacaagaacctcccgattgaggatattactaattcaactctggtgacgacaaatgtgacatggggcatacagccagccccaatgcccgtccctgtctgggtgatcattctggctgtgctggctgggcttctgctgttggcggtacttgtgtttgtcatgtataggatgggattctttaaaagagtacggcccccccaggaggaacaggagagggaacagttacagcctcatgagaacggtgagggcaatagtgagacttag

SEQ ID NO: 24572 - DNA, 1449 bp, synthetic construct
  misc_feature 1..1449: note = Description of Artificial Sequence: Synthetic coding sequence
  source 1..1449: mol_type = other DNA
atggccttccccccccggcggcggctgcggctgggcccccggggcctgccccttctcctgagcggcctcctgcttccactgtgtagagcttttaatttggacgtcgactctccggctgagtattcaggaccagaaggttcttacttcgggttcgcagtcgacttttttgtaccctcagctagttctaggatgtttcttctcgtcggcgcgccaaaggccaatacgacgcaacctggcatcgtggagggtggccaggtgctgaaatgcgattggagttccacacgacgatgccaacctattgaattcgacgcaactggtaaccgagattacgccaaggacgatcctttggagttcaagtcacaccagtggttcggagcctctgtgagaagtaaacaagataaaatcctcgcatgcgcgccgttatatcattggcggacagagatgaagcaagaaagagagcccgtcgggacttgcttccttcaggatgggaccaaaactgtcgagtacgccccttgccggtctcaggacatagatgctgacgggcaaggcttctgtcaaggtggctttagcatcgatttcaccaaggccgaccgcgtgctgctgggaggaccaggttcattctattggcagggacagttgatttcggaccaggtggctgagatcgtgagtaaatacgacccgaatgtgtattctattaaatacaataatcaactggccactagaaccgcccaggcaatcttcgatgattcgtacctaggttacagtgttgctgtgggcgacttcaatggagacggaatagacgactttgttagtggagtgccccgcgccgcccgcactttaggtatggtctacatttacgatggtaagaacatgagttccttgtataacttcacaggggaacaaatggcggcctattttggcttctctgtggcagctaccgatatcaatggtgacgactatgccgacgttttcattggggccccacttttcatggataggggctccgatggaaagcttcaggaagtgggtcaagtgtcggtatctctgcagagggcttccggggatttccaaaccacgaagcttaacggattcgaggtgtttgcccgttttggctccgctatcgcaccattgggggatttagaccaggacggattcaacgatatcgccatagccgcaccctacggcggtgaagataaaaagggcattgtttatatctttaacggccgctcaaccggattaaatgccgtgccttctcagatcctggagggacagtgggccgccagatctatgcctccttcgtttggctatagcatgaagggtgctaccgacatcgataagaacggctatcctgaccttattgtcggagcttttggagtggatcgagcaatactgtacagagcgcgacctgtgattccaatcttcgttcagttacatcacgtggtccactag

SEQ ID NO: 24573 - DNA, 2397 bp, synthetic construct
  misc_feature 1..2397: note = Description of Artificial Sequence: Synthetic coding sequence
  source 1..2397: mol_type = other DNA
atgaacctgcagcccatcttctggatcggcctgatcagcagcgtgtgttgtgtgttcgcacagaccgacgaaaatagatgtctgaaagcgaacgccaagtcatgtggagaatgtatacaagctggcccaaattgtggttggtgtaccaacagtactttcctgcaggaaggaatgccgactagcgcgcggtgcgatgatcttgaggctctcaaaaagaaggggtgtcctccagatgatatagagaatcctcgtggctctaaggatattaaaaagaataagaatgtcaccaaccgctccaaagggactgctgaaaaactgaaacctgaggatattacacagatccagcctcagcagttagttttgcggctcagatcgggggagcctcaaacttttacactgaagttcaagagggccgaagattaccccatcgacctctactatctaatggatctgtcctattctatgaaggacgaccttgaaaatgtgaagtccctcggtactgaccttatgaacgaaatgcgccgaatcacaagtgacttccgcatcgggttcggttcttttgtggagaaaacagtgatgccttacatctctaccacaccggccaagctccgcaacccatgcacatccgagcagaattgtaccagtccgttttcctacaagaatgttctgtcattgaccaataaaggcgaggtatttaacgagctggtgggcaaacagcgcatttctggcaacctcgactcccccgagggcggcttcgatgccatcatgcaggtggcggtgtgcggaagcctaatcggatggagaaacgtgaccaggcttttggtgttctccaccgacgccgggtttcatttcgcgggggatggaaaattgggaggaattgtgttacccaacgatgggcagtgccacttggagaataacatgtacaccatgagtcactactatgactacccttctattgcgcatctggtccagaaactgagcgagaataacatccagacaatctttgccgtaaccgaggagtttcagcctgtgtacaaggaacttaaaaatttgatacccaagtcagccgttgggactttgtcggctaacagctccaatgttatacagttgatcatcgatgcctataattctctgagctctgaggtgattctagaaaatgggaaactcagcgagggcgtgaccattagttacaaaagttattgcaaaaatggagtaaacggaactggcgagaatggtagaaagtgcagcaatatctctatcggcgatgaagtgcagttcgagatcagcattactagtaacaaatgtcccaaaaaagattctgattccttcaagattcgccccctgggcttcaccgaggaggtggaggttatccttcagtatatctgtgagtgcgagtgtcagagcgaaggaatacccgagagtcctaaatgccatgagggcaatggaacatttgagtgtggcgcatgccggtgcaatgaggggcgcgtcgggcgacattgtgagtgtagcacagatgaagttaattctgaggacatggatgcgtactgtaggaaagaaaattcttccgagatctgttcaaataatggcgagtgtgtttgtgggcagtgcgtgtgtagaaagagagataacacaaatgaaatctacagcggtaagttttgcgagtgtgataatttcaactgcgatcgctccaacggccttatctgcggcggaaatggggtatgtaaatgccgggtctgcgaatgcaacccaaactatactggtagcgcctgtgattgcagtctcgacacctccacctgcgaggcttcaaatggccaaatatgtaatggccgagggatttgcgagtgtggggtctgcaaatgtaccgaccctaaatttcaagggcagacctgtgagatgtgccaaacctgtttaggagtgtgtgccgaacacaaagagtgcgttcagtgccgcgcctttaacaagggtgagaagaaggatacgtgcacccaggaatgcagctatttcaacatcaccaaagtcgaatcgcgcgataagctgccccaaccagtgcaacccgatcccgttagccactgtaaggaaaaagatgtggatgactgttggttctacttcacatattccgtgaacggaaataatgaagttatggtgcacgtggtagaaaatcctgaatgtccaacgggacccgatatcattccgattgtcgctggagtggttgccggcatagtactcattggcctggccctgttgttgatctggaagctgttgatgattattcatgacagacgggagtttgcgaaattcgagaaagaaaaaatgaacgcaaagtgggatactggagagaatccaatttataaatcagcggtgacgactgtcgtcaatccaaaatacgaagggaagtag

SEQ ID NO: 24574 - DNA, 2478 bp, synthetic construct
  misc_feature 1..2478: note = Description of Artificial Sequence: Synthetic coding sequence
  source 1..2478: mol_type = other DNA
atgaacctgcagcccatcttctggatcggcctgatcagcagcgtgtgttgcgtatttgcacagacggacgagaatcgctgcctgaaagctaacgccaagtcctgcggggagtgtatacaggcaggcccgaactgcggatggtgtaccaattcgaccttcttacaggaaggcatgccaactagcgcccgctgcgacgatctcgaggctctgaagaagaaaggctgtccacccgatgacattgaaaacccaagggggagcaaggatataaaaaagaacaaaaatgtcacaaaccgatccaagggtaccgctgaaaaactcaagcccgaagatattacacagatccagcctcagcagttggtccttcgcttgagatcgggagagccgcagactttcacccttaaattcaaaagagctgaggattatcctattgacctgtattacctgatggatctgtcttatagcatgaaggacgatctggagaatgtcaagagtcttgggaccgaccttatgaatgagatgcggagaattacgagtgattttcgtatcgggttcggatcgtttgtggagaaaacagtgatgccttacatctccacaacccctgcaaaattgagaaacccatgtacctcggaacagaactgcactagccctttcagttacaagaacgtgctgagtctgactaataaaggcgaagtcttcaatgagctggttggtaagcagcgtatctcaggcaaccttgattcccccgagggaggctttgacgcaatcatgcaggtcgcagtctgtggctccctgatcgggtggagaaatgtgactcgcttgttggtattctccacagatgcgggattccatttcgctggcgacggaaagctcgggggtatcgtcctgcccaacgacgggcagtgccatctggagaacaacatgtatacaatgtcgcactactatgactacccttccattgctcatctggtgcaaaaacttagcgagaacaatatccagacaatattcgctgttaccgaagagtttcagcctgtatacaaggagttgaagaatctgatacccaagtccgcagtgggaacgttaagtgctaattccagcaacgttattcaactgataattgatgcatacaacagtttgagttctgaggttatactggaaaacgggaaactaagcgagggggtgacaatttcatacaaatcatattgcaagaatggtgttaatgggacaggcgaaaatggccggaaatgctccaatatttctattggggatgaggtccaattcgaaatctccatcaccagcaataagtgtccaaagaaagacagcgattcttttaagatccgccctttgggatttaccgaggaggtcgaggttatcctccagtacatttgtgagtgcgagtgtcaatcggaaggcatccctgagagcccgaagtgtcacgaggggaatggtacctttgagtgcggggcgtgccgatgcaacgaaggcagggttggtcgacattgcgaatgttctacagacgaggtgaattctgaggatatggatgcctattgcaggaaggagaacagtagcgaaatctgtagtaataacggcgaatgtgtgtgcggtcagtgcgtgtgtcgcaagcgcgacaatactaatgagatctattctggcaagttttgcgaatgtgacaacttcaattgtgacaggtcaaacggcctgatttgtggggggaacggagtctgtaagtgtagggtgtgcgagtgcaatcccaattatacaggctcagcctgcgactgctccctggatacctctacgtgcgaagcttccaatgggcagatctgcaacgggcggggtatttgcgagtgcggtgtctgcaaatgtactgatcctaagtttcagggccagacctgcgagatgtgtcagacctgtctgggagtgtgcgcagaacataaggagtgtgtccaatgcagggctttcaataagggggaaaaaaaagatacctgtacccaggagtgttcctattttaacatcactaaggtggagagtagggacaaacttccacagcctgtgcagcccgatccagtatcccattgtaaggagaaagacgtggatgattgctggttctatttcacctactctgtaaacgggaataacgaagttatggtgcacgtagtggagaaccccgagtgtccaactggccctgacataattccaattgtagctggggttgtggctggaatcgtattaatcgggttggcccttttgctaatctggaagctgttaatgattatccacgaccggagggagtttgcgaaattcgagaaggaaaaaatgaacgccaagtgggacacttcattatcagtggcgcagccaggggtccagtggtgtgacatcagctccttgcagccactcacttcccgattccaacaattctcttgcctgtctctgccgtccacttgggattatagagtgaagatactctttattagggtgccctag

SEQ ID NO: 24575 - DNA, 2397 bp, synthetic construct
  misc_feature 1..2397: note = Description of Artificial Sequence: Synthetic coding sequence
  source 1..2397: mol_type = other DNA
atgaacctgcagcccatcttctggatcggcctgatcagcagcgtgtgctgtgtgttcgcacagaccgacgaaaatcggtgtctcaaggccaacgcaaaaagctgcggtgagtgtatccaggcaggcccaaactgcgggtggtgtactaactccacctttttgcaggaggggatgccgacatctgctaggtgtgatgatcttgaagctctgaaaaaaaagggctgccccccggacgacatcgagaatccaaggggctctaaagacatcaagaagaataaaaacgtcaccaacagatcgaagggaacggccgagaagcttaaacctgaggatatcactcagatccaacctcagcagctcgttctccggctcaggtccggggagccccagacattcaccctcaaatttaagcgggccgaagactatcctattgacttatactatctgatggacctgagctacagtatgaaagatgatctggagaatgtcaaatctctggggaccgatcttatgaacgagatgcgaagaataacaagtgacttccgcatcggtttcggaagcttcgttgaaaagaccgtgatgccctatatcagtaccacacccgccaaactccggaacccttgcacatccgagcagaattgcacatcccctttttcttacaagaacgtgctctccctcactaacaaaggagaagtctttaacgagctagtggggaaacagaggatcagtggcaacttagattctcctgaggggggcttcgacgcaatcatgcaggtggcagtttgcggctcactcatagggtggcggaatgtcactcggttgctggtcttctctacggatgccggctttcattttgcgggcgatggaaagcttggcggtattgtgctgcctaatgacggtcagtgtcatctcgagaataatatgtacaccatgtcccactactatgattatccctcaattgcacatctggttcagaagcttagcgaaaataacatacagaccattttcgctgtaactgaggaatttcagcccgtctataaggagctgaagaacctgattcctaagtcagctgtggggacactgtccgccaacagctccaacgttatccagcttattattgacgcctacaatagtttatcaagcgaggtgattttagagaacggaaaactgtccgagggagtcaccatctcatacaagagctattgcaagaatggtgtcaatgggactggcgaaaatggacgaaaatgttctaacatttccattggggacgaagtgcaattcgagatcagcatcacctccaacaagtgcccaaagaaagactctgatagtttcaaaatccgccctcttggcttcactgaagaggtcgaggtcatattacagtatatctgcgagtgtgaatgtcagagtgaagggatccctgagagcccaaaatgtcatgaaggaaacggaactttcgagtgcggagcctgccggtgtaacgaaggccgggtcgggcgccactgcgagtgtagcactgatgaggtgaacagcgaagacatggatgcttactgtaggaaagagaactctagtgaaatctgctctaacaatggtgagtgcgtctgcggacagtgtgtatgtaggaagcgagacaacactaatgaaatttatagtggcaaattttgcgaatgtgacaatttcaattgcgatcgttctaatgggttgatctgtgggggtaatggcgtgtgcaagtgccgggtgtgcgaatgtaaccctaactatactggctcagcctgcgattgtagcctggatacttccacctgcgaggcctctaatggacagatttgcaatggccgcggaatctgtgaatgtggggtgtgcaagtgtactgacccgaaatttcagggccagacctgtgaaatgtgtcaaacttgtcttggagtgtgcgcggaacataaagagtgtgtccagtgcagggcttttaataaaggagagaaaaaagacacgtgcacccaagagtgttcttatttcaacataacaaaggtggagtctcgcgacaaacttccccaacccgtgcagccggacccagtttctcactgtaaggagaaagacgtagatgactgttggttttatttcacgtactcagtgaatggtaataatgaagtcatggtccacgtggtggagaatccagagtgtcccaccgggcctgatatcattcctatcgtggctggcgtggtcgctggtatcgtgttgatcggacttgctctgttactcatttggaaactgctcatgattatccacgacagaagagagttcgcaaagttcgagaaagagaaaatgaatgcaaaatgggatactggtgagaaccccatttataagagcgcagttacaaccgtggttaacccgaagtatgaggggaaatag

SEQ ID NO: 24576 - DNA, 150 bp, synthetic construct
  misc_feature 1..150: note = Description of Artificial Sequence: Synthetic coding sequence
  source 1..150: mol_type = other DNA
atgaacctgcagcccatcttctggatcggcctgatcagcagcgtgtgttgtgtgttcgctcagacagacgagaaccgatgtctgaaggccaatgcgaaatcctgcggtgagtgcattcaggctggccctaactgtgggtggtgtacatag

SEQ ID NO: 24577 - DNA, 270 bp, synthetic construct
  misc_feature 1..270: note = Description of Artificial Sequence: Synthetic coding sequence
  source 1..270: mol_type = other DNA
atgaacctgcagcccatcttctggatcggcctgatcagcagcgtgtgctgcgtgtttgcgcagactgatgaaaatcgatgccttaaagccaatgctaagtcctgcggagagtgcatacaggccggccccaactgcggatggtgcaccaactccacttttctccaggagggtatgcccaccagcgccaggtgcgacgatttagaggcactaaaaaaaaagggctgtccacctgatgatatagagaaccctagaggaagtaaggacatttag

SEQ ID NO: 24578 - DNA, 2406 bp, synthetic construct
  misc_feature 1..2406: note = Description of Artificial Sequence: Synthetic coding sequence
  source 1..2406: mol_type = other DNA
atgaacctgcagcccatcttctggatcggcctgatcagcagcgtgtgttgtgtcttcgctcaaacagacgagaatcgttgtcttaaggccaacgccaaaagctgcggtgagtgcattcaggcagggccgaactgcgggtggtgtaccaacagcactttcctccaggaagggatgccaacctcagctaggtgtgacgacttggaggctttaaagaagaaggggtgcccaccagacgacatagagaacccaagaggtagtaaggacatcaagaagaacaagaacgttacaaaccggtctaagggtactgccgaaaaactgaagccagaggatattactcagattcaaccgcaacaactggtcctaagactgaggtcaggagagcctcaaaccttcaccctgaagtttaagcgcgcagaagactatcctattgatctgtactatctgatggacctatcctattcaatgaaggacgacttagaaaacgtcaaatccttaggcacagacctaatgaacgagatgcgaaggatcacatctgactttagaatcggctttggctcctttgtggaaaaaaccgtaatgccttatatttccactacccctgctaaactccgtaatccctgtacctctgaacaaaactgcactagtcctttcagctacaagaatgtcctgtctctaaccaacaagggggaagtctttaatgagctcgtcgggaagcagcggatatctggcaacctggactcacctgagggaggattcgatgcgattatgcaggtggccgtgtgcgggtcactcatcggttggcgaaatgtaaccagactgttagtgttttcgactgacgcgggcttccacttcgctggagatggaaagctcggcgggattgtgctcccaaatgatggccaatgccacctagagaacaatatgtatacgatgagtcattactacgattatccttcaatcgctcatctcgttcagaagttgtcagagaataatattcagacaatctttgcagtgaccgaagagtttcagcctgtgtacaaggagctcaagaatctgatccccaaatccgcggtgggcacgttgtctgctaactcttccaatgtgatacagctgatcatcgatgcctacaacagcctgtcatccgaggtaattttggagaatggaaagctaagcgagggggtcaccatttcatataagagctactgtaagaacggagtaaacggaaccggagagaacgggagaaaatgctccaatattagcatcggagacgaggtgcagttcgaaatctcaattacgagcaataaatgtcccaagaaagattctgattccttcaagatccgacctttagggtttaccgaggaggttgaagtgattctccagtacatctgcgagtgcgagtgtcagtcagagggaatcccagagtctccaaagtgccatgaggggaacgggacatttgaatgcggcgcttgccggtgcaatgaaggaagggtcggacgccactgtgaatgctcaacagacgaggttaatagtgaagacatggatgcttactgccggaaagagaatagcagcgagatctgttccaacaacggagagtgcgtttgcggccagtgtgtttgtcgcaagcgggataacaccaacgaaatctattccggtaaattctgtgaatgtgacaatttcaattgtgaccggtccaatggcctgatttgcggaggcaatggcgtctgtaagtgccgtgtgtgcgagtgtaatcctaattataccggcagcgcatgcgactgtagcctggacacttctacctgcgaagcatctaatggccaaatatgtaacggacgaggcatctgcgaatgtggagtgtgtaagtgcacagatcccaagttccagggccaaacctgcgagatgtgccagacctgcttaggcgtctgtgccgagcacaaggagtgtgtgcaatgtagggctttcaacaagggagagaagaaagatacctgcacacaagaatgttcttatttcaatatcacaaaggtggagtcaagggacaagcttccacagccggtacaacctgaccccgtgtcacactgcaaagagaaggacgtcgatgactgctggttctatttcacttattctgtcaacggtaacaatgaagttatggtacacgtagtcgaaaaccctgagtgcccaaccgggcctgatattataccaatcgttgcaggtgtcgtggcagggatagtactaatcggactcgctttactgctgatttggaagctcctcatgatcattcacgataggagagagtttgccaaattcgagaaggagaagatgaatgccaaatgggatactcaggaaaacccaatatataaatcacctatcaacaattttaagaaccccaactatgggcggaaggcagggctgtag

SEQ ID NO: 24579 - DNA, 411 bp, synthetic construct
  misc_feature 1..411: note = Description of Artificial Sequence: Synthetic coding sequence
  source 1..411: mol_type = other DNA
atgaacctgcagcccatcttctggatcggcctgatcagcagcgtgtgctgtgtgttcgctcagactgacgagaacagatgtctgaaggccaacgccaagtcttgcggcgagtgtattcaggccggtcctaactgtgggtggtgcacgaacagcacctttcttcaagaaggaatgcctacaagcgcccgctgcgatgatctcgaagccttgaagaaaaagggatgtccacccgacgatatcgaaaacccaagagggtctaaggatatcaaaaagaacaaaaacgtgacgaacaggagcaaaggtacagcagaaaagcttaagcccgaagacatcacccagattcaaccccagcagctggtcctacggctacgttctggtgaaccacagactttcaccctgaaattcaagtag

SEQ ID NO: 24580 - DNA, 378 bp, synthetic construct
  misc_feature 1..378: note = Description of Artificial Sequence: Synthetic coding sequence
  source 1..378: mol_type = other DNA
atgaacctgcagcccatcttctggatcggcctgatcagcagcgtgtgttgcgtgtttgcccagaccgacgaaaatcggtgtctgaaagccaatgcaaaatcatgtggcgaatgcatccaggccggccctaattgtgggtggtgcacgaattctacctttctacaagaagggatgcctacctcagctagatgtgacgacctggaagccctaaaaaaaaagggctgcccccctgacgatatagaaaatcctaggggttctaaggatatcaagaaaaacaagaatgtgactaacagatccaaaggaactgccgaaaaactgaagcccgaggatattactcagattcaacctcagcagctggttctccgcctgaggtcttag

SEQ ID NO: 24581 - DNA, 492 bp, synthetic construct
  misc_feature 1..492: note = Description of Artificial Sequence: Synthetic coding sequence
  source 1..492: mol_type = other DNA
atgaacctgcagcccatcttctggatcggcctgatcagcagcgtgtgttgcgtgttcgcacaaactgatgagaatcggtgtctaaaagcaaacgccaaatcctgtggggagtgcatacaagcagggcccaattgtggttggtgcacaaatagcacattcctgcaagaggggatgcctacctcagcccgctgtgacgacctggaagcgctgaaaaagaagggttgccctccggatgacatcgaaaatccaagggggagcaaagatataaaaaaaaacaaaaatgtgaccaatcgcagtaaggggacggctgagaagctgaagcctgaagatatcacgcagattcagccgcaacaattagttctgcgattgcggtctggtgagcctcagaccttcactcttaagttcaaaagagctgaggattatccgattgacctctattatctgatggacctttcatactctatgaaggatgatctcgagaatgtgaaatag

SEQ ID NO: 24582 - DNA, 459 bp, synthetic construct
  misc_feature 1..459: note = Description of Artificial Sequence: Synthetic coding sequence
  source 1..459: mol_type = other DNA
atgaacctgcagcccatcttctggatcggcctgatcagcagcgtgtgttgcgtctttgctcagacggacgaaaaccgatgcctaaaggcgaatgccaagagctgtggcgagtgcatccaggctggacccaactgcgggtggtgcactaacagtgtaagcaaaacctttctgcaagaggggatgcccacatctgctcggtgtgacgatctggaggctttaaagaaaaagggctgtccccctgatgacattgagaaccctagaggctccaaagacataaagaagaacaagaacgttaccaacagaagtaagggcaccgctgaaaaactgaagccagaggacattactcagatccagccgcagcagctcgtcctgcgactcaggagcggagaaccccagacattcacgcttaaattcaaaagagccgaagactacccaatcgatttgtactatctgatgtag

SEQ ID NO: 24583 - DNA, 315 bp, synthetic construct
  misc_feature 1..315: note = Description of Artificial Sequence: Synthetic coding sequence
  source 1..315: mol_type = other DNA
atgaacctgcagcccatcttctggatcggcctgatcagcagcgtgtgttgcgtattcgcacaaactgacgagaaccgctgcctcaaggcaaatgccaagagttgcggtgaatgtattcaagccggccctaattgcggctggtgcacaaacagtacttttcttcaagagggaatgcccacgagtgcacgctgcgacgatctggaagctctcaagaagaaaggatgcccgcccgacgacatcgagaatcctcggggctccaaggatatcaagaagaataagaacgttactaatcgtagcaagggaacagccgagtag

SEQ ID NO: 24584 - DNA, 432 bp, synthetic construct
  misc_feature 1..432: note = Description of Artificial Sequence: Synthetic coding sequence
  source 1..432: mol_type = other DNA
atgaacctgcagcccatcttctggatcggcctgatcagcagcgtgtgctgtgtgttcgcgcagaccgacgagaaccgatgccttaaggccaatgcaaaatcctgcggggagtgcatccaagcaggacctaactgtggatggtgtaccaactctaccttccttcaagaggggatgcccactagtgcccggtgtgacgatctggaggcactcaagaagaaagggtgcccccccgatgatattgagaatcctcgcggttcaaaagacataaagaagaacaagaatgtgactaatagatccaaaggcacggccgaaaagctgaaaccggaagatatcacccagatccagcctcaacaacttgtcctgagactgagatcgggcgaaccgcagacgttcaccctgaagtttaagagggcagaggattacccaatctag

SEQ ID NO: 24585 - DNA, 2310 bp, synthetic construct
  misc_feature 1..2310: note = Description of Artificial Sequence: Synthetic coding sequence
  source 1..2310: mol_type = other DNA
atgctgggcctgcggccccccctgctggccctggtgggcctgctgtccctgggctgcgtgctgagtcaggaatgcacaaagtttaaggtttctagttgtagggagtgtatcgaaagcggcccgggctgtacctggtgccagaagttaaatttcaccgggccaggcgatccagactcaatccgctgcgacactcgtccccaattactaatgcgcggatgtgcagccgacgacatcatggacccaacgagcctggcagagacacaggaagatcataatggtggtcaaaaacagctgtccccccagaaggtcacactttatcttcgtcccgggcaggctgccgccttcaacgttactttccgaagggccaaaggctaccccatcgatctgtattatttgatggacctgtcgtacagcatgcttgatgacctacggaacgttaaaaagctcggcggggacctgctcagagccctgaacgagatcacagagtctggcaggatcggcttcggctcatttgttgacaagacggtcctccccttcgtgaatacccatccagataaacttcgcaatccgtgccctaacaaggaaaaggaatgtcagcccccattcgctttccgccacgtcctgaagctgacaaacaatagcaatcagttccaaacagaagtgggcaaacagctaatttctggtaacctggacgcccctgaaggtggcctggacgcaatgatgcaggtcgcggcctgtcctgaagagattggttggcgtaatgtcacacggctacttgtctttgcaactgacgatggctttcactttgctggagatggcaagctgggcgcaatattgaccccaaatgatgggcgctgtcatttagaagacaatctgtacaaacggtccaacgaattcgactatccaagtgtggggcaactcgcccacaagctcgccgaaaacaatatacagcccattttcgctgtcacgtccagaatggtgaagacatacgaaaaactgactgaaattattcccaagtccgccgtcggcgagctttcagaagattcttctaatgtggtgcaactcatcaaaaatgcctacaataaattgagctcccgggtattcctcgaccacaatgccttgcctgatactctcaaagtgacgtacgactccttttgttccaacggagtcacacatcgtaatcagcctaggggcgactgtgacggcgtgcagattaatgtacctattacgtttcaggtgaaagtcaccgctaccgagtgcatccaagaacagagtttcgtcatccgcgccttaggatttactgacatagtgaccgtccaggtccttccccagtgtgagtgccggtgtcgcgaccagtcaagagatagatcactgtgtcacggcaagggctttctggagtgtggaatctgccgctgcgatactggatacatcggtaagaactgtgaatgccagacccaggggcggtcaagccaagagttagaggggtcatgcagaaaggacaacaactccattatctgcagcggcctgggcgactgcgtttgcggccagtgtctttgtcatacatctgacgtgccaggcaaattaatatatgggcagtattgtgagtgtgacactatcaactgtgagcggtataacggacaggtttgtgggggtccaggccgcgggttatgcttctgtggcaagtgcagatgtcacccaggtttcgaaggctctgcctgtcagtgtgagagaaccaccgagggatgtctcaatccccgacgtgtggagtgctcaggcaggggacggtgccgctgtaatgtttgtgaatgccattcaggataccagttacctctgtgccaggagtgtccgggttgcccttccccctgtgggaagtacatcagctgcgccgagtgcctaaagttcgaaaaaggaccattcggaaagaactgttctgcagcgtgtcccggactgcagctgagcaataatccagtcaaaggtagaacatgcaaagagcgcgacagcgagggttgctgggtagcatatactcttgagcaacaggacggaatggacagatatttgatctatgtggatgaaagtagagagtgtgtagcaggacctaacatcgcagcgatcgtcggaggcacagtggctggtattgtcttgatcggcatcctattacttgtcatctggaaagctttgattcacctgtccgatctacgggagtataggcgcttcgagaaagaaaaactcaagagccaatggaacaacgataaccccctgtttaaatccgcgactaccaccgtgatgaatccgaagttcgccgaaagttag

SEQ ID NO: 24586 - DNA, 969 bp, synthetic construct
  misc_feature 1..969: note = Description of Artificial Sequence: Synthetic coding sequence
  source 1..969: mol_type = other DNA
ggccggctgggcaaggacctggccaccggcgtgctgagccaggagtgcactaaattcaaagtgtctagctgtagagagtgcatcgagtctggtccggggtgtacatggtgtcagaaactgaatttcactgggcccggggacccagattctatacgctgcgataccaggcctcagcttctcatgcggggatgtgccgctgacgatataatggatcccacaagccttgcggagacgcaggaagaccataatggcggtcagaagcaactgtctccacagaaagtaactctgtaccttcgaccaggtcaggctgctgcgttcaacgtaacgttcagaagagccaagggctacccaatagatttgtactacctaatggacctgtcgtacagcatgttagatgatctgcggaacgtgaagaaattaggtggtgacttactccgggctctaaacgagataactgagtccggcaggattggctttggtagttttgttgataagactgtgctaccatttgtcaatacccaccccgataaattaagaaatccctgccccaataaagagaaggaatgccagcccccatttgcctttcgccacgtgcttaaactgacaaacaactctaaccaatttcaaaccgaggtcggcaagcagctgatcagtggaaatctggacgcaccggaaggcgggcttgacgcaatgatgcaggtggctgcatgtcccgaggagataggttggaggaatgtaactaggctgttggtcttcgctaccgatgatggattccacttcgccggagatggcaagctaggagccattcttaccccaaatgatgggcgatgtcatctggaggataacctttataagcggtccaacgagtttgattatcccagtgtgggccagttagcccacaagctggctgagaataacatccaaccaatctttgccgtaaccagtcgaatggtgaagacatatgagtag

SEQ ID NO: 24587 - DNA, 2310 bp, synthetic construct
  misc_feature 1..2310: note = Description of Artificial Sequence: Synthetic coding sequence
  source 1..2310: mol_type = other DNA
atgctgggcctgcggccccccctgctggccctggtgggcctgctgtcactagggtgcgtgctttcccaagagtgtaccaagttcaaagtgagtagctgtcgggagtgcatcgaatctggtccaggatgtacctggtgccagaagctcaatttcaccggcccgggagaccccgactccatccgctgcgacacccggccccagctgttgatgcggggttgcgcagcagacgacattatggacccgacttccctggctgagactcaggaggatcacaatggcggccaaaagcagctgagcccacagaaggtcaccctgtacctgaggcccgggcaggctgccgcgtttaatgtgacgttcagaagagctaagggctaccctatcgacctctattaccttatggacctgagctactctatgttggacgatctgaggaacgttaaaaagctgggaggggatttgctgagggctctgaacgagataaccgagtctgggcgcatcggctttggaagctttgttgacaagaccgtactaccctttgtgaatacacatccggataagctgcggaacccttgccccaacaaggagaaggaatgtcaacctccattcgcattccggcacgtcctgaaattgacgaataactccaaccagtttcagacggaggtgggcaaacaacttatctccggaaatctggatgcgccagaaggtggccttgacgccatgatgcaggtggctgcctgccctgaggaaatcggatggagaaacgttactagactcctggtatttgccacagacgacgggtttcattttgccggcgacggcaaattgggggcaattctgacgccaaatgatggccggtgtcatctggaagacaatctgtacaaacggtcaaacgagtttgattatccaagcgttggccagttggcccacaagctggccgaaaacaacatccagccaattttcgccgtgacttcacgcatggtgaagacgtatgaaaagctgaccgaaatcatccctaagagtgccgttggcgaactgtccgaagacagttcgaatgttgtacagctcatcaaaaatgcctacaataaactgtccagtagagtgttcctcgaccataacgccttaccggacacgcttaaggtcacttacgacagtttttgcagcaatggggtcacccacaggaatcagccgcggggagactgcgacggcgtccagatcaacgtccccatcacatttcaggtgaaagtgacagccaccgaatgtattcaggagcagtcatttgtaattagggccttggggttcaccgatatagtgactgtgcaagtgttacctcagtgtgaatgcagatgtagggatcagtcccgggacaggtcgctgtgtcacggcaaaggatttttggaatgtgggatctgtcgctgcgacaccggctatatcggcaaaaattgtgagtgtcaaactcagggtcgctcttcccaagagcttgaaggatcatgccgcaaagacaataatagcatcatctgtagcggtttgggtgactgcgtctgcggccagtgtctgtgtcatacttcagacgtgccgggtaagttgatttatgggcaatactgcgagtgcgatacaattaactgtgaacgatacaacggccaagtatgcggaggacccggacgggggttgtgtttttgcgggaagtgtcggtgccaccctggattcgaagggtccgcctgccaatgtgagcgcacgacagagggctgcctcaacccccgcagagtggaatgtagcggccggggcagatgccggtgtaatgtgtgtgaatgccacagtggctaccagctccctctgtgtcaagagtgccctggctgcccttcgccatgcggaaaatatatttcctgtgcagagtgtctgaaattcgagaagggaccatttggtaagaactgtagcgctgcctgccccggactgcagttgagcaataaccctgtgaagggacggacatgtaaggagagagattcagaagggtgttgggttgcctacaccctggagcagcaggatgggatggaccgctacctgatatatgtggatgagtctagagagtgcgtcgctggccccaacatagccgcaatcgtgggggggaccgtggctggcatagtgttaattggaattctgctgctcgtcatttggaaagctctgatacacttgagtgatttaagagagtataggcggtttgaaaaagagaaactcaagtcccagtggaataatgacaatcccctcttcaaatcagccacgactaccgtgatgaacccaaagttcgccgagagctag

SEQ ID NO: 24588 - DNA, 2310 bp, synthetic construct
  misc_feature 1..2310: note = Description of Artificial Sequence: Synthetic coding sequence
  source 1..2310: mol_type = other DNA
atgctgggcctgcggccccccctgctggccctggtgggcctgctgtccctcgggtgcgtgctcagtcaagagtgcacaaaatttaaggtaagttcttgtcgagagtgcatcgagtcagggcccggctgcacatggtgccagaaattaaatttcactggcccaggtgacccggacagtatccgatgtgacacccgtccccaattattgatgcgaggatgtgctgctgacgacattatggatcctacttctttagctgagacccaggaggatcataacggcgggcagaaacagctgagcccccaaaaggtgacgctatatctgagaccagggcaggccgctgcgttcaatgtgacttttagaagagcgaagggatatcctattgacctgtactaccttatggacttatcctactccatgctggacgacctgaggaacgtgaaaaagttggggggcgacttgctcagggcgctgaatgagatcactgagagcggacgaatcggttttggctccttcgtggataagactgtgctgccgtttgttaatacccatccagacaagctgcggaacccatgtcccaataaggaaaaagaatgtcagcctcctttcgccttcaggcacgtactgaagctgaccaacaattctaatcagtttcaaaccgaagtaggaaaacagcttatttcagggaacctggacgcccctgagggtggattggacgctatgatgcaggtggcagcatgtcctgaggaaatcggctggcggaacgtgacccgccttctggtatttgcaacggatgatgggtttcacttcgcaggcgatgggaaattgggcgccattttaacacctaatgacggccgctgtcacctggaggacaatctatacaaacggagcaacgagttcgattacccttcagtcggccagttggcacacaaactggctgagaacaatattcagccaatcttcgctgtgacatctagaatggtcaaaacctatgagaaattgaccgaaatcattcctaagagtgccgtgggagaattgtcagaagactcaagcaatgtggttcaattaatcaaaaatgcttataacaaactctcttcaagagtttttcttgatcataatgcactgccagacaccttgaaagtgacatatgattctttctgttccaatggagtgactcatcgcaaccagccccgtggtgattgtgatggagtgcaaataaatgtaccaataacctttcaggttaaggtcacagcaacggagtgtattcaagagcagagctttgtcatccgagcactgggttttacagatatcgtgaccgtccaggtgctgcctcagtgcgagtgcagatgtagggaccagagtcgcgatcgcagcctctgtcacgggaagggctttctggaatgtggcatctgtcggtgcgacacaggctacataggcaagaactgtgagtgccagactcaaggtcggtccagccaagaattggaaggctcttgtcggaaggacaacaactctattatttgcagcgggctgggcgactgcgtttgtgggcagtgcctttgccacacatccgacgtgccgggtaaacttatttatgggcagtattgcgagtgcgacaccatcaattgcgaaaggtacaacggtcaagtttgcggagggcctggtagagggctttgtttctgcggcaagtgccggtgtcacccagggtttgaaggatctgcgtgtcagtgtgagagaacaaccgaagggtgcctgaatccacgccgggtcgagtgcagcggtagggggagatgccggtgtaacgtgtgcgaatgccattcaggctaccagcttcccctctgccaggagtgccccggctgtccttctccttgtggcaaatacatcagctgtgccgaatgcctaaagttcgagaagggcccgtttggaaagaattgcagcgccgcctgtcctggccttcagctgtccaacaaccctgtcaaaggccgtacatgcaaagagcgcgactcagaagggtgctgggtcgcctacactcttgaacaacaggatggcatggaccgctacctgatctacgtagacgaatcccgggagtgtgtcgcaggccccaatattgcagcaatcgttggcgggacagtggcaggcatcgtgctgattgggatcctcctgttggtaatttggaaggcgctgattcatttatctgacctgagggagtaccgccggttcgagaaggagaaattaaaaagccagtggaacaacgataaccctcttttcaaaagcgcaacaacaacagtgatgaaccctaaattcgcggagtcgtag

SEQ ID NO: 24589 - DNA, 2310 bp, synthetic construct
  misc_feature 1..2310: note = Description of Artificial Sequence: Synthetic coding sequence
  source 1..2310: mol_type = other DNA
atgctgggcctgcggccccccctgctggccctggtgggcctgctgtcacttggctgcgtcctgagccaggaatgtaccaaattcaaagtgagttcttgtagggagtgcatagaatcaggacctggctgcacctggtgccaaaagctaaatttcaccggccccggcgacccagactcaatacgttgtgacacccgtccacagcttcttatgcggggatgcgcagctgacgacattatggaccctacatctctggctgagacacaagaggatcacaatggagggcagaagcagctgtctcctcagaaagtgacgctgtacctaagacctggacaagcggccgctttcaacgtgactttccgccgggctaagggttatccaatcgacttgtattatctaatggatttgtcttactccatgctcgatgatcttcggaacgtgaaaaagttagggggggatctgcttcgggctctgaatgagattacagaaagcgggcgtatcggcttcggcagcttcgtcgataaaacagtcctgccttttgtcaacacccatcccgacaagctccggaacccttgccctaacaaggagaaggagtgccagccaccatttgctttccggcacgtgctgaagctcacaaacaactcaaaccaattccagactgaagttggcaagcagctcatcagtggcaacctcgatgcacctgaaggcggcttggacgccatgatgcaggtggctgcatgtccagaggaaattggctggaggaacgtgaccaggctgctagttttcgctacggacgatggatttcactttgccggggacggtaagttgggggccattctcactcctaacgacgggcgctgtcatctggaggacaacctatataaacgctcaaatgaattcgattacccaagcgtcggacagttggctcataagctggctgagaacaacatacaaccaattttcgcagtcacaagtcgcatggtgaagacctacgagaaactaacagaaatcatcccaaagagtgccgtgggcgagttgagcgaagactccagcaacgtggtccagctcattaagaatgcatacaacaaactgagttcaagagttttcctcgaccacaatgccctcccagataccctgaaagtaacatacgacagtttttgcagcaatggcgtgacccaccggaatcagccccgcggagactgtgacggtgtccagatcaacgtgcccataacctttcaggtcaaggtaacagcaacagagtgtatccaggagcaatctttcgtgattcgcgccctgggtttcactgatattgttacagtccaggtgctgccacagtgcgaatgcaggtgccgcgaccaatcacgagaccgttccttgtgtcacggcaagggcttcctggagtgcggaatttgtcgatgtgacactggatatataggcaagaactgtgagtgtcaaacacagggccgctctagtcaggaactcgagggctcttgtcgaaaggataacaactccataatctgcagcggactgggagactgcgtctgtggacagtgtctatgtcacactagcgatgttccagggaagctgatttacgggcagtattgtgaatgcgataccatcaactgtgagcggtataacggacaggtctgcggggggccaggacgaggattgtgcttttgcgggaagtgccgttgtcacccaggatttgagggctctgcttgtcaatgtgagagaaccacggagggctgcctaaaccctcgaagggttgaatgctctgggagaggcaggtgtcggtgcaatgtatgcgagtgtcactcaggttaccagttgcccctttgtcaggaatgcccaggctgtcctagcccttgcggaaagtacatatcctgcgccgaatgtctgaagtttgaaaaggggccatttgggaaaaattgctcagccgcgtgcccagggctgcagctgtctaataatcctgtcaaggggcgcacatgcaaggagagggactcggagggatgttgggttgcatataccctggaacagcaggacggcatggacagatatttgatttacgtcgatgagagtagagaatgcgtggctggccccaatatagctgctatcgttggcggcacagtcgctggcattgtattaataggtatattgctccttgtgatttggaaagcccttatccacttatcagatctgcgggagtatcgccgcttcgaaaaggaaaagctgaagtcacaatggaataatgacaaccctctgttcaaatcggccactacaactgtaatgaatcccaagttcgctgagagttag

SEQ ID NO: 24590 - DNA, 2310 bp, synthetic construct
  misc_feature 1..2310: note = Description of Artificial Sequence: Synthetic coding sequence
  source 1..2310: mol_type = other DNA
atgctgggcctgcggccccccctgctggccctggtgggcctgctgtctctcggatgcgtgctctctcaagagtgcactaaattcaaagtctcgtcttgtagggagtgcattgaaagcggtcccgggtgtacctggtgccagaagctaaactttactgggcccggcgaccctgatagtattcggtgtgatacacgtccacaacttctgatgcgcggctgcgccgccgatgatatcatggatccgacttctctcgccgagactcaggaggatcacaacggcggacagaaacaactgagtcctcagaaggtcactctttatctgcgccccggccaagcggcagcatttaacgtcacatttcggagggcaaaagggtatcccattgacctgtactatttgatggatctttcgtatagtatgcttgatgacctcaggaatgtcaagaaactgggcggagacctgcttcgagctctgaacgagatcaccgagtccgggagaattggtttcgggagctttgttgataagaccgttcttcctttcgtgaatactcacccagataagctgagaaacccttgccccaacaaggagaaggagtgtcaaccccctttcgcatttcgacatgttctgaagttgactaataatagtaaccaattccaaaccgaagtaggcaagcagctaatttcaggcaatctcgatgctcccgagggaggcctggatgccatgatgcaggtggctgcctgtcccgaggaaatcggatggaggaatgtcactagacttctcgtttttgccacagatgatggatttcattttgcgggcgacggcaagcttggagctatcctgaccccgaacgatggccgatgccatctggaggataacctctataaacggtccaacgagtttgattacccttctgtcggccagcttgcacataaattagctgaaaataacatacaacccatctttgccgtgacatctagaatggtgaaaacctacgaaaagctcaccgaaatcattccaaagagcgcagtgggggaactatctgaggattcctcaaacgttgtgcaactgattaaaaatgcatacaacaagctttcaagccgcgtttttctggaccacaacgcccttccagacactctcaaggtcacttacgattcgttctgttccaacggagtgacccaccggaaccaaccacgaggcgactgcgatggcgtacagatcaatgtgcctattacctttcaagtgaaggtcacagcgaccgagtgtatacaagagcaaagtttcgtgatccgcgcccttggctttacggacattgtgacagtccaggttctacctcagtgcgaatgtcggtgtcgtgaccagagtagagacaggtctctctgtcatggtaaagggtttcttgagtgtgggatttgtcgctgtgacacaggttacatcggaaagaattgtgaatgtcaaactcagggaagatcttctcaagagctcgagggaagttgccgcaaggacaataattcaataatatgcagtggtcttggagactgtgtatgcggccaatgtttgtgccatacgtcggatgtacccggcaagctgatttacggccagtactgcgaatgtgacaccatcaattgtgaacggtataacggtcaagtgtgcggaggccctggtcgcggcctgtgtttctgtgggaagtgtagatgccaccctggctttgaggggtcagcttgccagtgcgaacgcactacagagggctgtctcaacccacgtagagtggaatgctcaggccgtggccggtgtaggtgcaatgtgtgcgaatgccacagcggataccagttacccctgtgccaggagtgtcctggctgtccgtcaccatgtggcaagtacatcagttgcgcggagtgcctgaagtttgagaagggccctttcggtaagaactgcagcgccgcttgtcctgggcttcaactgagtaacaatcctgtgaagggccggacctgtaaagaacgggacagtgaaggttgttgggtggcatacactctcgagcaacaagatggaatggacagatacttgatctacgtggatgagagcagagaatgcgtcgcaggacccaatattgcggctattgttggtggcactgtcgccggaatcgtactgatcgggattctcctgcttgtgatttggaaagcactgatccacctctcagacctgagggaataccggcgatttgagaaggagaagctgaaaagccagtggaataatgacaatcccttgttcaagtctgccaccaccaccgtgatgaatcctaaattcgccgagtcctag

SEQ ID NO: 24591 - DNA, 363 bp, synthetic construct
  misc_feature 1..363: note = Description of Artificial Sequence: Synthetic coding sequence
  source 1..363: mol_type = other DNA
atgctgggcctgcggccccccctgctggccctggtgggcctgctgagcttgggttgtgttctgtctcaggagtgtacaaagttcaaagtatcttcttgcagagaatgcatcgagtcagggcccggctgcacctggtgtcagaaattaaattttaccggaccaggtgacccagacagcatcaggtgcgacacccggccccagctcctgatgcgtggttgtgcagctgacgacataatggatcccacctcattggcagaaactcaggaggaccacaatggagggcagaaacagctttcccctcaaaaagtgacactctatttacggccaggacaagccgcagcctttaatgttacattcagatag

SEQ ID NO: 24592 - DNA, 213 bp, synthetic construct
  misc_feature 1..213: note = Description of Artificial Sequence: Synthetic coding sequence
  source 1..213: mol_type = other DNA
atgctgggcctgcggccccccctgctggccctggtgggcctgctgtcattaggctgcgtgttgagtcaggagtgcaccaaatttaaggtctcctcatgcagggagtgtattgaatctggcccgggttgtacctggtgccagaagcttaatttcaccggacctggagatcccgatagcatccggtgtgacacaaggccacaattgcttatgtag

SEQ ID NO: 24593 - DNA, 150 bp, synthetic construct
  misc_feature 1..150: note = Description of Artificial Sequence: Synthetic coding sequence
  source 1..150: mol_type = other DNA
atgctgggcctgcggccccccctgctggccctggtgggcctgctgagtctagggtgcgtgctgtcccaagagtgcaccaagttcaaggtaagtagctgccgcgaatgtatagagtctggcccaggatgtacatggtgtcagaagctgtag

SEQ ID NO: 24594 - DNA, 483 bp, synthetic construct
  misc_feature 1..483: note = Description of Artificial Sequence: Synthetic coding sequence
  source 1..483: mol_type = other DNA
atgctgggcctgcggccccccctgctggccctggtgggcctgctgtcattgggctgcgttctgtctcaggaatgtacgaagtttaaggtgagcagctgccgcgaatgcatagaatcagggcccggctgtacatggtgtcaaaagctcaacttcacagggcccggagatcccgactcaatcaggtgtgacacacgtccccagctgctgatgcggggatgcgccgccgacgacatcatggatcccacctcccttgccgagacccaggaagatcataacgggggccaaaagcagctctctcctcagaaggtcactctttatctcagacccgggcaagcagcagcatttaatgttactttcaggagggcaaaaggataccctatagacctgtactatctgatggacctgtcttactcgatgctagacgacctccggaacgtgaagaagctggggggagatttgttgcgagccctaaatgaaatctag

SEQ ID NO: 24595 - DNA, 501 bp, synthetic construct
  misc_feature 1..501: note = Description of Artificial Sequence: Synthetic coding sequence
  source 1..501: mol_type = other DNA
atgctgggcctgcggccccccctgctggccctggtgggcctgctgtcacttggttgtgtactctctcaagagtgcaccaaattcaaggtctcttcgtgtcgagaatgcatcgagtctgggcccgggtgcacctggtgccagaaattaaacttcaccggccccggtgatcctgacagcatccgttgcgatacacgaccccagctcctgatgcgcggttgtgccgctgacgatattatggacccaacctctctcgcagagactcaagaggatcacaatgggggccagaagcagctgagccctcagaaggtgaccctgtatctgcgtcccggtcaggcggccgccttcaacgtgacttttcggcgggctaagggttatccaattgatttgtactacctgatggacctttcctactccatgctggatgaccttcgaaatgttaagaagctcggaggtgacctactacgagccctgaacgagataactgagtctggacgcatttag

SEQ ID NO: 24596 - DNA, 1137 bp, synthetic construct
  misc_feature 1..1137: note = Description of Artificial Sequence: Synthetic coding sequence
  source 1..1137: mol_type = other DNA
atgctgggcctgcggccccccctgctggccctggtgggcctgctgtcactgggctgcgtgttatcccaggaatgtacaaaatttaaagtgagctcatgtcgcgaatgtatcgaatccggaccaggatgcacttggtgtcaaaagctcaacttcaccggcccaggggaccccgactctatccgttgcgatactcgtcctcagttactcatgcggggatgcgcggccgacgatattatggatccaaccagcctcgccgaaacgcaggaggatcacaacggcggccagaaacagctttcaccacagaaagtcacactatacctcagacccgggtttggcagcttcgtggacaaaactgtgctgccctttgtaaatacacatccggataagcttagaaacccctgcccgaacaaggagaaagagtgtcaaccaccctttgctttcagacacgtcctgaagctgaccaataactcaaaccagtttcaaaccgaggtgggaaaacagttgatttcgggcaacctggacgcccctgagggtggattagacgccatgatgcaggtggcagcctgccctgaggagattgggtggaggaacgtgactcggcttctcgtgtttgctacagatgatggattccactttgccggcgacggtaaattaggagccatattgaccccaaacgacggacgttgccatctggaggacaatctgtacaagagaagcaatgagttcgactatcctagcgtgggacagttagcccacaagctggccgagaataacatccagccaattttcgctgtgacctctaggatggttaagacctatgaaaaactaacggagatcatacccaaatccgcggtgggcgagctctccgaggatagttcgaacgtcgtgcagctgattaagaatgcctacaacaagctaagtagccgagttttcctggaccacaacgccttacctgacaccctaaaagtaacctacgattccttctgttccaacggcgttacacaccggaatcagcctcgtggagactgcgatggcgtccagataaacgtgcccatcacttttcaggtaaaagtcactgcaacagagtgtatccaggagcaatcgttcgtgataggaaggtgggcctcccgaacttag

SEQ ID NO: 24597 - DNA, 2367 bp, synthetic construct
  misc_feature 1..2367: note = Description of Artificial Sequence: Synthetic coding sequence
  source 1..2367: mol_type = other DNA
atgcgggcccggccccggccccggcccctgtgggccaccgtgctggccctcggcgcattggctggcgtgggcgtgggcggcccaaatatttgtaccacacgcggggttagttcatgccagcagtgtctcgcggttagtcctatgtgcgcttggtgcagcgacgaagctttgccattgggatcccctcggtgcgacctgaaggagaacttattgaaggataattgcgcccccgagtccattgaattccccgtgtctgaggcgagagtccttgaagatcggcctctctccgataagggctccggggattcctcccaagtcacgcaggtttcgcctcagcgcatcgctctcaggctaagacctgacgacagtaaaaacttcagtattcaggtgagacaggtggaggattaccctgttgacatctattacctcatggatctgagctattccatgaaggacgatctttggagcatccagaatctcggcaccaaactggcaacccagatgcgtaagctcactagtaatctgaggattgggtttggcgcattcgtggacaaaccggtgtcaccatacatgtacataagcccccctgaagccctggaaaatccgtgttacgacatgaagacaacctgtctgcctatgttcggttataagcacgtcctgaccctgactgatcaagttacaaggtttaatgaggaagtcaaaaaacaaagcgtttcaaggaaccgtgacgccccagagggtggctttgatgctattatgcaggctaccgtctgtgacgagaagatcgggtggagaaacgatgcgtctcacttgctggttttcactaccgacgcaaagactcacattgcgctggacggtcggctggccgggatcgtgcagcccaacgatggtcagtgccatgtcggttcagataaccactactctgcatcaaccacaatggactatccttccctgggattaatgaccgagaaactgtctcagaaaaatattaatctgattttcgcagtgactgagaatgttgttaacctataccagaattattctgagctgataccaggtacgacggttggtgttctgagcatggattcaagcaacgtcttgcagctaatcgtggatgcttatggtaagattaggtctaaggtggaacttgaggttagagacctaccagaagagctgtcactgtcatttaacgcgacctgcctgaacaatgaggtcattccaggtctcaaatcttgtatggggctgaaaattggagacaccgtgagtttcagcatcgaggccaaagtgcgggggtgcccgcaggagaaggaaaagtcttttaccatcaaacctgtcgggttcaaagattcacttatcgtccaagtgacttttgactgcgattgtgcgtgccaagcccaggccgagccaaatagtcatcgctgtaataacggcaacggcacgtttgagtgcggcgtctgcagatgcggtcctggatggctggggagccagtgcgaatgttcagaggaggactaccgaccgtcacagcaggacgaatgctctccgcgtgaaggacagcctgtgtgtagccagagaggagagtgtttatgtgggcaatgcgtctgccacagctctgacttcggaaagataaccgggaaatattgtgagtgcgatgatttctcgtgcgtgcgatacaaaggcgaaatgtgttcagggcatgggcagtgctcctgcggtgactgcctctgcgattcagattggactggctactattgcaattgtaccaccaggacagatacttgtatgtcaagcaacggtttgttgtgcagcgggagagggaagtgcgaatgcggctcttgcgtgtgtatccagcctggcagttacggcgacacttgcgagaagtgtcctacatgtccagacgcatgcactttcaaaaaggagtgcgtggagtgtaagaaatttgataggggggctctacatgatgaaaacacatgcaatcggtattgccgggatgaaatagagagcgtgaaggaattgaaagatacgggtaaagatgcagtgaactgcacttataagaacgaggacgactgcgttgttcggttccagtattacgaagatagtagcggaaaatccattttatacgtggtggaggagcccgaatgtcctaaagggccggacatacttgtcgttttactgtccgttatgggggctattttgcttatcgggctggctgcgctgctcatttggaaactactcataactattcatgatagaaaagaattcgccaaattcgaggaagaaagagcacgagctaaatgggatactgccaataacccattgtacaaggaggctacttcaacgtttaccaacattacttatagggggacttag

SEQ ID NO: 24598 - DNA, 2256 bp, synthetic construct
  misc_feature 1..2256: note = Description of Artificial Sequence: Synthetic coding sequence
  source 1..2256: mol_type = other DNA
atgtgcgcctggtgcagcgacgaggccctgcccctgggcagccccagatgcgacctgaaagaaaatttactcaaggacaactgtgccccagagagtatcgagtttcctgtctcggaagcccgagtcctggaggacagacctctgagtgataagggcagcggtgacagttctcaagttacccaggtgagccctcaacggatcgcgcttagacttcgtcccgacgattctaagaactttagcattcaggtacggcaggtcgaggattatccagtcgacatatactatctgatggaccttagttattctatgaaggacgacctctggtctatacaaaacttaggtacgaagctggccacacagatgcggaagctgacatcaaacctgaggatcggcttcggggcatttgtggacaagcctgtttccccctatatgtacattagccctcccgaggctctagagaatccctgttacgacatgaagactacatgcctgccgatgtttggttacaaacacgtgctgactctgactgaccaggtcactcgctttaatgaagaggtgaagaagcagagcgtgagccgtaatcgagatgctccagaagggggtttcgacgctatcatgcaagccacagtttgtgatgagaagattggatggaggaatgacgcaagtcatctgctcgtatttaccacagacgctaagacccatatcgctctggacggacgcctagccgggatcgtgcagcccaatgacggtcaatgccacgtcggatcagacaaccactactctgcctccaccacgatggattatccatctctgggactcatgaccgagaagctgtcacaaaagaatattaacttgatcttcgcggtgacagaaaatgtcgtaaatctctatcagaattattctgagctcatcccaggcactactgtcggcgttctttcgatggatagcagcaacgtactgcagcttatcgtcgatgcttacgggaagatccggagcaaagtcgaactggaagttcgtgatctccccgaggaattgagcctcagtttcaacgctacctgcctgaataacgaggttattccaggcctcaagtcctgtatggggctgaaaattggagacacagtgtcattttctattgaggcaaaggtgcgaggatgtccacaagagaaggaaaaatcatttactatcaaacctgtgggattcaaggattcactgatcgtgcaagtgactttcgactgtgactgcgcctgtcaagctcaggcggaacctaatagccaccggtgcaataatggtaacgggacatttgaatgcggtgtctgtcgctgcgggccggggtggttagggtcccagtgcgagtgctctgaagaggactatagaccttctcagcaggacgaatgctctcctagagaaggccagccggtgtgcagtcagcggggtgagtgtctctgcggacagtgcgtctgtcacagttcggacttcggcaaaattacggggaagtactgcgagtgtgacgatttttcctgtgtacgatacaagggcgagatgtgcagcgggcatgggcagtgcagctgtggagattgtctttgcgattctgattggactggatattattgtaactgtaccacaaggacagatacctgtatgtcaagcaatggtctgctctgctctggcagagggaaatgcgagtgtgggtcttgcgtgtgcatccagcccggatcttacggcgacacctgtgagaaatgtcctacatgtcccgacgcttgcactttcaaaaaggaatgtgtcgagtgtaagaagttcgaccgtggtgctctacatgacgagaacacttgcaacaggtactgccgggatgagatcgaatccgtcaaggaactgaaggacacaggaaaggatgcagttaattgtacctacaaaaatgaggatgattgtgtggtgcggttccaatattatgaggactcttcgggtaagtctattttgtacgttgtagaagagccagagtgcccgaagggccccgacatcctcgtggtcctgctgagtgtgatgggcgccatcctcctcattggtttagccgcactactgatctggaaacttcttataacgatccatgacaggaaggaattcgcaaaattcgaggaagagagggccagggccaagtgggacacagagatcttgctgtactattgctcattcatcctggtgcaccagtctctggagtctctgaggaccgagttcaccagcaaacagaaggatggaaattag

SEQ ID NO: 24599 - DNA, 2367 bp, synthetic construct
  misc_feature 1..2367: note = Description of Artificial Sequence: Synthetic coding sequence
  source 1..2367: mol_type = other DNA
atgcgggcccggccccggccccggcccctgtgggccaccgtgctggccttgggggcacttgctggcgtgggtgtgggagggccgaacatttgtacaacaagaggagtgtcatcctgtcagcagtgtctcgcagtgagtcccatgtgcgcgtggtgttccgacgaggccctcccactgggaagccccagatgtgacctgaaagagaaccttttaaaagataattgcgctccggagtccatcgagttccccgtctccgaagcaagggtcctagaagaccggccgctgagcgacaaaggttcaggagactcttcccaggtaactcaagtctcaccacaaagaattgctttaagactaagacccgatgattccaaaaacttttcgatccaggttagacaagtcgaagattaccctgtagacatctattacctaatggacttaagctatagtatgaaagacgacctctggtctatacagaacctgggaaccaaactcgctacccagatgcgaaaactcacgtctaatctgagaatcgggttcggtgccttcgtagataagccggtttccccatacatgtacattagccccccagaagctctggaaaacccttgctatgatatgaaaaccacttgtcttcccatgttcggttacaaacacgtcctaacactcacagaccaggtaaccaggtttaatgaggaagtgaagaaacagtccgtttcgcgcaacagggacgcgcccgagggaggttttgatgctattatgcaagcaaccgtgtgcgatgaaaaaatcggatggcgcaatgatgcttctcacctgcttgtcttcacaacggacgctaaaacccatatcgcgttggacggcaggttggcaggcattgttcagcctaacgacggacaatgccatgtgggttcagataaccactattctgcctcgactaccatggactaccctagccttgggttaatgacggagaagctctctcagaaaaatataaatctgatcttcgcagtcaccgagaatgtggttaatctctatcagaactattccgaacttatacctggcacgacggttggagtcctgagcatggactctagcaatgttctgcagctgattgtcgatgcctacgggaagattcgaagtaaagtcgaattagaggtccgcgatctgcctgaggaactgagcttaagctttaacgctacttgtcttaacaacgaagtgattccggggttgaagtcctgtatggggctcaaaatcggcgacaccgtgtcattttccattgaagcgaaagtaagaggctgtccacaggaaaaagagaagtcttttaccataaagcctgttggctttaaagactccctgatcgtccaggtaacttttgattgcgactgcgcatgtcaggcacaggccgagcctaattctcaccggtgtaataacggaaatggcaccttcgaatgtggtgtttgccgttgtggcccagggtggctaggctcacagtgtgagtgttccgaggaggattaccggcctagccaacaggacgagtgctctccaagggaggggcagcccgtgtgttcgcagcgcggagagtgtctgtgcggacagtgtgtctgccatagtagtgattttggtaaaatcaccgggaagtattgcgaatgtgacgacttttcttgtgtgcggtacaaaggtgaaatgtgttccggtcatgggcagtgttcctgcggggactgtctgtgcgacagcgactggaccggatattactgcaattgtacaaccaggacggatacctgcatgtcctcaaacggcctgctgtgttcgggacggggtaagtgtgagtgtgggtcctgtgtttgcatccagcctggaagctacggggacacttgtgaaaagtgccccacatgtcctgacgcctgcacttttaagaaagaatgtgtcgagtgtaaaaagtttgataggggagctctgcatgacgaaaatacgtgtaatcggtactgtcgcgacgaaatcgagtcagttaaagagctgaaggatactggaaaagacgccgtgaactgcacgtacaagaacgaggatgactgtgtggtacgttttcaatattatgaggatagttcaggtaagagcatcctgtatgttgtggaggagcctgagtgcccaaaggggccagatattctagtcgtcttactctcggtcatgggcgccattcttctaatcgggctggcggccctgctcatttggaaactcctcataaccatacacgaccgtaaggagtttgctaaattcgaggaagaacgggctcgagctaaatgggataccgccaacaatccgctgtacaaagaggcaacaagtacatttaccaatatcacctacagggggacttag

SEQ ID NO: 24600 - DNA, 1359 bp, synthetic construct
  misc_feature 1..1359: note = Description of Artificial Sequence: Synthetic coding sequence
  source 1..1359: mol_type = other DNA
atggacgacatcttcacccagtgccgggagggcaacgccgtggccgtgaggctgtggctggacaatacggaaaatgacctgaatcagggcgacgaccatgggttttcgcctctgcattgggcctgcagggagggaagatccgccgtcgtagaaatgttaattatgaggggcgcaagaataaacgtgatgaatcgcggagatgatactccactgcacctcgcagcttcacacggtcacagggacattgtgcagaaacttctccaatacaaggcagatatcaacgcagtgaacgaacatggaaacgtcccactacactatgcctgcttctggggtcaagatcaggtggctgaggacttagtggcaaacggggctctagtgagcatctgcaacaagtacggagagatgcctgtggataaggccaaggctccgctgcgcgagctcctcagggaacgagcagagaagatgggtcagaacttgaaccgaatcccctataaggatacattttggaaaggaacaactcgaacccgacctaggaatgggaccttgaataagcactcaggaatcgatttcaaacagctgaacttcttaaccaaattaaatgaaaatcattcgggggagctttggaagggacggtggcagggcaacgacatagtggtgaaggtgttgaaagttcgggattggtccaccaggaagtcccgggactttaacgaagagtgccccagactccgaattttcagtcacccaaacgtgctgcccgtcctgggggcctgccagagcccacccgcccctcaccccaccctaataacccattggatgccctatggctccttgtacaacgttctgcacgaagggaccaatttcgtggttgatcaaagccaggccgtaaaatttgcactggatatggccagaggtatggcatttctccacactcttgagccactaatacctcgccatgcgcttaacagtagatcagtgatgattgacgaggatatgaccgcacggatttccatggctgacgtgaaattctcattccagtgccccggacggatgtatgcccctgcatgggtcgcccctgaggcgctgcagaagaaaccagaagataccaacaggcgttcggccgatatgtggagcttcgcggtcctgctttgggagctcgtcacgagagaggtcccgtttgcagacttatccaatatggaaataggcatgaaggtggcactggagggtttaagacctactatcccgcctggcatcagtcctcatgtatgcaagctgatgaagatctgcatgaacgaagacccagcaaaacgtcccaagtttgatatgattgtgcccatcctggagaagatgcaagataaatag

SEQ ID NO: 24601 - DNA, 1359 bp, synthetic construct
  misc_feature 1..1359: note = Description of Artificial Sequence: Synthetic coding sequence
  source 1..1359: mol_type = other DNA
atggacgacatcttcacccagtgccgggagggcaacgccgtggccgtgcgcctttggctcgacaacaccgaaaatgacctcaaccagggcgatgatcatggattcagcccgttacactgggcatgtagggagggccgtagtgctgttgttgagatgctcatcatgcggggcgcaaggatcaatgtgatgaacagaggtgacgatacgcctcttcaccttgccgcttcccatgggcatcgagatatcgtgcagaaactgctccaatacaaggcagacatcaacgcagtgaacgaacatggcaatgtgcctctgcattacgcgtgtttctgggggcaggatcaggtcgctgaggacctggtggcaaatggggccctagtctcgatttgcaataagtacggcgaaatgcctgtcgataaggctaaggctccactgcgggagctgctccgtgaacgtgccgaaaagatgggccagaaccttaacagaattccatacaaagacactttctggaaagggacaacccggaccagaccacggaacgggaccttgaacaaacattcggggatcgactttaaacagcttaattttttgacaaaactcaacgaaaaccattcaggtgagctctggaagggtagatggcagggtaatgatatcgtcgtcaaagtgctgaaggtccgcgactggtctaccagaaaaagtcgggattttaatgaagagtgcccaaggttacgcatattctctcatcctaacgtgttacccgtcctgggggcctgtcagtccccacccgccccccatccaacccttatcacccactggatgccttatggatctctgtacaacgtgctgcacgagggcaccaattttgtggtcgatcaaagccaggcagtgaagtttgccctggacatggccagaggcatggccttccttcataccctggagccactcatcccgcgtcacgccctgaattcgcggtccgtgatgattgacgaggatatgaccgctaggatctctatggctgacgtcaagttttcctttcaatgccctggaaggatgtacgcaccggcctgggtagcacctgaagctctccagaaaaagcctgaagatactaacaggcgctccgctgatatgtggtcttttgctgttctgctctgggaactggtcacgcgtgaagtgccattcgcggatctgagcaacatggagattggcatgaaggtggccctagaagggcttagacccacaatcccaccaggcatctccccccatgtctgtaaactaatgaaaatctgtatgaacgaggacccagctaaacggcccaagttcgatatgattgtcccaattctggaaaaaatgcaggacaagtag

SEQ ID NO: 24602 - DNA, 1359 bp, synthetic construct
  misc_feature 1..1359: note = Description of Artificial Sequence: Synthetic coding sequence
  source 1..1359: mol_type = other DNA
atggacgacatcttcacccagtgccgggagggcaacgccgtggccgtcagactctggctggataacacggagaatgatttaaaccaaggagatgaccatgggttcagtcctctgcactgggcatgtagagaaggacggtcagccgtagtggagatgctgataatgcggggggcacggatcaacgtaatgaatagaggagacgacacccccctgcatttggccgcctctcacggacaccgagatattgtccagaagcttctgcagtacaaggccgatatcaatgccgtgaatgagcacggcaatgtcccgctgcattatgcttgcttctggggtcaggaccaggtggccgaagatctagtagcaaacggggccttggtatctatctgtaacaagtatggagagatgcccgtggacaaggcaaaagcacccctcagggaactactgcgggaacgcgctgagaaaatggggcagaatcttaatcgcattccctataaagacaccttctggaaaggtacaacccgcacacgccctcgcaatggcactttgaataagcactcgggcattgattttaaacagctgaacttcctaaccaagctgaacgaaaatcacagcggtgagctgtggaagggtcgttggcagggcaacgacatcgtggtgaaggtgctaaaggtgagagattggtctactcgaaagagccgcgattttaacgaagagtgtccacgattgagaattttcagccatccaaatgtcctccctgtacttggcgcttgtcagtcccccccagccccgcatccgactctgatcacacattggatgccttacggttcactgtacaatgttctgcatgaaggtacaaattttgtggtcgaccagtctcaggcagtgaaattcgccctggacatggccagaggaatggcgttcctgcacacccttgaacctctgattcctagacacgccctgaacagcagatccgtcatgatcgacgaagacatgacagcccgcatttcaatggccgacgtaaagttttcttttcagtgcccaggccgaatgtatgcacccgcctgggtggctcccgaggccctgcagaagaaacctgaggatacgaatcgcagatctgccgatatgtggagctttgccgttctcctgtgggagttagtaaccagagaggtgccatttgctgacctctcaaacatggagatcggcatgaaagtggctctggagggtttgaggcccaccataccgcccggaatttctccccacgtctgtaagctgatgaagatttgcatgaatgaggaccccgccaagagaccaaagtttgatatgattgtccccattctggagaagatgcaggacaagtag

SEQ ID NO: 24603 - DNA, 957 bp, synthetic construct
  misc_feature 1..957: note = Description of Artificial Sequence: Synthetic coding sequence
  source 1..957: mol_type = other DNA
atgcccgtggacaaggccaaggcccccctgcgggagctgctgcgggagagagccgagaagatgggtcagaacctgaacagaattccatataaggacaccttctggaagggaacaactagaacgcgccctcggaatggtactctgaataaacactcaggcatcgattttaagcagttgaatttcctgactaagcttaacgaaaaccacagcggagagttatggaagggaaggtggcagggaaatgacattgtcgttaaagtgctcaaagtccgagactggtcaaccagaaagagtagagacttcaatgaagagtgccctcgcctccggatcttcagccaccccaatgtgctccccgtgttaggggcctgccagtccccgcccgctccccatcctacactgattacccactggatgccttacgggtctctgtataacgtcctgcacgagggaactaatttcgtggtcgaccagtcacaggctgtcaagtttgcattggatatggcgcggggcatggcatttctccacacactggagccactaatccctcgccacgcactcaactcgcggagcgtcatgatagacgaggacatgactgcaagaattagtatggccgacgtcaagttttcctttcagtgcccaggcagaatgtacgcaccggcctgggtggccccggaggccctgcagaaaaagcccgaagatactaatcgccgatcagccgacatgtggagcttcgcagttttactttgggaactcgtgactcgcgaagtgccgttcgcggacctgagtaatatggagattggaatgaaggtcgctctggagggcctgcggccaaccattccgcccggcatttcaccgcacgtatgcaagctcatgaagatatgtatgaatgaagaccctgctaagagacctaaatttgatatgatagtgccaattcttgaaaaaatgcaggacaaatag

SEQ ID NO: 24604 - DNA, 978 bp, synthetic construct
  misc_feature 1..978: note = Description of Artificial Sequence: Synthetic coding sequence
  source 1..978: mol_type = other DNA
atgcccatcacccggatgcggatgcggccctggctggagatgcagattaattccaatcaaatcccaggtctgatttggattaacaaagaggaaatgattttccaaatcccatggaaacatgcagcaaagcacggttgggacatcaataaagacgcgtgtctatttcgaagttgggccatacacaccggacggtataaagctggcgaaaaggagccagaccccaaaacttggaaagccaacttcaggtgtgctatgaactcacttcccgacattgaggaggtaaaggatcaaagccggaacaaagggtcatcagccgtgagagtctaccggatgctacctcctctcaccaaaaatcaacgtaaggagcgaaagtctaagtccagccgagacgccaagagcaaggccaaacgcaaaagttgtggagattcctccccagacacatttagtgacggtttaagttccagcaccttgcctgatgaccactcaagttataccgtcccaggctatatgcaggatctcgaagtggagcaggccctcacccccgcactcagcccctgtgctgtttcttccacactgcccgattggcacatcccagtagaggttgtgccggattccacctcagatctgtacaatttccaggttagtcccatgccctccacctcagaagcgacgactgatgaagacgaggagggcaagttacctgaagatataatgaagttactcgaacagtcagagtggcagccaacgaacgtagatgggaaaggatacctgctgaacgagcccggggttcagcccacttctgtgtatggagatttttcctgtaaggaggaaccggagattgatagccctggaggcgatattggcctgtccctccagagggtatttacagacctgaagaacatggatgccacctggctggatagtctgctgaccccagtacggctgccatccatccaggcaataccttgcgctccgtag

SEQ ID NO: 24605 - DNA, 978 bp, synthetic construct
  misc_feature 1..978: note = Description of Artificial Sequence: Synthetic coding sequence
  source 1..978: mol_type = other DNA
atgcccatcacccggatgcggatgcggccctggctggagatgcagatcaacagtaaccagattcccggtctcatctggatcaataaagaagagatgatattccagatcccttggaaacacgctgcaaaacacggctgggacatcaataaggacgcatgtctctttagatcctgggccatccacacgggccgttacaaggccggagaaaaggagccagaccccaagacttggaaggctaatttccgctgtgcaatgaactctctgccagatatcgaggaagtaaaggaccagagcagaaataagggcagctccgctgtgagggtgtacagaatgctgccgccattgaccaaaaaccagcgtaaagaacgaaagtcaaagagttcacgggatgccaagagtaaggctaaacgcaagtcttgtggtgacagttccccggacacattctcggacggactaagcagttcaacactccccgacgaccacagtagttacacggttcctggctatatgcaggatctggaagttgagcaggcgctcaccccagccctgagtccgtgcgctgtgagcagtactctccccgactggcatatacccgtcgaggtggtgcccgattccacatccgacctgtacaacttccaagtatctccgatgccaagtacttctgaagcaactacggacgaggatgaagaaggaaagttgccggaagatattatgaagctgctggagcagagcgagtggcagcctactaatgtggacgggaagggctacctcttgaacgaacctggagtgcaaccaacctccgtgtatggtgatttttcttgtaaggaagagccagaaattgactctcccggaggcgacatcggcctttctctgcagagagtcttcaccgatctgaagaatatggatgccacttggctggacagcctgctcaccccagtgagacttcctagcatccaggccataccctgcgccccttag

SEQ ID NO: 24606 - DNA, 579 bp, synthetic construct
  misc_feature 1..579: note = Description of Artificial Sequence: Synthetic coding sequence
  source 1..579: mol_type = other DNA
atgcccatcacccggatgcggatgcggccctggctggagatgcagataaactctaaccagatacccggactgatatggattaataaagaggagatgatcttccagataccttggaagcatgcagccaagcatggatgggatataaataaggatgcgtgccttttcagatcgtgggctatacataccggtagatacaaagcgggcgaaaaggagcctgacccgaagacttggaaagccaattttcggtgcgccatgaattctctgcccgatattgaagaggtgaaagatcagagtcggaataagggctcttccgctgtcagggtctataggatgcttccaccactaaccaaaaatcaacggaaggagagaaagtccaagtcctcacgcgacgctaaaagcaaggccaaacgcaagagctgtggcgactctagtccagacacattttcagatgggttaagttccagtacactgcccgacgaccatagcagctacacagtccccggatacatgcaggatctcgaagtcgagcaggcattgacacctgcactgagcccgtgtgctgtgagctcaactctctag

SEQ ID NO: 24607 - DNA, 1356 bp, synthetic construct
  misc_feature 1..1356: note = Description of Artificial Sequence: Synthetic coding sequence
  source 1..1356: mol_type = other DNA
atgaacctggagggcggcggccggggcggcgagttcggcatgagcgcagtctcttgcgggaacggaaagctccggcagtggctgattgatcagatcgactctggcaagtatcctggactggtgtgggagaatgaggagaagagcatttttcgaatcccatggaaacacgccgggaagcaagactacaacagagaggaagacgccgctctttttaaagcgtgggccctcttcaagggcaagtttcgagaggggatcgataagccggacccacccacctggaagacccgtctgagatgcgctctaaacaagtccaacgattttgaagagctggtggagcgatctcagctggacattagcgatccctacaaggtgtatcgaatagtgcctgagggggccaaaaagggcgccaagcagctgacattagaggacccacaaatgtcaatgagccacccttatacaatgacaacaccctacccctccttgcctgcccagcaagtccacaactatatgatgcccccactggataggagttggcgggattacgtgccagatcaaccacacccagaaatcccataccagtgccctatgacctttggcccacgaggccaccactggcaaggacctgcttgtgagaatgggtgccaagtgacaggaaccttttacgcttgcgcgccaccggagagccaggcccccggggtgccgaccgagcctagcatccgctcagccgaggcgctcgccttctcagattgcaggttacacatttgcctgtattatagagagatcctcgtgaaggagctgacaaccagctccccagagggatgtcgaatttcacacggacacacgtatgatgcttcaaacctggaccaggtgttattcccctatccagaggataacggccaaaggaaaaatatcgagaagctgctatcacacctggaaaggggagttgttctgtggatggccccagacgggctgtacgcaaaacggctctgtcagagtagaatctactgggatggaccattagctctgtgcaatgatcgccctaataaactggagcgcgatcagacatgtaaactgtttgatacacagcagtttctgtcagaactccaggcttttgcccaccatggccggtccctgccacgatttcaagtgaccttgtgcttcggggaggagtttcccgatccccagagacaacggaaactgatcacagcgcacgttgagcctctgttggccaggcagctttattactttgctcaacagaatagtggccattttcttagaggttacgatcttcccgaacatatctccaatcctgaggactaccaccgaagcattcggcacagctcaattcaggagtag

SEQ ID NO: 24608 - DNA, 1443 bp, synthetic construct
  misc_feature 1..1443: note = Description of Artificial Sequence: Synthetic coding sequence
  source 1..1443: mol_type = other DNA
ctgggccccaccgccgccctgagcagcgagagccgggcccgggccgctcaggctggcggaggcccaagggcgcgagccaggacacgggggatgaaccttgagggcggggggcgtgggggtgagttcgggatgtcagctgtgagctgcggtaacggcaaactcagacagtggctcattgaccagatcgactctggcaagtaccccgggctggtatgggaaaatgaagagaagtctatcttcagaatcccctggaagcacgccgggaagcaggactataatcgtgaagaggatgctgccctttttaaagcttgggcgctgttcaagggcaagttccgcgagggaatagataaaccagacccgcccacctggaaaactagactccgatgtgcactcaacaagtcaaacgattttgaggaactcgtggaacggtcccagttagatatcagcgatccctataaagtctaccggatcgtaccagaaggagcgaagaagggcgcaaaacagctgacactggaggatccgcagatgtccatgtcacacccttatactatgaccactccctaccctagtcttcctgcccaggttcacaactatatgatgccaccactggataggagttggcgagattacgttccagatcagccccaccccgaaatcccctatcagtgcccaatgacattcggtccacgtggtcatcactggcagggacctgcctgcgagaacggctgtcaggtgactggtaccttctacgcatgcgctcctcccgaatcccaggcccctggcgtgccaacagagccctccatccgatcagctgaggcgctggcttttagcgactgccgcctccacatttgcctgtactatagggaaatcttggttaaggagttgacgacttcctcccccgagggatgtagaattagccatggccacacttatgatgcatcaaacctggatcaggtgctattcccctacccagaagataacgggcaaaggaaaaacatcgaaaagcttctctcacacctcgagaggggcgtggtgctgtggatggcgcctgacgggctttacgccaaacgactgtgccaatcacgcatctactgggatggaccattagccctgtgcaatgatcggccaaacaagctggaacgcgaccagacatgtaagctgttcgacacccagcagtttctgtccgaattgcaggcctttgcacaccacggtcgcagtctccccagattccaagtcaccctctgttttggcgaagaattcccagatccccaacgtcaaagaaaactcatcaccgctcacgttgagccgctgctcgctagacagctatactacttcgctcagcagaacagtggccacttcctgcggggctatgaccttcccgaacacatttccaatcctgaggactaccacaggtctattaggcacagcagcattcaggaatag

SEQ ID NO: 24609 - DNA, 1497 bp, synthetic construct
  misc_feature 1..1497: note = Description of Artificial Sequence: Synthetic coding sequence
  source 1..1497: mol_type = other DNA
atgaaccagagcatccccgtggcccccacccccccccggcgggtgcgcctgaagccctggcttgtggcacaagtcaatagctgccagtaccctggactccaatgggtgaatggtgaaaagaagctgttttgcatcccgtggaggcatgctactcggcacggccctagccaagatggagataatactatcttcaaggcctgggccaaggagactgggaaatacacagagggggtcgacgaggctgatccagccaagtggaaggctaacttgaggtgtgcgttgaataaaagcagggactttcgcctgatctatgacgggccacgggatatgcctccccagccctataagatctacgaggtgtgtagcaacggcccagctcccacagattcccagcccccagaagactatagctttggtgcaggagaggaggaggaagaagaggaggaattgcagagaatgctgccctcattgtccctaaccgaggacgttaagtggccaccaacgctccagccgcccacgttgcgtcctccaacactgcaacccccaaccctgcagcctccagtagtgctgggaccgcccgctccagatccctcaccactggcccctccccctggaaatcctgctggctttagggagctgctgtccgaggtgctggagccgggtcctctcccagcgagtctgcccccggccggtgagcaactgctacctgacctgctgatcagccctcatatgctccctcttacagatctggagattaagtttcagtacagagggagaccccccagggcactcaccatttcgaacccccacgggtgcaggcttttttacagtcagcttgaggcgacacaggagcaagttgaactgttcggacccatttctctcgagcaagttaggtttccaagtccagaagatatccccagtgacaagcagcgtttttataccaaccagttactggacgtcctggaccgcgggctgatcttgcagctgcaggggcaggatctgtacgcaattagactatgccagtgcaaggtattctggagtggcccctgtgcgtctgcacatgactcttgcccaaatcctatacaacgggaagtgaaaactaaactgtttagccttgagcattttcttaatgaactcatattgtttcagaaaggacagaccaacaccccacccccgttcgaaatcttcttctgctttggggaggagtggcctgaccgtaaaccccgcgagaagaagcttattactgttcaggtggttccagtggccgcccgcctactcctggagatgttcagcggagagctgtcttggagcgctgacagcattaggcttcagataagcaatcccgatctaaaagaccggatggtcgagcagtttaaggagctacatcacatttggcagtcccaacagagactgcagccggttgcccaagctcctccaggggcgggccttggtgtcgggcaagggccctggccgatgcatcccgccgggatgcagtag

SEQ ID NO: 24610 - DNA, 1545 bp, synthetic construct
  misc_feature 1..1545: note = Description of Artificial Sequence: Synthetic coding sequence
  source 1..1545: mol_type = other DNA
atgaaccagagcatccccgtggcccccacccccccccggcgggtgagactcaaaccatggctggttgcccaggtaaacagctgccaataccctgggctgcagtgggtgaatggggaaaaaaaactgttctgcattccatggcgtcatgcaacccgccacggacctagccaggacggggataatacaatttttaaggcctgggcgaaggagacggggaaatatactgagggggtagatgaagctgatcctgccaagtggaaggcaaatttgagatgcgccttaaataagtcacgcgacttcaggcttatttacgacgggccacgcgatatgccacctcagccttataaaatatacgaggtgtgttctaacggacccgccccgaccgacagccagccccccgaagactattccttcggggctggcgaggaagaggaagaggaagaggaactccagagaatgcttccgtcactcagtctgaccgatgcagtccaatccggcccccacatgacaccttactctctgctgaaagaggacgtgaagtggccaccaacacttcagcctcccaccctgagacctcctacattgcaaccccctaccctacagcctcccgtcgtgctgggccctcctgcacccgaccccagtcctctggcacctccccccggcaacccggccggatttcgagagttgctctctgaggtgctggagccaggccctctgccagcgtctttacctcccgccggcgagcagctcctccctgatttactcatctcaccacatatgcttccgctaacggatcttgaaatcaaattccaatatcgcgggaggcctccccgggcattgacgatatccaacccacacggctgccgccttttctatagtcagctcgaagccacccaggaacaggtcgaactgtttggtccaattagtctggagcaggtaagattcccctcccctgaagatatcccgtctgataaacagcgcttttacacgaatcagctgctagacgtcctggacagaggactcatcttgcagctccagggtcaagacctctatgccatccgactttgccagtgcaaggtgttttggagcggtccatgcgcatcagcacacgacagctgtccaaacccaatccagagggaggttaaaaccaaactcttctcactggaacactttcttaacgaacttatcctgtttcagaaaggtcagacaaacacccctccgccttttgagattttcttctgtttcggtgaggagtggcctgatagaaagccacgcgagaagaagcttatcaccgttcaggtagtcccagttgcagcgcgacttctgctggagatgttcagtggggagctgtcctggtcagcggactcaatccggcttcaaatctctaatccggacctgaaggatcgaatggttgagcagttcaaagagttgcaccacatctggcagtcccagcaacgactgcagcctgttgctcaagccccccctggcgctgggcttggggttgggcagggcccctggcccatgcaccctgccggaatgcagtag

SEQ ID NO: 24611 - DNA, 1497 bp, synthetic construct
  misc_feature 1..1497: note = Description of Artificial Sequence: Synthetic coding sequence
  source 1..1497: mol_type = other DNA
atgaaccagagcatccccgtggcccccacccccccccggcgggtgcggctcaaaccttggcttgtagctcaggtgaacagctgtcagtatcctggtttgcagtgggtgaatggggagaagaagttattttgtatcccctggaggcacgcaactagacatggcccttcacaggacggtgataacaccatatttaaagcatgggcgaaagagactggcaagtatactgaaggggtggacgaggccgatcccgccaagtggaaagcaaacctgagatgcgctctgaataaatctcgtgatttcagattaatctatgacggtccccgcgacatgcccccccagccatacaaaatttatgaagtatgttctaatgggcctgctcctacggatagccagccaccagaggattactcctttggagccggggaggaagaggaagaggaagaagagctccaaaggatgctcccatccctgtctcttaccgaggacgtaaagtggccacctacattacagccccctaccctgcgaccaccgacactgcagcctcccacgctacagccaccagttgtattaggccctccagccccagatcctagtcctctagctcccccccctggaaaccccgccggtttccgggagttattaagtgaggtgctcgagcccgggcccctccctgcttctcttcctccagcgggtgaacaattgctgcctgacctgctgattagcccacacatgctcccgcttacagatctagaaattaagtttcagtaccgtggccgtcctccccgggcactgaccatatcaaacccacacgggtgccggttgttctatagccagctcgaagccacgcaggagcaggttgagctctttgggcccatttctctcgagcaggtgcggttcccctcccccgaagacatcccgagtgacaaacagaggttttacaccaatcaattgctagatgtgctggatagaggtctcattctacaactgcagggacaggacctgtacgccatacgcctgtgccaatgcaaagtattctggagtggtccatgtgctagcgcgcatgactcatgtccaaacccaatccagcgcgaggttaaaactaaactctttagcctagagcacttcctgaatgaacttatattgtttcagaaagggcagactaatacaccacccccctttgagatatttttctgctttggggaagagtggccagaccgaaaacctcgggaaaagaagctcataactgttcaagttgtgcccgtggcagcacgcctgctgctggagatgttttcaggggagctgagttggtctgctgacagcattcgcctacagatttcgaatccagacctgaaggatcgaatggtggagcaattcaaggagctgcaccacatctggcaatcacaacagagattacaaccagtagcacaggcccccccgggcgctgggttgggcgtaggtcaaggaccatggccaatgcaccctgcgggcatgcaatag

SEQ ID NO: 24612 - DNA, 1467 bp, synthetic construct
  misc_feature 1..1467: note = Description of Artificial Sequence: Synthetic coding sequence
  source 1..1467: mol_type = other DNA
atgaaccagagcatccccgtggcccccacccccccccggcgggtgagactgaaaccatggctcgttgcgcaggtgaacagctgccagtatcctggtctccagtgggtgaatggggaaaagaaactgttctgcatcccttggcggcacgcgactaggcatggcccaagccaggacggcgacaatacaatctttaaagcctgggctaaagaaaccggcaagtataccgagggcgttgatgaagccgacccggccaagtggaaagcaaatcttcggtgcgccctgaacaaatccagggactttcgactgatctatgacggcccgcgtgacatgccaccccagccatataagatctatgaggtttgcagtaatggacccgcccccactgattctcagccgccggaagattactcatttggtgccggcgaggaagaggaagaggaggaagagctgcagcgaatgttgccttccctttctcttactgaggacgttaagtggcccccgactctgcagccacctacccttcagcctcccgtggtgctcggcccaccagccccggacccaagcccactagcccctcccccaggtaacccagccgggtttcgcgaattactctcagaggtgctcgagccaggacccttgccagcctctctgcctcctgccggagagcaactgctcccggacctgctgataagtccccacatgcttccgctcacagacttagaaatcaaattccaatacaggggccggccaccccgtgcgctaaccatctcgaacccacacggatgccgtctgttttactcccagttagaggccacccaggagcaggtcgagcttttcgggcctatatcgctggagcaggtaagatttccctctcctgaagacattccatccgataagcagcgcttttacaccaaccagctcctcgacgtgcttgatagaggactgattctgcagcttcaaggccaggatttgtacgcgattaggctgtgccagtgcaaggtcttttggtccggaccctgtgcctcggctcatgatagttgccccaaccccattcagcgagaggtcaaaacgaagctattcagccttgagcactttctgaacgagttgatcttatttcagaagggccaaaccaatactccgccaccgttcgagatctttttctgcttcggcgaggaatggcctgataggaagccgcgagaaaaaaaactcattactgtccaggttgtgccggtggctgctagactgctgttggagatgttcagcggcgagctttcatggagcgcagactccattaggcttcagatcagcaacccggatttgaaggacagaatggtggagcagttcaaggagctgcatcatatttggcagagccagcagcgcctacagccagtggcacaggcccctcctggagcggggctgggcgtagggcagggtccatggcccatgcatcctgcaggcatgcaatag

SEQ ID NO: 24613 - DNA, 684 bp, synthetic construct
  misc_feature 1..684: note = Description of Artificial Sequence: Synthetic coding sequence
  source 1..684: mol_type = other DNA
atgaaccagagcatccccgtggcccccacccccccccggcgggtgcggctcaaaccttggttggtggcccaggtaaacagctgtcagtaccccggattacaatgggtgaatggcgaaaagaaactgttttgcatcccctggagacacgccaccaggcacggcccctctcaggacggcgacaatacaattttcaaggcctgggcaaaagagaccggaaaatatacggaaggagtcgatgaagcggacccagctaaatggaaggccaacctccggtgcgccctcaataaatccagagattttcgtctgatatatgacgggccacgggacatgccaccccagccatacaagatatatgaagtctgtagcaacgggccagcccccactgattcacagcccccggaggactattcatttggtgcaggcgaggaggaagaagaagaagaggaacgcatgagttcagggcgccctctctgttcccgacctctgtgcggccgcctgctctgcagcagaccactgtgtagtcggccctggtgctgggtccctttgctgcaaacaccggccccatggctgctgccgctcgccaccctcctggcttccggcagtttcagcctgaggtcatggtctctgggcccttgcctccctgcatgcccactacaggccaattcatcatgccagacctgttag

SEQ ID NO: 24614 - DNA, 474 bp, synthetic construct
  misc_feature 1..474: note = Description of Artificial Sequence: Synthetic coding sequence
  source 1..474: mol_type = other DNA
atgaaccagagcatccccgtggcccccacccccccccggcgggtgcggttgaagccgtggctcgtggctcaggtgaactcttgtcagtatcctggtctccagtgggtgaacggcgaaaaaaaactcttttgtattccttggaggcatgccactaggcacggcccctcacaggacggggacaatacgattttcaaggcttgggccaaggagacggggaaatatactgagggggtggatgaggctgaccccgccaaatggaaggcaaacctaagatgtgctctaaataagtcccgagactttcgtcttatttatgacgggcctcgtgacatgccaccacagccttataagatctatgaggtttgctctaatgggcctgcacccacagacagccaaccaccggaagattactcatttggcgcaggagaggaagaggaggaggaggaggagatgcagtgcagtttagcacccacttag

SEQ ID NO: 24615 - DNA, 321 bp, synthetic construct
  misc_feature 1..321: note = Description of Artificial Sequence: Synthetic coding sequence
  source 1..321: mol_type = other DNA
atgaaccagagcatccccgtggcccccacccccccccggcgggtgaggctgaaaccatggttggtggcccaagtaaactcctgtcagtatcctggcctgcagtgggtcaacggagagaagaagttattctgcataccatggcgtcacgccacacggcacggaccctcacaggatggcgacaacacgatattcaaggcttgggcaaaggaaacgggcaaatatacagagggcgtggatgaagcggacccggccaagtggaaagccaacctgcggtgcgcactcaacaaatcccgtgattttcgactcatttacgacggttag

SEQ ID NO: 24616 - DNA, 180 bp, synthetic construct
  misc_feature 1..180: note = Description of Artificial Sequence: Synthetic coding sequence
  source 1..180: mol_type = other DNA
atgaaccagagcatccccgtggcccccacccccccccggcgggtgcggctgaagccctggctcgttgcccaagttaacagctgtcagtacccagggttgcagtgggtgaacggggagaaaaagctgttttgcatcccatggagacatgcgacaaggcacggaccaagtcaggatggctag

SEQ ID NO: 24617 - DNA, 1497 bp, synthetic construct
  misc_feature 1..1497: note = Description of Artificial Sequence: Synthetic coding sequence
  source 1..1497: mol_type = other DNA
atgaaccagagcatccccgtggcccccacccccccccggcgggtgagattaaagccctggctggtcgcccaggtcaacagttgtcagtaccctggcctccaatgggtgaacggggaaaagaagctgttttgtatcccttggcgtcatgctactagacatgggcccagccaggacggagacaacacaatttttaaggcatgggctaaagaaaccgggaagtatacggaaggggtggatgaggccgatcctgctaagtggaaagccaacttacgttgcgcattgaataaaagcagagacttcagacttatctatgacgggcccagagacatgcctcctcagccctataagatttatgaagtctgctctaacggccccgcccctacggattcccagccccccgaagactattcgtttggagctggcgaggaggaggaagaagaagaggagctgcaaagaatgctgccatctctcagcctgactgaagacgttaagtggccacccaccctgcaaccgccaacactgcgaccaccaaccctgcaacccccgacgctgcagccccccgtagtgcttggaccacccgctcccgatccaagccctctggccccgccacctggaaaccctgctggatttcgcgagttgttgtccgaagtactcgagccaggccctctgccagcaagtctacccccagccggtgagcagcttttgccagacctcttaatttccccacacatgctgccattaactgatcttgagataaagttccaataccgcggcaggccaccgcgtgcacttaccatttctaacccacacgggtgcaggctgttctatagtcaactggaagctacccaggaacaagtggaattattcggtcccattagccttgagcaagtccggtttcccagtccggaggatatcccgtctgacaagcaaaggttttataccaaccagctgttagacgtattggatcggggattgatcttgcagctccagggtcaggacctctacgctatcaggctttgccagtgcaaagtcttctggagcggcccatgcgcaagcgctcacgattcttgccctaaccctattcaacgggaggtgaaaactaagctgttctccctggagcatttccttaacgagctgattctgttccagaaaggacaaaccaatacccccccccctttcgagattttcttttgctttggggaggagtggcctgacaggaagccccgcgaaaaaaaactgatcactgtacaggttgttccggtggcggcccgtcttctgctggagatgtttagcggcgaactgagttggtctgccgattccatccgcttgcagattagcaaccccgacctcaaagatcgaatggtcgagcagttcaaggagctacaccatatctggcagtctcagcagaggcttcagcccgtggctcaagctcccccgggtgcaggccttggcgtggggcagggcccatggccaatgcatccagccggaatgcagtag

SEQ ID NO: 24618 - DNA, 426 bp, synthetic construct
  misc_feature 1..426: note = Description of Artificial Sequence: Synthetic coding sequence
  source 1..426: mol_type = other DNA
atgaaccagagcatccccgtggcccccacccccccccggcgggtgcggctcaagccttggctagtcgctcaggtcaactcgtgccaataccccggcctccagtgggtgaacggagaaaagaagctgttttgcataccctggagacacgctactaggcatgggcccagtcaggatggagacaacacgatctttaaagcttgggccaaagaaaccggcaagtacaccgagggagtggatgaggcggatcctgcgaagtggaaggctaatctcagatgcgccctgaacaaatcccgcgatttccgcctcatttatgacggtcccagagatatgccccctcagccgtacaagatctacgaggtgtgtagtaacggcccggctcctacagacagtcaaccaccggaggactactcatttggagccggctag

SEQ ID NO: 24619 - DNA, 459 bp, synthetic construct
  misc_feature 1..459: note = Description of Artificial Sequence: Synthetic coding sequence
  source 1..459: mol_type = other DNA
atgaaccagagcatccccgtggcccccacccccccccggcgggtgcggctaaagccttggcttgtcgctcaggtgaactcctgtcaataccccgggttgcagtgggtgaacggtgagaaaaagctgttctgtattccttggcgccatgcaacccgccacggcccttcacaagatggggataacacgatttttaaagcgtgggctaaggagacagggaagtatacagagggggtggacgaagctgatccagctaaatggaaggctaacctgagatgtgcccttaacaaatcacgcgattttaggttgatttatgacggtccaagagacatgcccccgcagccatataaaatctacgaggtgtgttctaacggtcccgcaccaacagactctcagccacccgaagattattcctttggtgcgggtgaggaggaggaggaagaggaagaagtcagcgtgtag

SEQ ID NO: 24620 - DNA, 1239 bp, synthetic construct
  misc_feature 1..1239: note = Description of Artificial Sequence: Synthetic coding sequence
  source 1..1239: mol_type = other DNA
atgaaccagagcatccccgtggcccccacccccccccggcgggtgcgactgaagccttggctggtggcgcaggttaattcctgtcaatacccgggcctgcaatgggtcaatggggaaaaaaaactgttctgcatcccctggaggcacgctacacgccacggaccctctcaggatggcgacaatacaattttcaaagcttgggctaaagagacaggaaagtacactgaaggggtcgacgaggcggatcccgcgaagtggaaggcaaacctgcgctgcgcgcttaataagagccgtgacttcagacttatttatgatgggccgagagacatgcctccccagccatataagatctacgaggtctgttctaacggacccgcccccaccgattcgcagcctcctgaggattacagctttggcgcaggcgaggaggaagaggaggaggaggaactccagcggatgctgcctagtctctcactgacagtgacagacctagagattaagttccagtacaggggacgcccacctcgggcgctcactatttctaacccacatgggtgcagattgttttactcgcagttagaggctacgcaagagcaagtggagctctttggacctatctcgttggagcaagtcagattcccatcccctgaggatattccgagcgacaaacaacgcttctatacaaaccagttactcgatgtgctggaccgcggtctaatcttgcaactgcaaggccaggatctgtacgccatacggctctgtcaatgcaaagtcttctggtcaggcccttgcgcttctgcacatgattcttgcccaaaccctatccagagggaagtgaagacgaaactgttctctttagaacatttcctaaacgagctgatcttattccagaagggccagaccaatactccaccacctttcgaaatctttttctgtttcggtgaggagtggccggatcgcaaaccacgcgaaaaaaagctgattaccgttcaagtggtgccggttgccgcccgccttctacttgaaatgtttagcggcgagctgagctggtctgccgattcgattcggctccaaatctcaaatccagatctgaaagatcggatggtcgagcagtttaaagagctgcaccacatatggcaatcacagcagcgactgcaacctgtagctcaagcaccccccggggcaggcctgggagttggtcagggcccttggcctatgcaccctgctgggatgcaatag

SEQ ID NO: 24621 - DNA, 570 bp, synthetic construct
  misc_feature 1..570: note = Description of Artificial Sequence: Synthetic coding sequence
  source 1..570: mol_type = other DNA
atggccagccccttcgccctgctgatggtgctggtggtgctgagctgcaagtcctcctgcagcttgggctgtgatctgcctgaaacacactccctggacaataggcggacgctgatgctccttgcacagatgagccgaatctctccctcctcctgccttatggacagacacgactttgggtttccccaggaagaatttgacggtaatcagtttcaaaaggcccccgccatttcagtgcttcatgagctgattcagcagatcttcaatctcttcaccaccaaagacagctctgctgcatgggatgaagacctgctcgacaaattctgcaccgaactctatcagcagttaaacgatttggaggcatgtgtgatgcaggaagagcgggtgggtgagaccccgctgatgaacgcagatagcatactggcagtgaagaaatactttcggaggataactctgtatttaactgaaaagaaatattcgccttgtgcttgggaggtggttagggccgagatcatgcggtctctcagcctgagtaccaatctgcaggagcgtttgcggagaaaggagtag

SEQ ID NO: 24622 - DNA, 516 bp, synthetic construct
  misc_feature 1..516: note = Description of Artificial Sequence: Synthetic coding sequence
  source 1..516: mol_type = other DNA
atgctggtgaacttcatcctgcggtgcggcctgctgctggtgaccctatcattggctattgcaaaacataaacagagttctttcacaaagtcttgttatccccgcgggacactttcccaggctgtcgacgctctctacattaaagccgcctggctcaaggctacaattccggaggatcgaatcaaaaacattcggcttctcaagaagaaaacgaaaaagcagttcatgaagaactgccagttccaggagcagctgctgagcttcttcatggaggacgtgttcggtcagctgcagttgcaagggtgcaaaaagatcagatttgtagaggacttccacagcctgaggcagaaattgtctcactgtataagttgcgcatcctctgctcgcgagatgaagagtatcaccaggatgaaacgtattttttatcggatcggcaacaaaggaatatataaggctatttccgagctcgatatcctcctctcctggatcaaaaaactcctggagtcatctcaatag

SEQ ID NO: 24623 - DNA, 543 bp, synthetic construct
  misc_feature 1..543: note = Description of Artificial Sequence: Synthetic coding sequence
  source 1..543: mol_type = other DNA
atggccctggccgacctgtacgaggagggcggcggcggcggcggcgagggcgaagataacgcagactcaaaggagacaatctgcagaccgtctggccgcaaatcctccaaaatgcaggcttttcgcatttgggacgtgaatcaaaaaacattttatttgaggaacaatcaattagtggcagggtaccttcaggggcccaacgtgaacctcgaggaaaagatcgatgtcgtgccaatcgagccacatgccttgttcctgggaattcatggcgggaagatgtgtctctcctgcgttaagagcggggacgagacccggctacagctggaggccgtgaacataaccgatctgagcgagaataggaagcaggataagagattcgcattcataaggagtgactcaggacctaccaccagctttgagtccgcggcatgtcctggttggtttctgtgcacagctatggaggcggatcagcctgtgtccctgacaaacatgccggacgaaggtgtgatggtgactaagttctacttccaggaggatgagtag

SEQ ID NO: 24624 - DNA, 480 bp, synthetic construct
  misc_feature 1..480: note = Description of Artificial Sequence: Synthetic coding sequence
  source 1..480: mol_type = other DNA
atggccctggagaccatctgccggcccagcggccggaagagcagcaagatgcaagcattccgcatttgggacgttaatcagaagacattctatctgcgcaataaccagctcgtggctggatatctgcagggacctaatgtgaatcttgaggaaaagattgatgtggttccgatagaaccgcatgctctgttccttgggattcatggcggcaagatgtgtctgtcctgcgtcaagagcggcgacgaaacccgattacagctggaggctgtgaacatcacagacctctcagaaaatcggaagcaggataaacggtttgcctttatccggtcagactcaggacccacaacctcgtttgagtctgcggcgtgccctggctggttcttatgtacagccatggaagcagaccagccagtgtccttaaccaacatgccagacgaaggtgtgatggtgactaaattctactttcaggaggacgaatag

SEQ ID NO: 24625 - DNA, 534 bp, synthetic construct
  misc_feature 1..534: note = Description of Artificial Sequence: Synthetic coding sequence
  source 1..534: mol_type = other DNA
atggagatctgccggggcctgcggagccacctgatcaccctgctgctgtttctgttccattctgagaccatatgccgacctagcgggcggaagtcgtcgaaaatgcaggctttcaggatctgggatgtaaatcagaaaaccttttacctgagaaataatcagctggttgcaggctatctgcagggaccaaatgtgaacctggaagagaaaattgatgtggtgcctatcgaaccacacgcactgttcctgggaatccatggagggaagatgtgtttgtcatgcgtgaaaagcggagatgagacccgactacagctggaggcagttaacataaccgacctgtccgagaatagaaagcaggataaaaggtttgccttcattcggagtgactcagggcctactactagtttcgaatcagcagcatgccccggttggttcctgtgtacggctatggaggccgaccaacccgtatccttgacaaatatgccagacgagggcgtcatggtcacgaagttctatttccaggaggacgagtag

SEQ ID NO: 24626 - DNA, 432 bp, synthetic construct
  misc_feature 1..432: note = Description of Artificial Sequence: Synthetic coding sequence
  source 1..432: mol_type = other DNA
atgcaggccttccggatctgggacgtgaaccagaagaccttctacctacgcaacaaccaattggttgcggggtaccttcaaggtccaaatgtaaatctggaggagaagattgatgtggtgccgatcgagccgcatgccctcttcctgggaatccacggcggcaaaatgtgtctgtcgtgcgtaaaaagtggcgacgaaacccggttacagctggaggctgtcaacatcactgacctgtctgaaaataggaagcaagataagcggtttgcttttatccggtccgatagtgggcctacaacaagtttcgagagcgctgcctgccctggctggttcctttgtacagccatggaagctgaccagccagtttcattgacaaatatgcctgatgagggagtaatggtcaccaaattctattttcaggaggacgagtag

SEQ ID NO: 24627 - DNA, 1470 bp, synthetic construct
  misc_feature 1..1470: note = Description of Artificial Sequence: Synthetic coding sequence
  source 1..1470: mol_type = other DNA
atggagcccggcctggagcacgccctgcggcggacccccagctggagctcattgggcggttcagagcaccaagaaatgtcattcctggagcaagaaaactcttcgtcctggcccagcccagccgtgaccagttcgtcggagcggatcagggggaaacgaagggccaaggctctgcggtggactcgccagaaaagcgtcgaggaaggcgagccaccagggcagggcgaggggccacggagccggccagcagcagagagcaccggcttagaagcaactttcccaaagaccacccccctggctcaagcagaccccgccggcgtcgggacaccgcctacgggatgggactgtctacccagtgattgtaccgctagcgccgctggatcatcaacagacgacgtggagctagcgacagaatttccagccaccgaagcctgggaatgtgagttagaaggacttcttgaggagcgacctgccctgtgtctcagcccccaggcgccctttcctaagctgggttgggacgatgaactgcgtaaaccaggagcacagatttatatgaggtttatgcaagagcacacttgttatgacgccatggccacaagtagcaaactagttatcttcgacaccatgctagagatcaaaaaagcgttcttcgccctagtcgcaaacggggtgagggccgcaccactctgggatagcaaaaagcagtctttcgttggtatgcttaccattacagattttatcctcgttctgcaccggtattacaggtccccactggtccagatttacgagattgagcagcataagattgaaacatggcgcgaaatctacctgcaaggatgctttaaaccgctggtcagtatcagcccgaatgacagcctgtttgaagccgtctatacccttatcaaaaaccgcatacatagactgccagtgctggatcctgtgtctggcaacgtgttgcatattctgacccacaagaggctgctgaagtttctccacatctttggcagcctgctccctagaccaagcttcctctacagaacaattcaggatctcggtatcgggaccttcagggacctcgccgtcgtccttgagactgcacctattctgacggccctggacatcttcgtggatcgtcgtgtgtccgctctgccggtcgtcaacgagtgtggccaggtcgttggcctgtacagcagatttgacgttattcacctggccgcacaacaaacctataatcacctcgatatgtccgtgggcgaggcactgcggcaacggactttgtgcttggagggggtgctgagttgtcagccgcacgaatccctcggggaagtgattgatcgcattgctcgcgaacaagtacataggctggttctggtggacgagactcaacacctcctcggcgtagtatcactttccgacatactccaggcactggtgttatctcctgcgggtatcgacgccctcggggcttag

SEQ ID NO: 24628 - DNA, 1710 bp, synthetic construct
  misc_feature 1..1710: note = Description of Artificial Sequence: Synthetic coding sequence
  source 1..1710: mol_type = other DNA
atgaaggtgctgctgcggctgatctgcttcatcgccctgctgatctcctctcttgaagccgataagtgcaaggaaagagaagagaaaataatactagtgagctccgcgaacgaaattgatgttcggccctgccccctgaatcccaacgaacacaaaggcactatcacctggtataaggacgatagcaaaacgcccgtatcaaccgagcaagcaagccggatccatcagcataaggagaagctatggttcgtccccgctaaggtggaagacagcgggcactactactgtgtcgtgcggaattcctcttattgccttaggatcaagatctctgctaaattcgtcgagaacgagccaaatctgtgttataacgcccaagccatttttaaacagaagctgcctgtagcgggcgatggtggtctggtgtgtccatacatggaattcttcaagaatgaaaataacgaattacccaagttgcagtggtacaaggattgtaaaccattgctgctagataatattcactttagcggagtgaaggataggttaatagttatgaacgtcgcggagaagcatcgtgggaactatacatgtcatgcctcctacacttacctcggcaagcaatacccgatcactcgtgtgatcgagttcattactctggaggaaaataaaccaacccgccccgtgatcgttagcccagctaacgaaacgatggaggtggacttgggaagtcagatccagcttatatgtaacgtgacgggccagctcagcgatatcgcctactggaagtggaacggcagcgtgattgacgaagatgacccagtcttaggagaagattattattcagttgagaatcctgctaataagaggaggtctaccttgattacagttctgaatatatccgaaattgagtcaaggttctataagcacccttttacctgctttgcaaagaacacgcacggcatagacgccgcatatatccagctgatctaccccgtcacaaattttcagaaacatatgataggaatctgtgtgacattaactgtcattattgtgtgcagtgtttttatctataaaatcttcaagattgatatcgtgctctggtacagggactcttgttacgacttcctccctataaaggccagtgatggcaagacttacgatgcttatattctgtatcccaagaccgtgggggaaggttctacctcagattgcgacatattcgttttcaaagtcttgcctgaggtgttggagaaacagtgcggttataaattatttatttacggacgggatgactatgtaggggaggacatcgtcgaagtgatcaacgagaatgttaagaagtctcgccgactcattataatcttggtgcgggagaccagcggcttcagctggctcggcggcagttccgaggaacagatcgccatgtacaatgccctggtccaggatggcatcaaggttgtattgttggagcttgagaagattcaggactacgagaagatgccggagagcattaagttcattaagcaaaagcatggagccattagatggtcgggggacttcactcaaggcccgcagtccgctaaaacccgcttctggaagaacgtgagatatcacatgccagtccagcgcagatctccatctagcaagcatcagttgctgagccccgccaccaaggaaaaactccaaagggaggcccacgtgccgctcgggtag

SEQ ID NO: 24629 - DNA, 549 bp, synthetic construct
  misc_feature 1..549: note = Description of Artificial Sequence: Synthetic coding sequence
  source 1..549: mol_type = other DNA
atgaaggtgctgctgcggctgatctgcttcatcgccctgctgatcagctcactggaggcggataagtgtaaggagagggaggagaagatcatactggtcagctctgccaatgagatagatgtgagaccttgtcctcttaacccaaatgagcacaaaggaaccattacctggtacaaagatgatagcaagacccccgttagcaccgagcaagcatcacggattcatcagcacaaagaaaaactgtggttcgttcctgcaaaggtagaggatagcggtcattactactgtgtggtgaggaactcatcttattgcctacgaattaagatcagcgccaagtttgtggaaaatgagcccaacctgtgttacaatgcgcaggcgatatttaagcagaaattacctgtcgcaggcgacggcggcctggtctgtccatacatggagttctttaagaatgagaataatgaactgcccaagcttcagtggtataaggattgcaagcccctgctgcttgacaatattcatttcagcggagtcaaagatcgactgatttag

SEQ ID NO: 24630 - DNA, 345 bp, synthetic construct
  misc_feature 1..345: note = Description of Artificial Sequence: Synthetic coding sequence
  source 1..345: mol_type = other DNA
atgaaggtgctgctgcggctgatctgcttcatcgccctgctgatcagctcactggaggcggataagtgcaaggaaagggaggagaaaattattctcgtgtcaagcgccaatgaaattgatgtccgtccatgtcctcttaatccgaacgaacacaagggcactatcacatggtataaggacgatagcaagacgcctgtcagcactgaacaggcaagcaggatccaccagcacaaagagaagctgtggtttgtccctgcaaaggtggaggactcaggccactactattgtgtggtccgtaactcgtcatattgcctgcgcataaaaatttccgcaaaatttgtctag

SEQ ID NO: 24631 - DNA, 321 bp, synthetic construct
  misc_feature 1..321: note = Description of Artificial Sequence: Synthetic coding sequence
  source 1..321: mol_type = other DNA
atgaaggtgctgctgcggctgatctgcttcatcgccctgctgatcagcagcctggaagcggataaatgcaaggagagagaagagaagatcatccttgtgtccagcgcaaacgagattgacgtgcgtccttgtccactgaaccccaacgagcacaagggtacgatcacctggtataaagatgactccaagactcctgtcagcacagagcaggcctcaaggatccatcagcataaggagaaactctggtttgtacctgccaaggtggaggattccggtcactattattgcgtggtgagaaactcaagctattgcctaaggtag

SEQ ID NO: 24632 - DNA, 243 bp, synthetic construct
  misc_feature 1..243: note = Description of Artificial Sequence: Synthetic coding sequence
  source 1..243: mol_type = other DNA
atgaaggtgctgctgcggctgatctgcttcatcgccctgctgatctcctctttggaggctgataaatgcaaggagagagaagagaaaatcatcctagtgtcctcagctaatgagatagatgtcagaccctgtcctctcaatccgaatgaacacaagggcaccataacatggtataaggacgattcaaaaacacctgtaagtaccgaacaggcctcccgtattcaccagcataaagagaaatag

SEQ ID NO: 24633 - DNA, 810 bp, synthetic construct
  misc_feature 1..810: note = Description of Artificial Sequence: Synthetic coding sequence
  source 1..810: mol_type = other DNA
atggccgaggtgcccgagctggccagcgagatgatggcctactactccgggaacgaggatgatctattttttgaagcagacggtcctaaacagatgaagtgttcattccaagacctggatctgtgtccgctggacggtgggatccagctcaggatatctgatcaccattattccaagggttttcgtcaggccgcttctgtggtggtggcaatggataaactgcgcaagatgctggtgccctgtccccagacgttccaggaaaatgacttaagcaccttcttcccttttatttttgaagaggagccaatctttttcgatacgtgggacaatgaggcttatgttcacgatgccccggtgaggagcttgaattgcacactgcgtgactcccagcagaaaagcttggtgatgagcgggccatatgagctcaaggctctgcacctgcagggccaggatatggaacagcaagttgtcttctcaatgtcattcgtgcaaggcgaggaaagtaacgataagatccctgttgcgctgggacttaaagaaaagaatctgtatctgagttgcgtgttgaaggatgacaaacctaccttacagctggagagcgtggatcccaagaattaccccaaaaaaaagatggagaagcgattcgtgtttaacaaaattgagatcaacaacaagctggagtttgaatctgcacagttccctaactggtacatttcaactagtcaggctgaaaatatgcctgtctttctcggaggaaccaaagggggccaagacataaccgactttaccatgcagttcgtgagttcctag

SEQ ID NO: 24634 - DNA, 336 bp, synthetic construct
  misc_feature 1..336: note = Description of Artificial Sequence: Synthetic coding sequence
  source 1..336: mol_type = other DNA
atggccgaggtgcccgagctggccagcgagatgatggcctactactctggaaatgaggacgacttgttcttcgaagctgatgggccaaaacagatgaagtgctcctttcaggacctagacctatgcccccttgacggcggaattcagcttagaatttccgaccatcattactcaaaagggttccgccaggctgcctccgtggtggtggccatggataagttaagaaaaatgcttgtgccctgtccacagacctttcaggagaatgatcttagcacattttttcctttcatatttgaggaggaacccattttcttcgatacctgggataacgagtag

SEQ ID NO: 24635 - DNA, 432 bp, synthetic construct
  misc_feature 1..432: note = Description of Artificial Sequence: Synthetic coding sequence
  source 1..432: mol_type = other DNA
atggccgaggtgcccgagctggccagcgagatgatggcctactacagcggcaacgaggacgatttgttctttgaggccgacggaccaaaacagatgaagtgttcctttcaagacttagatttgtgccctctggatggcggaatccagctgcggatttcagaccaccactactcgaaggggtttagacaagcggccagcgtcgtggtggcaatggacaaattacgaaagatgctggttccatgccctcagacatttcaggagaacgatctgagcaccttcttcccattcatttttgaagaggagccaatattcttcgacacctgggacaatgaggcctacgttcacgacgctcctgtacgttccctcaactgtaccctgcgcgactcacagcaaaagtcccttgtaatgtctggaccttacgagttaaagtag

SEQ ID NO: 24636 - DNA, 378 bp, synthetic construct
  misc_feature 1..378: note = Description of Artificial Sequence: Synthetic coding sequence
  source 1..378: mol_type = other DNA
atggccgaggtgcccgagctggccagcgagatgatggcctactacagtggaaacgaggatgatctgtttttcgaagccgacggtcccaaacaaatgaagtgctccttccaggacctcgacctctgtcctctagacgggggaattcagttgcggataagcgaccatcactactctaaaggtttcaggcaagccgcgtctgtggtggttgcgatggacaagttgagaaagatgttggtgccgtgcccgcaaaccttccaggagaatgacctaagcacgttctttccttttatctttgaggaggaacctatcttctttgacacctgggataatgaggcatatgtccacgatgctcctgtcaggtcgctgaactgtacatag

SEQ ID NO: 24637 - DNA, 762 bp, synthetic construct
  misc_feature 1..762: note = Description of Artificial Sequence: Synthetic coding sequence
  source 1..762: mol_type = other DNA
atgtggccccccggcagcgccagccagcccccccccagccccgccgcggctacaggccttcacccagctgccagacccgtgagccttcagtgccgcctgagtatgtgcccagccaggtcactcttgttagttgcaactttggtgctgttagaccatctgagtctggcacgcaacctgccagtggctactcccgatcccggcatgtttccctgcctgcatcacagccaaaatctgcttcgtgctgttagcaacatgctgcagaaggcacgccagaccttggaattctacccatgcacttcagaggagatcgatcacgaggacatcacaaaagataagactagtactgtcgaggcttgtctgcccttggaactcaccaagaacgagtcctgcctgaatagccgtgagactagcttcattactaatggttcctgtctggccagccgcaaaacatccttcatgatggcactttgcctctcaagtatctacgaggacctgaaaatgtatcaggttgagtttaagacgatgaacgccaaattattgatggaccccaagagacagattttcttagatcagaatatgttggcggtgatcgacgaactgatgcaagcgctgaacttcaactccgaaaccgtgccacaaaagtctagcctagaggaacccgatttctacaagactaaaatcaagttgtgcatcctgttacatgctttccgaattagagccgtgactatcgatagggtcatgtcttacctgaacgctagttag

SEQ ID NO: 24638 - DNA, 720 bp, synthetic construct
  misc_feature 1..720: note = Description of Artificial Sequence: Synthetic coding sequence
  source 1..720: mol_type = other DNA
atgtggccccccggcagcgccagccagcccccccccagccccgccgcagccactggtctgcatcccgccgctcggccggtgagcctgcagtgtcggctctctatgtgtcctgcaagaagtctattgttggtcgcaaccctggtcttactggatcacctttcccttgctcgtaacctaccagtggccacccccgacccgggaatgttcccctgcctccaccactctcaaaatcttctgagggccgtctcaaacatgcttcaaaaggcgaggcagaccctggagttctacccctgcacttctgaggaaattgaccatgaggatatcacaaaagacaaaacatccactgtcgaagcttgccttccgctcgagctcaccaagaatggatcctgtctggcttcaaggaagacctcgttcatgatggctttatgcctgagttcaatatacgaggatctcaagatgtatcaagtagaatttaagacaatgaacgcaaaattactgatggatccaaaacgacagatcttcttagatcaaaacatgctggcagttattgatgaactcatgcaggctcttaatttcaattctgagaccgtgccccagaagagtagtttagaggagccagacttttataagaccaagatcaagctgtgtatcctgttacacgcattccggattcgggcagttacgatcgacagagtgatgtcctatttgaacgcctcctag

SEQ ID NO: 24639 - DNA, 648 bp, synthetic construct
  misc_feature 1..648: note = Description of Artificial Sequence: Synthetic coding sequence
  source 1..648: mol_type = other DNA
atgtggccccccggcagcgccagccagcccccccccagccccgccgccgccaccggtctccacccggctgctcgacccgtctctcttcagtgcagactgtcaatgtgcccagccagaagcctgctgttggttgccaccctagtgctcttggatcaccttagtcttgcgaggaatctacccgttgccactcccgaccccggtatgttcccgtgccttcaccactcccagaatttattacgggcagtaagcaacatgctgcagaagaacgagagttgtctgaattcccgggagacctccttcattacgaacggctcttgcttggccagccgcaaaacatcatttatgatggcattatgccttagttctatttatgaagacctaaagatgtaccaggtggaatttaaaacaatgaatgctaagctgctcatggacccaaagcgccaaattttcctggaccagaatatgctcgccgtgatcgatgaattgatgcaagctctgaacttcaattcagaaactgtccctcagaagagctcactggaggaacccgacttctacaaaactaagattaagctctgcattctgcttcatgcctttcgtatccgggctgtgacaatagatagggtcatgagctacctgaacgcctcttag

SEQ ID NO: 24640 - DNA, 489 bp, synthetic construct
  misc_feature 1..489: note = Description of Artificial Sequence: Synthetic coding sequence
  source 1..489: mol_type = other DNA
atgcggatcagcaagccccacctgcggagcatcagcatccagtgctatctttgtttgttgctgaactcgcacttcctcaccgaagcaggcattcacgtctttatattaggctgcttcagtgccgggctgcccaagactgaggccaattgggtcaacgtcattagcgacttgaaaaaaattgaggacctgatccagtcaatgcacatagatgcaactctttatactgaaagtgatgttcatccttcatgcaaagtcactgccatgaaatgctttctgctagagttgcaggttatctccctggaatcaggtgatgcttcaatacatgacacagttgagaacctgatcatacttgcaaacaattcactctcctcaaacgggaacgtcaccgagtcaggctgtaaggagtgcgaagaactcgaggagaagaacattaaggagtttctccaatcgtttgtccacattgtgcaaatgtttatcaacacttcttag

SEQ ID NO: 24641 - DNA, 489 bp, synthetic construct
  misc_feature 1..489: note = Description of Artificial Sequence: Synthetic coding sequence
  source 1..489: mol_type = other DNA
atgcggatcagcaagccccacctgcggagcatcagcatccagtgctatctgtgtttgcttcttaactctcatttcttgaccgaggctggaattcacgtgttcatcctaggctgctttagcgcaggcttgcccaagaccgaggctaactgggtgaacgtgatatcagatctcaagaaaatcgaagatttgatccaaagcatgcacattgacgcaacattgtacacagagagcgatgtacacccaagttgtaaagtcacagctatgaaatgcttcctcctggagctgcaggttataagcctggaatctggcgatgcaagcattcacgatactgtggaaaacctgataattttggctaacaactccctctcttcaaatggtaacgttaccgaaagtggctgcaaagaatgtgaagagctagaggagaagaacatcaaagagttcttgcagtctttcgtgcatatcgtgcagatgtttatcaatacgagctag

SEQ ID NO: 24642 - DNA, 408 bp, synthetic construct
  misc_feature 1..408: note = Description of Artificial Sequence: Synthetic coding sequence
  source 1..408: mol_type = other DNA
atggtgctgggcaccatcgacctgtgcagctgcttcagcgccggcctgcccaaaacagaggccaactgggtgaatgtaatctccgatctgaagaagatagaggatctgattcagtcaatgcacattgacgccacactgtacaccgagagcgatgtgcaccctagttgcaaagttacagctatgaaatgtttcttactcgaattgcaggtgattagcctcgaatcaggcgacgcatcaattcatgatactgtagaaaacctcatcatactggccaacaactcgctgagtagcaatgggaatgtgaccgaatctgggtgcaaggaatgcgaagaactcgaggagaagaatataaaagagttcttgcagagctttgtgcatatagtccaaatgttcatcaacacaagttag

SEQ ID NO: 24643 - DNA, 408 bp, synthetic construct
  misc_feature 1..408: note = Description of Artificial Sequence: Synthetic coding sequence
  source 1..408: mol_type = other DNA
atggtgctgggcaccatcgacctgtgcagctgcttcagcgccggcctcccaaaaacagaagctaattgggtgaatgtgatttctgatctcaaaaaaatagaggatctgatccagtccatgcatatcgacgcgacactttacactgagtccgacgtccaccctagctgtaaggttacagctatgaaatgctttctgttggagctgcaagtgatttccctggaatcgggtgacgcttccattcatgatactgtcgaaaatttaattattctggcaaataactccttgagcagcaacggaaacgtgactgagtccggatgtaaggagtgtgaagaactggaggagaagaatatcaaagagttccttcaaagcttcgttcatattgtccagatgtttatcaacacatcatag

SEQ ID NO: 24644 - DNA, 408 bp, synthetic construct
  misc_feature 1..408: note = Description of Artificial Sequence: Synthetic coding sequence
  source 1..408: mol_type = other DNA
atggtgctgggcaccatcgacctgtgcagctgcttcagcgccggccttcctaaaactgaagccaactgggtcaacgttattagcgacctaaagaagatcgaagatctgatccaatccatgcacatcgacgccactctgtatactgagagcgatgtgcacccatcgtgtaaggtaacagcaatgaaatgtttcctgcttgagttgcaggtgatttccctggagtccggtgacgctagcattcacgatactgtggagaatctgatcatcctggcgaacaactcccttagtagtaacgggaacgtgaccgagtccggttgcaaagagtgcgaggagctagaagaaaaaaacattaaggagttcttgcagtcattcgtgcatatcgtgcagatgtttatcaatacatcgtag

SEQ ID NO: 24645 - DNA, 489 bp, synthetic construct
  misc_feature 1..489: note = Description of Artificial Sequence: Synthetic coding sequence
  source 1..489: mol_type = other DNA
atgcggatcagcaagccccacctgcggagcatcagcatccagtgctacctgtgcctgctgctgaattcccattttctgaccgaagccggcatccacgtctttattctgggctgcttcagtgctgggctgccgaagactgaggctaattgggtcaatgtcattagtgatctaaagaaaatagaagatctaattcagtccatgcacattgacgctaccctgtatacagaatcagacgtccacccctcctgcaaggtgacggctatgaaatgctttctgttggaacttcaggtcatttccctcgagagtggtgatgcaagcatccatgataccgtcgagaatctaatcattctcgcaaataactccctgtctagcaacggaaacgtgacggagagcggctgcaaggagtgtgaagaactggaagagaagaatatcaaggagttccttcagtcattcgtccacattgttcagatgttcatcaacacctcctag

SEQ ID NO: 24646 - DNA, 582 bp, synthetic construct
  misc_feature 1..582: note = Description of Artificial Sequence: Synthetic coding sequence
  source 1..582: mol_type = other DNA
atggccgccgagcccgtggaggacaactgcatcaacttcgtggccatgaaatttatcgataacaccctatatttcatcgcagaagacgacgagaacctggaatccgactacttcggaaagctcgaatccaagctctccgtgattcgaaatctgaacgatcaagtgctgttcattgatcagggcaatcgaccactgtttgaggacatgaccgactctgattgcagggataacgccccacgaaccatattcattatctcgatgtataaagattcacagccacgaggcatggccgtaaccatatcggtcaaatgcgaaaagatatctacattatcctgcgaaaataaaattatcagcttcaaggaaatgaatccccccgataatattaaagatacgaaatctgacatcatcttcttccagcggtcggtccctgggcatgataacaaaatgcaattcgagagttcgtcttacgaaggctacttcctcgcctgtgaaaaagaacgagatcttttcaagctgattttaaagaaggaagatgaactaggcgatcgcagtatcatgttcactgtgcagaatgaggattag

SEQ ID NO: 24647 - DNA, 570 bp, synthetic construct
  misc_feature 1..570: note = Description of Artificial Sequence: Synthetic coding sequence
  source 1..570: mol_type = other DNA
atggccgccgagcccgtggaggacaactgcatcaacttcgtggccatgaagttcatcgacaacactctctacttcatcgagaatcttgaatcagactatttcggcaagctggaatcaaaactatctgttattcggaatctcaacgatcaggtgctgtttatcgaccaaggcaatcgccccctctttgaggacatgaccgatagcgactgtcgggataatgccccccgaaccattttcatcatcagtatgtacaaggattcacagcctaggggaatggctgtgacaatcagcgtaaagtgcgaaaagattagcacacttagttgcgagaataagattatatcattcaaggagatgaatccccctgacaacattaaggacactaagtctgacataatctttttccagaggagcgtccctgggcatgacaacaagatgcagtttgagtctagctcatatgagggttatttcttggcttgcgagaaggaacgcgatcttttcaagctgattctcaagaaggaagatgagttgggggaccgctctattatgttcacagtgcaaaatgaagattag

SEQ ID NO: 24648 - DNA, 582 bp, synthetic construct
  misc_feature 1..582: note = Description of Artificial Sequence: Synthetic coding sequence
  source 1..582: mol_type = other DNA
atggccgccgagcccgtggaggacaactgcatcaacttcgtggccatgaagtttatcgataataccctatacttcatcgcagaggatgacgagaacctcgagtctgactactttggaaaattagagagcaagctcagcgtgatccggaatctgaacgaccaggttctgttcatagatcagggaaaccggcccttattcgaagacatgactgactccgactgtcgggacaatgcaccgcgcacaatattcataatttcaatgtacaaggattctcagcccaggggcatggctgtgactatctctgtcaagtgcgagaaaatttccacactgtcctgtgagaataagattatctcatttaaggaaatgaaccctccagataatatcaaagatactaaatcagacatcatattctttcagcgttccgttccaggacacgacaacaagatgcagttcgagtcatcaagctatgagggctattttctggcttgcgagaaagagagagatttgtttaagctaatcctaaaaaaagaagacgagctaggggatcgatctattatgttcacagtacagaatgaagattag

SEQ ID NO: 24649 - DNA, 1782 bp, synthetic construct
  misc_feature 1..1782: note = Description of Artificial Sequence: Synthetic coding sequence
  source 1..1782: mol_type = other DNA
atggagaccccccccctgccccccgcctgcaccaagcagggccaccagaaaccgctagactctaaggacgacaatacagagaagcactgcccagtgacagtcaatccctggcacatgaaaaaagcatttaaggtaatgaacgaactccggtcacagaatctgctgtgtgatgtaacaatcgtggccgaagatatggagatatctgctcaccgtgttgtcctagcagcctgttctccgtacttccatgcaatgtttaccggtgagatgagcgaatcacgggcgaagcgcgttcggatcaaagaggttgacggatggactttgagaatgttaatcgactacgtgtacacagccgagattcaagtaaccgaagagaacgtgcaggtgttgctgcctgcagccggtctgctccaactccaggatgtcaaaaaaacgtgctgcgaattcctggaaagccaacttcatcccgtgaactgtctaggaatccgggcatttgccgacatgcatgcctgcaccgatttactgaataaagccaacacctacgcagagcagcactttgccgacgtggtactgtctgaagagttccttaatctgggcatcgagcaagtgtgttcgttgataagctcagacaagctgaccatctcatccgaagagaaagtgtttgaggcagtcatagcttgggtgaatcacgacaaggacgttaggcaggagtttatggccagactcatggaacacgtgcgtctgcctctcctgccccgggagtacctggttcagagggtggaagaggaagccctggtcaaaaactcttcagcatgtaaggattacctgattgaggccatgaaatatcatcttctgcctaccgaacagcgaatactcatgaaaagtgtacgtactcgcctccgcactcctatgaatttgccaaagttaatggtggtcgtgggcgggcaggctccgaaagccattagatctgttgagtgttatgattttaaggaagaacgctggcaccaggtcgccgaactgccaagccgaagatgtagggcaggaatggtgtacatggccgggctggtattcgctgtgggtggattcaacggatctctgcgcgtgaggaccgtcgactcttatgatccagtgaaagaccagtggacctccgtagctaacatgcgtgaccggaggagcactctcggcgctgcagtacttaatggactgctatacgcagtggggggctttgacgggtctacaggattgtcatctgtagaggcgtacaatattaagtcaaacgaatggttccatgtggcgcccatgaacactcggcgcagttccgtgggcgtgggggtagtggggggcctcttatacgcggtcggtgggtacgacggggcgtctcgacaatgtctttcaacggtggaatgttataacgcgacgacaaatgaatggacttacatcgcggaaatgtctacccgcaggtcgggagctggagtgggagtgctgaacaatctgctttatgcggttggagggcatgatggcccattggtgagaaagtccgttgaagtatatgacccaaccaccaatgcctggcgacaggtggccgacatgaacatgtgcagaaggaacgccggagtttgcgccgtgaacggtttactctacgtggtgggaggcgacgatggcagctgtaatctagcaagtgtcgaatattataatccaactaccgataaatggactgtggtctctagctgtatgtccactgggagaagttatgccggcgttactgtaattgacaaacccctctag

SEQ ID NO: 24650 - DNA, 1131 bp, synthetic construct
  misc_feature 1..1131: note = Description of Artificial Sequence: Synthetic coding sequence
  source 1..1131: mol_type = other DNA
atgaaggagaacgtggccagcgccaccgtgttcaccctgctgctgttcctcaacacatgcctgctgaacggccaactcccaccaggcaaacctgagattttcaagtgccgatcccctaacaaggaaacgttcacatgctggtggcgccctggcacagacggcggactgccgacaaattattcactcacgtatcatcgcgagggcgagacactgatgcacgaatgtcctgattacatcaccggtggacctaatagttgccactttggcaagcagtacacctcaatgtggagaacctatataatgatggtcaacgccactaatcagatggggtcatctttttcggacgagctgtacgtggacgtgacttatattgtacagccggatccacccctagagctggccgtggaagttaagcagcccgaagaccgaaaaccgtacctttggataaaatggagtcccccgactctgatagacctgaaaaccggctggtttaccctgctctacgagattcggctcaagcccgagaaggctgccgaatgggagattcacttcgccgggcagcagactgagttcaaaattctcagccttcatccagggcagaaatacctggtccaagttaggtgtaagccggatcacgggtattggtcagcttggtcccccgccacttttattcagattccaagcgattttaccatgaacgacactacggtctggattagcgtcgctgtgctgagtgcagtgatctgcctgattattgtgtgggcagtggcgctaaagggctacagtatggtgacgtgcatctttcccccagtgccgggtcccaagattaaaggctttgatgctcatttgctggagaagggtaagtcagaggaactgctttcagccctgggatgccaagactttccaccaacctcagactacgaagacctgctggtcgaatatctggaagttgatgacagtgaagaccagcacctgatgtctgtgcattcaaaggagcatccatcacagggggatcccctgatgctgggtgcctcgcattacaagaacctgaagtcctacaggcctcggaaaatttcctcccagggcagactggcggtgttcaccaaggctactcttactaccgtccagtag

SEQ ID NO: 24651 - DNA, 414 bp, synthetic construct
  misc_feature 1..414: note = Description of Artificial Sequence: Synthetic coding sequence
  source 1..414: mol_type = other DNA
atgggcctgaccagccagctgctgccccccctgttcttcctgctggcttgcgccgggaattttgtgcacgggcataaatgcgatataacattacaagagatcatcaagaccttaaactcacttaccgaacaaaaaaatactaccgagaaggaaacattctgtcgcgctgccacagtactgaggcagttctactcacaccatgaaaaggacacccgctgtctgggcgctacagctcaacagttccacagacacaaacagctaatcagatttttgaagagactggatcgtaacctctggggattggccggcctcaattcttgcccagttaaggaagcaaaccagagtactctcgagaacttcctggaaaggctgaagaccatcatgagagagaagtacagcaaatgttcctcctag

SEQ ID NO: 24652 - DNA, 639 bp, synthetic construct
  misc_feature 1..639: note = Description of Artificial Sequence: Synthetic coding sequence
  source 1..639: mol_type = other DNA
atgaacagcttcagcaccagcgccttcggccccgtggccttcagcctgggactcctactagttctgcctgcagcctttcctgccccggtcccgcccggggaagacagcaaagatgtggcagcacctcatagacagccgctgacttcgagtgaaagaatcgataaacagatacggtacattctcgacgggatctctgccctgcggaaagagacctgcaataagtcgaacatgtgtgagagcagcaaggaagccctggctgaaaataatctcaatttacccaagatggcagagaaggatggatgctttcagtcgggttttaatgaagagacctgcctggtcaagatcataaccggattgttagaattcgaggtgtatctggagtatcttcaaaaccggttcgaaagcagtgaggaacaagccagggccgtccagatgtccactaaagtgctgattcagttcctccaaaaaaaagccaagaatcttgatgcaattactacgccggatcctaccacaaacgctagtctgctcacaaagctgcaagcccaaaatcagtggcttcaggacatgacgacacacctgatactcaggtcatttaaagagtttctgcagtcatcgttgcgtgcactgcgccagatgtag

SEQ ID NO: 24653 - DNA, 369 bp, synthetic construct
  misc_feature 1..369: note = Description of Artificial Sequence: Synthetic coding sequence
  source 1..369: mol_type = other DNA
atgtgcgagagcagcaaggaggccctggccgagaacaacctgaacctccctaaaatggcagagaaagatgggtgttttcaatccggctttaacgaggaaacctgcctggtcaaaattataactgggctcctggagtttgaggtatacctggaatacttacagaaccgcttcgagtcatcagaggagcaagcaagagctgtgcagatgagcaccaaggtccttattcaattcctgcagaaaaaagttggtgtgagcagtttcccccaactgggcgtgggcgaggaccgcctgaaagattcagtcctcgacaattcagggatgcagtgtcatttccaaaagagaaggctgcacgtgaacaagagagtttag

SEQ ID NO: 24654 - DNA, 639 bp, synthetic construct
  misc_feature 1..639: note = Description of Artificial Sequence: Synthetic coding sequence
  source 1..639: mol_type = other DNA
atgaacagcttcagcaccagcgccttcggccccgtggccttcagcctggggctgctgttagtcctgccagcggcatttccggccccggtgcctccaggggaagactcaaaagacgtggcagcgcctcataggcagccgttgacaagctcagaacggatcgataagcagattaggtatatcctggatggcatctccgcccttcgtaaagaaacatgtaacaagtcaaacatgtgcgagtcctctaaagaggctctggcggaaaacaacttgaatcttccaaagatggccgagaaagacggatgcttccagagcgggttcaatgaggagacttgcctggtgaaaattattaccgggctattagagttcgaagtctatttagaatacctccagaaccgttttgagagcagtgaggagcaggccagggccgtgcagatgtctacaaaggttctcatccagtttttacagaagaaggccaagaacctggacgccattacaacaccggaccccactaccaatgcttcccttctgacaaaattgcaggctcagaatcaatggctccaggatatgactacgcacttaattctgaggagttttaaagaattcctgcagagctcccttagggcactgcgccagatgtag

SEQ ID NO: 24655 - DNA, 597 bp, synthetic construct
  misc_feature 1..597: note = Description of Artificial Sequence: Synthetic coding sequence
  source 1..597: mol_type = other DNA
atgaacagcttcagcaccagcgccttcggccccgtggccttcagcttagggttgctcctggtcctgcctgcagcatttcctgcacccgtgccgcctggagaggactcgaaagacgtggctgctccccacagacagccactgacctcctccgagcgtattgataaacagatacggtatattctcgacggcatctctgccttgcggaaggagacttgtaataagtctaacatgtgtgagtcgtctaaggaggctttggctgagaacaacctaaatctgcccaagatggctgagaaagacggatgcttccaaagcggctttaacgaggagacctgcttggtgaagatcattactggccttttagaattcgaggtgtacctggaatacctacagaatcgatttgagtcatccgaggaacaggctcgggctgtccagatgagtaccaaggttctcatacagtttctgcagaagaaggttggagtgagctcattcccccagctcggcgttggtgaagaccgcctgaaggactctgtgttggacaacagtgggatgcaatgccacttccaaaaacggcggctgcatgtgaacaagcgcgtgtag

SEQ ID NO: 24656 - DNA, 759 bp, synthetic construct
  misc_feature 1..759: note = Description of Artificial Sequence: Synthetic coding sequence
  source 1..759: mol_type = other DNA
atgaacagcttcagcaccagcaagtgccggaagagcctggccctggagttacctgccgctgtcgaaccatgcgtcagagagggctgtgtcgcccaaggaggccttgcgggggggcaacagcagcgccaggctccaagctgcgctgtctcctcccccctgaggagtctgccctcaggtaccggggcatttggccccgtcgcattttcactgggtctgctgctggtcctccctgccgccttccccgccccagtccctcccggcgaggattccaaagacgtggccgcaccgcataggcagcccctaacctcctccgagcgaatagacaaacagatacgatacattctggatgggattagtgcacttcggaaggagacctgtaacaaatctaatatgtgcgaatccagcaaagaggctctcgcggaaaacaatttgaacctcccgaagatggctgagaaggatggttgtttccagtccgggtttaacgaagaaacctgtcttgtaaaaattataacaggactgctggagtttgaagtctacttggaatatctgcagaaccgcttcgagagtagtgaggaacaggcgcgggctgttcagatgagcactaaggtactcattcagtttctgcagaagaaagtgggagtgagctcttttccccagctcggcgtcggagaagataggttaaaggattctgtgctggataactctggcatgcagtgtcattttcagaaaagacgtcttcacgtgaacaaaagagtgtag

SEQ ID NO: 24657 - DNA, 459 bp, synthetic construct
  misc_feature 1..459: note = Description of Artificial Sequence: Synthetic coding sequence
  source 1..459: mol_type = other DNA
atgaacagcttcagcaccagcgccttcggccccgtggccttcagcctcggcttactgctggtcctgccagccgctttccccgcccctgtgcctccaggcgaggactcgaaggacgtagctgcaccacatagacagcccttgacttcttcggaacgcatcgataagcaaattagatatatcctcgatggcatatccgctcttaggaaggaaacctgcaataagtccaacatgtgcgagagttcaaaagaggcgctcgcagaaaacaatctcaacctccccaaaatggctgagaaggacggctgtttccagtccggctttaacgaagaaacctgcttggtcaagataataacaggactgctagagtttgaggtgtaccttgaatatctccaaaataggttcgaatcctccgaagagcaggcccgagccgtgcagatgtccaccaaggttctcattcagtag

SEQ ID NO: 24658 - DNA, 300 bp, synthetic construct
  misc_feature 1..300: note = Description of Artificial Sequence: Synthetic coding sequence
  source 1..300: mol_type = other DNA
atgaccagcaagctggccgtggccctgctggccgccttcctgatctctgctgccttgtgtgaaggcgctgtccttccccgctctgctaaggaactgcgttgccaatgcattaagacatacagcaagccctttcacccaaaattcatcaaagagctgagagtaattgagtctggcccccactgcgccaacaccgagattatcgtaaagctgtccgatggaagagagctctgccttgatccaaaggagaattgggttcagagggtcgttgagaagtttctcaaacgagccgagaattcatag

SEQ ID NO: 24659 - DNA, 2139 bp, synthetic construct
  misc_feature 1..2139: note = Description of Artificial Sequence: Synthetic coding sequence
  source 1..2139: mol_type = other DNA
atggccggcggccccggccccggcgagcccgccgcccccggcgcccagcacttcttatacgaggtccctccctgggttatgtgcaggttttacaaggtaatggacgccctcgagccagcagattggtgccagttcgcagcgctgatcgtccgagaccagacagagctacgcttatgtgagcgctccgggcagcgaacagcctccgtgctctggccctggatcaatcgcaacgccagggtcgctgaccttgtccacattctgactcacctgcagctgcttcgggcaagagatataattacggcttggcatccgcctgcacctttaccctcccccggcaccactgccccgcggcctagtagtattccagcacccgcagaagcagaggcttggagtcccaggaaattaccctcatccgcgagtacttttctttcccccgcctttccaggatcccaaacccattcaggccccgagctgggtttagtcccctcacccgcgtcactgtggcctcctccaccgagtccagccccttccagtacaaaaccaggtccagagtcctccgtttccttgttacagggagctaggcccttcccattctgttggccactctgcgagatctctaggggcacccataacttttccgaagagttgaaaattggagagggagggttcggttgtgtgtacagggccgtcatgcgcaatacggtgtatgcagtgaaaaggttgaaagaaaatgccgaccttgaatggacagccgttaaacagagctttttaacagaagtggagcaactaagccgctttcggcatcccaacattgtcgactttgctggctactgcgcacagaatggcttctattgtctggtatacgggttcctacctaatggatccctagaagatcggctccactgccagacacaggcctgtccacccctgagttggccccaacgcttggatatcttgctaggaaccgcaagggccatccagtttctgcaccaggacagtccttctctgatccatggcgacattaagagctctaatgttctcctggacgagcgactgaccccaaagctaggagatttcggcctcgccagatttagccgctttgccggctcctctccgtcgcagagcagcatggtggcccgcacccaaaccgtcaggggaacactggcctatctgccagaagaatatatcaagacaggcaggctcgcagtcgacacagacacatttagctttggcgtggtcgtcctggagaccctcgccgggcagcgcgccgttaaaactcacggcgcccgcacaaaatatctcaaagatctagtggaagaggaggctgaggaggccggagttgccctgcgttccacccagagcactctacaggctggcctagccgctgatgcatgggccgccccaattgcaatgcagatttacaaaaagcatctggatcccaggcccggaccctgtccacccgagctgggactgggacttgggcagctggcgtgttgttgtttacaccgtcgggccaaacgaagaccgcccatgacacaggtctacgagcggctggaaaaactgcaggccgtcgttgccggcgtgcctggacattccgaagccgcaagttgcattcctccgtctccacaagaaaattcatacgtaagctctactggcagggcacactctggcgcagctccctggcagcctttagctgcaccgtcgggggctagcgctcaagcagcggagcagttacagaggggacccaaccagccggtggagtctgatgagtcactgggcggcctcagtgccgccctcagatcttggcatctaactccctcttgccccttggatcccgccccgctgcgggaggctggctgcccacagggtgacacggccggggagtcctcctggggcagcggtcccgggtcccgccccaccgctgtcgaggggcttgctttgggctcctctgctagctcaagctccgagcccccccagataattattaacccagcaaggcagaaaatggtgcagaagctggctctgtatgaggacggtgccctggattctctccaactgctgtctagttcaagccttccaggactcgggttagaacaggatagacagggtcccgaagagagcgacgagtttcagtcatag

SEQ ID NO: 24660 - DNA, 2082 bp, synthetic construct
  misc_feature 1..2082: note = Description of Artificial Sequence: Synthetic coding sequence
  source 1..2082: mol_type = other DNA
atggccggcggccccggccccggcgagcccgccgcccccggcgcccaacacttcctctatgaagtgcccccttgggtcatgtgtcgcttctacaaagtcatggacgccttagagcccgccgactggtgccagtttggcggctggcggagagctgccggcgggcgagaagccaggggcctgctcgcacctacccccgacgccccacgacccgcagctgctcttatcgtgagagaccaaactgagctgagattatgcgaacggtccggccagaggactgccagtgttctctggccctggataaacaggaacgcaagggtggctgatctggtgcacatcctcacacacctccagctgctgcgggctcgggatatcataacggcctggcatccacctgccccactgcccagcccgggtacaactgcccctaggccatccagtatacctgcgccagcggaggccgaagcgtggtccccccgtaagctgcctagtagtgccagcacttttctgtccccagccttccctggaagccagacccatagtggacctgaactgggcttggtaccttctccagccagcctgtggccacccccaccatctcccgccccgtcaagcaccaagcctggtcccgagagctccgtgtctctccttcaaggggctagaccattccccttctgttggccgctctgtgagatctccaggggaacacataatttttccgaagaactgaaaatcggcgaaggcgggttcggctgcgtttaccgcgcagttatgcggaacacagtctacgcagtaaagaggctgaaagaaaatgctgacctagagtggaccgctgtgaaacagtcgttccttacagaggttgagcagctctccagatttcggcatccaaacatcgtagacttcgcagggtactgcgcccagaatgggttttattgtctggtgtacgggttcctgcctaatggctctttagaggaccggcttcactgtcagactcaagcttgccccccgctctcttggccgcagcgcctggacatcctactcgggactgcccgggcaatacagtttctgcaccaggactcgccatccctgatccacggtgacattaagtcctccaacgtccttctggacgaacgactgaccccaaaactcggcgatttcggtctagcacgtttcagccgatttgctgggagctcaccgtcccagtccagtatggtggccaggactcaaacggttcggggcacactggcctacctcccagaggagtacatcaagaccggaagactggccgtggataccgatacattctcatttggggtggtcgtgctagaaacccttgccgggcagagggctgttaagacacatggggctaggaccaagtatctgaaggatctagtagaagaggaggcagaggaagctggcgtggctcttagatccacccagtccacactccaggcgggtctggccgccgacgcctgggccgcacctatcgcaatgcagatctacaaaaaacatctaggacagctggcctgctgttgtcttcacagaagagccaagaggcgacctcccatgacccaggagaactcgtacgtgtcctccactggacgggcccattctggcgccgccccctggcaaccccttgccgccccctcaggtgcatccgcgcaagctgcggagcagctccaaagaggccccaaccaaccggtcgaaagcgatgaatccttgggagggctgtccgcagctttgcgcagttggcacttgacgcctagttgccccctcgaccctgccccgctccgcgaagccggctgcccccagggggacacagccggagagtccagttggggatccggcccaggcagcagacccaccgctgtggagggtctcgcgctcggatcttccgctagcagctcttctgaacccccccagattattatcaatccagcacggcaaaaaatggtacagaagctggcgttatacgaagatggtgccctggattctttacaactcctgtcgtcaagtagcctgcctgggctgggtttggagcaagatagacagggacccgaagagtcggacgagttccagtcctag

SEQ ID NO: 24661 - DNA, 2049 bp, synthetic construct
  misc_feature 1..2049: note = Description of Artificial Sequence: Synthetic coding sequence
  source 1..2049: mol_type = other DNA
atggccggcggccccggccccggcgagcccgccgcccccggcgcccagcactttctctacgaggtgccaccttgggtcatgtgcaggttttacaaagtcatggacgcactagaaccggctgattggtgtcagtttgctgcactcatcgtgagagaccaaacagagctgaggctctgcgagcgatcgggacagaggactgcaagcgttctttggccctggattaataggaacgctagagtcgccgatcttgttcacattcttacacacctccaattgctcagagcccgtgacattatcactgcctggcatccccccgcacctctgccatctcccgggactaccgctccacggcctagctctatccctgctcctgctgaggcagaggcttggtctcctaggaagcttcccagctcagcctctacatttctttcccctgcctttcctggctctcagacacactcaggaccggagcttggcctcgtgcccagtccagctagtctttggcccccgccaccttctcccgccccgtcatctactaaacctggccccgagagttcagtgtccctgctacagggagcacggccctttccattttgttggccattatgtgagatcagccgaggcacacacaatttctctgaagagctaaaaattggggaagggggattcggctgtgtatatcgagccgtgatgaggaacaccgtatatgcagtgaagaggctcaaagagaacgctgatctcgaatggaccgctgttaaacaatccttcctgacagaggttgaacaactgtcaagattccgccaccccaatattgtggacttcgctggatattgtgcgcaaaacggcttctattgtctcgtgtacgggttccttccaaacgggagcctagaggaccggctgcattgtcagacacaagcctgccctcctctgagctggccacaaaggctggacattctcctcgggaccgctcgcgcgattcagttcctgcaccaggattccccatctctgatccatggcgatatcaagagttcaaacgtgctactggacgaacgactgacccccaagctcggagactttggactggccagattttcacgcttcgctggcagttcaccttcgcaatccagcatggtggcaagaacacagacagttcgaggaaccttagcttatttgccagaggaatacattaagaccggaaggctggcagttgatactgacaccttcagcttcggcgttgtggtgctggagactcttgctggccagagggccgtcaaaacccacggggccaggactaagtacttgaaagatctggtcgaagaggaggccgaggaggccggagtggctctgagatcaacgcaatccaccctgcaggctggactggctgccgacgcttgggctgcaccgatcgccatgcagatatataaaaagcacttggacccccggccaggcccctgccctcccgaactaggcctcggcttaggtcagctagcttgttgctgtctccaccggcgagccaagaggcggcccccaatgacccaggagaacagttacgtgagttcaacagggcgcgcgcattccggagctgccccctggcagcctctggctgccccatctggagcgtccgctcaggccgcggagcagcttcagcgagggccaaatcagcctgtggagtcagacgagagtctcggtggtctcagcgcagcgctgcgcagctggcacttaacaccctcttgtcctcttgatcccgcacctctgagggaggccggctgtccacagggggacacagccggcgagtcatcttggggctccggccccggaagccgcccgactgccgtagaaggtctggctctgggaagctccgcttcctcgtcgagtgagccgccgcagatcatcataaacccagctcgacaaaaaatggtacaaaaacttgccctgtatgaggacggcgccttggactcgctgcaactgctaagcagcagctccttgcctgggcttgggctcgaacaagatcgccaggggccagaagagtccgatgagtttcagtcctag

SEQ ID NO: 24662 - DNA, 2127 bp, synthetic construct
  misc_feature 1..2127: note = Description of Artificial Sequence: Synthetic coding sequence
  source 1..2127: mol_type = other DNA
atggccggcggccccggccccggcgagcccgccgcccccggcgcccaacatttcctttatgaggtaccaccttgggtgatgtgccgcttctacaaggtcatggacgccctggaaccagctgattggtgccaattcggcgggtggcggagagcggccggaggaagagaggctcggggtttactagcacctaccccggatgctcctaggcccgcagccgccttgatcgtgagggatcaaacagaactccgattgtgcgaaagatcaggacagcggaccgccagcgtgttgtggccctggatcaaccgaaatgccagagtcgctgatcttgtccacattctcacccatctccagctactgagggcgcgcgacattattacggcatggcacccaccagcacccctgccctcccccgggacgaccgctcctagaccatcttctatcccagcccccgccgaggccgaagcttggtctccccggaagctgccaagtagcgcgagcacctttctctcaccggccttccccggatctcagacacattctggccctgagcttgggcttgtgccctcaccagcctccctgtggcctcctccccctagcccagcaccttcctccactaagcccggacctgagtctagcgtgagcctgctccagggggccaggccctttcccttttgctggccactatgtgagatatcgcggggaacacataacttcagtgaggagctaaagattggcgaaggagggttcgggtgcgtgtatcgagctgttatgagaaacactgtgtacgccgtcaagaggctgaaggagaatgccgacctggaatggaccgccgtcaagcagtctttcctgacggaggtggaacagctgagcagatttcggcacccaaacattgttgattttgcgggttactgcgcacagaacgggttttactgcttggtgtacggatttctgcccaacggttcacttgaagacaggttgcattgtcagactcaggcttgtccccccctatcatggccccaacggctggacatattactgggcaccgcaagggccatacagtttctacaccaggactccccaagcctgatccatggtgatattaagtcctccaatgtgctgctggacgaaaggctgacacccaaacttggcgattttgggctggcacgattctcaaggttcgctggctcttctccctcgcaaagctccatggtcgcccgtacccagacagtgaggggcacccttgcttaccttcctgaagagtacattaagaccggaagactcgctgtcgatacagatacattttcgtttggcgttgttgtcctggaaacactagcaggacaaagggctgtgaagacgcacggagcgcggaccaaatatttaaaagacctggtggaggaagaggccgaagaagctggcgtcgccctgaggtctactcaatctacactccaggccggcttagcggccgacgcttgggccgctcctattgctatgcagatctataaaaagcatctagatcccagacctggaccctgcccccccgagctgggtttgggcttggggcaactggcctgttgctgcctgcatcggagggccaagcggagacctcctatgacccaggaaaacagttacgtctcatcaaccgggcgggctcactccggtgccgctccttggcagcctctcgccgccccatccggcgcctcggcccaggctgcagaacagttgcagaggggccccaaccagcctgtggaaagtgacgagtccctggggggcctgtctgccgcccttcgatcttggcaccttacgccttcctgccccctggatccagcgcctctgagggaggctggatgcccgcaaggggatactgctggcgaatcttcttggggcagcggcccaggatccaggcctaccgccgtagaagggctcgctttgggcagcagcgcctcaagctcatccgaaccgccccagattatcatcaacccagcaaggcagaagatggtccaaaagctggctctatatgaggacggggccttggattctttgcagttactaagctcctctagcctcccgggcttgggcctcgaacaggacagacagggccccgaagaaagtgacgagtttcagtcctag

SEQ ID NO: 24663 - DNA, 1902 bp, synthetic construct
  misc_feature 1..1902: note = Description of Artificial Sequence: Synthetic coding sequence
  source 1..1902: mol_type = other DNA
atggccggcggccccggccccggcgagcccgccgcccccggcgcccagcactttttgtatgaggttccgccttgggtgatgtgtagattttacaaggtcatggatgctctggagcccgccgactggtgccagttcgctgcactcattgtgcgggatcagaccgagctgagactgtgtgagcgctctggtcaacggacagcctccgtgctatggccctggatcaataggaacgctcgggtggccgatctggtgcacatacttactcacctgcagctcctgcgcgctcgagatataataacagcgtggcaccctcccgcaccattaccctcacctggtaccactgctcccagaccatcgagcattccggctccagccgaagcagaggcttggtcacctcgaaagttgcccagtagtgcgtccactttcttgagcccagcttttccaggctcacagacccattctggccccgagctgggattagtgccaagtccagcatctctctggccgccccccccttctcctgccccgagttctaccaagcctggccctgagtcctccgtgagcctgctgcagggggcccggccttttcccttttgctggccactctgcgagatctccaggggaacacataactttagtgaggaacttaagattggtgagggtggcttcggttgtgtgtaccgggctgtaatgcggaacacggtctacgcggtcaagcgactcaaagagaacgctgatctggagtggactgccgtgaaacagtcatttctgactgaggttgaacagctcagcaggtttcgtcatccaaatatagtggattttgccggatactgcgcacagaacggattctattgcctggtgtatggattcctgccaaacggatccctcgaggatcggctgcactgtcagacacaggcctgtccaccactttcctggcctcaacggctcgacatcctcctaggtactgcacgtgcaattcagtttttgcatcaagattcccctagcctaattcacggcgacatcaagagctctaatgtgttgttggatgagcgcctaacccctaaactgggagacttcggtctcgccaggttttcccgattcgctggctccagcccctctcagtccagcatggtggcacgcacccagacagtcagaggtaccctggcatatcttccggaggagtatattaagactggaaggttagcggtcgacacagataccttcagctttggggtcgtcgtgctcgaaacactagcagggcagagagctgtgaaaactcacggcgcccgcaccaagtatctggtctatgaacggttggaaaagctacaggccgtcgttgctggcgtgcccgggcatagtgaagctgccagctgtatccccccatcaccacaagaaaactcatatgtctcaagtacagggagagcccacagtggggccgcgccatggcaaccattagctgcaccctcgggagcctccgcacaggccgcggaacaattgcagcgaggccctaaccaacctgtcgagtcagacgaatctttaggaggtctgtcagcagctctcagaagctggcatctgacgccaagctgtcccctggatcctgcaccacttcgggaagcaggctgccctcaaggagatacagcaggagagtcaagttggggatccggccctgggtccaggccaactgcggtagaaggactcgctctcggaagctcagcatcctcaagctccgagccaccccagattataatcaacccggccagacaaaagatggtgcagaagctggccctgtatgaagatggagctttggatagcctccaactgctgagcagcagctctcttccaggactgggcctcgaacaggatcgccaggggcctgaagagtccgatgaatttcagtcttag

SEQ ID NO: 24664 - DNA, 1245 bp, synthetic construct
  misc_feature 1..1245: note = Description of Artificial Sequence: Synthetic coding sequence
  source 1..1245: mol_type = other DNA
atgagcaagaagatcagcggcggcagcgtggtggagatgcagggcgacgagatgaccagaattatctgggaacttatcaaagagaaactcatattcccttacgtagagcttgacttacacagctatgacttgggaattgagaatcgtgatgccacaaatgaccaagtgacaaaagacgccgcggaggcaataaaaaagcacaacgtgggagtcaagtgtgccacgatcactcccgacgaaaagagggtagaggagttcaaacttaaacaaatgtggaagagcccaaatggaacaataagaaacatccttggcggtacagttttccgcgaggcgataatctgtaaaaacatcccgaggcttgtttctggatgggtgaagcctatcattatagggagacatgcgtatggtgatcagtacagagcaacagacttcgtggtaccagggccgggcaaggttgaaataacctatacaccctcagatggtacccaaaaagtgacatatcttgtgcacaatttcgaagagggcggcggtgtggctatgggcatgtacaaccaggataagtctatcgaggactttgcccacagctctttccagatggctctctctaaagggtggcctctgtacctgtcaaccaagaacacgatactgaagaagtacgacggcagatttaaagatatcttccaagaaatctacgacaagcagtataagagccagtttgaggcacaaaagatttggtacgaacatcggttaatcgacgacatggtggcacaggccatgaaaagcgagggaggattcatttgggcctgcaaaaattacgacggagacgtgcagagcgatagcgttgctcagggctacggctcgctgggaatgatgacatccgtcttggtttgtcccgacggcaaaacggtagaggcagaagctgcccatggtaccgtgacacggcattaccggatgtaccagaagggacaggaaactagcactaacccaattgcctctatctttgcttggacaaggggactggcacatcgggccaagctagataacaataaggaactggcgttttttgcaaatgcactggaggaggtttcaattgagacgattgaggccgggtttatgactaaggacttagcagcctgtatcaaaggtctgcctaatgtacagaggtccgactacctgaatacattcgaattcatggacaagctcggggagaatctcaaaatcaaactggcccaggctaagctgtag

SEQ ID NO: 24665 - DNA, 474 bp, synthetic construct
  misc_feature 1..474: note = Description of Artificial Sequence: Synthetic coding sequence
  source 1..474: mol_type = other DNA
atgagcaagaagatcagcggcggcagcgtggtggagatgcagggcgacgagatgacacgcataatctgggagttaataaaggaaaagctgattttcccttatgtggaactcgacctgcacagctacgatttgggaatcgagaatcgagatgcaaccaatgatcaagtgaccaaggacgcggcagaagcaatcaaaaaacacaacgttggggtgaagtgtgctaccataacaccggacgagaagagggtggaggagttcaagttgaaacaaatgtggaagagccccaacggcaccatccgcaacattcttggcggtaccgtgtttcgtgaggccattatttgtaagaatatccctaggctggtctccggatgggttaagcccataattatcggccgtcacgcctacggtgatcagtacagggcaactgactttgtggtgccaggtccgggaaaggttgagattacctatacttag

SEQ ID NO: 24666 - DNA, 1245 bp, synthetic construct
  misc_feature 1..1245: note = Description of Artificial Sequence: Synthetic coding sequence
  source 1..1245: mol_type = other DNA
atgagcaagaagatcagcggcggcagcgtggtggagatgcagggcgacgagatgacaaggattatttgggagttaattaaagaaaaactgatatttccgtacgttgaactagacctacactcatatgacctgggcattgagaatcgcgacgcgaccaacgaccaggtaaccaaggacgcagctgaggctattaagaaacacaacgtcggcgtgaagtgcgccactattactcctgacgagaaacgggtagaggagtttaaactgaagcaaatgtggaagtctccaaacgggaccatcagaaatattctggggggaacggtgttccgggaagccatcatttgtaaaaacatcccaagattggtgagtggatgggtgaaacctatcatcattggtcgacacgcctatggcgatcaatatagagcaacagattttgttgttccaggcccaggcaaggttgaaatcacatacacgccaagcgacgggacgcagaaagtcacttacctcgtgcataactttgaggagggagggggggttgctatgggcatgtataaccaggataagtctatcgaagacttcgcccacagtagcttccagatggccctctcaaagggatggccattgtaccttagtactaagaacaccatcctcaaaaagtatgacgggcgttttaaggatattttccaggaaatttacgacaagcaatacaagtcccagtttgaggcgcagaagatctggtatgagcatcgtctgattgatgatatggtcgcccaagccatgaaatctgagggcggatttatatgggcatgtaagaactatgacggcgatgtgcagtctgatagcgtggctcaagggtatggatccctgggcatgatgaccagtgtgctcgtatgcccagacggaaagaccgtcgaagcagaagccgctcacgggaccgtcacgaggcattacaggatgtaccagaaagggcaggaaacttctaccaaccctatagcaagtattttcgcttggacacgcggactggcccatagagctaagctcgacaataacaaggagctggcattctttgccaatgccctcgaggaagtcagtatagagactatcgaggccggttttatgacaaaagatctcgctgcctgcatcaaaggcctgcctaatgtacagagatccgactatctgaatacttttgagttcatggataaactgggggagaaccttaaaataaagctggcccaagcaaaattatag

SEQ ID NO: 24667 - DNA, 225 bp, synthetic construct
  misc_feature 1..225: note = Description of Artificial Sequence: Synthetic coding sequence
  source 1..225: mol_type = other DNA
atgagcaagaagatcagcggcggcagcgtggtggagatgcagggcgacgaaatgacacggattatctgggaactaatcaaagaaaagctgatattcccgtacgtcgaactcgatctacactcatacgatcttgggatagagaatcgggacgctaccaacgaccaggttactaaagatgctgccgaagcgatcaagaaacataacgtcggagtcaagtgtgcttag

SEQ ID NO: 24668 - DNA, 1245 bp, synthetic construct
  misc_feature 1..1245: note = Description of Artificial Sequence: Synthetic coding sequence
  source 1..1245: mol_type = other DNA
atgagcaagaagatcagcggcggcagcgtggtggagatgcagggcgatgaaatgacaaggatcatctgggaactaataaaggaaaaactgatctttccttacgtggagttggacctgcatagctacgacctcggaattgagaaccgggatgccaccaatgatcaggtgacgaaggacgctgctgaagcaatcaaaaagcataacgttggagtgaagtgcgccaccattacacctgacgagaagcgcgtagaggaatttaaacttaagcagatgtggaaaagtcctaacggaacaatacgtaacatcttgggcgggaccgtctttcgtgaagctattatatgtaagaacataccccgactggttagcggatgggtcaagccgataatcatcggaagacacgcctacggcgatcagtatcgcgcgacagacttcgtggtccctggacccggcaaggtggaaattacttataccccctccgatggtactcagaaggtcacgtaccttgttcataatttcgaggaaggtgggggcgtagcgatgggtatgtataatcaggacaagtccatcgaggacttcgctcatagctcttttcagatggcattaagtaagggctggccactgtacctgtcgacaaaaaacactatactgaaaaagtatgacggacgttttaaggatatctttcaggagatatatgacaagcaatacaagtctcagttcgaagcccagaaaatttggtacgagcaccggcttatagacgatatggtggcccaggccatgaagagcgaaggcggattcatttgggcttgcaagaattacgacggagacgtgcagtccgattccgtggcacagggatacggctcactcggaatgatgactagtgtcctggtctgcccagacgggaagactgtagaagccgaggcagctcatggaactgtgacaagacattatagaatgtaccagaagggccaggagacttcaaccaatcctattgcttcgattttcgcctggactaggggattggctcaccgggccaaactggacaataacaaagaactggccttttttgcaaatgcacttgaggaagtgtcaatcgaaacaatcgaagcaggattcatgacaaaagacctggcagcttgcatcaaaggcctcccaaatgtgcagagaagcgactacttaaacacttttgaattcatggataagctgggagagaacctgaaaattaagctagcacaggccaagctttag

SEQ ID NO: 24669 - DNA, 189 bp, synthetic construct
  misc_feature 1..189: note = Description of Artificial Sequence: Synthetic coding sequence
  source 1..189: mol_type = other DNA
atgagcaagaagatcagcggcggcagcgtggtggagatgcagggcgacgaaatgactagaattatctgggaacttattaaggagaagctgatctttccttacgtcgagctagacctgcacagctatgacttgggcatcgagaacagagatgccaccaacgatcaggtaacaaaagatgcagccgaatag

SEQ ID NO: 24670 - DNA, 1359 bp, synthetic construct
  misc_feature 1..1359: note = Description of Artificial Sequence: Synthetic coding sequence
  source 1..1359: mol_type = other DNA
atggccggctacctgcgggtggtgcggagcctgtgccgggccagcggaagccggccagcctgggcccccgctgcactaaccgcaccaacaagtcaggagcaacctcgaagacactatgcggataaaagaatcaaagtcgccaagccagtggtggagatggatggcgatgagatgacgagaatcatttggcagttcatcaaggagaagttaatactgcctcacgttgacattcagctgaaatatttcgacctcggcctgccaaatcgtgaccagaccgatgaccaagtaacaatcgattcagcgctggccacgcagaaatactcagtcgccgtgaagtgcgcaaccattaccccagatgaagcacgggttgaagagtttaaattaaagaaaatgtggaaatcacccaacggaaccattcgcaatatactcggcggaaccgtgttcagggagcctatcatctgcaagaacattccacgccttgtccctggatggactaagccaatcactatcgggcgccacgcacacggtgaccaatacaaagccaccgacttcgtagcggatagggctggcactttcaaaatggtgttcacaccaaaagacgggtcaggtgtcaaagagtgggaggtttataacttccccgccggcggcgttgggatgggcatgtataacactgacgagtccatctctggattcgcccattcttgttttcaatacgcaatccagaagaaatggccactgtacatgtctacgaagaataccatcctgaaagcatacgatggccggttcaaggacatcttccaggagatctttgataaacactataagacggactttgataagaacaagatctggtatgaacaccggttaatcgacgatatggtggctcaggttctgaaatcctctggcggcttcgtttgggcttgcaagaattacgacggggacgtccaatccgatattctcgcccaggggtttggctcacttggcctgatgacaagtgtcttagtgtgccctgacggcaaaaccattgaagctgaggctgcccacggaactgtcactagacactatcgtgaacaccaaaagggtcgccctacttccacgaatcccatagctagtatttttgcctggacccgcggattggagcacagaggcaaacttgatgggaatcaggatctgatcagatttgcacagatgctggaaaaagtttgcgtcgaaacagtcgagagtggagccatgaccaaggatctggctggctgcatccacggcctttccaacgtcaagttaaacgaacactttctgaatacaactgactttctagataccattaaatcaaatctggaccgagcgttggggcgccagtag

SEQ ID NO: 24671 - DNA, 969 bp, synthetic construct
  misc_feature 1..969: note = Description of Artificial Sequence: Synthetic coding sequence
  source 1..969: mol_type = other DNA
atgtggaagagccccaacggcaccatccggaacatcctgggcggcaccgtgtttcgggagccaatcatctgcaaaaacatcccacgcctggtgcccggctggactaagcctatcacaataggcaggcacgctcacggggatcaatataaagccaccgattttgtagctgatagagccggaacttttaaaatggtgttcacccccaaagacggctctggcgtaaaggaatgggaggtgtacaatttccctgccgggggcgtgggcatgggaatgtataatacagacgagagtatctcagggtttgctcactcctgttttcagtacgctatccaaaagaaatggcctctttacatgtctactaagaacaccatcctcaaggcctacgatgggcgcttcaaagatatctttcaggagatttttgataaacattacaaaacagacttcgacaagaacaagatttggtacgagcaccggctcatagatgacatggttgctcaggtgctcaaatctagcggaggctttgtgtgggcctgcaagaactacgacggtgatgtccagtccgacatcttggcacaggggtttggaagcctcggcctgatgacctctgtgttagtgtgtcccgatggtaagacaatcgaggccgaagcagcccacgggaccgtgactcgccactatagagaacaccagaagggcagacccacttctaccaacccaattgcgagcatttttgcttggaccagaggcctggaacatcggggtaagctcgatggtaaccaggacctgataaggtttgcgcagatgcttgagaaagtttgtgtcgagaccgtggagagcggagccatgacaaaggaccttgccggctgcatccacgggctgagcaacgttaaattaaatgagcactttctaaacactaccgatttcctggacacaatcaagtcaaatctcgaccgtgctcttgggcgtcagtag

SEQ ID NO: 24672 - DNA, 1203 bp, synthetic construct
  misc_feature 1..1203: note = Description of Artificial Sequence: Synthetic coding sequence
  source 1..1203: mol_type = other DNA
atggacggcgacgagatgacccggatcatctggcagttcatcaaggaaaagttgattctccctcacgtagatattcagttgaagtatttcgacttgggtctgcccaatcgagatcagacagatgaccaggtaaccatcgactcagctctggctacacagaagtactcggtggcagtgaagtgcgccacaattacaccggatgaagccagggtggaagaattcaagctgaaaaagatgtggaaatctcccaacgggacaattaggaacatcttaggcgggacggtctttcgggaaccgataatttgtaaaaacattcccagattggtgcccggttggactaaacccattaccataggccgccacgcacacggggaccagtacaaagctaccgatttcgtcgccgacagggcgggtacttttaaaatggtttttacacccaaagacgggagtggtgtcaaagaatgggaagtctacaacttccctgcaggaggggtcggcatgggcatgtataatacagatgagtctatcagcggcttcgcccactcctgttttcaatacgctatacagaaaaaatggcctctctacatgtcgactaagaatactatcctgaaagcatacgacggcaggtttaaagatattttccaggaaatcttcgataagcactacaaaacagattttgataagaataaaatctggtatgagcaccgcctgatcgacgacatggtggcacaggtgctgaagtccagcggcgggttcgtctgggcttgtaagaactacgacggagacgtgcagagcgacattttagcacagggctttggctccctcggactcatgactagtgtccttgtgtgtcccgacgggaagaccatcgaagcagaagctgcccatgggactgtcactagacactacagggagcatcagaaagggagacctacctccaccaaccctattgcttcaatatttgcttggactcgcgggctggagcaccgaggaaagctcgatggcaaccaggacctgatccggtttgcccaaatgttggaaaaggtatgtgtcgagacagtggagagcggcgcaatgacaaaagacttagcagggtgtatccatggactatcaaatgtgaagttgaacgaacatttcttgaacacaaccgactttctggataccataaagtccaacctggatcgagccctgggacgacagtag

SEQ ID NO: 24673 - DNA, 3657 bp, synthetic construct
  misc_feature 1..3657: note = Description of Artificial Sequence: Synthetic coding sequence
  source 1..3657: mol_type = other DNA
atgcggagcccccggacccggggccggagcggccggcccctgagcttactcctggcccttctgtgcgctcttcgagctaaggtatgcggtgccagtggccaattcgaactggagattctatcaatgcaaaacgtaaacggggaactgcagaacggcaactgctgtggcggagcacgaaacccaggagacaggaaatgtacacgcgacgaatgcgacacatactttaaggtgtgcctgaaggaatatcaatcccgggtgaccgccggcggcccttgttcatttggatccggttccactcctgtaatcggggggaatacctttaatttgaaagctagcaggggaaatgaccggaacaggattgtgctgcccttctcttttgcatggccccgcagctacaccttgcttgtggaggcttgggacagttcaaacgacactgtacagccggattcaatcatcgaaaaagctagccacagtggaatgatcaatccgagtcggcagtggcagaccctgaagcagaacacaggcgtggcccacttcgaataccagattcgcgtcacttgtgacgactattattatggatttggctgcaataaattctgccgtcccagagacgattttttcggacactatgcttgtgaccagaacggcaataaaacttgtatggaagggtggatgggccccgagtgtaaccgggccatctgccgacagggttgttcacctaaacatggtagttgtaagctaccaggtgactgccgttgccaatatggctggcagggcctttactgcgacaaatgtatcccgcaccccgggtgcgttcacggtatatgtaacgaaccatggcagtgtctctgcgagacaaactggggcgggcagctttgcgataaagacttgaattattgtggcactcatcaaccctgtttgaatgggggaacctgttctaacacaggacctgataagtaccagtgctcatgtcctgaggggtacagtggccccaactgcgagatagccgagcatgcatgtctgtctgacccatgccataatcgaggatcctgtaaagaaacctctctggggtttgagtgcgagtgttctcccggctggacaggtcccacttgctctaccaacatcgacgactgcagtcctaacaattgcagccatggtggcacatgtcaggacctggtcaatggatttaagtgcgtatgcccaccacagtggaccggcaagacttgccagctcgatgctaacgaatgtgaagccaagccttgtgtcaacgccaaaagttgtaaaaacctcattgcctcatactattgcgattgtctgccgggatggatgggtcagaattgcgatatcaatatcaatgactgtttgggacagtgtcagaatgacgcctcttgccgggacctggtgaacggttaccgatgtatttgtcctccaggctatgccggcgaccattgtgaacgagatatcgacgagtgcgccagtaacccttgcctgaatggtggacattgtcagaacgagattaacagatttcaatgcctgtgtcccaccgggtttagcggcaacctgtgtcaactcgacatcgattactgtgagccaaatccctgccagaatggagcacaatgctacaacagagcctccgactatttttgtaaatgtcctgaggactacgaaggaaagaactgttcccacctcaaggatcactgtcggacaacaccctgcgaagtgatcgatagctgcacggtggcaatggcaagcaacgatactccagaaggggtaagatatatatcctccaacgtgtgtgggccgcatggcaaatgcaagtcacaatctggcgggaagtttacctgcgattgcaataagggctttaccggaacttattgtcacgaaaacattaacgactgcgagtctaatccctgtagaaacggtggcacgtgcatcgatggggtgaacagctataagtgcatctgttctgatggatgggagggcgcctactgtgagacgaatattaacgactgttcccagaacccatgtcacaacgggggcacatgccgcgacctcgtgaatgacttttactgcgactgcaagaacgggtggaagggcaaaacctgccattcccgcgactcgcagtgcgacgaggcaacatgcaataacggcgggacttgttatgatgagggcgacgcatttaaatgcatgtgtccaggaggttgggaaggtactacctgcaacatagccagaaactcttcctgcctgcctaatccatgtcacaatggaggcacctgtgtggtgaacggagaatccttcacgtgtgtgtgtaaggaggggtgggagggccctatctgtgctcagaacactaatgattgcagcccgcacccgtgttataatagtggaacctgtgtggatggggacaattggtataggtgtgaatgtgcccctggtttcgctggccccgattgcagaatcaatattaacgagtgccagtcttccccgtgtgccttcggggccacttgcgtggatgagattaatgggtacagatgcgtctgcccaccagggcattcaggggcaaaatgccaggaggtttcaggtagaccgtgtatcactatggggagcgtcatcccagatggtgccaaatgggacgacgactgtaatacctgccaatgtctgaatggccgtatcgcttgcagtaaggtgtggtgtggacctagaccctgcctgctgcacaagggacacagcgagtgcccgagtgggcaaagctgcatcccaatcctcgatgatcagtgttttgttcatccttgcacaggcgtaggcgagtgtcggtcaagtagccttcagccagttaagaccaagtgtacaagcgacagttattaccaggataactgcgctaacataacttttacattcaataaagagatgatgtcgcctggactgacgactgaacacatttgctcggagctgcgcaatctgaatatactgaaaaacgtgagcgcagaatactctatctatattgcatgcgagccatccccctcagccaataacgagatccacgtggccatctcagccgaggatatcagagatgacggtaatccaataaaggagatcacagacaaaataatcgacctggttagcaagagggacggaaatagcagcctcatagcagccgtagcggaggtgagagttcagaggagaccgctaaaaaatcgaaccgattttctcgtgcccctcctcagctccgtgctaaccgtcgcctggatatgctgcctcgtgaccgccttctactggtgtcttcgtaaacggcggaagcccggtagtcacacacattccgcttctgaggacaacacaacgaacaatgtgagagagcagctgaaccaaattaagaaccccattgagaagcacggagctaacaccgtgcccatcaaggactatgaaaataagaattccaagatgagtaaaattcggacgcacaactccgaggtggaggaggacgacatggacaagcaccaacagaaggcccgctttgctaaacagcccgcctacaccctggtggatagggaggagaaaccgcctaacggcaccccaactaagcatccaaattggactaacaaacaggataacagagatctggagtctgctcagtctttgaataggatggagtacatcgtgtag

SEQ ID NO: 24674 - DNA, 3180 bp, synthetic construct
  misc_feature 1..3180: note = Description of Artificial Sequence: Synthetic coding sequence
  source 1..3180: mol_type = other DNA
atgatcaaccccagccggcagtggcagaccctgaagcagaacaccggcgtcgcacacttcgagtatcagattagagttacatgtgatgattattactacggtttcggctgcaacaagttttgtcggccaagagatgatttcttcgggcattacgcatgtgaccagaatggcaataagacctgtatggagggctggatgggtcccgaatgtaacagggccatttgccgtcagggctgctcgccaaagcatggatcttgcaaactgccaggggattgtcgctgccaatacggctggcagggcctctactgcgacaagtgcatcccacacccgggctgcgtgcacgggatatgcaacgaaccctggcaatgcttatgtgaaacgaactggggggggcaactgtgcgacaaagacctgaactattgtggtactcaccagccttgcctgaacggaggcacttgctccaacacaggacccgacaaatatcagtgttcatgtcccgaggggtactccggcccgaattgcgagattgcagaacatgcgtgcctttcggacccatgtcacaaccgggggtcttgcaaggaaacttctctggggttcgagtgcgagtgtagtcctggatggaccgggccaacatgctcaaccaatattgatgattgcagtccaaataattgcagccacggaggtacatgccaggatcttgtgaacgggtttaagtgtgtctgtccgcctcaatggacgggcaagacctgtcagctggacgccaacgagtgtgaggctaagccatgcgtaaatgccaaatcttgtaagaatttaattgcttcatactattgcgattgcctcccaggttggatgggccagaactgcgacattaatattaacgattgccttggccagtgtcaaaacgacgcctcatgcagggatctggtcaatggctatagatgcatctgtccacctggctatgcgggggaccactgcgaaagggatattgacgagtgcgcatcaaacccttgcctaaatggaggccactgccagaacgagataaataggtttcagtgtctatgcccaactggcttttcagggaatttatgtcaactggatattgactattgtgaacctaatccatgtcaaaacggagctcagtgttataaccgagcctccgattacttttgtaaatgtcctgaggattatgaaggcaagaattgttcacatctgaaggaccactgtcgcaccacgccctgtgaagtcatcgacagttgcactgtggccatggctagtaatgatactcccgagggtgtccgctatatctcttctaacgtctgtgggccacacggcaaatgcaaatcccagtcaggcggaaagtttacatgtgattgtaataaaggatttacagggacgtattgtcacgaaaatataaacgattgcgagagcaacccctgccgaaatggagggacctgcatcgatggggtaaattcttacaagtgtatctgttctgatggctgggaaggggcctactgtgaaacaaacatcaatgactgcagtcagaatccttgccataacggagggacatgtagagatctcgtgaacgatttttactgtgactgcaagaacggatggaaaggcaaaacatgccacagccgtgactcccagtgtgacgaagcaacgtgcaacaacggaggaacctgttatgacgagggagacgcatttaagtgcatgtgtcccggcggatgggagggcacaacatgcaacatcgcaaggaattcttcatgtctacctaatccttgccataacgggggcacttgtgtagtgaacggggagtccttcacttgcgtgtgcaaggaggggtgggagggcccaatttgcgctcaaaatacaaacgattgctctcctcacccatgctacaacagtgggacgtgcgttgatggggacaactggtacaggtgtgagtgcgcccctgggttcgcaggaccagattgtaggatcaatatcaatgagtgccaaagttcaccttgtgcctttggagcgacatgtgttgatgagatcaacgggtatcgttgtgtgtgtccacctgggcactcaggcgccaagtgccaggaagtgtctgggcggccctgtatcacaatggggagtgtcatccccgatggggccaagtgggatgacgattgcaatacatgtcagtgcctgaatggaagaatcgcctgctccaaggtgtggtgcggcccacgcccttgtcttttgcataaaggccattctgagtgtccgagtgggcaaagctgtatccccatcttagatgaccagtgttttgttcacccctgtaccggagtgggcgagtgccgctctagctctctgcagcctgttaaaactaagtgtacttccgacagctattaccaggataattgcgctaacatcacttttactttcaacaaggaaatgatgagccccggtctcaccacagagcatatttgtagtgaactgaggaacctgaacatcctgaaaaacgtttcggccgagtactctatttatatcgcctgtgaaccatccccctctgccaacaacgagatccacgtcgctattagcgcagaagacatacgcgacgacggtaacccaatcaaggaaattaccgacaagatcatcgatcttgtttccaagagagacggcaatagcagccttattgcggcagtcgccgaggtgcgggttcagagacggcccctcaaaaatcgcacagactttcttgtccctcttctgtcatccgtgctcacagtggcctggatttgttgcctggtcaccgccttttattggtgcctgagaaagcgcagaaaacccggcagtcatactcattcagcttccgaggataacacaaccaataatgtaagggaacagttgaaccaaattaaaaatccaatcgagaaacacggagctaatacagtgccaattaaggattacgagaacaaaaattcaaagatgtctaagattcgcactcacaatagtgaggtcgaagaagacgatatggataaacatcaacaaaaagcgaggttcgccaaacaacctgcctataccctagttgaccgggaagaaaaaccgccaaatggcacacctaccaaacatcccaactggaccaataagcaagacaatcgagatctcgagtccgcccagagtctgaaccgaatggagtacatcgtgtag

SEQ ID NO: 24675 - DNA, 3399 bp, synthetic construct
  misc_feature 1..3399: note = Description of Artificial Sequence: Synthetic coding sequence
  source 1..3399: mol_type = other DNA
atgggcatggcctgcctgaccatgaccgagatggagggcaccagcaccagctctatctaccagaatggagacatctccggcaacgcaaattccatgaaacagatcgaccctgtgttgcaagtttatctctatcacagccttggcaaaagcgaagctgattatcttacattccccagcggagaatacgtggccgaggaaatctgtatcgccgcctcaaaggcctgtggcatcactccggtctaccataacatgttcgccctcatgtcagagacagaacggatttggtatccgcctaaccatgtgtttcacattgatgaatctactcgacacaacgtcttgtacagaatccgcttctacttcccacgctggtactgctccggtagcaaccgggcttaccgtcacggtatcagccgcggtgccgaagcgcctttgttggacgactttgtaatgtcctatttgttcgcccagtggagacacgatttcgtccatgggtggattaaggttcccgttacgcacgaaactcaggaggagtgcctcggcatggctgttctggacatgatgcggatcgctaaggaaaatgatcaaactccactggctatctacaactctatcagttacaagaccttccttcctaaatgtattcgagccaagattcaggattatcatattctgacccgcaagaggattcgatatcgtttcagacgcttcatacagcagttcagccagtgcaaagcaaccgcaaggaatctgaagctaaagtatctgatcaatctcgagaccctccagagcgccttctacacagagaagttcgaggtgaaggaacctgggagcggtccctcaggtgaggagatatttgcaaccatcatcatcactggtaacggcgggattcagtggtccaggggcaagcacaaagaaagtgaaaccctgacagagcaggatcttcaactttattgcgacttcccgaatatcatcgatgtgagcatcaagcaggccaaccaggagggcagcaacgagtcaagggtcgtgaccattcacaagcaagatgggaaaaacttagaaattgaactgtccagcttgcgcgaagccctctcttttgtgtccttgatagacggatactataggctaactgctgacgctcatcattacctatgcaaggaggtcgctcctcctgcagttctggagaacatccaatccaattgtcacggtcccatctccatggactttgccatctcaaaactcaagaaggctgggaaccagacaggtctctacgtactgagatgctctcctaaagactttaacaaatactttctcactttcgctgtggagagggaaaacgttatcgaatacaaacactgtctgatcactaagaatgagaatgaggaatacaacttgagtggcactaagaaaaacttcagctcattaaaggatcttttaaactgctaccagatggagacagttcgcagcgacaacatcatttttcaattcactaaatgctgtcctccaaaacccaaagataaatctaacttgcttgtcttccggacaaatggggtgagtgacgtgccaacttcgcccaccctgcaacgtcctacccacatgaatcagatggtgtttcacaagatccgcaatgaagacctcattttcaacgagagcctggggcagggaacctttaccaagatcttcaagggagtacggcgcgaagtgggggattacgggcagcttcacgagaccgaagtcttgctgaaggttcttgacaaggcccatcgcaactactcagagtctttcttcgaggcagctagcatgatgagcaaactttctcataagcatctggtgctcaattacggagtatgcgtctgcggagacgaaaacattctggtgcaagaatttgtcaagtttgggtcattggacacatacctcaagaaaaacaaaaattgcatcaatatcctttggaagctcgaggtggctaagcagctcgcttgggcaatgcactttctcgaagaaaatactcttattcacgggaacgtgtgcgcaaagaacattttgcttatccgcgaagaagatcggaagactggaaatccgcccttcattaaattatctgatcctggcattagtatcaccgtgcttccaaaggacattttgcaggagcgaatcccctgggtccccccggagtgtattgagaaccccaagaacttgaatttggccactgataaatggagctttggaacaaccctgtgggaaatttgctcaggcggcgataaaccactcagtgcgctggactcccaacgcaagctgcagttctatgaggaccgacaccagcttcctgctccaaaatgggccgagttagcgaacctgatcaacaattgcatggattacgagccggattttaggcccagcttccgggccattatccgcgacctgaatagcctttttactcccgactacgaactgctgacagagaatgatatgctgccaaatatgcggataggtgcactcggattctcaggcgctttcgaagacagagaccctacacaatttgaggagcggcacctgaagtttctgcagcagctgggaaagggaaattttggaagcgttgaaatgtgccggtacgacccactccaggacaataccggagaggtggtcgccgtgaagaagctgcagcacagtacggaagagcacttacgtgacttcgaacgcgaaatcgagattctgaagagtttacagcacgataacatcgtaaagtacaagggggtgtgttacagtgcgggacggcggaacctgaagctgattatggagtacttgccctatggttctttgagagactacctccagaagcacaaggagcggatcgaccacattaagcttttgcaatatacttcgcagatctgtaaaggtatggagtacctggggactaagagatatatccacagggacctggccacaagaaatatcctggtcgaaaacgagaaccgggtgaagattggggattttggactcaccaaggtactaccacaggacaaggaatactacaaggtgaaggagccgggtgaaagtccaatcttttggtacgctcccgagagcctcaccgaatctaagttctccgtcgcctctgacgtatggagttttggcgtggttctttacgaactgttcacatacattgagaagagtaaatctccacctgccgaatttatgcggatgatcgggaatgacaagcaaggccagatgatagtttttcacctgatcgagttacttaaaaataatggacggttaccgaggcccgatggttgtcccgatgaaatttatatgatcatgaccgaatgttggaacaataacgtgaaccaaaggccctcatttcgcgatctggctttgcgcgtagatcaaatccgagataacatggctggttag

SEQ ID NO: 24676 - DNA, 3399 bp, synthetic construct
  misc_feature 1..3399: note = Description of Artificial Sequence: Synthetic coding sequence
  source 1..3399: mol_type = other DNA
atgggcatggcctgcctgaccatgaccgagatggagggcaccagcacttcttctatttatcagaacggcgatatttctggcaacgccaactccatgaagcaaatcgatccggtactgcaggtttatctgtaccacagtcttggcaagagtgaagcggactatctcacgttcccttcaggggaatatgtggctgaggaaatatgcatagccgctagtaaagcctgtggcataaccccagtatatcacaacatgtttgctctgatgagtgaaactgaacggatttggtacccaccaaaccacgtcttccacatagacgagagtacaaggcacaacgtcttgtaccggatccggttctacttcccacgttggtactgcagcggcagcaatcgagcctaccggcacggaattagtagaggcgccgaggctcccctgctggacgatttcgtgatgtcctacctctttgcccaatggcgccatgacttcgttcatggatggataaaagtgcctgttacacatgagactcaggaggagtgcctcgggatggctgtcctggatatgatgcgaatcgctaaggaaaacgaccaaactccgctagcaatctacaatagcatttcatacaagaccttcctgcccaagtgtatcagggcaaagatccaggattaccatattctgacaagaaaacgtatcaggtacaggttccggcggttcatccagcagttctctcagtgtaaagccacagccaggaacctaaagctgaagtatcttattaatttggagactttgcaatcagctttctatacagagaaatttgaggtgaaggaacctggttccgggccatcaggcgaggaaattttcgccacaatcatcatcacgggaaatggagggatacagtggagccgcggcaaacacaaagagtctgaaactcttaccgagcaagacctgcagttatattgtgattttccgaacattatagatgtgagcatcaagcaggccaatcaagaaggttctaatgagtcccgggtggttactatccataaacaggatggcaagaatcttgagatagagctctcctcgttgcgggaggctctcagctttgtatccctcattgatggttattacaggctgacagccgatgcccaccattatctctgtaaggaggtggcacctccagctgtgctggagaacatccagtcgaactgtcatggtccgatctccatggatttcgccatctctaaactcaagaaggctggcaaccagacaggcttatacgtcctgagatgctctccaaaggacttcaacaagtactttctgactttcgccgtggaacgtgagaacgtgattgagtacaaacactgcttaattaccaagaacgagaacgaggagtacaacttgtcaggaacaaaaaaaaacttcagttcccttaaagatctgctaaattgttaccagatggaaactgttcggagcgataatataatcttccaatttactaagtgttgtccgccaaaacccaaagacaagtcgaatctcctggtgttccggacaaatggcgttagcgatgtgcccacatctcccacactccagcgccccactcatatgaatcagatggtgtttcataaaatcaggaacgaagatctcatctttaacgagagtctcggccaaggtacatttactaagatcttcaaaggagtgcggcgcgaggtgggcgactacggacagctgcacgagaccgaggtcttgctgaaagtattggataaggcgcaccggaattactcagaaagcttcttcgaggcagccagcatgatgtccaagttgagccataagcacttggttctgaactatggggtttgtgtttgcggagacgaaaatattctggttcaagaattcgtgaaattcggctccctggacacatacctcaagaagaacaaaaactgtattaacatattatggaagctggaggtggcaaaacagttagcgtgggccatgcacttcttagaggaaaacactcttatccatgggaacgtctgcgccaagaatatcctgctcatcagggaggaggaccgaaagacgggcaatccaccctttataaaactgtctgaccccggcatctcaatcacggtcctgcctaaggatatcctccaggaacggatcccctgggtccctccagagtgtattgagaacccaaagaacctcaatctggcaacggataagtggagcttcgggacaactctgtgggagatatgttctgggggcgataaacctctgtcagcgctcgatagtcagcgaaagctgcagttttatgaagatcgccatcaactgccagcacctaagtgggcggagttggcgaatctgataaataactgcatggactatgaacccgatttccggccctcttttagggccattatcagagacctgaacagtttgttcaccccagattatgaattattaaccgaaaacgatatgctgccgaatatgagaattggcgccctcggattcagtggagcctttgaggacagagaccccacccaatttgaagaacgacatctgaaatttttacagcagttagggaaaggtaacttcggctcagtggagatgtgccgttacgaccccctccaggataacactggggaagtggtcgctgttaagaagttacagcactcaaccgaagagcacttgcgcgatttcgagagggagattgagatcctgaagtccctacagcatgataacatcgtgaaatacaagggggtgtgctacagcgccggacgaagaaatttgaagctgatcatggagtacttaccttatgggagtctgcgggattatcttcagaaacacaaggagaggattgaccatattaagctgctgcaatacacatcccagatctgcaagggaatggaatatctcgggactaaacggtacattcatcgcgacttggcaacgaggaacatcctggtggaaaacgaaaatagggtgaaaattggcgacttcggcttaacgaaggtgttaccgcaagataaggagtattataaggtgaaggaacccggggagagcccgatcttttggtatgctcctgagtccctgaccgaatcaaaattctcagtggcatccgatgtctggagttttggggtggtgttgtatgaactttttacttacatcgagaagtcgaaatccccccccgcagagttcatgagaatgattggcaatgacaaacaaggccagatgattgtttttcaccttatcgagctcctcaaaaacaatggacgcctgccacgtccagacgggtgcccagatgagatctacatgataatgacagagtgctggaacaataatgtaaaccagcggccctcttttcgagaccttgcactgagagtggaccagattagggacaacatggcaggatag

SEQ ID NO: 24677 - DNA, 2952 bp, synthetic construct
  misc_feature 1..2952: note = Description of Artificial Sequence: Synthetic coding sequence
  source 1..2952: mol_type = other DNA
atgagctacctgttcgcccagtggcggcacgacttcgtgcacggctggattaaggtgccagttacgcatgagacccaggaagagtgtttaggaatggccgtcctggacatgatgcggatcgccaaagaaaacgaccagacgccactggccatctataacagtattagctacaaaaccttccttccgaagtgtattcgagcaaaaatccaggattaccacattctcaccaggaagaggatcaggtatcgattcaggcgctttatacagcagttttctcagtgtaaggccacagccaggaacctgaaactgaagtacctcatcaatctcgaaacgcttcagtcagctttctataccgagaaatttgaggtcaaggaacccggctctggccctagcggagaggagattttcgctaccattatcatcacaggtaatggaggcattcaatggtcccgaggtaaacataaggagagcgaaactctgaccgagcaggatctgcagctctactgtgatttcccgaatatcatagacgtgagtattaagcaggctaatcaggaaggatctaatgaatcaagggtggtcacaattcacaagcaggacggcaaaaacttggagatcgaattgtccagtctgcgggaggctcttagctttgtttctctgattgacggatattacaggctcactgccgacgcccaccattacctgtgcaaagaggtggcgcccccagccgtactcgaaaatatccagtccaactgtcacggcccgatttctatggactttgcaattagtaagttaaagaaggccggcaatcaaaccggtctatacgtgctccggtgttcccccaaagactttaacaagtactttctgacattcgcagttgaacgggagaatgttatagaatacaaacactgtctcatcacaaagaacgaaaatgaggagtacaacctctcagggactaaaaagaacttctcctcattaaaggatctcctgaattgctaccagatggagactgtgaggtcggataacataattttccagttcaccaagtgctgtccccccaagcccaaggacaagagcaatttgctagtgttccgaacaaatggggttagcgatgtgcccactagccccaccttacaaaggccgacccatatgaatcaaatggtgttccacaagattaggaacgaggaccttatctttaatgagtctctcggccagggcaccttcacgaagatatttaaaggagtgcggagggaggtcggcgattacggacagcttcatgaaaccgaggtcctgttaaaggtgcttgacaaagctcacagaaattacagtgagagttttttcgaggccgcatccatgatgtcgaagctatcacataagcatcttgtgctgaattatggagtctgcgtgtgtggcgacgaaaacatcctcgtgcaggagtttgtgaagtttggatcattggacacctaccttaagaaaaataagaactgtatcaacatcttatggaaattggaagtggccaaacagctggcttgggccatgcattttctggaagagaatacattgatccacggcaacgtatgtgcgaagaatatcctgctgattcgggaggaagatcggaaaacaggcaatcctccttttataaaactgtcagacccgggtattagtatcacggtcctccccaaagacattttgcaggagcgcattccgtgggtccctccagagtgcattgaaaaccccaagaatctcaacctcgctaccgacaagtggtcctttgggacaacgctgtgggagatttgtagcgggggcgataagcctctcagcgccttggattctcaaaggaagctccagttttatgaagataggcaccagctccccgccccgaagtgggccgagctcgccaacctcatcaataactgtatggattacgaaccagattttaggccctcttttcgggccataatcagggatctaaatagcctcttcacaccagattatgaattgctgaccgagaacgacatgctgcccaatatgagaattggtgctttgggtttttctggcgcgttcgaggatagggacccaacgcagtttgaggagaggcacctgaaattcctgcagcagctggggaaaggaaatttcggctccgttgagatgtgcaggtatgatcccctgcaagataataccggggaggtcgtagccgtgaagaaactccagcacagcaccgaggaacatctacgcgactttgagagagaaatagaaattctaaagtctctccagcatgacaacattgttaagtataaaggagtgtgctacagcgccgggagaagaaatcttaaattgatcatggagtatctcccttatggcagcctaagagattatttgcagaagcataaggagaggattgaccacatcaagcttctccagtatacttctcaaatctgcaagggcatggagtatttgggaacgaagcggtatatacaccgggatctcgccacacggaacattctcgtggagaatgagaatcgcgtcaagattggagactttggcctgacaaaagtcttgccacaggacaaagagtattataaggtaaaagagccgggcgaatctcccattttctggtatgcccccgaatcccttactgaaagtaagtttagcgtagcatctgatgtgtggtcatttggtgtggttctgtacgagttgtttacctatatagagaagtccaaaagcccgcctgctgaattcatgcgtatgattggtaatgataagcagggccaaatgattgtgttccacttaatagaacttctgaaaaacaacggccgtcttccacggcccgatggctgtcccgacgaaatttacatgataatgactgagtgttggaataataacgtcaaccagcgcccatcttttagagatctcgccctccgggtggaccaaatccgggacaacatggccggttag

SEQ ID NO: 24678 - DNA, 732 bp, synthetic construct
  misc_feature 1..732: note = Description of Artificial Sequence: Synthetic coding sequence
  source 1..732: mol_type = other DNA
atgaccggcatcgccgccgccagcttcttcagcaacacctgccggtttggggggtgtggccttcatttccccaccctcgccgacctgatcgaacacatcgaggataaccacatagacactgatcctagagtcctggaaaagcaggagttgcagcagcctacatacgtagccctgtcttacattaatagattcatgacagacgccgctcgccgagaacaggagtcactgaagaaaaagatccaacctaaacttagcctcaccctatcttcttccgtgtcgaggggcaacgtcagcacccctcccaggcactctagtggctctctgactcctcctgtcactcctcctataactcctagctcctcatttcgcagcagtacgcccacagggtcggagtacgatgaagaagaagtggattatgaagagagtgattccgatgagtcatggaccactgagtcagctatctccagtgaggctattctgagctccatgtgtatgaacgggggtgaggaaaaaccatttgcttgtcccgtgccaggctgtaagaaacgctacaagaacgtcaacggcatcaagtaccacgctaaaaacgggcacagaactcaaattagggttcgaaaacctttcaaatgtcgatgtgggaaatcttacaagacagctcagggcctgcggcatcataccattaactttcatccccccgtctccgccgaaattatccgtaaaatgcaacagtag

SEQ ID NO: 24679 - DNA, 1044 bp, synthetic construct
  misc_feature 1..1044: note = Description of Artificial Sequence: Synthetic coding sequence
  source 1..1044: mol_type = other DNA
atgtgcaccaagatggagcagcccttctaccacgacgacagctacaccgccacagggtacgggcgggcccctgggggtctctcactccacgactataagctgctgaaaccctctctagctgtcaatttggccgacccctacagatcgcttaaggcccctggtgcgcgagggcctggaccagagggcggaggaggtggatcctacttcagcggacaggggagcgacactggagccagtctgaaattggcttcatccgagctcgaacgtctaatcgtgccaaactccaacggggttatcacgacaacacccacgcctcctggacagtatttctaccccagagggggcggcagcggcgggggcgcaggaggagcaggagggggtgtgactgaggagcaggaaggtttcgcggacggcttcgtcaaggcattagacgacctgcacaagatgaatcatgttacaccgcctaacgtcagcttgggcgcgaccggtggacctcctgccggaccaggaggcgtgtacgccgggccggagccccctccggtgtacacaaacctgtcctcttattctcccgcttccgcatccagcgggggcgccggagccgcagtgggcacgggcagctcttaccccacgaccaccataagctacttgccccacgctcctccgttcgccggaggtcacccggcccagctgggcctgggaaggggagcgtctaccttcaaggaggaaccacaaaccgtgccagaagccagaagcagggacgccaccccccctgtgtctcccattaatatggaggatcaggaacgaataaaagtggaaagaaagagactgaggaacaggctagccgctacaaagtgcaggaagaggaaactggaaagaattgcccgtctcgaggacaaggtaaagacactgaaagcagaaaatgcgggcttgagctctacagcggggctgctgcgtgagcaggtcgcacagctgaaacagaaggtcatgacccacgtgtccaatggttgtcagttgctcctgggcgtgaaaggccacgccttttag

SEQ ID NO: 24680 - DNA, 996 bp, synthetic construct
  misc_feature 1..996: note = Description of Artificial Sequence: Synthetic coding sequence
  source 1..996: mol_type = other DNA
atgaccgccaagatggagaccaccttctacgacgacgccctgaacgctagctttctgcctagcgagtccggaccatatggttactcaaacccgaaaattttaaagcagagtatgactcttaacctggcggatcccgtcggctcactgaagcctcacctcagagccaaaaattccgatctgctcacctcccccgatgtcgggcttctgaagctagctagtccggagcttgaaaggcttatcatccagtcatccaatggacatatcaccaccactcctaccccgacgcaattcctgtgcccaaagaatgtgaccgacgaacaagaagggtttgcagagggatttgtgcgggcattggccgagctgcattctcaaaacacgctccccagcgtgacaagtgccgcccagccggtgaacggagccggcatggtggcacccgccgtggcctcagtggctggcggatctggatctggaggattttcagctagcctgcacagtgagcccccggtgtacgcaaacctatctaacttcaaccctggtgccctgagctcaggcgggggggctcccagctacggtgccgctggactggccttccccgcacagccccaacaacaacaacagccaccacaccatctgcctcaacagatgcctgtccaacacccgaggttacaggccctgaaggaggagccgcagacagtccctgagatgccaggggagaccccgcccttgagcccaatcgatatggagtcccaggaacggatcaaagccgaacggaaacgaatgcgcaaccgtatcgctgctagcaagtgtcggaaacggaaactggaaaggatcgccagactggaggagaaagtcaaaactctcaaggcccagaactccgagctcgcgagcaccgcaaacatgcttcgggagcaagttgcccagcttaaacaaaaagttatgaaccacgtgaattccggatgtcagctgatgttgacccagcagctgcagaccttctag

SEQ ID NO: 24681 - DNA, 831 bp, synthetic construct
  misc_feature 1..831: note = Description of Artificial Sequence: Synthetic coding sequence
  source 1..831: mol_type = other DNA
atgcgggccccccacctgcacctgagcgccgccagcggcgcccgggccctggccaagcttttgcccctgcttatggctcaactatgggctgccgaagcggctctgttgccccagaatgatactaggctcgatccagaggcatacggttccccatgtgctcgcgggtcacaaccttggcaggtgtctctatttaatggattgtcatttcattgtgccggcgtgctcgtcgaccagtcctgggtactcactgccgcccattgcggtaataaaccgctgtgggctagggtgggtgatgatcatttgctgcttttgcagggtgagcagctgcgacgaactactaggagtgtggttcacccaaagtatcatcagggcagtgggcctatcctgcctcgtcgcactgatgagcacgacctgatgctgttgaaactggcccggcccgtggtgctgggccctcgtgtcagagcattgcagctcccgtacaggtgcgcccagccaggggatcagtgtcaggtggcaggatggggaactaccgcagcaagacgtgtgaagtacaacaaggggctcacttgttcatccataaccattctgtcaccaaaggagtgcgaggtcttctatcccggggtagtaactaacaatatgatttgtgctgggctggatagggggcaggatccatgccaatcagatagcggagggcccctggtgtgtgacgaaaccctgcaaggaatcctgagctggggcgtttacccatgcgggtccgctcagcacccagctgtgtatactcagatctgtaaatatatgtcctggatcaataaggtgatccgctccaactag

SEQ ID NO: 24682 - DNA, 831 bp, synthetic construct
  misc_feature 1..831: note = Description of Artificial Sequence: Synthetic coding sequence
  source 1..831: mol_type = other DNA
atgcgggccccccacctgcacctgagcgccgccagcggcgcccgggcgctggccaaactactgccattgctgatggcacagctgtgggcagcagaggccgcattgctgccacagaacgatacccgactcgaccctgaggcctacgggtcaccatgcgcaagaggctcgcagccgtggcaggtcagcctctttaacgggctgtcatttcattgtgccggagtgctagtcgaccagtcctgggtactaaccgcggcccactgcggtaacaagcccctctgggccagggtcggcgatgatcacctattgctcttacagggcgaacagttgaggcgcacaacaaggagcgtagtgcatccaaagtaccaccaaggtagcggacccatcctgcctaggcgaaccgacgagcacgaccttatgcttttgaagctggccaggcccgtcgtgttggggccacgcgtgcgtgctctgcagctgccctacaggtgcgcccagccaggagaccagtgtcaggtggccggatggggcaccaccgccgcacgccgcgtcaagtacaacaaaggtttgacatgcagcagcatcacgattctgtcccccaaggagtgtgaagtgttctaccccggcgtcgtgaccaataacatgatctgcgccggcctagaccgaggtcaggatccctgtcagagcgatagcggaggcccactggtgtgtgatgagaccctgcagggtatcctgtcttggggtgtttatccctgtggttctgctcagcaccctgccgtgtacacacagatttgtaagtatatgagctggataaacaaagtgatccgatcaaattag

SEQ ID NO: 24683 - DNA, 831 bp, synthetic construct
  misc_feature 1..831: note = Description of Artificial Sequence: Synthetic coding sequence
  source 1..831: mol_type = other DNA
atgcgggccccccacctgcacctgagcgccgccagcggcgcccgggccctggctaaattgttaccgctgctaatggcacaattgtgggcggcggaggccgctttgctgccccaaaacgacacaagattagacccggaggcctacgggagcccctgcgcccgcggctctcagccatggcaggtgagtctgtttaacggactctcctttcattgcgccggtgtgttggtcgaccagagttgggttttgacagccgctcattgcggcaacaaacccctgtgggctagagtcggcgacgaccatcttctccttttacagggggagcaactgcgtcgcaccactcggagcgtcgtgcaccctaagtaccaccagggatccgggcctatcctccctagaagaaccgacgaacacgatctgatgctgttgaaactggctcgccccgttgtccttggaccccgggtgcgtgcgctgcagctgccctacagatgcgcgcagcccggcgaccaatgtcaggtagctggatgggggacgaccgcggcccgccgcgtcaaatacaataagggtctgacctgttcatcgatcacaattctctcccccaaggagtgtgaggtgttttaccccggtgtcgtcaccaacaacatgatttgtgctggtctggacagaggacaggacccttgccagagcgatagtgggggccccttggtatgtgacgagacactccagggtatcctcagctggggtgtgtatccctgtggatccgctcaacaccctgccgtgtacactcagatttgcaagtacatgagctggatcaataaagtgatccgatctaactag

SEQ ID NO: 24684 - DNA, 657 bp, synthetic construct
  misc_feature 1..657: note = Description of Artificial Sequence: Synthetic coding sequence
  source 1..657: mol_type = other DNA
atgtgggtgcccgtggtgttcctgaccctgagcgtgacctggatcggcgccgccccgctcatcctgagtcgaattgtgggaggctgggaatgcgaaaagcactcacagccctggcaagttctagtcgcgtcaaggggccgggccgtttgcggcggtgtgttagtgcatccacaatgggtgctgacggccgcacactgcatccgcaagcccggcgatgatagctctcacgacctcatgttgctgcgcctatcagaacctgccgagttgactgacgctgtgaaagtgatggatcttcctactcaggaaccagccctcggaactacatgctatgcttctggctgggggtctattgaacctgaggagttccttacccccaagaaattgcagtgcgtcgatttacatgttattagtaatgatgtgtgtgctcaggtacacccacagaaagtgaccaaatttatgttgtgcgccgggcgttggacaggcggaaagagtacttgtagtggagactcaggaggtcccctcgtttgcaacggagttttacaggggattactagttggggaagcgagccctgtgcgctgcctgaaagaccgagcttatacacaaaggttgtacattacagaaaatggatcaaagacaccattgtggcgaacccctag

SEQ ID NO: 24685 - DNA, 1590 bp, synthetic construct
  misc_feature 1..1590: note = Description of Artificial Sequence: Synthetic coding sequence
  source 1..1590: mol_type = other DNA
atgagcaccaacgagaacgccaacacccccgccgcccggctgcaccgatttaaaaataaaggaaaagatagcactgagatgcggaggcggcggatcgaagtgaacgtggaactgcggaaagcgaagaaagatgaccagatgcttaaaaggcgcaacgtgtcaagttttcccgacgatgccacaagtcccctccaggagaataggaataaccagggcactgtaaattggagcgtagacgacatcgtgaagggcattaattcttccaacgtggagaaccaacttcaagctacacaggccgcacgcaaactgttaagtagggagaagcagccacctatagacaacattattcgggcaggtcttatcccgaaatttgtatctttcctgggacggaccgactgtagcccaatccaattcgaatctgcctgggccctgaccaatattgcgtctgggacctcagagcaaacaaaggccgtcgttgacgggggagcaatcccagccttcataagcctgctggctagcccgcacgctcacatcagcgagcaggctgtgtgggcactgggaaatattgccggcgacgggagcgtgtttagagatctagtcatcaaatatggcgccgtggacccacttctggccctactggcggtgccggatatgtcctcactcgcctgcggatatctgcgtaacctgacctggaccctgagcaatttgtgtcgcaataaaaaccctgccccgcctattgatgctgtggaacagatcctgcccacgctcgtgcggttattacaccatgacgatcccgaagtgctagcagatacatgttgggctattagttacctgactgacggccccaatgagcgcatcgggatggtcgtgaaaactggggtggttcctcagcttgtcaaattattgggcgccagtgagctgccgatagtgacacctgctctgcgggcaatcggcaatattgtaaccggcaccgatgaacaaacacaggttgtgatagatgccggggcccttgccgtgtttccatcacttttaaccaatcccaaaaccaatattcagaaagaggcgacttggaccatgtctaacattactgctggccgacaggaccagatacaacaagtggtcaatcatggactcgtgccctttctagtctctgttctcagcaaggcggacttcaagacgcagaaggaagccgtgtgggcagtgacaaattatacttctggtggcaccgtcgagcaaatcgtgtatctggtccactgtggcattatcgaacccctgatgaacctcctgacagccaaagacactaaaattatcctcgttatactggatgctattagcaatatcttccaggcagccgaaaagttaggagagaccgagaaactctcgattatgattgaagaatgtggggggctcgataaaattgaggccctgcagaaccacgagaatgaatccgtttacaaagcctctttgagtttgattgaaaagtacttttcagtggaggaagaggaggaccagaacgtggtgcccgagaccacttctgaggggtacacctttcaggtacaagacggggcccccgggacgtttaacttctag

SEQ ID NO: 24686 - DNA, 1590 bp, synthetic construct
  misc_feature 1..1590: note = Description of Artificial Sequence: Synthetic coding sequence
  source 1..1590: mol_type = other DNA
atgagcaccaacgagaacgccaacacccccgccgcccggctgcacagatttaagaacaaaggcaaagactcaactgagatgagaaggaggaggatcgaagttaatgtggagctccggaaggcaaaaaaggacgatcaaatgttaaaacggcggaatgtctcctctttccctgacgatgccacttcgcccctacaagaaaatcgaaacaatcagggtaccgttaattggtcagtggatgatatagtcaagggtattaactctagcaacgtggagaaccagctgcaggctacgcaagctgctcggaaattactgagccgggagaaacagcctcctatcgataacattatccgggcgggcctgattccgaagttcgttagctttctgggacggactgattgcagtcccattcagttcgaatccgcgtgggctctgacaaatatagcctccggtacaagcgaacagaccaaggcagtggtcgatggaggcgcgatcccagcatttataagcctgctggctagtccccacgctcatatttccgagcaggccgtttgggctctggggaacatagcaggcgatggtagtgtattccgggacctcgtaatcaaatatggcgcagtcgatcctttgctggccctcctagcagtcccggacatgagctcccttgcatgtggctatctaaggaatctgacttggacactgtccaatctctgtcgaaacaagaatcccgcgcctccaatagatgccgtagaacagattttacccaccctagtacgtttgctccaccatgacgacccagaagtgctggctgatacatgctgggctattagctacttaactgatggacctaacgaacgcattggaatggtggtgaagactggggttgtgccacaactggttaagctcctaggagcctcagaacttccaatcgtaactccagccttaagagcgatcggtaacattgtgaccggtaccgacgaacaaactcaggtcgtgattgacgctggcgccctggccgtttttccttctctcttgaccaaccccaaaaccaatattcagaaagaagccacttggacaatgtccaacattactgccgggcgccaggatcagatacagcaggtcgttaatcacgggctcgtgccatttctggtaagtgttctatctaaggctgactttaaaacacagaaagaggccgtgtgggccgtgaccaattataccagcggtgggaccgtggagcagatcgtctacttagtgcactgcggaattatagaacctttaatgaatcttttgaccgctaaagatacaaaaattatactggtaatcctagacgcaatatccaacatctttcaggccgctgagaagctgggagagaccgaaaagttgtcgataatgatcgaggaatgcggcgggctcgacaaaatcgaggccctgcagaaccatgagaacgaaagcgtgtacaaagcctccctgagtctcatagagaagtacttttccgtcgaggaagaagaggaccagaacgtcgtgccagagacgacaagtgagggttacacatttcaagtgcaggacggggctcccggaacttttaatttctag

SEQ ID NO: 24687 - DNA, 1968 bp, synthetic construct
  misc_feature 1..1968: note = Description of Artificial Sequence: Synthetic coding sequence
  source 1..1968: mol_type = other DNA
atgcccctgaagtggaagaccagcagccccgccatctggaagttcccagtgcctgtcctgaaaaccagtagatcgactcctttatcccctgcctacattagccttgtggaagaagaagaccagcatatgaaattgtccctgggcggcagtgagatgggtttgtccagccacctgcagagttctaaggctggccccacccgtatttttacaagcaacacccattcctcagtcgtgctgcaagggttcgatcaattacggctagaaggcctgctctgcgatgtgactctaatgccgggtgacactgacgacgcttttccagtgcacagagtgatgatggcttctgctagcgactacttcaaggccatgttcactggcgggatgaaggagcaggatctcatgtgtatcaagctccatggtgtctccaaagttggtctgcgtaaaatcattgatttcatatacaccgccaaactaagtctgaacatggacaatctgcaggataccctggaggcagcctctttcctgcaaattctgcccgtattggacttctgcaaggtattcctaattagcggtgtgacactggataattgtgtcgaggttggaagaatcgcgaatacttacaacttaaccgaagtcgacaaatacgtcaattctttcgtactaaagaacttcccagccctgttatccaccggggaattcctgaaacttccctttgagaggctggcctttgttctgtcgtccaacagcctcaaacactgcaccgagttggaactcttcaaggccacctgtagatggctgcgactggaggagccacgcatggatttcgccgctaagttgatgaagaatatccgatttcctctgatgaccccccaggagctgatcaattatgtccaaactgtggattttatgcgaaccgacaatacttgtgtgaacctcctcctggaagcctccaattatcagatgatgccctatatgcaaccggttatgcagtctgaccgaaccgctatcaggtccgatacaacacatctcgtgactctcgggggagtcctgagacaacaactcgtggtgtctaaagagctgagaatgtatgatgagaaggcccacgagtggaagtccctcgcacccatggacgcaccccgctatcagcacggcatcgccgtgatcgggaacttcctgtacgtcgtcggcggccagtctaattatgacaccaaaggaaagacagccgttgacacagtgtttaggttcgacccaagatacaataagtggatgcaagtggcgtctcttaatgaaaaacgcacctttttccacctctccgccctcaaaggatatctatacgccgtcggggggagaaatgcggcaggggaattacccacggttgaatgctacaaccctaggaccaatgagtggacttacgtggctaagatgtccgagccacactatgggcacgctgggaccgtatacggaggcgtgatgtatatctctggaggtatcacccatgatacatttcaaaaggagctcatgtgcttcgatcctgatacagacaagtggatccaaaaggcccccatgacgaccgtgcgcggtttgcattgtatgtgcactgtgggtgagaggttatacgtgattggcggcaaccactttcgcggaaccagtgactacgatgacgtactgagctgcgagtactatagccctattctcgatcagtggacaccgattgctgccatgttacgcggccagtcagatgtgggcgtggccgtttttgagaataaaatatatgtagtcggagggtactcttggaataatagatgtatggtcgaaatagtccagaagtatgaccccgacaaagacgagtggcacaaggtgttcgatcttcctgagtccctcggagggattcgagcatgtaccttaaccgtttttccccccgaagagaccacacccagtccgagccgggagagccccttgtccgccccctag

SEQ ID NO: 24688 - DNA, 1815 bp, synthetic construct
  misc_feature 1..1815: note = Description of Artificial Sequence: Synthetic coding sequence
  source 1..1815: mol_type = other DNA
atgggcctgagcagccacctgcagagcagcaaggccggccccacccgtatcttcacttcaaatacacacagctctgtggtgttgcagggctttgaccaactgcgccttgagggcttgctatgcgatgtcactttgatgccgggagacactgatgacgcttttcctgtgcacagagtgatgatggcctcagcgtctgactattttaaggccatgttcacaggtgggatgaaggaacaggacttaatgtgcatcaaactccacggcgtgagtaaggtggggcttaggaaaataattgacttcatctatacagccaagttgtccctgaacatggataacctccaggatactttggaagcagcatctttcttgcagatcctgccagtgcttgacttctgcaaggtattcctaatttcaggggtgacccttgataattgtgtggaggttggacgcatagctaacacatataacttgacagaggtggacaagtacgttaactctttcgtgctgaaaaatttcccggctctcctgtccacgggcgagttcttgaagctgccttttgaacgactggcctttgtcctttctagtaacagcctcaagcactgcactgagttggagttgtttaaggccacctgtcgttggttgcgattggaggagcctaggatggactttgccgctaaactcatgaagaacattaggttccccctgatgactccccaagaactcatcaactatgtgcagaccgtggacttcatgaggaccgacaatacatgtgtcaacctgctgctcgaagcaagcaattaccagatgatgccctacatgcagcccgtgatgcagtcagaccgtacagctatcagaagcgacacaacacatctggttactctcggcggcgtcctgcgtcagcagctggttgtaagcaaggagctacgaatgtacgatgaaaaggcccacgagtggaagtccttggcccctatggatgcacctaggtaccagcacggcatcgccgtgatcggaaacttcctatatgtggtgggcggccagagtaattacgacacgaagggtaagactgctgtggacacagtgttcagatttgatccgaggtacaataaatggatgcaggtggcctctttgaacgagaaacggactttttttcacctgtcagccctaaagggttacctgtacgctgtgggcggtaggaacgccgccggagagctacctactgtcgaatgttataaccccagaaccaacgagtggacttatgtcgcaaagatgtcagagccccactacggccacgccgggaccgtgtatggaggtgtaatgtacatcagcgggggaataacccatgataccttccagaaggagctgatgtgttttgaccccgatactgacaagtggatacagaaggcccccatgaccaccgtgagaggcttacattgtatgtgtaccgtcggagaacgactgtacgtgatcggcgggaaccatttcagagggactagtgattacgatgatgtgctatcctgcgagtactattctcctatcctggatcagtggacccctatcgcagccatgctgcggggtcagagcgacgtgggcgtggccgttttcgaaaacaagatttacgtagtgggcggctacagttggaacaaccgctgcatggtagagattgtgcagaagtacgatcctgacaaagacgagtggcataaagtgttcgacctccctgagtcactcggagggataagagcctgcactctcaccgtcttcccacccgaggagactactccatctccttctcgtgagtccccactgtcagccccctag

SEQ ID NO: 24689 - DNA, 1815 bp, synthetic construct
  misc_feature 1..1815: note = Description of Artificial Sequence: Synthetic coding sequence
  source 1..1815: mol_type = other DNA
atgggcctgagcagccacctgcagagcagcaaggccggccccacccgtatattcacctctaacacgcattcatctgtggtgttgcagggcttcgaccagttgaggctggagggactcctttgcgacgttactttgatgccaggcgatactgatgacgcatttcccgtacaccgcgtcatgatggcttccgcctccgattattttaaagcaatgttcacaggaggcatgaaggagcaggacctcatgtgtatcaagctgcacggggtatcaaaggtgggcctgagaaagatcattgactttatctacacagctaaactttccttgaacatggataaccttcaggataccttggaggcagccagtttcctccagatcctgcctgttttggatttctgcaaggtgttcctgatttccggagtgactctggacaactgtgtcgaagtggggaggattgcaaatacttataatttaacagaggtggataaatacgtcaactcttttgtgctgaagaacttcccagccctgctgagcacaggtgagttcctcaaactccctttcgagagactggcttttgtactgagctccaattctctgaagcactgtacagaactggagttgtttaaggccacttgtcgatggctccggctcgaggagcccaggatggacttcgcagctaagcttatgaaaaatatccgatttccattgatgactcctcaggagctgatcaactacgtgcaaacagtagattttatgagaaccgataatacctgtgtgaatctactgctggaggcatccaactaccaaatgatgccctacatgcaaccggtgatgcagtccgaccggacggcaataagaagcgacaccactcacctggtaacactcgggggggtcctgaggcaacaacttgtcgtgagcaaggaacttaggatgtacgacgagaaggcccatgaatggaagagtttggccccaatggacgccccaagatatcagcacggtatagctgtcataggcaacttcttgtacgttgtcggtggccaatcgaattacgacactaaggggaaaacggccgtcgataccgtgtttaggtttgatcccaggtacaacaagtggatgcaggtagcttcattgaacgagaaacggaccttctttcatttatcagccttaaaagggtatctttatgccgtcggcggccgcaacgccgccggcgagttgcccacagtcgagtgttacaacccgaggaccaacgagtggacctacgtagccaagatgtctgagcctcattacggacacgctgggacagtgtacggcggagtgatgtacatttcaggaggcatcactcacgacacatttcagaaagagctgatgtgtttcgaccccgacactgataagtggatccagaaggcccctatgacaaccgtaagaggactgcactgtatgtgcacagtaggcgagaggctgtacgtgataggaggcaatcatttcagggggacctctgattacgacgacgtcctgtcctgcgaatactacagcccgattctggatcaatggacacctatcgccgcgatgcttcggggccagtccgacgttggagtggcggtgtttgagaataagatatatgtggttggcgggtactcttggaacaaccgctgtatggtcgagattgtccagaagtacgacccagacaaggacgagtggcacaaagtgttcgacttgcccgaatctttgggtggtatcagggcatgcacactcaccgtgtttccccctgaagagacaactccaagcccctctcgcgaaagccccctgagcgccccatag

SEQ ID NO: 24690 - DNA, 1815 bp, synthetic construct
  misc_feature 1..1815: note = Description of Artificial Sequence: Synthetic coding sequence
  source 1..1815: mol_type = other DNA
atgggcctgagcagccacctgcagagcagcaaggccggccccaccagaatcttcacctccaatactcacagttccgtggtgctacaagggttcgatcagttacgcctggaaggtctgttgtgtgacgtaaccctgatgccaggcgacacggacgatgcttttcccgtgcacagagtcatgatggcttccgcttccgattacttcaaggctatgttcacgggtggcatgaaagagcaagacttgatgtgtatcaagctccacggtgtttcaaaagtgggcttgcggaaaattatcgattttatctataccgctaagctcagcctcaacatggataacctccaggatacacttgaggccgccagtttcttgcagattctcccggtacttgacttttgcaaagtgtttctgatcagtggcgtcacactcgataactgtgtcgaggtcggtaggatcgccaatacttacaacctcaccgaagtggataaatacgtcaacagctttgtgctgaagaactttccggcactcttaagtaccggcgagtttcttaaactgccctttgaacgtttagctttcgtactgtcctcgaattctctgaagcactgcacagaactggaactctttaaagccacctgtagatggctgcgtctcgaggaacctaggatggacttcgccgccaagctcatgaaaaacatcaggttccccctcatgactccccaggagctgatcaattatgtccagacagtggactttatgcgcactgataacacctgcgtcaatctgctcctggaggcgagtaattaccaaatgatgccgtatatgcaacctgtcatgcaatcggatcgcacggccattagatcagatactactcaccttgttactctcggtggggtgctccgacagcagctggtggtgtccaaagagctgcggatgtacgacgaaaaggcccatgaatggaagtccctcgctccaatggatgccccaagataccagcatggtatcgctgtcataggaaattttctctatgtggtcgggggccaatcaaactacgatactaaaggaaagaccgctgttgatactgtgtttcgcttcgacccccggtacaataaatggatgcaggttgcctccttgaacgaaaagcgcacttttttccacttatccgccctgaaggggtacctgtatgccgttggcggtagaaacgcagcaggcgaacttcctaccgtcgaatgttataatccccgaaccaatgaatggacgtacgtggcaaaaatgtctgaacctcattacgggcatgcaggcaccgtgtatggaggagtgatgtacatctctggaggaattactcatgacaccttccagaaggagctgatgtgcttcgaccccgatacggataagtggatacagaaggctccaatgacaacagtacggggattgcactgtatgtgcacagttggtgaacgtctctacgtaatcggagggaatcactttcgaggaacaagcgattacgacgacgttctctcttgtgagtactacagccccatattagatcagtggactcccatcgctgctatgttgagaggccagagcgatgtaggggttgccgtgtttgaaaacaaaatatatgtcgtgggaggatattcctggaacaatcgatgcatggtcgaaatcgtgcagaagtatgatccggataaagacgaatggcataaggtatttgacctgcctgagtccctcggcggtatcagagcatgcactctcacagtgttcccgccagaagaaaccactccatcccccagtagagagagtcccctgtctgccccatag

SEQ ID NO: 24691 - DNA, 1815 bp, synthetic construct
  misc_feature 1..1815: note = Description of Artificial Sequence: Synthetic coding sequence
  source 1..1815: mol_type = other DNA
atgggcctgagcagccacctgcagagcagcaaggccggccccaccaggatttttacttccaatacccactcaagtgtggtgctccaggggtttgaccagttgcggctagaggggctgctctgtgatgttacgctgatgcccggggatactgacgacgcctttcctgtgcacagagttatgatggctagcgcttctgattatttcaaagctatgtttaccggggggatgaaagaacaggatttgatgtgcattaagctccacggcgtgtcaaaggtgggtctgcggaagatcattgattttatctatacagctaagctgagcctcaatatggataaccttcaggacaccctggaggccgcatcattccttcagatcctcccggtgctggatttttgtaaagtgttcctgatcagtggggtgacactggacaattgcgtcgaagtgggcaggattgcgaacacctacaacttgacggaggtggacaagtatgttaactctttcgtactgaaaaactttcccgctctgctaagcaccggtgagttcctgaaactgccttttgaacgactggctttcgtgctgtcttccaattccctcaagcattgtacggaacttgagctcttcaaagcaacgtgtagatggttaaggctggaagaaccgcgaatggactttgcagcaaagctgatgaagaatattcgctttccgctcatgactccacaagagttgatcaactacgtccagacagtggactttatgcggacagataacacttgcgtaaacctcctgctggaggcatccaactaccagatgatgccttacatgcagccagtgatgcagtccgacagaacagccattcggtcggataccacccatcttgtgacattaggcggcgtgttgaggcaacaacttgtggttagcaaggagctgcggatgtatgatgaaaaagcacacgagtggaaatcgctggctcctatggatgccccacgttatcagcatgggattgccgtaataggcaattttttgtatgtcgtgggaggccaatccaactacgacactaaggggaaaactgcagtggacactgtatttaggttcgaccccaggtataacaaatggatgcaggtcgcctctctcaacgagaaacgcaccttttttcatctgtccgccctgaaggggtacctgtacgccgtgggcggacgcaacgccgcaggagagctccccacggtggagtgctataacccaaggaccaatgagtggacgtacgtggcaaaaatgtccgaaccccactatggccacgctggaactgtgtacgggggcgtgatgtacattagcggggggatcacacacgatacctttcagaaggagctcatgtgttttgaccctgacaccgacaagtggatacagaaagcacccatgacgacagtgcgagggcttcactgtatgtgcacggtcggcgagcggctgtatgtaattgggggcaaccactttaggggcacctctgattatgacgacgtgctgtcttgcgaatattattcgcccattttggatcaatggacacccattgccgccatgctgcgggggcagtccgatgtgggcgttgctgtgtttgaaaacaaaatctacgtcgtaggcggctatagctggaataatagatgcatggtagagattgtccaaaagtacgaccctgacaaggatgagtggcataaagtgtttgaccttcccgagtccctcggaggaataagagcctgcacactgactgtctttccccctgaggaaactactccgtctccatcgcgcgagtcccccttatccgccccttag

SEQ ID NO: 24692 - DNA, 117 bp, synthetic construct
  misc_feature 1..117: note = Description of Artificial Sequence: Synthetic coding sequence
  source 1..117: mol_type = other DNA
atgggcctgagcagccacctgcagagcagcaaggccggccccaccaggatatttaccagcaatacccactcatcagtggtgttgcagggatttgatcaacttagactggagggctag

SEQ ID NO: 24693 - DNA, 1815 bp, synthetic construct
  misc_feature 1..1815: note = Description of Artificial Sequence: Synthetic coding sequence
  source 1..1815: mol_type = other DNA
atgggcctgagcagccacctgcagagcagcaaggccggccccaccagaatctttacatcgaacactcactcaagcgtcgtgctgcagggctttgatcaacttcgcctcgaggggctgctctgtgacgtgacactgatgcctggtgatacggacgacgcgttccccgtgcacagggttatgatggctagcgcttcggattatttcaaggctatgtttactgggggcatgaaggagcaggatttaatgtgtattaaactccatggcgtctccaaagtagggctccggaagattatcgacttcatctacacagccaagctttcccttaatatggataacctgcaagatactctagaagccgcaagcttccttcaaattctccctgttctggatttctgcaaagtctttctgatttccggtgtcacacttgataactgcgtcgaggtgggcaggattgccaatacgtataacctgactgaggtggataagtacgtcaactccttcgtgcttaagaatttcccggctctcctctccaccggagaattcctgaagctgcccttcgagcgtcttgcctttgtgctgtccagcaattctctgaagcattgtactgagctggaactgttcaaggctacttgcaggtggctgaggttggaggagcctagaatggattttgctgccaagcttatgaagaacatccgctttcctctgatgactccccaagagcttataaactacgtccagactgtagactttatgcggaccgacaacacttgcgtgaacctactgctcgaggcgagtaactaccagatgatgccttatatgcagccagttatgcagagcgaccggaccgcaattcgatccgacacaacccacctcgtcacactgggcggcgttctgaggcagcagctggttgtatccaaagagctccgcatgtacgacgaaaaggctcacgagtggaaaagtcttgcccctatggacgccccaaggtatcagcacggaatagccgtgattggaaacttcctctacgtcgtcggggggcaatcaaattatgacaccaaggggaaaaccgctgtcgacactgtgtttcgctttgacccgaggtacaataaatggatgcaggtagcgtccctgaatgaaaaacggactttttttcacttgtcggccctgaaaggctacctgtatgctgtgggcggacgtaacgccgctggcgagctgccaacggtcgagtgctacaatccaaggaccaacgagtggacttacgtggccaagatgtcggagcctcactacggccatgctggcaccgtgtacgggggtgtaatgtacatctctggcgggattacgcatgatacttttcagaaagagctgatgtgtttcgatcccgatactgacaaatggatccagaaggcacccatgaccaccgttagaggtctccactgcatgtgcactgtcggcgagagattgtacgtcatcggaggcaatcatttcaggggcacttccgattatgatgacgtgctttcgtgcgaatattactcccccatcctggaccaatggacacccattgcagccatgctgagagggcaatccgatgtcggcgtggccgtgttcgaaaacaaaatctatgtcgtgggaggctattcttggaataatcgatgtatggtcgaaatcgttcagaagtacgatcccgacaaggatgaatggcacaaagttttcgatctgcccgaatcgctcggcggaatccgtgcctgtaccctgacagtatttccgcctgaggaaactacccccagcccctcccgggaaagcccgctgagcgccccctag

SEQ ID NO: 24694 - DNA, 1977 bp, synthetic construct
  misc_feature 1..1977: note = Description of Artificial Sequence: Synthetic coding sequence
  source 1..1977: mol_type = other DNA
atgatgcgggtgcagaccctgcgggagaagtgggcctactggcggcggagacagcttagtctgaaacaggccgatttcaaagacatctttaaaaagagcacaagcggcagcctggtcgaggaagaagaccagcatatgaagctgtccctcggcggatcagaaatggggttgagtagccacctgcagtcgtccaaggcaggaccaactcggatatttacttccaacacccattctagcgtggtgctgcagggatttgaccagctccgcctggaaggcctgctttgcgacgtgacactcatgcctggagatacagatgatgcgttccctgttcatagagtcatgatggcctcggccagcgactacttcaaggcaatgttcacagggggtatgaaggaacaggatcttatgtgcatcaagctgcatggtgtctcgaaggtcggcctcaggaaaattatagactttatctacaccgccaagttgagcctaaatatggataacctgcaggataccttagaagccgccagtttcctacagatcctgcccgtgctggacttttgcaaggtttttcttatctccggggtaactctggacaactgcgtggaagttgggcggattgctaatacgtataacttgactgaagtagacaagtatgtgaactcattcgttttaaaaaactttccagctctgctttccacaggagagttcctcaagcttcctttcgagaggctcgcttttgtattatctagcaactctctcaaacactgtaccgagctggagctttttaaagctacctgccggtggctgcgtctggaggagcctcgcatggattttgccgcaaagttgatgaagaatatccggtttccccttatgacgcctcaagaattgattaattatgttcagacagtagactttatgcgaactgataatacctgtgtgaacctgcttctggaagcaagtaattaccagatgatgccatatatgcaaccagttatgcagagcgataggactgccattcggtcagataccacccacctggtaaccttaggaggggtcctgaggcagcaattggtcgttagtaaggaattacgaatgtacgatgaaaaagcacacgaatggaagtcactggctcccatggacgctcctaggtaccaacacggtatcgccgtcataggcaactttctgtatgtagtgggaggacagtcgaattacgatacaaagggcaaaactgcggtggacactgtctttcgatttgaccctcgatacaataaatggatgcaggtggcctcactgaatgaaaaaagaactttcttccacctctctgcattgaagggatatctatacgctgtgggcggacggaacgcagccggtgaactacccacagtcgaatgttataatcctcgaactaacgagtggacatatgtggccaagatgtccgaaccacattatggtcatgcaggaaccgtttacggtggagtaatgtacatctccggcgggatcacccacgatacttttcagaaggaactaatgtgttttgacccggataccgacaagtggatccagaaagctcccatgacaactgtgagaggactccactgtatgtgcacggttggggagagactgtatgttatcggtggcaaccatttcaggggaaccagtgattacgatgacgtgttgtcatgcgagtactattccccaattctggaccaatggacacccatcgctgctatgctacgtgggcagtccgatgtgggcgtggctgtattcgagaacaagatctatgttgtaggagggtactcttggaataaccggtgtatggtggaaatagtgcagaagtacgatcctgacaaagacgaatggcacaaggtgtttgacctgcctgagtcgctgggcggtatcagggcatgtaccctgactgttttcccacctgaggaaacgaccccatccccttccagggagagccctttaagtgcaccttag

SEQ ID NO: 24695 - DNA, 1920 bp, synthetic construct
  misc_feature 1..1920: note = Description of Artificial Sequence: Synthetic coding sequence
  source 1..1920: mol_type = other DNA
atggaccacctgcaccggggcgagctggtggccgccatcctgcggaaccgttccctggtagaggaagaggaccaacatatgaagctgtcactggggggcagcgagatgggactgagcagccacctccagtcaagcaaggccggccccactcgaattttcacgtcaaacactcattcatccgtagtattgcagggcttcgaccagcttcggctggaggggcttctgtgtgacgtgaccttaatgcccggtgacaccgacgatgccttccccgtgcacagggtcatgatggcaagcgctagcgactactttaaggctatgttcactggagggatgaaagagcaggacctgatgtgtatcaagctccacggggtctcaaaggtgggactgcggaagatcatcgatttcatttacaccgccaagctgtccttgaacatggacaacttgcaggacacactggaagccgcatctttcctacagatcctgcccgttctcgatttctgtaaggttttcctcatctctggtgtgacactggataactgtgttgaggtggggcggatagccaacacatacaatctcactgaagtcgataagtacgtcaacagcttcgtccttaagaacttcccggcattactttctactggagaatttctcaaactccctttcgagagactcgcgttcgtgctctcctcgaactcattgaagcattgcaccgagttggaactgttcaaggctacctgtcggtggctgcggctcgaagagccaagaatggatttcgcagcaaagctgatgaagaacataaggtttccccttatgaccccccaggaactgattaactacgtgcagactgtagacttcatgaggaccgacaatacctgcgttaatctcttgctggaagctagtaattaccaaatgatgccgtacatgcaaccagtcatgcagagcgacagaaccgcgatcaggagtgacacaacgcatctggtcactctgggcggcgtgctccgccagcagctggtcgtgagcaaagaactcagaatgtacgacgaaaaggcccacgagtggaagagtcttgctcccatggatgcccccagataccagcatggaatcgctgtcattggtaatttcctctatgtggtgggcgggcagtctaattatgatacaaaaggcaagacagccgtcgatactgttttcaggttcgacccaaggtacaacaagtggatgcaagtcgctagcttaaacgagaagcgcaccttttttcatttgagtgccctgaagggatatctgtatgcagttggcggcagaaacgcagcaggggagttgcctacggtggaatgttacaacccccgcaccaatgagtggacctatgtcgccaagatgagtgagccgcattatggacacgctggaaccgtctacggcggcgtgatgtacatcagtggagggatcacacatgatacctttcaaaaggaattgatgtgcttcgaccccgacacagacaaatggatccaaaaagccccaatgaccacagtcagaggactacactgcatgtgcacagtgggggagcggctgtacgtgatcggcggtaaccacttccgagggacctctgattatgacgatgtgctgtcatgcgaatactattccccaattcttgatcagtggacacccatcgctgccatgctccggggccagagcgatgtgggggtggctgtgtttgaaaataaaatctacgtcgtggggggttatagctggaacaatcgctgcatggtcgagattgtgcaaaaatacgatcccgataaggacgagtggcacaaggttttcgacctccctgagtctctgggcgggatcagggcctgcacactaacagtcttccccccggaagaaacgaccccctccccttcccgcgagtctccgctttcagccccatag

SEQ ID NO: 24696 - DNA, 1920 bp, synthetic construct
  misc_feature 1..1920: note = Description of Artificial Sequence: Synthetic coding sequence
  source 1..1920: mol_type = other DNA
atggaccacctgcaccggggcgagctggtggccgccatcctgcggaaccgatccctggtggaggaagaggatcagcacatgaaactgtcccttggaggcagtgagatgggcctaagcagccatctgcagtcctctaaggccggcccaacacgtatctttacatccaacactcacagctcagtggttctgcaaggctttgatcaactgaggctggaagggcttctgtgtgacgtcaccttgatgcctggcgacaccgacgacgccttccccgttcaccgtgttatgatggcctctgcatccgactatttcaaggcgatgttcacagggggcatgaaggaacaagatttaatgtgcataaaacttcacggtgtcagtaaggtaggcctgagaaaaattattgattttatctacacagctaagctgtccctaaatatggacaatcttcaggacacccttgaagccgcatcctttctgcagatactgccagtgctggacttttgtaaagttttcctgatttctggagtgaccttggataattgtgtcgaggtaggaaggatcgccaatacctacaacttgactgaagtggataagtatgtgaatagctttgtgttgaaaaatttccccgctctgctctccactggagagtttctgaagcttccattcgagagactggcctttgtcctgtcaagcaatagcctgaaacattgcaccgaactggagctgtttaaagctacttgccgctggcttcgacttgaggagccgcgaatggatttcgcagccaagttaatgaagaacatccgctttcccctcatgacccctcaggagctaatcaactacgtgcaaacggtggactttatgcggactgataatacatgcgttaatttattgctggaagcatccaattatcaaatgatgccatatatgcaaccagttatgcagtctgataggacggctattcggtctgacactacacatttggttacactggggggagttttgcgacaacagttggtggtgtctaaggaactgaggatgtatgatgagaaagctcatgaatggaaaagccttgctcctatggacgccccccgctatcagcacggaatcgctgtcatcggaaatttcctgtacgtcgtgggcgggcaaagcaactatgacacaaaaggcaagaccgcagtcgataccgtgttcagattcgatccgaggtacaacaaatggatgcaggtcgcatctctaaatgagaagagaacgttcttccacctgagcgccttgaagggatatctctatgctgttggaggtcggaacgctgcgggagaactgccaactgttgagtgttataatccacgtactaacgagtggacctacgttgccaagatgtccgagcctcactatggacacgccggcactgtctatggcggagtgatgtatatctcaggtgggatcactcacgatacctttcaaaaggagctgatgtgttttgatcctgacacagacaaatggattcagaaagctcccatgacaaccgttcgggggcttcactgtatgtgtacagttggtgagaggctttatgttatcggtggtaaccactttcgtggaacatccgactatgacgacgtcctgtcttgcgagtattactcacctatcctagatcagtggacccctatcgccgctatgcttcgcgggcagagtgacgtgggagtggccgtgttcgaaaataagatatatgtcgtgggcggttattcatggaataatcgatgtatggtagaaattgtgcagaaatacgatccagacaaggacgaatggcacaaggtgttcgacctgcctgagtctctcggcgggatcagggcgtgtacactcaccgttttccctccggaagaaactacgccaagcccatcccgcgagagccctctatccgccccttag

SEQ ID NO: 24697 - DNA, 1842 bp, synthetic construct
  misc_feature 1..1842: note = Description of Artificial Sequence: Synthetic coding sequence
  source 1..1842: mol_type = other DNA
atgaagctgagcctgggcggcagcgagatgggcctgagcagccacctccagagcagtaaggcagggccaacaaggattttcacttccaacacacacagctccgtggtgctgcagggtttcgatcagctgagactggagggactcttgtgtgacgtaaccctgatgcctggtgacaccgacgacgcctttccagtgcatcgggtgatgatggcatccgcctccgattattttaaagccatgtttacgggcgggatgaaggagcaggacctcatgtgcatcaaactgcatggggtgtctaaagtcggactccgcaagatcattgacttcatttataccgctaagctgtctctgaatatggataatcttcaggacaccctcgaggcggcctcctttctgcagatattacctgttctggacttttgcaaagtgtttctgatttccggagtcacactcgataattgcgtagaagttggcagaattgccaatacatacaatctgacagaggttgataaatacgtgaattccttcgtcctgaaaaacttccccgctttgctttcaaccggggaatttctgaagctaccttttgaaagattagcctttgttctgtcttccaactcactgaaacattgcactgaactggagctgttcaaagctacttgtagatggctacggctggaggagcccagaatggacttcgcggccaagctcatgaagaatatacggttccctctgatgactccccaggagcttatcaactatgtgcagactgtcgatttcatgaggacagacaacacttgtgttaacctactacttgaagctagcaattatcagatgatgccctacatgcagcctgtgatgcagtccgataggactgcaatccgatccgacactactcacttggttaccctgggaggggttctgagacaacagctggtggtgagtaaagagctgcggatgtatgacgagaaagctcacgaatggaagtcactggctcctatggacgcaccccgctaccagcatgggatcgcagttatcggcaattttttgtacgtcgtcggcgggcagtcaaactacgacacaaaggggaaaacagcagtggacaccgtgttcagattcgaccctagatataacaaatggatgcaggtcgcaagtttgaatgagaagaggaccttcttccatctgtcggcgctgaaaggctacttgtatgctgtgggaggccgcaatgcagccggagaactacccactgttgagtgttacaaccccagaaccaatgagtggacttacgtggcaaaaatgtccgagccacactacggacatgccggaactgtctacggtggcgtcatgtacataagtggcgggatcacacacgacacattccagaaggagctgatgtgcttcgaccctgatacagacaagtggatccagaaagcccccatgacaacggtgcggggactgcactgtatgtgcactgttggagagcgactgtacgtcataggcggcaaccacttcaggggtacctctgattacgatgacgtgctgagctgcgagtactatagtcctatccttgaccagtggacacccatcgccgccatgcttcgtggccagtcagacgtcggcgtagccgtttttgagaataagatttacgtcgttggcggctattcctggaacaatcggtgcatggttgagatcgtgcaaaagtacgaccccgacaaagacgagtggcacaaagtgttcgaccttcccgaaagccttggtggcatcagggcatgtacactgaccgtttttcctcctgaagagaccactcctagtccaagcagagaatctcccctgtccgccccatag

SEQ ID NO: 24698 - DNA, 1419 bp, synthetic construct
  misc_feature 1..1419: note = Description of Artificial Sequence: Synthetic coding sequence
  source 1..1419: mol_type = other DNA
atgaccacctgcagccggcagttcaccagcagcagcagcatgaagggtagttgtggtattggcggtggcatcggggggggctctagcaggatctcctccgtgctcgcgggcgggtcctgtagagctccgagtacttacggaggggggctgagcgtcagctcgtcccgctttagcagtggcggagcctgcggactgggaggcggctacgggggtggtttcagtagcagttccagtagcttcggaagcggattcgggggaggatatggcggaggcctaggtgctggcttgggcggcggcttcggaggggggttcgccggcggagatggtctgctggtgggatcagagaaggtcaccatgcaaaatcttaacgaccggttggccagttacctggacaaggttcgagccttagaagaagctaatgctgatctggaggttaagatccgcgattggtaccagcggcagcgacctgcagagataaaagactacagcccttacttcaaaactatagaagacctgcgcaacaaaatcctaactgccacagtagacaatgcgaatgtgctgttacagatcgataacgcaaggttagctgccgatgatttccgcaccaaatacgaaaccgagctcaatcttcgcatgtctgtggaggcggacataaacggcctgagacgtgtcctggacgaactgactttagccagggctgatttggaaatgcaaattgagtcactgaaagaggagctagcctatctcaagaaaaaccacgaggaggaaatgaacgccctacggggtcaagtcgggggggacgtgaacgtggagatggacgcagcccccggcgtagatctctcaagaattcttaacgaaatgagagatcagtacgagaagatggctgaaaaaaacaggaaagacgccgaagagtggtttttcaccaagactgaggagctcaatagagaggttgccactaactcagagctggtgcagtcaggcaagagcgagatctccgaactgagacggactatgcaaaacctggagatcgagctgcaatctcagctttccatgaaagcctcgctcgagaactctctggaggaaacaaaaggacggtactgcatgcagctcgcccagatccaggaaatgatcgggtcagtcgaggaacaattagcacagctccgctgtgaaatggagcagcaaaaccaggaatacaaaattctcctggacgtgaagaccaggctggagcaggaaatagcaacctacagaagactcctggagggggaagatgcccatctgtcctcttcccagtttagctcagggtcacagtccagccgagacgtgacctccagctcccgccaaattcggaccaaggtgatggacgtacatgacggcaaagtggtgagcacacacgagcaggtgctacggaccaagaattag

SEQ ID NO: 24699 - DNA, 1293 bp, synthetic construct
  misc_feature 1..1293: note = Description of Artificial Sequence: Synthetic coding sequence
  source 1..1293: mol_type = other DNA
atgagcttcaccacccggagcaccttcagcaccaactaccggagcctgggttccgtccaggctccatcctatggcgcgagacctgtttcttccgcagcgtcagtgtatgcgggcgccggcggatccggctcacgtattagtgtgtcaagatctacatcctttagaggcggaatggggagtggggggctggctactggcattgcaggcggactagcggggatgggaggtatccagaatgaaaaggagaccatgcaatcactaaacgacagactggccagttacctggatcgagttcggtccctcgaaacagagaaccggcgccttgagagcaaaatccgcgagcacctcgagaagaaaggccctcaagtgcgggactggtcccattactttaagatcattgaagatctgagggcacagatctttgcaaacaccgtagacaacgcaaggatcgtcctgcagatcgataacgcgcgactggccgcagatgattttcgagtaaaatatgaaaccgagcttgccatgcgccagtcagtcgagaacgacatccacggtctgagaaaagtgatcgacgatacaaacatcaccaggctgcagctggaaacggagatcgaagcccttaaggaggagctgttattcatgaagaaaaatcacgaagaagaggtcaaaggtctccaagcccagattgcttccagcgggctgacagtagaagtcgatgcacctaaaagtcaggacctggccaaaattatggcggacatccgagcacaatacgatgagctcgcgcgaaagaatcgggaggaactcgataaatattggagtcagcaaattgaagagtccacaactgtcgtcacgacccagtcagcagaggtgggcgcggccgaaaccactcttaccgagctgaggcggaccgtgcaatcactagagattgacctggatagtatgcgcaacctcaaggcttcactcgagaacagcctgagggaggtggaagctagatatgccctgcagatggagcaattaaatggaattcttctgcacttggagtctgagttggcccagactcgcgctgaaggccagcgccaagctcaggagtacgaggctctgctgaacataaaggtgaagctggaagcagaaattgccacttatcggcgcctgcttgaggacggcgaggattttaatctcggagacgcactggacagctctaattccatgcagaccatccagaagaccactacgaggcgcattgtcgatggtaaggtggtgagcgaaaccaacgacacaaaggtactgcggcattag

SEQ ID NO: 24700 - DNA, 1293 bp, synthetic construct
  misc_feature 1..1293: note = Description of Artificial Sequence: Synthetic coding sequence
  source 1..1293: mol_type = other DNA
atgagcttcaccacccggagcaccttcagcaccaactaccggagcttggggtcagtacaagcccccagctacggtgcgagacctgtgagtagcgcggcatccgtttacgccggggcaggaggcagcggatccagaatctctgtgtctagatctacctcattccgaggtggcatgggatctggaggcctggctaccggtatcgctggtggactggctggaatgggagggatccaaaatgaaaaagagaccatgcagagcctaaatgatagactagcttcgtacctggatcgggttcgctctctcgagaccgaaaaccgacggttggagagcaagatacgcgagcatttagagaagaagggaccgcaagtgagagactggagccattatttcaagatcattgaggatctgcgggctcaaatctttgcaaacaccgtggacaacgctcgcatcgtactgcaaatcgataacgctagactggcggcagatgacttcagggtaaagtatgaaacggagctcgccatgcgacagtctgtggaaaacgacattcacggattgcggaaagtcatagatgacactaacattacccggctgcaactggagaccgaaatcgaagcgctgaaagaagaactgctgtttatgaagaaaaaccatgaagaggaggttaagggtcttcaggcccagattgcttcaagtggcctgacagttgaggttgatgcgccaaagtcccaggatctggcaaaaataatggcagacatccgagcacagtacgatgagctggctcgcaaaaatcgggaagagctcgacaagtattggtcccaacagatcgaggaatctacaaccgtggtcacaacccaaagcgcagaggtgggcgcagctgagaccacgctgacagagctccgacgcacggttcagtccctggagatagacctggacagcatgcgcaacctcaaggcttcactggagaattctcttcgcgaggttgaagcacgatacgcattacaaatggagcagctcaacgggattctgctgcatttagagtctgagctggctcagacgcgcgcggaggggcagagacaggctcaggagtatgaggccctgttgaatatcaaggtgaagctcgaagcagagatcgctacttataggaggttgctggaggacggtgaagacttcaatctgggagacgccctggatagttctaattctatgcagaccatccagaaaaccacaacaagaaggatcgtggatggcaaagttgtctccgagaccaacgatacgaaggtgttgagacactag

SEQ ID NO: 24701 - DNA, 1203 bp, synthetic construct
  misc_feature 1..1203: note = Description of Artificial Sequence: Synthetic coding sequence
  source 1..1203: mol_type = other DNA
atgaccagctacagctaccggcagagcagcgccaccagcagcttcggtgggttagggggaggctccgtaagatttggccctggggtggcatttagggccccctccattcatgggggtagtggggggaggggcgtctcagtgagttccgccagattcgtgagctcttcgtcgtcaggcgcatacggcggcggttatggtggggtgctgaccgctagtgatgggttactggccggcaatgagaaactgaccatgcagaatttaaacgataggctcgcctcatacttggataaggtgagggccctagaggccgccaatggagaactggaagtcaaaattcgcgattggtaccagaagcagggccccggtccatccagggactacagtcactactataccaccatccaagaccttagagataaaattctgggggctacaatcgaaaactcgcggattgtattacagatagacaacgctcgccttgctgccgatgacttcagaaccaagttcgaaactgagcaggcactgcgaatgtcggttgaggctgacattaatggacttagaagagtccttgacgagttaactctcgcccgcaccgacttagagatgcagatcgaaggacttaaggaggaactcgcctacctgaaaaaaaatcacgaggaggagatatcaacactccgcggacaggtgggcggccaggtatcagtggaagtcgacagcgcgccgggaaccgacctagccaaaatcttgtctgatatgagatctcagtacgaggtcatggcagaacagaaccgcaaggacgccgaagcatggttcaccagccgcaccgaggaactcaaccgcgaagtcgcggggcatactgaacaactgcaaatgagtaggtcagaagtcacggatctccgcaggaccttacaggggctggagatcgagctgcagagccagctgtcgatgaaggccgctctggaggacaccctggctgaaaccgaagcgaggtttggtgcccaactggcacatatacaggcccttatttccggaatcgaggcgcagcttggcgacgtgagagcggattccgagcgccagaatcaggaataccagcggctcatggacatcaagagcaggctggagcaagagatcgccacatatcggagccttctagagggccaggaggaccattacaacaatctgtcggcgagcaaagttctctag

SEQ ID NO: 24702 - DNA, 591 bp, synthetic construct
  misc_feature 1..591: note = Description of Artificial Sequence: Synthetic coding sequence
  source 1..591: mol_type = other DNA
atgaccagctacagctaccggcagagcagcgccaccagcagcttcggcggccttggtggggggtcagtgcgattcggtcctggtgtggctttcagagcacccagcattcatggtggtagcgggggcagaggcgtttcagtgtcctccgcacgttttgtgtcatccagctccagcggagcctacggcggaggctacggcggtgtgctgacagcctctgatggcctcctagcaggaaacgaaaaactgacaatgcaaaatctgaatgaccggcttgccagctatctggataaggttcgcgccctggaggcagctaacggcgaactggaaatcctgggcgctaccatcgaaaactcgagaatcgttctgcagattgataatgcccgactggctgccgacgactttcggacgaaatttgagaccgagcaggccctgcgtatgtcggtagaggccgatattaacggactccggagagtgctggatgagcttacccttgctcggaccgatctagagatgcagattgaaggactcaaggaggaactcgcttacttaaagaaaaaccacgaggaggagatctctacactaaggggatag

SEQ ID NO: 24703 - DNA, 1773 bp, synthetic construct
  misc_feature 1..1773: note = Description of Artificial Sequence: Synthetic coding sequence
  source 1..1773: mol_type = other DNA
atgagccggcagagcagcgtgagcttccggagcggcggcagccggtccttctctactgcaagtgccattacacctagcgtcagtcgtaccagctttacctcggtctctcgctccggtgggggaggagggggaggctttgggcgtgtgtcactggcgggcgcatgtggggtcggcgggtatggcagcaggtccctctataatttgggggggtcgaaacggataagcatatctacttctgggggcagcttccggaaccggtttggcgctggtgctggaggtgggtatggatttgggggcggggccggcagcggtttcggtttcgggggcggggctggtggaggatttggtctgggcggcggagctggctttgggggcggcttcggcgggcctggcttcccagtctgcccacctggagggattcaggaggtcacagtgaaccagtccctcctgacacctttgaacctccagatcgacccatccatccagcgggtgaggacggaagaaagggagcagattaagactcttaataacaaatttgcctcattcatagataaggtgcggtttttggaacagcagaacaaggtgttggataccaagtggactctgctgcaggagcaaggaacaaaaacagtccggcagaatctcgagcccttgttcgagcagtacataaacaatttgcgacgacagctagatagtattgttggggaaaggggccggctagattctgaactccggaatatgcaggacctggtcgaagactttaagaataagtacgaggatgagattaataagcggacaaccgctgagaatgaattcgtgatgctgaagaaagatgttgatgctgcctacatgaacaaggtggaattggaggctaaagttgatgcactgatggatgagattaactttatgaaaatgtttttcgacgctgagctgagtcagatgcaaacacacgttagcgatacaagcgtggtcctgtctatggataacaatagaaacctcgacctggattctatcattgcagaggtgaaggctcagtatgaggagatcgccaaccgaagcaggaccgaagcagaatcgtggtaccagaccaaatacgaggaactccaacagaccgcaggccgccacggagatgacctcagaaatactaaacacgaaatctctgaaatgaaccgcatgatccagcgcctcagggctgaaattgacaatgtaaaaaaacaatgcgcgaacctgcagaacgcgattgcagacgccgagcagcggggagagctcgctttgaaggacgctcggaacaagctagcagaattggaggaggcactgcagaaagctaagcaggacatggcacggctgctccgggaatatcaggagctcatgaacaccaagttggctttagacgtcgaaatcgccacttacaggaaactgctggaaggagaggaatgtaggctctctggcgaaggagtggggcctgttaatattagtgtggtgacatcaagtgtatcatccggctacggatccgggtcaggctacggcggagggttggggggcggacttggcggaggtctgggcggcggcctcgccggcggatcttcaggctcttactattcatcatcatctggaggcgtgggcctgggcggtggactttccgtggggggcagtggattcagcgcctcctccggccgcggactgggagtgggctttggaagcggaggtgggagtagttcaagtgtgaagttcgtctcaaccacatcatccagcagaaagagtttcaaatcatag

SEQ ID NO: 24704 - DNA, 1668 bp, synthetic construct
  misc_feature 1..1668: note = Description of Artificial Sequence: Synthetic coding sequence
  source 1..1668: mol_type = other DNA
atgagccggcagagcagcgtgagcttccggagcggcggcagccggtccttttctactgcatccgcgattacccccagtgtaagtcgcacatcgttcacttccgtgtctcggagtggtggggggggcggaggcggttttgggcgagtatccctcgcaggggcttgcggcgtgggggggtatggttttggtggtggcgccgggtccggtttcgggtttggcggaggggcgggcggagggttcgggctcggtggcggagccgggttcgggggaggctttggagggcctggttttccagtctgtccccccggcggcatccaagaagtcacagtgaatcagagtctccttacccccctgaacctgcagatagatccctccatccagagagttcgaacagaggaacgggagcaaatcaaaaccttaaataataagttcgcatccttcattgataaggtccggtttttagagcagcaaaataaagtcctggatacaaagtggacacttctccaggaacagggtactaagacagtgagacagaacctcgagccactgttcgaacagtatatcaacaacttgagaagacaactggattcaatcgtaggcgagagggggcggttggatagcgagctccgaaacatgcaggatttagtggaagactttaagaacaagtacgaggatgagatcaataagagaacaaccgcggagaatgagtttgtcatgcttaaaaaggacgtggacgccgcttacatgaacaaggtggaactggaggctaaggtggatgctctcatggacgagattaactttatgaaaatgtttttcgacgctgagctgtcccagatgcagacacacgtgtccgatacatctgttgtgctgagcatggacaacaacagaaacctggatctggattctattatagccgaggtgaaggcccagtacgaagagatcgccaatagaagtcggaccgaggccgagtcatggtaccagaccaaatacgaggagcttcagcaaacggcaggtcgccacggggatgacttgaggaatacgaaacatgagatcagcgaaatgaaccgcatgattcaaagattgcgcgctgagatcgacaatgtcaaaaagcagtgcgcaaacctgcagaacgccatcgcagatgcagagcagaggggagaactggctcttaaagacgctcgaaacaaattagcagagctcgaagaagccctccagaaggctaagcaggacatggcccgcctccttcgggaataccaagagttgatgaatacaaagctggctctggatgtcgagatcgcaacctaccggaagctgctggaaggcgaagagtgccggctaagcggggaaggagtgggacccgtgaatatatctgttgtgacctcctccgtgtcttctgggtatggatctgggtcaggctacggcggcggactgggcggaggattgggcggcggactgggaggagggctcgctggcggatctagcgggagttattattcttcctcctctgggggggtggggctcggcggagggttgtccgtgggcggttctggcttcagcgccagctctgggagaggcctgggtgtcggattcggttctggaggcggcagtagtagcagtgtgaaattcgtgagcactacaagctctagccggaagagctttaagagctag

SEQ ID NO: 24705 - DNA, 399 bp, synthetic construct
  misc_feature 1..399: note = Description of Artificial Sequence: Synthetic coding sequence
  source 1..399: mol_type = other DNA
atgagccggcagagcagcgtgagcttccggagcggcggcagccggagcttttccaccgcctctgccatcaccccttccgtttctcgcacatcgtttacctccgttagtagaagcggtggaggcggcggtggcggcttcggacgggtgtctcttgctggcgcctgtggtgtagggggctacggctccagatctctgtataatctcgggggctctaagagaattagtatctccacatctggtggctcgtttcgaaaccggttcggagcgggcgctggcggcggctacggcttcgggggtggggccggttccgggttcggctttggaggaggggcagggggcgggtttggccttgggggcggggccggcttcggaggaggtttcggagggccaggtttctag

SEQ ID NO: 24706 - DNA, 1410 bp, synthetic construct
  misc_feature 1..1410: note = Description of Artificial Sequence: Synthetic coding sequence
  source 1..1410: mol_type = other DNA
atgagcatccacttcagcagccccgtgttcaccagccggagcgccgccttcagcgggagaggagcacaggtccggctcagctcagccagacccggagggctgggttctagctcactgtatggacttggcgcatctcgccccagggtggccgtgagatccgcttacgggggccctgttggtgcgggtatacgtgaggtaaccataaatcagagtcttctagcgccgctgcgtctcgatgccgatccttccttgcagcgggttagacaggaagagagcgagcagataaaaacactcaataacaagttcgcttcttttatcgataaggtgcggtttctcgagcagcaaaataaactcctagagaccaaatggacactgctccaagagcagaaaagcgctaagagctcccgcctgccagacatattcgaagcccagattgccgggctgagaggccaacttgaggccctccaagtggatggcggtcgactggaggccgagcttcgatctatgcaggatgtggtcgaagatttcaagaataagtacgaagatgagatcaatcataggaccgcggccgaaaacgaattcgtggtgctgaaaaaagatgtagacgcggcgtatatgagtaaagtggagcttgaggccaaagtcgatgcgctgaatgatgaaataaatttcttgcggacactgaatgagactgaacttaccgaactccagtctcagataagcgatacgtctgtagtactgtccatggacaatagcaggagtttagacctggacggaattattgccgaagtgaaggcccagtatgaagaaatggccaagtgtagtagagcagaggccgaagcctggtaccagacaaaattcgaaacactgcaagctcaggccggaaagcacggagatgacctacggaacaccaggaacgagatcagcgaaatgaatcgtgctatccagagattacaagctgaaatcgacaacattaagaatcagagagcaaagctggaggctgcgatcgcggaggctgaagagaggggagaacttgccctaaaagacgccagagcaaaacaggaggagctcgaagctgctctgcagaggggcaagcaggacatggcacgtcagctgcgagaataccaggagctcatgtctgtgaagcttgctttggacatcgaaatagctacctaccgaaagcttctggagggcgaggaatccaggcttgcaggggacggtgttggtgctgttaatatttcagtgatgaatagcacaggcgggtctagttctggaggtggaattggcctgacccttggcggaacgatggggagcaacgccctgtcatttagctcctccgccggccccgggcttctgaaggcctactcaattaggaccgcctctgccagccggcgatctgctagggactag

SEQ ID NO: 24707 - DNA, 1338 bp, synthetic construct
  misc_feature 1..1338: note = Description of Artificial Sequence: Synthetic coding sequence
  source 1..1338: mol_type = other DNA
atgagcatccacttcagcagccccgtgttcaccagccggagcgccgcctttagcgggaggggggcccaagtcaggctctcttctgcccgccctgggggcctgggcagctcatcactgtatggcctgggagccagccggccacgggtcgcccctctccgccttgacgctgatccaagtctacagagggtcaggcaggaggaaagcgagcaaataaaaaccctcaataataagtttgcatcttttatcgataaagtccgcttccttgaacagcagaataaattgctggagaccaagtggacattgttacaggagcagaaatccgccaaatccagtcggttgcctgacatcttcgaagcccagattgccggactgcgcggccaactggaagccttacaagtggacggcggccgattggaagcagagttgagatcaatgcaagacgtggtggaagactttaagaatcgctacgaagatgaaatcaaccacagaacagctgcagagaatgagttcgtggtcctgaaaaaagatgtggatgccgcatacatgagcaaagttgagctggaggcgaaagtggacgccctgaacgacgagatcaattttctaagaactttaaatgaaaccgaactcactgaacttcaatcacagatctccgacacaagcgtggtgctgtcaatggataactccaggtccctggatttagacggaatcatcgcggaggttaaggcgcagtatgaggaaatggctaagtgctcacgcgcggaggcagaggcctggtaccagaccaagtttgaaacattgcaagcacaggcaggcaaacacggcgacgacctgagaaatactcgtaatgagatcagcgagatgaatcgagccattcagcgactgcaggcagaaatagacaacattaaaaatcagagggcaaaattggaggcggcgattgccgaggccgaggagagaggagaattagccctgaaggacgcccgggcgaaacaggaagagctggaggccgccctgcaacgaggcaagcaggacatggccaggcagttgcgcgagtaccaggagctgatgagcgtgaaactagccctcgatattgaaatcgcaacttatcgtaagctgctggaaggagaagagtctcgcctggcaggcgacggggttggtgccgtgaatataagtgtcatgaattctactggcggcagttcctccgggggtggaattggcctgacccttggtggcactatgggctccaatgcgctgagcttttctagttccgctgggcctgggctgttgaaggcctatagtattcgcaccgcgagcgcctcaagaaggagcgctagggactag

SEQ ID NO: 24708 - DNA, 1212 bp, synthetic construct
  misc_feature 1..1212: note = Description of Artificial Sequence: Synthetic coding sequence
  source 1..1212: mol_type = other DNA
atgagcatccacttcagcagccccgtgttcaccagccggagcgccgccttttccggtagaggcgcccaggttcgcttatccagcgcacggccaggcggattaggaagctcatctctctacgggcttggcgcgtcaaggcccagagttgctgttagatcagcgtacgggggccctgtgggggctggcatcagagaggtgactatcaaccagtccctcctggctcctctgcgccttgacgcagaccctagtctacagcgcgtgcgccaggaagagtccgagcagattaagacacttaataataaattcgccagcttcatcgataaagttagattcttagagcaacagaataagctgctggaaactaagtggacgttactccaggagcaaaagtcggcaaagtccagtcgtttgccggacatcttcgaggcccagatagccgggttgcgaggtcagttggaggctcttcaggtagacggaggtagactcgaggccgagttgcggtccatgcaggatgttgtggaagattttaagaacaagtatgaggatgaaattaaccatcggaccgctgcggaaaacgaattcgtcgtactgaaaaaggacgtggatgcagcctacatgtctaaggtggaactggaagctaaggtcgacgcactcaatgatgagattaacttccttaggaccctcaatgaaacagaaattcacgtgttgcaatcccacatctcagatactagcgtggtggtgaagttggacaatagccaggatctgaacatggattgcatcatagctgagataaaagcacaatacgatgatatcgtgacatgttcctgggccaaggcagagagctggtaccacggatgtctggagatgaaagctacagttatttggcacggagagaccgttggttgcacaaaggaagagatcaaggaactgactcacatgattcagcggctaatggctaaagtggaaaatgcaaaatgtcagaactcaaaactggaggtcgaagtgacgcaatccgaacagcagggcgaggtggcgctgtcggataacagatgcaagctagttgaactggagggaacaatgcagaaggccaggcagtatcaagaagtgatgaattcaaagcttgggctgaacgtcaaagccgcaagctcttgccacttgctggacggggaagagcaacgactgtgcgatggcatctccgcagtgaatatatag

SEQ ID NO: 24709 - DNA, 1452 bp, synthetic construct
  misc_feature 1..1452: note = Description of Artificial Sequence: Synthetic coding sequence
  source 1..1452: mol_type = other DNA
atgagcatccgggtgacccagaagagctacaaggtgagcaccagcgggcctcgtgccttctcctcccgatcatacaccagcgggcccggaagcagaatttcaagttcatcatttagtcgcgtggggtcatcaaatttcaggggcgggctggggggcggatatgggggggcctctgggatggggggcataaccgccgtgaccgtgaatcagtctctgttatccccactggtcttagaagttgatcctaacatacaagccgtgcggacacaggagaaggagcagatcaaaacactcaacaataaatttgcttccttcattgacaaagttcgctttttggagcagcagaataaaatgctggagacaaaatggagtctactccagcaacagaagaccgcgaggtcaaatatggacaatatgttcgagtcatacatcaacaatctgagacggcagctagagacactcgggcaggagaagttgaaattagaagccgagctgggaaatatgcagggcctggttgaggatttcaaaaacaagtacgaagatgagattaacaagagaactgaaatggaaaacgagttcgttttgatcaaaaaggatgttgatgaggcctacatgaacaaggtcgagctggagagtcgactcgagggactaacggacgagattaatttcctacgacagttgtacgaagaggagatccgggaactgcagagtcagattagcgacacctcagttgtgttaagtatggacaactccagaagcttagatatggacagtatcatcgctgaggtaaaagcccagtatgaggatatcgctaataggtcacgcgcggaggctgagagcatgtatcagatcaagtatgaggagctgcagtctctcgcaggaaaacacggggatgacctgagacgcacaaaaacagaaatatcagaaatgaaccgaaacattagtcgcttgcaagcagagattgaagggctgaaggggcaaagggcaagtttggaggccgccatcgccgacgcggaacagcgcggtgagctcgcaatcaaggatgctaatgctaagctgagtgaactagaagccgctctacagcgggctaagcaagacatggctcgccagttgcgcgaatatcaagaacttatgaacgtgaagctcgcattggatatcgagatcgctacttataggaaactgctggagggggaagagagtcgcctcgaatccgggatgcagaacatgtctattcatacaaaaactaccagtggatatgctggaggcctgtcttctgcttatggcggcttgacgtcccccggattatcttattcacttggttcttcatttggctccggagcagggagctcttcatttagcagaacttcttcctctagagcagtcgtggtaaaaaagatcgaaacccgtgacggcaaactggtctctgagagctcagacgtgcttccgaagtag

SEQ ID NO: 24710 - DNA, 822 bp, synthetic construct
  misc_feature 1..822: note = Description of Artificial Sequence: Synthetic coding sequence
  source 1..822: mol_type = other DNA
atgagcatccgggtgacccagaagagctacaaggtgagcaccagcggacccagggccttctcatccagatcatacacctccggtcccggatcccggatttctagcagcagtttttccagggtcggttcgtccaatttcagaggaggcctcggcgggggatatgggggcgcttctgggatgggcggaatcacagccgtgaccgttaaccagtccctgctgtccccgctagtcctcgaagtcgatcctaatattcaggcggttaggacacaggagaaggaacagataaagaccctgaataacaaatttgcctcctttattgataaagtgaggttcctcgagcagcagaataaaatgctggagaccaaatggtccctactgcaacagcaaaaaaccgcccgtagcaacatggacaatatgtttgagtcttacataaacaatttacggcgccagctggagaccttgggccaggagaaacttaaactggaggcagagctcggcaatatgcaagggctcgtagaggattttaaaaataaatacgaggacgagatcaataagcggacagaaatggagaatgaattcgtgctgattaagaaagacgtggacgaggcatacatgaataaggttgagctggaatcccgactggaaggactgactgatgagattaatttcctccggcagctgtacgaggaagaaatcagagagctccagagccaaatttcggacacaagcgtcgtgctgtcgatggataatagtagatctctggatatggactcaatcatcgctgaggttaaagcacaatacgaagacatcgcaaacaggtag

SEQ ID NO: 24711 - DNA, 1452 bp, synthetic construct
  misc_feature 1..1452: note = Description of Artificial Sequence: Synthetic coding sequence
  source 1..1452: mol_type = other DNA
atgagcatccgggtgacccagaagagctacaaggtgagcaccagcggccctcgcgcgttcagctccaggtcttacacctcaggcccaggaagccgaatttcgtcctcctccttctcccgggtaggctcttcaaatttcaggggtggcctcggtggcggctacggcggcgcgtcgggtatgggagggattaccgccgtgacagtgaatcagtctcttctttcacctttagtgctggaggttgatcctaacattcaggcagtgcgaactcaggagaaggagcagataaaaacactcaacaacaagttcgccagtttcattgataaggtcagatttctggagcaacaaaacaagatgcttgaaacaaaatggtcactcctccagcagcaaaagacagcaagaagcaatatggacaacatgtttgaatcctacatcaataatttacgccgccagttggagactctggggcaagagaaattgaaactcgaggcggagctggggaacatgcagggtctagtggaggactttaaaaataagtatgaggatgaaattaataagcgaaccgaaatggaaaacgaattcgttctgatcaagaaagacgtggatgaagcatatatgaataaggtggagctggaatcacggctcgaaggtttaacagacgagattaattttctgcggcagctgtacgaggaggagattcgcgagttgcagtcgcagattagcgataccagcgttgtattgtcaatggacaacagtcgcagcctcgacatggactctattattgctgaggtcaaagctcagtacgaagacatcgctaatcgctcccgtgccgaagccgagtctatgtaccagatcaaatacgaagagttacagtcattggctgggaagcacggtgacgatttgcgccgtactaagactgaaatctcagagatgaaccggaatatttcacgtctccaagctgaaattgagggcctaaaggggcagagagccagccttgaagccgcaatagcagatgccgagcagcgcggtgaactagccattaaggacgcgaacgcaaaactatcagaattagaagccgctctccagcgggcaaagcaggacatggccaggcagcttcgcgagtatcaagagctgatgaatgtcaagctggccctggatatcgagatcgctacatacaggaaacttctggagggcgaagagtcccggttggaaagcgggatgcagaatatgtccatccacacaaagaccacctctggctacgctggagggctctctagcgcttacggcggtctgacctcgcctggactgagctactcactcgggtcctcctttggttccggcgctggtagttcaagcttttcccgcacctcatcatctcgcgcggtggtggtcaaaaagatagaaacgagggacggcaagttggttagtgagtcaagcgacgtcctccctaagtag

SEQ ID NO: 24712 - DNA, 534 bp, synthetic construct
  misc_feature 1..534: note = Description of Artificial Sequence: Synthetic coding sequence
  source 1..534: mol_type = other DNA
atgagcatccgggtgacccagaagagctacaaggtgagcaccagcggcccaagagcatttagtagccgcagttatacaagtggtcccgggtcccgcatcagtagtagtagcttttcgcgggtgggcagtagtaatttcagagggggactgggcggggggtatggtggtgcttccggaatgggggggattaccgctgtcacagtcaaccagagtctgctgtctcccttggtgttagaggtagaccccaacatccaggccgtgcggacgcaggaaaaggagcagattaagaccctgaacaataaattcgccagtttcatcgacaaagtcagatttctcgagcagcaaaataaaatgcttgagacaaagtggagtcttctccagcagcagaagactgccaggagcaacatggataatatgttcgagagctatataaacaacctgagaaggcagctggagactctcggtcaggagaaactgaaactcgaggccgagcttggcaacatgcagggactcgttgaggatttcaagaattag

SEQ ID NO: 24713 - DNA, 1536 bp, synthetic construct
  misc_feature 1..1536: note = Description of Artificial Sequence: Synthetic coding sequence
  source 1..1536: mol_type = other DNA
atgaacggcgtgagctggagccaggacctgcaggagggcatcagcgcatggttcggaccacccgcctctactccagcttcaactatgtcaatccgcgtcactcagaagagttacaaagtgagcacctcaggtccccgcgctttctcctctagatcctacacctccggcccaggttcaaggatcagtagttcaagcttcagccgtgtcggctccagcaacttcagaggagggcttggggggggatacgggggggcgagcggcatgggtgggataaccgctgtgacggtcaatcaatctctccttagtcccctggtgctggaagtggaccctaacatccaggctgtgaggacacaagaaaaggagcagatcaaaacgttgaataacaaattcgcatccttcatcgacaaggttagatttttagagcagcagaataagatgctcgagacaaagtggagccttctgcagcagcaaaagacggctcggtcaaacatggataacatgttcgaatcctatataaataatctcagaagacagctggaaacacttggacaggaaaaattgaagctggaagctgagctgggcaatatgcagggtctagtggaagacttcaagaacaaatatgaagacgagatcaacaagcgaacagagatggagaacgaatttgttctgatcaaaaaagacgttgatgaagcctacatgaataaagtggagttagaatcgcgtttggaaggcctcacagatgaaatcaactttctgagacagctctatgaggaggagatccgagaactgcagagtcaaatctctgacactagcgttgttttaagcatggataattcacgctctctcgacatggatagcattattgcggaggttaaggctcagtacgaagatatcgcgaataggtcaagagcggaagccgagtccatgtaccagatcaagtacgaagagctgcagtctctcgctgggaagcatggagacgacctgaggagaaccaaaacagaaatttccgaaatgaacagaaatatctcccgacttcaggccgaaattgaaggcctgaaaggccagcgcgccagcttggaggctgctattgccgatgcagagcaacggggcgagctcgcaataaaagacgccaacgccaaactgtctgagctggaggccgcgctgcagagggccaagcaagacatggcacgacaactccgagaataccaggagctgatgaacgtcaagcttgccctggacatagaaattgcgacttacagaaagttactcgagggggaggagtcaagactggaaagtggaatgcaaaacatgtctattcacacaaaaactacctctggctatgctgggggcctttcatcagcttacggcggcctgacctctcccggtttgtcctacagcctgggatcctctttcggatccggcgcaggctcatcttcattctctcgcacttctagcagcagggccgttgtggtgaaaaaaattgagacaagggatggaaagctcgtgtcggagagctctgacgtcctgcctaaatag

SEQ ID NO: 24714 - DNA, 1452 bp, synthetic construct
  misc_feature 1..1452: note = Description of Artificial Sequence: Synthetic coding sequence
  source 1..1452: mol_type = other DNA
atgagcatccgggtgacccagaagagctacaaggtgagcaccagcggcccccgcgccttcagctctcggtcatatacctctggtccgggtagccggatcagctctagttccttttccagggtggggtccagtaacttccgggggggactagggggcggatatggcggcgcgagtgggatgggcgggattactgcagtgaccgtcaatcagtcgctgctctcccccctggtgttagaggtagatcctaatatacaagccgtaagaactcaagagaaagagcagattaaaacactgaataataagtttgctagcttcatcgacaaggtccgcttcctggagcaacagaacaaaatgctggagacaaaatggtccttgttgcagcagcagaagaccgctaggtctaacatggataacatgttcgagtcgtatattaacaacctcaggaggcagctggaaacactggggcaggagaaacttaagctggaggcagagctgggcaacatgcaggggttggtggaggattttaagaataaatacgaggatgagattaataagaggaccgaaatggagaacgaattcgtgctgattaaaaaagatgttgacgaggcttacatgaacaaggtcgaactggaatcccgcctcgaaggccttactgacgagataaatttcctccggcagctctatgaagaggagattagggaactacagtcacagatctccgacacatccgtggtgctgtccatggataattctagaagcctggatatggactccatcatcgcagaggtgaaggcccagtatgaggatatcgccaaccgtagccgggcagaggctgaatctatgtaccagatcaaatacgaggagctacaaagtctagcagggaagcacggtgatgacctgcgtaggacgaagactgagatctcggagatgaataggaatatcagccgcctccaggctgagatagagggattaaaaggacagagggccagcctggaggcagccattgctgatgccgaacagaggggtgaactggcaatcaaagacgctaatgcgaagctgtcagaactcgaggccgccttgcagcgcgctaaacaggacatggcccgccagttgcgtgagtatcaggaattgatgaacgtgaagctggctttggacatcgagattgcaacttaccgcaaacttctagagggcgaagaatctagacttgaatcaggcatgcagaatatgagtatccacaccaaaaccacttctggatatgcaggtgggctgagtagtgcctacggaggccttacctcaccaggcctgagttattccctcggatccagctttgggagcggtgccggatcgtctagttttagtaggactagctcatcacgcgcggtggtggtgaagaagatcgaaaccagggacggcaagctggtttccgaatcctcagacgtgctccctaagtag

SEQ ID NO: 24715 - DNA, 4071 bp, synthetic construct
  misc_feature 1..4071: note = Description of Artificial Sequence: Synthetic coding sequence
  source 1..4071: mol_type = other DNA
atgcagagcaaggtgctgctggccgtggccctgtggctgtgcgtggaaacaagagcggcttccgttggcctcccaagtgtgagtctcgacctgcccaggctgtccatccaaaaggacattctgactatcaaggccaacacaactctccaaatcacgtgtcgaggacaacgtgatctagactggctgtggcccaataaccagagcggctccgaacagagggtggaagtgactgaatgcagcgacggattgttctgcaaaaccctgactatcccgaaggtaattgggaatgataccggggcatacaaatgtttctaccgcgaaacggatttggcaagtgtgatatatgtctacgttcaagactaccgctctccttttatcgcctctgtgtccgatcaacatggggtggtttacattactgaaaacaaaaataaaacagtcgtgattccatgcttggggtcgatatccaacctgaatgtgtccctgtgtgctcgataccctgaaaagagatttgtgccagacgggaaccggatctcctgggatagtaagaaaggttttacaatccccagttacatgatctcatacgcagggatggtgttctgcgaagcaaagattaacgacgaatcttatcaatcaattatgtatatagtcgtcgtggtgggctatcggatctacgacgtagtgctctctccaagtcacggaattgaattatcggtaggagagaagctcgtgcttaattgtacagccaggacggaattgaacgtgggaatcgattttaactgggaatacccctctagcaaacaccagcacaaaaagctggtgaatagagacctgaagacacagagtggatcggaaatgaaaaaattcctgagcaccctcactatagacggcgtgactcgcagcgaccaaggtctctacacctgtgccgcgtcttccgggcttatgaccaagaagaatagcacatttgtgagagtgcatgaaaaaccgttcgtcgcttttgggagcgggatggagagcctcgttgaggccaccgtgggcgaaagggttaggatcccagcaaagtatttagggtaccccccccccgaaattaaatggtacaagaacggcatcccactcgaatctaatcatacaataaaagccgggcatgtgctgactatcatggaagtgtctgagagggacactggtaactacactgttatcctgacaaaccccatctctaaggagaagcaatctcacgtggtctccttggtagtgtacgtgcctcctcaaatcggagagaaatcactgatctctccggtggactcgtaccagtacgggaccactcagacacttacctgcaccgtttatgccataccacccccacatcacatacattggtactggcagctcgaggaagagtgcgctaatgaaccaagtcaggctgtgtccgtgaccaatccttacccatgtgaagagtggcggagcgtggaggattttcagggtggtaataaaatagaagtgaataagaaccagtttgctttgattgagggaaagaataagaccgtctccacactggtgattcaggctgcaaatgtatccgcactgtacaaatgcgaagctgttaacaaggtaggacgcggcgaacgggtgatcagttttcatgtgacaagaggtccagaaattacacttcagcctgatatgcaacccactgagcaggaaagcgtctcactgtggtgtaccgccgatcgcagcacattcgagaatctgacttggtataagttaggaccccagccattaccaattcacgtcggagagcttcccacgcccgtgtgtaaaaacctcgacacgctatggaagcttaatgccacaatgttttccaacagtactaacgatatcctcataatggagttgaaaaacgcgtcgctgcaagaccaaggggactatgtctgtctggcacaagaccggaagaccaagaaaagacattgcgtggtccggcagctaacagtgctggagcgcgtcgctcccacaattacggggaacctggagaaccagacaacatcgattggcgagagcatagaagtatcctgcactgcctctggtaatccaccaccccagattatgtggttcaaggataacgagaccttggttgaggatagcgggatcgtgttgaaggatggcaatcgaaaccttacaatcaggcgagtccgaaaagaggacgagggcctttacacctgccaggcctgctccgtcctgggctgtgctaaagtcgaggccttcttcataatcgagggtgcacaggaaaaaactaatctggaaattattatcctggtaggaaccgccgtgattgcgatgttcttctggttactcctggtaataattctccggactgtgaagcgggccaacggtggagagttaaagacaggatacctctctatcgtcatggaccctgatgaactgccgttagacgagcactgcgaaagattgccctacgacgcttccaaatgggaatttccgagagacaggctcaagttaggaaagcctttaggcaggggggcttttggacaggtgattgaggccgacgcatttggaatcgataagactgctacctgccgaactgtcgccgtcaagatgttgaaagaaggggccacacactctgaacacagagcattaatgtccgagctcaagatcttgatacatatcggtcaccatttgaacgtggtcaacttgttaggtgcttgcaccaaacccggagggcctcttatggtcatcgtagagttctgcaaatttggaaacctgagcacttacctccggtctaaaaggaatgaattcgtaccctacaagacaaaaggggcccgcttcaggcagggtaaagactacgtgggggccatccccgtggacctgaagcgacgccttgactccatcaccagcagtcaaagttcggcgagttctgggttcgttgaagagaaatccctgtcagacgtagaggaagaggaagcccccgaagacctctataaagatttcctaacccttgagcatttaatatgttatagcttccaagtggcgaagggaatggagtttctggcctctcgcaaatgtatccaccgcgacttggcggcgcggaacatattgctgtccgagaagaacgttgtgaaaatatgtgatttcggactggctcgcgatatctataaggaccccgactacgtacggaagggagacgcccgtctgcccttgaagtggatggccccagagaccatttttgatcgcgtgtatactattcagagcgacgtctggagcttcggagtactgttgtgggaaatcttctctctgggagcctcaccctatcccggcgtgaagatcgacgaagaattttgtaggcgattgaaggaaggcaccaggatgcgcgcccccgactacaccactccagaaatgtatcagaccatgttagattgttggcacggagaaccatcccagagaccgacattctccgagctggtggaacacctgggaaacctcctgcaagccaatgctcaacaagacggtaaagattacattgtccttccgatttcggaaacactgtccatggaagaggacagcggcctgagcctgccaacgtccccagtgtcctgtatggaagaagaggaagtctgcgatccgaaattccattacgataatactgccggaatctcacagtacctgcagaattccaaacgaaagtcccgtcctgtctccgtgaaaactttcgaggacattcccctcgaagagccagaagtcaaggtgataccagacgacaatcagactgatagcgggatggttttggcttccgaggaactgaagacactcgaagatcggaccaagttgtccccatcttttggcggcatggttcctagcaagtctagagagtcagttgcttccgaggggagcaaccaaacatctggctaccaatccggttatcactccgacgacacggatactacggtgtattctagtgaggaagcggagctgttgaagcttattgaaataggcgttcagacaggctcgaccgcacagattttgcagcctgacagcgggacaacccttagcagtccccctgtgtag

SEQ ID NO: 24716 - DNA, 6630 bp, synthetic construct
  misc_feature 1..6630: note = Description of Artificial Sequence: Synthetic coding sequence
  source 1..6630: mol_type = other DNA
atgtggaacgacatcgagctgctgaccaacgacgacaccggcagcggttatctgagtgtaggttctcgcaaagaacatgggactgccctttaccaagttgatttattggtcaagatcagcagtgagaaggcctcactcaaccctaaaatacaggcgtgttcactgtctgatggctttattatcgtagcagaccaatcagtgatcttgctggactccatttgtaggtccctgcagctacatttagtgttcgacacagaggtcgacgtggtgggactgtgccaggaaggcaagttcctgcttgtaggcgagagatccgggaatctacacctgattcacgtgacctcaaagcagaccctcctgaccaatgcctttgtgcagaaggccaacgatgaaaatcgccgcacataccagaatcttgtcatcgaaaaagacgggtcgaacgaaggcacctattacatgttgttactgacttacagcgggtttttttgcattactaacttgcagctgctgaaaattcagcaggcgatcgaaaacgtggacttttcaactgctaagaagctgcaggggcaaatcaaaagttcttttatatcgaccgaaaactaccataccctgggctgtttgtcactggtggctggggacctcgcatcggaagtccctgtcataattgggggtaccggcaattgtgccttctcaaaatgggagccagacagctcaaagaaaggaatgaccgtcaagaatttgattgacgccgagatcataaagggtgcaaagaaatttcagctcattgacaacttacttttcgtgctggataccgacaatgttctatctctgtgggatatttatacactcaccccagtctggaactggccaagtctgcatgttgaagagttcctgctgactacggaagccgactccccatcctcagtcacatggcaaggcattacgaatttaaagctgatcgccctgaccgcctccgctaacaaaaagatgaagaatctcatggtgtactcactcccgaccatggagattctctactctctcgaggtgtccagcgtatcctctctcgttcagacagggatttccactgacactatttatcttctagagggcgtgtgtaaaaatgatccgaagttgtccgaagactcagttagtgtcctggtccttcggtgcctgacagaggccctcccagagaaccggctgtctcggcttctgcataagcatagatttgccgaggccgaaagctttgcgatacagttcggcctcgatgtcgagcttgtatataaagtgaagtctaaccacattctggaaaagctggcactctcctccgtggacgcaagtgaacagacagagtggcagcaactggtggatgatgcgaaagagaacctccacaaaatacaggatgacgagtttgtagttaattattgcttgaaggcccaatggatcacatacgagacaacccaggagatgttgaactatgccaagaccaggctgcttaagaaggaagacaagacagccctcatttattcagacggactaaaggaggtgcttcgggctcatgcaaaattgacaactttctatggggcatttgggcctgaaaagttctctggcagctcctggatcgaattcctcaacaatgaagacgacctaaaggatatatttctgcaactgaaagagggtaacctggtgtgcgcacaatacctctggctccgacatcgcgccaatttcgaatccagattcgacgttaagatgctcgagtcccttttaaacagtatgtctgccagcgtgtctctccagaagttatgcccatggtttaaaaacgacgtgattccgtttgtgaggcgcactgtccccgaaggacagattattttagcaaaatggctcgagcaggcagccagaaatctggagctgacagacaaggctaactggcctgagaacggccttcagctggctgagatctttttcacagctgaaaagaccgacgagcttggcctcgcaagcagctggcactggatatcactcaaggactaccagaatactgaggaagtttgccagttaaggactttggtaaataatctgcgtgagctaatcactctgcatagaaagtataactgtaagctcgctctgtccgactttgagaaggagaacaccaccacgatcgttttccgaatgttcgacaaagtactggccccagaactaattccctccatcctcgaaaaatttatcagggtgtacatgagagaacatgacctccaggaagaagagttgctgttgctgtatatcgaagacttacttaataggtgttctagcaaatctactagcctgtttgagactgcctgggaagccaaggctatggcagtgattgcgtgcctctcggacactgaccttatattcgatgccgtactgaagattatgtatgctgccgtggttccctggtccgccgcagtggagcaactggttaaacagcatctggagatggatcatccgaaggttaagctcctgcaagagagttacaaattgatggagatgaagaagttgctgcgcggttatggcatacgtgaagtgaaccttctcaataaggagatcatgcgggtcgtccgctacatcctaaagcaggatgttcctagctcactggaggacgctctgaaagtcgcgcaggctttcatgctgtctgatgacgagatttatagtctacgcattattgatctcattgacagagaacagggcgaggattgcctgctcctgttgaagtcccttccccccgcagaagccgaaaagacagctgagagggtcatcatctgggcccgcctcgcgctgcaggaagagccagatcacagcaaggaaggtaaggcttggcggatgtctgtggccaaaacaagcgtggacatactcaaaattctatgcgacattcagaaggacaacttacaaaaaaaagacgaatgtgaggagatgttgaagttgttcaaagaggtcgccagtctccaggaaaacttcgaggtctttttaagttttgaggactactccaactcctccctggtcgccgacctccgcgagcagcacatcaaggctcacgaggtcgcccaggccaaacacaaacctggctccactcctgaacccatcgcagccgaggtaagaagccctagtatggagagcaagctgcaccgacaggccttggcccttcagatgtcaaaacaggagctggaagccgagctgacattgagggcactgaaggacggaaatatcaagacggcccttaaaaaatgttctgacctgttcaaataccattgcaacgctgacactggaaagctgctgttccttacttgtcaaaagctctgccagatgctcgccgataatgtccctgtgaccgtgcccgttgggctcaatttgccttccatgattcacgacttggcttcccaggctgccaccatctgttcccctgatttcctgttggacgccctggagctctgcaagcataccctgatggctgtagagttgtcccgtcaatgtcaaatggatgactgcggaatcctgatgaaagcctccttcgggacacataaggacccctacgaggagtggagttactccgatttcttcagtgaggatgggatcgttcttgagagccagatggttctgcccgtgatctatgaactaattagttctctggttccgctggctgaatcaaagcgttatccactggagtctacttcattaccctattgctcgctcaacgagggcgatggcctcgtactaccagtgatcaactctatctcggccctcctccaaaacctgcaggagtcctcacaatgggaactggctctccgcttcgtagtggggtcatttggcacctgtcttcagcatagcgtgtccaatttcatgaatgctaccttgtccgagaaactgttcggcgagacaaccctcgtgaaaagccgccacgtggttatggaacttaaggagaaggctgtcatattcatacgggagaatgccacaaccctattgcacaaggtatttaactgtaggctagttgatctcgatctggccttggggtactgcaccttactcccacagaaggacgtctttgaaaatctctggaaactgatcgataaagcatggcagaattacgacaagattctcgcgatcagcctcgtggggtcagaactggcctccctgtaccaagaaatcgagatgggactgaagttcagggaattgagcaccgatgcccagtgggggatccggttgggaaagttagggatttctttccagccagtctttagacagcatttcctgacaaagaaagatctgatcaaggccctggttgaaaatatcgatatggacaccagtctgatcctggaatactgctctacattccaacttgattgtgacgcggtgctgcaattgttcattgagaccctgctccataatacgaacgcaggacaggggcagggcgacgcgtctatggattccgccaagcgtcgccatcctaagctgttggcaaaagcactagagatggttccattgctgactagcacaaaggaccttgtgatctccctgtcaggaatcctgcacaaacttgacccctacgattatgagatgattgaagttgtgctgaaggtgatagagagagcggacgagaagatcaccaatatcaacattaatcaagctctgtctattcttaaacatctgaagtcttatagaaggatcagccctcctgtggatttggagtatcaatatatgttggagcacgtcataaccctaccctcagccgcacagactagactcccttttcacctgatttttttcgggaccgcccagaacttctggaaaatcttgtccacagagctttccgaagagtcattccccactcttctgctgatttcgaagctaatgaaattctcccttgatacactgtacgtatcaaccgcaaagcatgtctttgagaaaaagctgaaacccaagcttctcaagctgactcaagccaaaagcagcacactgattaataaggaaatcaccaaaatcacccagacaatcgagtcttgcctgctgtccatcgttaaccccgaatgggccgtggctatcgcaattagcttggctcaggatattccggaggggtcattcaagatctccgcactgaaattctgcttgtatctagccgaaaggtggctccagaatattccttctcaagatgagaaaagagagaaagcggaagcactcctgaagaagctgcacattcaatatcgaagatctgggacagaggccgttctgatcgctcacaaactcaatacagaagagtatctgagggtaatcggaaagccagctcacctgattgtgtctctgtacgaacaccctagtattaatcaaaggatccagaattccagcggcacagactacccggacattcacgccgcggcgaaggagatagctgaagtgaatgaaattaatctcgaaaaggtctgggatatgcttttggagaaatggctgtgcccttctaccaagcctggtgaaaagccctccgagttattcgaactgcaagaggacgaggcacttcgccgcgtacagtatttgttactgagccgacccatcgactatagctcccgcatgctgttcgtatttgcaacctccacgacaaccaccttaggtatgcaccagctgacgtttgcccatcgcaccagggccttgcagtgcctgttctacctggctgacaaggagactattgagtccctcttcaagaaaccaatcgaagaagtaaagagctacctccggtgtatcacgtttctcgcgagcttcgaaactctgaacatccctatcacctatgaattattctgctcctctcctaaagaagggatgatcaaagggctgtggaagaaccatagtcacgaatcaatggcagttcgcctggttaccgaactttgcctcgagtataagatttacgacctccaactctggaacggactcttgcagaaattactaggcttcaacatgatcccctatctgaggaaggtactcaaagctatttcgtctattcactcattgtggcaagtgccgtatttttctaaagcgtggcagagggtaatacagatcccgttgctgagtgccagctgcccccttagccctgatcagctgtctgactgctccgaaagcctcatcgccgtcctagagtgtcctgtttcgggggatttggatttaatcggagtagcccgccagtatattcagctcgagcttcctgccttcgctctggcctgcctaatgctgatgcctcactctgagaaacgccatcagcagattaagaactttctaggatcatgtgacccgcaagtcattctgaagcagcttgaagaacatatgaacaccgggcagctggcaggcttcagccaccagatacggtctctcatcctcaataatatcatcaacaaaaaggagttcgggatattggcgaaaacgaaatacttccaaatgcttaagatgcacgcaatgaatacgaataatatcacggaactcgtcaactacttggccaatgatctaagtctggacgaggcctcggtgttgatcactgaatactcaaagcattgtggcaaaccggtgccacctgacacagctccgtgcgaaatcctgaaaatgttcttgtccggtttaagttag

SEQ ID NO: 24717 - DNA, 1332 bp, synthetic construct
  misc_feature 1..1332: note = Description of Artificial Sequence: Synthetic coding sequence
  source 1..1332: mol_type = other DNA
atgctggagcacgtgatcaccctgcccagcgccgcccagacccggctgccatttcacctgatctttttcggaacagcacagaatttctggaagatcttgagcacggaactgagtgaagaaagctttcccactctgttgctcatcagcaagctgatgaaatttagcctagataccctatatgtctcaaccgcgaagcacgtctttgagaagaagctgaagcctaaacttctgaaactcacccaagccaaatcctcgactctcataaacaaagaaattactaagatcacccagaccatcgaatcctgcctgctgtctatcgttaaccccgagtgggctgtggccattgctatctctttggcccaagacatccctgagggctcctttaagataagtgcccttaagttctgtctctacctggcggagcgatggctccagaacattccctcccaggatgagaagagagagaaagctgaggccctgctgaaaaagcttcacatccagtacagacgatctggcaccgaggccgttcttatcgcccataagcttaatactgaggagtaccttcgagtcattggtaaaccagctcacctgattgtgtccctgtacgaacacccatctattaatcagcggatccagaattcatcagggactgactatcccgatattcacgccgctgccaaggaaatagctgaggtaaatgagataaacctggaaaaggtatgggacatgctattggagaagtggctgtgcccttcaacgaagcccggtgaaaagccgtctgaattattcgagctgcaggaggatgaggctctacgaagggtgcagtacctgttactctcgcgcccgattgattattcatcccgtatgctctttgtgttcgccacgtctacaacaacgacattaggaatgcaccagcttacattcgctcatcgcacaagagcgctgcaatgtttattctatctggccgacaaggaaacaatcgagagcttgtttaagaagccaattgaggaggtcaagtcctacctgcgctgtatcacatttctcgcttccttcgagactctgaatatccctatcacctatgaactgttctgctcctctcccaaggaggggatgataaagggactctggaagaatcatagccatgagtctatggctgtgagactcgtcaccgagctgtgcctagaatacaaaatctacgacctgcagctctggaatgggctcctgcaaaagctgctcggctttaacatgattccataccttagaaaagtgctgaaggctatctcctctatccacagcctatggcagcgctggcgatcatgctacgtagcttag

SEQ ID NO: 24718 - DNA, 417 bp, synthetic construct
  misc_feature 1..417: note = Description of Artificial Sequence: Synthetic coding sequence
  source 1..417: mol_type = other DNA
atgaacagcctggtgagctggcagctgctgctgttcctgtgcgccactcactttggcgagccgcttgagaaggtggcctcagtgggaaactcccgcccaacaggccagcagctagaaagtctggggctcctggcacctggagaacaatctctgccttgcaccgaaaggaagcctgcggcgactgctcgcctctcacggcggggaaccagcttaagccccccaccggaatccagcggtagcccccaacagcccggactctctgctcctcactcacgacagatccccgctccccagggagccgtactggtgcaaagggagaaagatctccctaattataactggaattccttcggcctgcgctttgggaaacgggaagcggcccctggaaaccacggtagaagtgccggccggggttag

SEQ ID NO: 24719 - DNA, 771 bp, synthetic construct
  misc_feature 1..771: note = Description of Artificial Sequence: Synthetic coding sequence
  source 1..771: mol_type = other DNA
atggcccaccggccccccagccccgccctggccagcgtgctgctggccctcttactctctggggcggcaagggctgccgagatcgtagggggccacgaagcacagccccacagccgtccgtatatggctagcttgcagatgcgcggaaaccctggatcacacttctgcggaggcacactgattcacccgtcttttgtgcttactgctgcacactgcctgagggacatccctcagcgcttggtgaacgtcgtcttgggagcacataatgtcagaacccaggaacctacacagcagcacttcagtgtcgctcaggtttttctgaacaattatgatgccgaaaataaacttaatgacgttctactgattcagttgtcctcacctgccaatctgtcagcgtctgtagcaacggtgcagcttccccagcaggaccaaccagtgcctcatggcacccagtgcctagcaatggggtggggccgggtcggagctcatgaccccccggcacaggtattacaggaactcaacgtgaccgtggtgacgtttttttgccggcctcacaacatttgcacttttgttcctcggagaaaagcgggcatatgtttcggcgacagcggcggtcctctgatttgtgatggaatcattcaggggatcgactccttcgttatatggggttgcgccacacgtctgttcccagattttttcacaagagtagccctgtatgtcgattggatccgcagtacgctaaggcgtgtcgaagctaaaggccgcccctag

SEQ ID NO: 24720 - DNA, 2937 bp, synthetic construct
  misc_feature 1..2937: note = Description of Artificial Sequence: Synthetic coding sequence
  source 1..2937: mol_type = other DNA
atggcccacaccaccaaggtgaacggcagcgccagcggcaaggccggcgacatactttccggagaccaagataaggagcagaaggacccgtacttcgtcgaaaccccttatgggtatcagctggaccttgactttctaaaatacgttgacgatatccaaaagggcaacacaattaaaagactaaacatccagaagagacggaagccatctgtcccctgccccgagccccggacaacctccggccagcaaggcatctggacatctaccgagagcctgagttcctccaacagtgatgataataagcagtgtccaaacttccttattgcaagatcacaggttactagcactcctatctccaaaccccctccacctctggagacaagtcttcctttcctgaccatccctgaaaaccgccagctccctccaccatctccgcaactacccaagcataacctgcacgtgacaaagaccttgatggaaacacgccggagactcgaacaggagcgcgccaccatgcagatgacccctggcgagttccgcaggccgaggctggcatcttttggaggaatgggcacgacatcatcgctgccaagctttgtgggctctgggaaccacaaccccgccaagcaccagctgcagaacggttaccagggaaatggagactacggttcatacgcccccgctgcacctaccaccagttccatgggaagttccatacgacactccccattgtcatcggggatctcaaccccggttaccaatgtcagccccatgcacctgcagcacataagagaacagatggccattgcattaaaaagactgaaagagctggaagagcaggtcaggacaattccggtgctccaggtgaagatatcagtgctccaggaggaaaaacgccagctcgtctctcagctgaaaaaccagcgtgctgccagccagatcaatgtatgtggagtgcggaaaaggtcttactctgccggcaatgcaagccaactcgaacaactgtctagagcgcggagatctggaggcgagctttacattgactatgaagaggaagagatggaaacagtcgaacagagcacacagaggattaaagagtttagacagctcaccgcggatatgcaggccctggagcagaaaatacaggacagttcttgcgaagcttcatccgagttgagagaaaatggggagtgccgtagcgtcgctgtgggggctgaagaaaacatgaacgatatcgttgtgtaccaccgcggcagcagaagctgcaaagatgctgctgttggtacgcttgtcgaaatgaggaactgtggagttagcgtgacagaagcaatgctcggggtgatgacagaagctgataaagagattgagctccagcagcagaccattgagagtctgaaagagaaaatctacagattggaagtgcagctcagagaaaccacccatgaccgtgagatgaccaaactaaagcaggaactccaggcggctggaagccggaagaaggtagacaaagctaccatggctcagccgcttgtgtttagcaaggtggtggaggctgtggtccagaccagggatcagatggttggaagccatatggacctggtggacacgtgtgtgggcacctccgtggaaactaatagcgtcggtatcagctgccagcctgagtgtaaaaataaggttgtggggcccgagctgcccatgaactggtggattgtgaaagaaagggtggagatgcatgaccggtgcgccgggaggtcggtcgagatgtgcgacaagtcggtatctgtggaggttagtgtgtgcgagactggaagtaacacagaagaaagcgtgaacgacttgacccttctcaaaacaaacctcaacttaaaggaggttcgaagtatcggctgtggggactgcagcgtggacgttacagtctgttctcctaaggagtgcgccagtcggggggtcaatactgaagccgtgtcgcaggtggaggcggcagttatggctgtgccacggaccgcagaccaggatacctcaacagacctcgaacaagtgcaccagttcaccaacaccgagactgctacccttatagagtcctgtaccaacacctgtctttcaaccctggataaacaaacttcaacgcagacagtggaaaccagaaccgtagcggtcggcgagggtcgcgtaaaggatatcaatagttctaccaaaacacgaagtattggcgttgggactttgctctccggccattcagggttcgacaggccaagtgccgtgaagactaaggagtctggcgtgggtcagattaacataaatgacaactacctcgtaggtctcaaaatgcggactattgcatgcggcccaccccagctgacagttggtcttaccgcgagcagacggtctgttggtgtgggcgacgatcccgtcggcgagtccctggagaacccccagcctcaggcgccactgggaatgatgacaggtctggaccactacatagagaggatccagaagttactggctgagcagcagactttgttagctgaaaattactcagagttagctgaggcttttggtgaaccacatagccagatggggagcctcaattctcagctgatctctacactgagctccatcaactctgtgatgaaaagcgcctccactgaggaactgcgcaaccccgactttcagaagacaagccttggtaaaattaccgggaactacctgggctacacttgtaagtgcggtggccttcagtctggatcccccctgagctctcaaactagtcagccagagcaggaggtcggcacatccgaagggaagcctatcagctctctggatgcctttccaacacaggagggaactctatcgccggtcaatctgaccgacgaccagatcgcggcgggcttgtatggcaatttttcacattcacagagtttggcttccggcttctag

SEQ ID NO: 24721 - DNA, 831 bp, synthetic construct
  misc_feature 1..831: note = Description of Artificial Sequence: Synthetic coding sequence
  source 1..831: mol_type = other DNA
atgctgagcgcctgcaacctgctgaagaacaccatcaacgaccccaaagcattgacctccaaagacatgaggttctgcctgaatacgcttcagcacgaatggttcagggtttcctctcagaagtctgctatccctgcaatggtaggggactacattgccgccttcgaagcaatctccccagatgtgctgcgttatgtaattaatctggcagatggcaacggcaacactgctctccattacagcgtgtcgcactcaaacttcgagattgtgaagcttctgctggatgccgacgtttgcaacgtggaccatcaaaacaaggccggctatactcctatcatgctagcggcactggccgctgtagaggcggaaaaggacatgcgaattgtagaggagctttttggatgcggtgacgttaatgcaaaagcttcacaggccgggcagacagcgttaatgcttgccgtgtcgcacggcagaatcgatatggttaaggggctcctggcatgtggggccgacgtgaacatacaagacgatgagggctccacagccctaatgtgtgctagtgagcacggccatgttgaaattgttaagttgctcttggcacagcccggatgcaatggccatctggaggacaatgacgggtcgactgcgctgtccatcgccctggaggccggacacaaggatatcgccgtgctgctttatgcccatgttaattttgccaaagcccaatctcctgtgagcgtggtccacctggcctttgttaatcgcttgaagagcactcgcctggtggatccattgccccccggtatagatggtcggcagattctttgctag

SEQ ID NO: 24722 - DNA, 993 bp, synthetic construct
  misc_feature 1..993: note = Description of Artificial Sequence: Synthetic coding sequence
  source 1..993: mol_type = other DNA
atggccgagggccaccacgccgtgaacatcgagggcctgaagagcgcccgagtggaggatgagatgcaggtgcaggagtgcgagcccgagaaagttgaaatcagggagcgttacgagctttctgagaaaatgctctctgcttgtaacttgctaaagaatacaatcaatgaccccaaagccctaacatctaaggatatggggcaagtacagtggttgactcctatgatccctactctgagggaagccgatgccggcggcagtcacgagaggttctgcttaaatacactgcagcacgagtggttccgggttagctcccagaaatctgccatccccgctatggttggcgactatatagccgccttcgaagctattagtcccgacgtgctcaggtacgtgataaatctggctgacgggaacgggaacactgccctacattacagcgtttcccatagtaactttgagatcgtcaagttactgctcgatgccgacgtctgtaacgtcgaccaccagaataaagccggatatactccaatcatgctggccgcacttgccgccgtggaagccgagaaagatatgcgtatcgtcgaggagctgtttgggtgtggcgacgtaaacgcgaaggcgtcacaggccgggcagaccgcactgatgcttgccgttagccatggcaggatcgacatggtaaagggtctgctggcttgcggggccgatgtgaacatccaggacgatgagggtagcaccgcactcatgtgcgctagtgagcacggacacgtggaaatcgtgaagttgctactggcccagcccgggtgtaatggtcatctggaagacaacgacggcagtactgcgctttctatagcccttgaggcagggcacaaggatatcgccgtcctgctatatgcccatgtaaacttcgccaaggcccagtctcccggcactccacgactgggacggaaaacctcccctggtccaacacaccgcggaagcttcgactag

SEQ ID NO: 24723 - DNA, 3585 bp, synthetic construct
  misc_feature 1..3585: note = Description of Artificial Sequence: Synthetic coding sequence
  source 1..3585: mol_type = other DNA
atggagacccggcggcggctggagcaggagcgggccaccatgcagatgacccctggtgaatttagaagaccacggctggctagcttcggcggcatgggaactacatcgtctctcccctctttcgtgggtagcggtaaccataaccccgcaaaacaccagctgcaaaacgggtaccagggcaacggcgattatgggagctatgctccagctgctccaaccacctcgagcatgggatcctccattcgtcactctcccctgtccagcggcatatcgactccagtaactaacgtctctcccatgcatctgcaacacatccgcgaacagatggctattgctctgaagcgccttaaagagcttgaggaacaggtccgaaccatcccagttttgcaggttaaaattagcgtgttgcaggaggagaagagacagttggtgagccagctgaagaatcaaagagccgcatcacagataaacgtctgcggagtcaggaaaagaagctacagcgctggaaatgcatcccaactagagcagctgtcccgggctcgccgctcgggcggagagctgtacattgactatgaggaagaggaaatggaaacagtagaacagagtactcagagaatcaaagagttccgtcaattgaccgctgacatgcaggcgctcgagcagaagatacaggattcttcttgcgaagcctcaagcgagttacgggaaaacggcgagtgtcggagtgtggccgtcggcgctgaggaaaatatgaatgacatcgtcgtataccaccggggatctcgatcctgtaaagatgctgcggtaggcacacttgttgagatgcggaattgcggggtctccgttaccgaggctatgctcggcgtgatgacagaagccgataaggagatcgaactccagcagcaaaccattgagagcctgaaggagaaaatctataggctcgaagtgcagttaagggaaacaacacatgatagagaaatgacaaaactgaaacaggagctgcaggccgctggttctcggaagaaagttgacaaagcgactatggcccaaccccttgtgttttcaaaggtagtggaagccgtggtacaaaccagagaccagatggtaggaagccacatggatctggtcgacacgtgtgttggaaccagcgtggagacaaacagcgttggaatttcatgtcagcctgagtgtaagaacaaggtggtcggtcctgagctgccaatgaactggtggatagtgaaagagagggtcgagatgcacgataggtgtgcagggagaagtgtggagatgtgcgacaagtcagtgtcagtcgaagtctcagtttgcgagaccggctcgaatacggaagaatccgtcaatgatctgacattactcaagaccaaccttaacctgaaggaagtgagaagtatcggatgtggagactgttccgtggatgtgaccgtttgttcacccaaagagtgcgccagtaggggcgttaacaccgaagcagtgtcccaggtggaggcagcagtaatggccgtgccgcggactgccgatcaggatacgagcacagatctcgaacaggttcaccagttcaccaacacagaaacagcaacactcattgagagttgcaccaacacctgcctgtcaacactggacaagcagacttcaactcaaactgtggagacccggactgtggccgtgggggagggccgcgttaaggacattaacagtagtactaagacacgttccattggggtcggaaccctgctgagtggccatagcgggtttgaccgcccatctgcagtgaaaaccaaggagtccggggttgggcaaataaatataaacgacaactatcttgtcgggttgaaaatgagaacaatagcttgcggccctccgcagctgacagttgggttgactgcttctcgacggtctgtcggggtgggcgatgaccccgtcggtgaaagccttgagaacccgcagcctcaagctcccctggggatgatgaccggcctggatcattatatcgagcgtatccagaaactgctggctgagcaacaaacgctgctggctgaaaattattcggaattggccgaggcatttggcgagccccattcacagatggggagtctaaactctcagctgattagtactttgtctagcatcaattctgtgatgaaaagcgcttccaccgaggaactacgaaatccggactttcaaaaaacaagcttaggcaaaataacagggaattacttgggctatacatgtaaatgcggtgggctgcaaagcgggagtcccctaagcagccagacaagtcaacctgagcaggaagtgggtactagtgaagggaaaccaataagtagcttggacgccttccccacacaagagggcacactgagtcccgtgaacttgactgacgaccagatcgctgcgggcttgtacgcctgcacaaataatgagtcgacacttaagagcatcatgaagaagaaagacggaaataaagactcaaacggagccaagaagaacttgcagttcgtgggaattaacggagggtacgagaccacctcttcagatgacagtagcagcgacgaaagctcttcaagtgagtccgatgatgaatgcgacgtgattgagtacccactggaggaagaagaagaggaggaagacgaggatactagagggatggcagaagggcaccacgctgtgaacattgagggcctcaagtcagcccgggtagaggatgaaatgcaggtccaagaatgtgagcctgagaaggtggaaattcgggaaagatatgaactcagcgaaaagatgctgtcggcttgcaatctactcaaaaacactatcaacgaccctaaggctcttacttcaaaagacatgcgtttctgcttaaataccctgcagcacgagtggttccgcgtttcttcacaaaaatctgccataccggctatggtgggagactacattgccgcttttgaggccatcagtcctgacgtcctgcgatatgtgattaatctggctgatggaaacggcaatacagcattgcattatagtgtaagccactcaaattttgaaatcgtcaagcttttgcttgacgccgatgtttgcaatgtcgatcaccagaacaaggctggttacacaccaatcatgctggccgcactcgccgcagtggaagctgagaaagacatgcggatcgtcgaggaactctttggctgcggcgacgtgaacgcgaaagcctcacaggccggacaaactgcgctcatgctggctgtatctcacggcaggatcgatatggtgaagggcctactagcttgcggagcagatgttaatatccaagatgacgaaggttccacagcacttatgtgtgcaagtgaacatggtcatgtagaaatcgtaaaattactgttggcacagcccgggtgtaatggccatctggaagacaatgacggatctacggcactttcaatcgctctggaggccgggcacaaggacatcgcagtgctgttgtacgcacatgtcaactttgcaaaagcgcagtctcccgggactccgaggctgggccggaagacaagccctgggcccacccatagaggcagctttgactag

SEQ ID NO: 24724 - DNA, 4059 bp, synthetic construct
  misc_feature 1..4059: note = Description of Artificial Sequence: Synthetic coding sequence
  source 1..4059: mol_type = other DNA
atggcccacaccaccaaggtgaacggcagcgccagcggcaaggccggggatatcttatcaggcgatcaggacaaagagcagaaggatccctatttcgtggaaaccccttacggatatcagctagatctggacttcctgaagtacgttgatgatatccagaaaggaaacacaattaagcgattaaacatacagaagagaaggaaacctagtgtcccttgtccagaaccacgaaccacttccgggcagcagggcatctggaccagtacagaaagtctttcctcgagtaattcagacgacaacaagcagtgtcctaactttctgattgctagatctcaggtgactagcaccccaatcagcaaaccacctcccccgttggaaacgagcctcccattcctgactatccctgagaacagacagctacctccaccttccccccaactccccaagcataacctgcatgtcaccaagacacttatggaaaccaggaggcgattggagcaggaaagagcaaccatgcagatgacaccaggggaattccgacgcccccgtctggcttctttcgggggtatgggaactactagcagcctgccgtcttttgtgggctctggtaatcataaccctgccaagcaccagcttcagaacgggtaccagggaaacggcgattacgggtcatatgcaccagcagcacccacaactagctcaatgggaagctcaattagacactctcccttgagctctggcattagtaccccggtaactaatgtgtctcccatgcatctgcagcatatacgggagcagatggctatcgcactcaaacgactcaaagaattagaagagcaagtgagaactattccggtgcttcaggttaagatatcagtactgcaggaagagaaaaggcagttggttagtcagttgaaaaaccagcgggccgcctctcagataaacgtctgtggcgtgaggaaaaggtcatactcagcaggcaacgcatcccagcttgaacaactctcgagggccaggagatccggcggcgagctgtacattgactatgaagaggaggagatggagaccgtggaacagagcacccagaggatcaaagagtttaggcagctcaccgcagacatgcaagccttagaacagaaaatccaggattcatcctgcgaggcatcaagcgaactccgggagaacggggaatgcagatcagttgccgtgggcgccgaagaaaacatgaatgatatagtggtgtaccacagaggttctcggtcttgtaaagacgcagccgtcggtactcttgtagagatgcgcaactgtggtgtgtcggtaactgaggccatgctgggagtgatgacagaggcagataaggagattgagctgcagcaacagaccattgagagtctgaaggaaaaaatctatcgcctggaagtgcagctcagggagacaacccacgaccgggaaatgactaaattaaagcaggaactgcaggccgccggctcgaggaagaaagtcgacaaggccaccatggcgcaacccctggtcttttctaaagtcgttgaggcagtggtacagactagagaccagatggttggctcccatatggacctggtcgatacatgcgttggaacatcagtagagaccaactccgttggaatcagttgccagccagaatgcaagaacaaggtcgtgggtccagaattgccaatgaactggtggatcgtgaaggagcgggtcgagatgcacgacaggtgcgctggccgaagcgtcgagatgtgtgacaagtccgtcagcgtcgaagtgtctgtttgcgagaccggcagtaatacagaagaatcagtgaacgatctgaccctcctgaaaactaatctgaatcttaaggaggtgaggagcattgggtgcggagattgcagcgtggatgtgaccgtatgttcacctaaagagtgcgccagccggggcgtaaacactgaggctgtgtctcaggtcgaagcagccgtgatggcagtgccccggacagctgaccaggatacaagcactgatctggaacaagttcatcagttcaccaacaccgagacggctaccttaatcgagagttgtaccaacacttgcctgagcaccctggacaagcagacatcgacccagactgtcgaaacgaggaccgtggctgttggcgaaggtcgcgtgaaggacatcaactcctccacgaaaaccaggagcattggcgttggaactttgctgtctggccactcaggattcgatcgacctagcgctgtaaaaaccaaggaaagcggcgtggggcaaattaatatcaacgataattatcttgtgggactaaagatgaggaccattgcctgcggcccaccccagctaaccgttggcctaacagcttcacgtcggtccgtaggggtgggcgatgaccccgtgggcgaatctctcgaaaatcctcaaccccaggctcccttgggtatgatgaccgggctggatcattacattgaaagaattcaaaagctgctggccgaacaacagactttgctggctgagaattactccgaactggcggaagcgtttggggaaccacactcacagatgggcagcttaaacagccagttgatatctacactgtcctccatcaatagcgtcatgaaatctgcctccactgaggaattacgtaaccctgatttccagaagactagtctgggtaagatcaccggcaattacttagggtatacttgtaagtgtggcggtctgcagtctggcagtcccctgagcagccagactagccaacccgagcaggaagtagggacgtcggaaggcaagcccattagctccctcgatgcctttccaacccaagagggcaccctgtcccctgtcaacctcaccgacgaccagatcgcggcaggcctatacgcctgtaccaacaacgagtctactctgaagtctattatgaagaagaaggacggtaacaaagatagcaacggagcgaagaaaaacctccagttcgtgggaattaatggcggctacgagacaacttctagcgatgactccagctctgatgagagtagctcaagcgagtcggacgatgaatgtgacgtaattgagtaccccctagaagaagaggaggaggaggaagacgaagatacccggggcatggccgaggggcaccacgcagtcaacatcgagggtttgaaatccgctagagtggaggacgagatgcaggttcaagaatgcgagcccgagaaagtagagatccgggaacgttacgagctttcagaaaaaatgctctcagcatgtaaccttctcaagaacacgataaatgatcctaaagctttgaccagcaaagacatgcgattctgcctcaatacactacagcacgaatggtttagagtttccagtcagaagtcagccattccagccatggtgggcgactatatagctgcattcgaagcaatcagtcccgacgttctacggtatgtaattaatctcgctgacggcaacggaaacactgccctccattattcagtgtctcacagcaactttgagattgtaaaactcctgttggatgccgatgtgtgcaacgtcgatcaccagaataaggcagggtatactcccataatgctcgccgcactggccgctgttgaagcggagaaagacatgcgtatcgtagaggagttgttcggctgcggagacgtcaatgcaaaagccagccaagccggccagacggcactaatgctcgctgtttctcacggcaggattgatatggtcaagggcctcttggcttgcggggcggacgtaaatatacaggacgacgagggttctacagcactgatgtgtgcctccgagcatggacacgttgagatcgtgaagctcctcctggcacagcctggctgtaacggacaccttgaggacaacgatgggtcaaccgcactgtctatcgctctggaagcggggcataaggacatcgccgtcttgttgtacgcccatgtgaatttcgccaaagcacagtcccccgggacacctaggttgggcaggaagacttcccctggccctacccaccgtgggagctttgactag

SEQ ID NO: 24725 - DNA, 4059 bp, synthetic construct
  misc_feature 1..4059: note = Description of Artificial Sequence: Synthetic coding sequence
  source 1..4059: mol_type = other DNA
atggcccacaccaccaaggtgaacggcagcgccagcggcaaggccggggatatcctctcaggtgatcaggataaagagcagaaagacccgtacttcgtggaaactccgtacgggtatcaactggacctggattttctgaaatacgttgacgatattcagaagggaaacactattaagcggctaaatattcagaagaggcggaagcccagcgtaccctgtccagaacctcgcactacctcaggccagcagggaatatggaccagcacggaatctctgagctcgtccaatagtgatgacaataagcagtgccctaatttcttgattgcgaggagtcaggttacttcaacccccatctccaaacctccgccaccgctggaaacttctttaccttttctgactattccagagaacaggcagctgcccccgccgagcccacagctacccaagcataatcttcacgtcaccaaaacactgatggagactcgcaggcgattagagcaagaaagagcaactatgcagatgacacccggcgaattccgcaggccccggctcgcctcgttcggtgggatggggactactagctcactcccatcctttgtgggctcaggtaaccataatccggcaaagcaccagctgcaaaatggctatcaggggaatggcgactatggaagctatgcacctgcagcccctactactagctcaatgggaagtagtattcgccactcccccctatcttctgggatatccacacctgtgaccaacgtctcccccatgcaccttcagcatatacgggagcagatggctattgcgcttaaaaggctgaaagagctggaagaacaggtgaggaccatccctgtgttgcaggtcaaaatctctgtgcttcaggaggagaagcggcagcttgtttctcaattgaaaaaccaaagagctgcaagccaaattaacgtttgcggcgtgcggaaacgctcttattctgccggaaacgcgagccaactcgagcaactttctcgcgccagacgcagcgggggggaactttacattgactacgaagaagaggagatggagaccgtagaacagagcacccagcgaattaaggagttcaggcagttgaccgccgacatgcaggcattagagcagaagatccaggattccagctgcgaagcctcttccgagctgagagagaacggcgagtgtcgaagcgtggccgttggagccgaagaaaacatgaacgatatcgttgtgtatcacaggggctcccgctcgtgtaaggacgctgctgtcggaaccctggtggaaatgcgcaactgcggtgtgtcagtgactgaggcgatgcttggtgttatgaccgaggccgataaagagatcgagctccagcagcaaacaatcgaatcgctgaaagaaaagatatacaggctggaggtccagcttcgcgagactacccacgaccgagagatgaccaagcttaagcaggaactgcaggccgcgggatctcgaaaaaaggtggataaggctacaatggctcaacctctcgtattctctaaggtagtggaggccgtggtccagacgcgcgaccaaatggtgggctcacacatggatctcgttgatacatgtgtggggacttccgtggaaaccaatagtgttggaataagttgccagcccgagtgcaagaacaaggtcgtgggtccggagctgcccatgaattggtggatcgtgaaggagagagttgaaatgcacgaccggtgcgctggccgcagtgtagagatgtgtgacaagtccgtgagtgttgaagtgagcgtctgtgagaccgggtctaacacagaggaaagcgtcaatgatctgaccctcctgaaaacaaatcttaacctgaaggaggtcagaagtatcggctgtggagactgctccgtggatgtcacagtgtgcagccctaaggaatgtgcatctagaggtgtgaatacggaagccgtatctcaggtagaggccgctgttatggcagttccgcggaccgccgaccaggatacttcaaccgatctggagcaagtacatcagtttactaacactgagactgcaactttgatcgagagctgcacaaacacatgcctaagcaccctggacaagcagacaagcacccagactgtcgaaacacgtaccgtcgcagtcggagagggcagagtcaaggacataaattcaagcactaagacgcggagcattggcgtgggcacccttttgtccggccactcaggcttcgaccggccgagcgccgtaaagacaaaggagtcaggggttgggcagatcaacatcaatgacaactacctggttggcctgaagatgcgtaccattgcctgtggaccccctcagttgaccgtgggcctcaccgcatcacgccgctctgtgggcgttggagatgaccccgttggagagagcctggagaacccacaacctcaagctcccctcggtatgatgactggtttggatcactatatcgaaaggattcagaaactcctggctgagcagcagacgctcctcgctgaaaattattcggaattggccgaagcattcggggaacctcacagccagatgggcagcttgaattcgcagctcataagtacactatctagcattaactctgttatgaagtcagcctctacagaagagcttcgcaaccctgacttccagaagactagcctgggtaagattactggcaactacctggggtacacatgcaaatgcggaggactccaatcagggtcaccattatcaagccagacatcacaacctgagcaggaagttggcactagcgaaggcaagccaatctcgtcactggatgcgttcccaactcaggaaggaacattaagccctgtgaatctgacggacgatcagatcgctgctgggctgtatgcctgcaccaacaacgagagcactctgaaatccatcatgaagaaaaaagacggaaacaaagatagcaacggggccaaaaagaatttgcagtttgtgggtattaacgggggctatgagactacttcttcagacgactcaagttcagatgagagttcctccagtgaatccgacgatgagtgtgacgtgatagaataccccctggaggaggaggaagaagaagaagatgaagacaccagaggtatggccgagggccatcacgcagtgaatatcgagggcctgaagtctgctagggtcgaagacgagatgcaggtgcaggaatgcgagcctgagaaagtcgaaatccgggaacgctatgagctgtcggaaaagatgctctccgcatgtaatctcttaaagaatacaatcaacgatcctaaggccctgacaagtaaggacatgaggttttgcctgaacaccctccaacatgagtggtttagggtaagtagccaaaagtccgcgattcctgcaatggtgggagactatatagccgctttcgaagccatcagcccagacgtgctgcgctacgtgatcaatcttgccgacggcaacggaaacaccgctcttcattattctgtgtcccactccaattttgaaatcgtgaagctgctattggatgcagatgtctgcaacgtcgatcatcaaaataaggccggctatactcccatcatgcttgccgccctggccgccgtcgaagctgagaaagacatgcgcatcgtcgaggagctgttcgggtgcggcgacgtcaatgccaaggcgagccaagctggccagacagctctgatgctggcggtatctcatggcaggattgacatggtcaagggattgttagcgtgtggcgccgacgtgaatatccaagatgacgaaggctctaccgccctgatgtgcgcatctgaacatgggcatgtggaaatcgtaaagttactcctcgcccaacctggctgcaatggacacctggaagacaacgatggaagcacagccctgtccattgccttggaagctggtcacaaggatatcgctgttttgttgtacgcccatgtaaattttgccaaggctcagagccctggtacacctagactgggcaggaaaacgtcaccaggccccacacatcgggggagttttgactag

SEQ ID NO: 24726 - DNA, 1197 bp, synthetic construct
  misc_feature 1..1197: note = Description of Artificial Sequence: Synthetic coding sequence
  source 1..1197: mol_type = other DNA
atgaagaagaaggacggcaacaaggacagcaacggcgccaagaagaatctgcaatttgtaggaatcaatgggggctacgaaacgacaagttcagatgactcttcaagcgatgagagcagctctagcgaaagtgatgatgagtgcgatgtcattgaataccctctggaggaagaagaggaagaggaagatgaagacacacgcggaatggcagaaggccatcatgctgtcaacattgaggggctgaaatctgcacgggtcgaggacgaaatgcaggtgcaggagtgcgaaccagagaaggttgaaataagggagaggtatgaactatccgaaaaaatgttatcggcctgtaatctcctgaagaacaccattaatgatcccaaggcactaacctcaaaggatatggggcaggtacagtggctgacacctatgattccaacccttcgggaagccgatgcaggaggctcacatgagaggttttgcctgaacactcttcaacatgagtggtttagggtgtcatctcaaaaaagcgccattcccgcaatggtcggcgactatattgccgccttcgaagctatatcccccgatgtattgaggtatgtcattaaccttgctgacgggaacggaaatacagcactgcattattccgtgtcacacagcaactttgagatcgtaaagctattgctagatgctgacgtttgtaatgtcgaccaccagaacaaggcgggttacacgcccattatgctggccgccttggcggcggttgaggctgaaaaagatatgcgaatcgtcgaagagctattcggctgcggggatgtaaacgccaaagcttctcaggctgggcaaacagctcttatgctggcagtcagtcacggccggattgacatggtaaaaggcttgctggcatgtggcgccgacgtgaacattcaggacgatgagggctccacagctctgatgtgtgcaagtgagcatggccacgtggaaatagttaaactcctgcttgctcagccagggtgcaacggccacctcgaggataacgatggcagtaccgctttaagtatcgcactggaggccggccacaaagatattgcagtgctgttgtacgcgcatgtgaattttgcaaaggcccaatctcccggaaccccacgtttgggacgcaagacatcaccagggccaacccaccgtggctcattcgattag

SEQ ID NO: 24727 - DNA, 2211 bp, synthetic construct
  misc_feature 1..2211: note = Description of Artificial Sequence: Synthetic coding sequence
  source 1..2211: mol_type = other DNA
atgggcaaccccgagaacatcgaggacgcctacgtggccgtgatcagaccgaagaatacagcaagccttaactcccgcgagtatagggcaaaatcttacgaaattctgctacatgaggttccaattgagggacaaaaaaagaaacggaagaaagtgctgctcgaaacgaaactgcaaggcaacagcgaaattacccagggtattctagattatgtggtagagaccacaaagccgatttcccctgccaatcagggaatccggggaaaaagagtggttctgatgaagaaatttccactggacggggaaaaaatgggcagggaagcatcattgtttattgtgcctagtgtagttaaggataatacaaagtacacatacacaccaggctgtccgattttctactgcctgcaggacattatgcgggtgtgctcagaatcctccacgcattttgccaccttgacagcacgcatgctgattgccctcgataagtggttagacgaaagacacgcccagtcccacttcattcctgccctgtttcgtccctcccctctggagcgcatcaagaccaatgtaatcaacccagcgtacgccacggagtccggtcaaacagaaaacagcttgcacatgggctactccgcccttgaaattaagagcaaaatgcttgccttggaaaaagctgatacatgcatttacaaccctttattcggctcagacttgcagtacactaatagagttgacaaggtagtcattaacccttactttggccttggagccccagactattccaaaattcagattcctaagcaggaaaagtggcagcggagcatgtcatctgtgacagaggacaaagaacggcaatgggtagatgatttccccctgcaccggtcggcatgcgagggggacagcgagctgctgtcgagattactgagcgaacgcttttcagttaatcagctggacagcgaccactgggcacctatacattacgcttgttggtacggcaaggtcgaggccacacgaattctccttgagaagggcaagtgtaaccctaacttgctaaacggccagctttcgagtcctcttcattttgctgctggagggggtcatgctgagatcgtacagatccttctgaatcatccagagacagatcgccatattacagatcagcagggtaggagtcctctcaatatttgtgaggagaacaaacaaaataactgggaggaagcagccaagctcctgaaggaagcgattaacaagccctatgagaaagtgcgaatctatagaatggatgggtcctacagatctgtggaactgaaacacggcaacaacaccactgtgcagcagattatggagggaatgcgactgtcacaggaaactcaacagtatttcaccatttggatttgtagcgagaatctttccttacagttgaagccttatcataagcccctccagcatgtgcgagactggcctgagattctggcagagctgacgaacctggatccacagcgcgagacgccacagctctttctgcggcgtgacgtccgtctgcctcttgaggtggagaagcaaatcgaagatcccctggcaattctcattctgttcgatgaggccaggtataatctgttgaaaggattctatacggcacctgatgccaaactgattacactcgccagtttattactgcagatcgtgtacggtaattacgaatctaagaaacacaaacaggggttcttgaacgaggaaaacttaaagagcatcgtcccggtaaccaaactgaaatcaaaggccccgcactggacgaaccgcatcctgcatgagtacaaaaacctttccactagtgaaggcgtgtcaaaagagatgcaccatctgcaacggatgttcctgcagaactgctgggagatccctacttatggcgctgcgttctttaccgggcaaatcttcaccaaggccagcccttcaaaccacaaggtgatcccagtgtacgtgggcgttaatataaaaggcctgcatctcctgaacatggaaactaaggccctactgatctccctgaagtatggctgctttatgtggcagctcggggatacagatacctgctttcagatacacagcatggaaaataagatgagcttcattgtccatacgaagcaggccggcctggtagtgaagttgttgatgaagctcaacgggcagctgatgcctacagaaagaaattcctag

SEQ ID NO: 24728 - DNA, 2067 bp, synthetic construct
  misc_feature 1..2067: note = Description of Artificial Sequence: Synthetic coding sequence
  source 1..2067: mol_type = other DNA
atgggcaaccccgagaacatcgaggacgcctacgtggccgtgatccgccctaagaatacagcctctctgaactcaagagagtatcgcgccaaatcctatgagatactccttcacgaagtaccaatcgagggacagaagaagaagagaaaaaaagtattactggaaacgaagctgcaaggcaattcagagattacacagggcatcctcgactatgtcgttgagaccactaagccgataagcccagctaatcaggggataagggggaaaagggtcgttttaatgaaaaagtttccgctggatggcgaaaagatgggaagggaagcttctttgttcatcgttccatcagtggtgaaagataatactaaatatacctacacaccaggatgccccatattctattgcctccaagacatcatgcgcgtgtgttcagaatcttccacacactttgccacactgacagctaggatgctcatcgcccttgacaaatggttggatgagagacatgcccaaagtcacttcattcctgcactctttcgaccttctccactggaacggatcaagaccaacgtgataaatcctgcctacgccacggagagtggtcagacagagaattccctgcacatggggtactcagcacttgaaatcaaatccaagatgttagccctggaaaaagctgacacctgcatctacaacccactctttgggtcagacctgcagtacaccaaccgcgtggacaaggttgtcataaatccatattttgggcttggggctccagattattccaagattcaaatccctaagcaagaaaaatggcaacgatccatgtcaagcgtgaccgaggacaagtatgggaaggtggaggctacccgcatactgttggagaaagggaaatgtaacccgaatctgttaaacggtcagctaagttcccctctgcactttgccgctggcggagggcacgccgagatcgtgcagattctgttaaaccatcccgaaacggacagacacattaccgatcaacagggcaggagccccctgaacatttgtgaagagaacaagcagaataactgggaggaagctgccaaactgctaaaggaggccattaataagccttacgagaaggtccgtatctaccggatggacgggagctaccggagcgtggaactgaagcacggaaataataccactgttcagcagatcatggaaggaatgcgtctgagccaggagacacagcagtactttaccatctggatttgtagcgagaacttatcccttcaacttaagccctatcataagccactgcaacacgttagggattggcccgagatccttgcagagttaacaaatctggacccgcaaagagaaactccgcagctattcttgagaagggacgtgcgtctgcctttggaggtggagaaacaaatcgaggatcctttagctattttgatcctattcgacgaggcaaggtacaatctgttgaaaggcttctacaccgcccccgacgccaagcttatcacccttgcctcgctccttttgcagatcgtgtatgggaactatgaatccaagaagcacaaacagggcttcttgaacgaggagaatctcaaaagtattgtaccagtgacaaagttgaagtctaaggcaccgcactggaccaacaggatactgcatgagtacaagaacctttccaccagtgagggtgtgtccaaagaaatgcaccacctccagagaatgttcctgcaaaattgctgggagatacctacctatggagcagccttcttcactgggcagatcttcactaaggcctccccttctaatcacaaggtcattccagtgtatgtcggtgttaatattaagggcctgcacctgctgaatatggagaccaaggcactcctgatcagtctcaagtatggatgcttcatgtggcagctgggtgacaccgatacctgttttcagatacacagtatggagaataaaatgtcctttattgtccatacaaagcaggcaggcctggtagtaaagctgttaatgaaactgaacgggcaattgatgcccactgagagaaactcctag

SEQ ID NO: 24729 - DNA, 2211 bp, synthetic construct
  misc_feature 1..2211: note = Description of Artificial Sequence: Synthetic coding sequence
  source 1..2211: mol_type = other DNA
atgggcaaccccgagaacatcgaggacgcctacgtggccgtgatcagacccaaaaatactgcctcgctaaactcaagagaataccgagccaaatcttacgagatccttctgcacgaagtaccgattgagggtcagaagaaaaaacggaaaaaggtcttgttggagacaaagttgcagggaaattccgagattacgcagggcattctggactatgtcgttgagacgacaaagccaatatcacccgctaaccaaggcattcggggtaaaagagtggtcctgatgaaaaagttccctcttgatggcgaaaagatgggaagggaagcaagtctcttcattgtgccttccgtagttaaggacaatacgaagtacacatacaccccgggttgccctatattttactgcctccaggacattatgcgagtttgcagcgaatcgagcacacacttcgccacactcaccgctagaatgttgatcgcgctagataagtggttagacgagagacacgcccagagtcacttcatcccagccttgtttaggccaagccctcttgaaaggatcaagacaaacgttattaaccctgcatatgctactgagagcggccaaaccgagaattctctccatatgggatactccgcactggagatcaaaagcaaaatgctggcactcgagaaagccgacacgtgtatctacaaccccttattcggaagcgatctccagtacacaaatcgcgtggataaggtggttatcaacccatatttcggattgggcgctcccgactattccaaaattcagatccccaaacaagagaaatggcagaggagcatgtccagtgtcaccgaggacaaggaacgtcaatgggttgacgactttcccctgcacagaagcgcttgtgaaggcgacagcgagctgctcagcaggctcttgtctgagcggttcagcgttaaccaactggacagcgaccattgggcccccattcactatgcctgctggtatgggaaggttgaggcaacccgcatcctgctggagaagggcaagtgtaatccaaacctccttaacgggcagttaagctccccactgcacttcgcggccgggggcgggcacgccgagatcgtccagatactgcttaaccacccagagacggaccgccacattacggaccagcaggggcgaagcccactgaacatctgtgaagaaaataagcagaacaactgggaggaggccgcaaagctgctgaaggaggctatcaacaaaccatacgaaaaagtacggatctaccgaatggatggctcatacagatctgtggaactcaagcacggtaacaacacgaccgttcaacagatcatggaaggcatgcgcctgtcccaggagactcaacaatactttacaatctggatctgctctgagaatttgagccttcaacttaaaccgtaccacaagcctttacagcacgttcgagattggcccgagatcttggcagagctgaccaaccttgatccacagcgagaaacacctcagctgttcttgcgcagagatgttagactccccctggaagtagaaaaacaaattgaagacccgttggcaattctgatcctgtttgacgaggcgcgctacaaccttttgaaagggttctatacagcacccgatgcaaagcttatcaccctggcgtctctgctgctacagatagtttatggaaactatgagtcgaagaaacacaaacagggttttctgaacgaagagaatctgaaatccattgtgccagtgaccaagttaaaaagcaaggctcctcattggacaaaccggatattgcatgagtacaagaacctctccacctccgaaggcgttagcaaagagatgcaccacctgcagagaatgtttcttcagaactgctgggagataccaacctacggcgccgccttcttcacggggcagatcttcacaaaagcttccccttcaaatcataaggtcatcccagtgtacgtgggagttaatattaaaggcttgcatctgttgaacatggagacaaaagccttgctgatttctttaaaatatggctgcttcatgtggcagctgggcgataccgatacctgtttccagatacacagtatggaaaacaaaatgagtttcattgtccataccaagcaagcaggattagttgtcaaattgctcatgaagctgaacggacagttaatgcctacagagcgtaattcatag

SEQ ID NO: 24730 - DNA, 2211 bp, synthetic construct
  misc_feature 1..2211: note = Description of Artificial Sequence: Synthetic coding sequence
  source 1..2211: mol_type = other DNA
atgggcaaccccgagaacatcgaggacgcctacgtggccgtgatcaggcctaaaaacaccgcgagcctgaactctcgcgaatacagggctaagtcttatgaaattctcttgcatgaagtgccgattgagggccagaaaaaaaagagaaagaaggttctgctggaaaccaagctacagggcaatagtgaaatcactcaagggatcttggactacgtggtcgagacaaccaagcccatcagtcccgccaatcaaggtatccggggcaagagagtggttctgatgaaaaagttccctttagatggtgagaagatgggacgagaagccagtttattcatcgtgcctagtgtagtgaaggacaacacaaaatacacttatactcctggctgtcctatcttttattgtttgcaagacatcatgcgggtgtgctcggagtcttccacccacttcgcaaccctcactgctaggatgttaatcgctctggataagtggttggatgagaggcatgcacaaagtcacttcattcctgccttgttcaggccctcccctctcgagcgcataaagaccaacgttatcaaccccgcttatgccaccgaaagcgggcagacagaaaatagcctgcacatgggatattctgccctggagataaaatcaaagatgctagctctggagaaagcggacacctgtatctacaaccccctgtttggatcagacctccagtataccaatcgcgtcgacaaggtcgttatcaatccctactttgggttgggggcaccagattatagcaagatccaaatccccaaacaggaaaaatggcagcgatcaatgagctcagtgactgaggacaaagaacggcagtgggtggacgatttcccacttcacagatctgcttgtgaaggggattcggagctgctcagccgcctgctctccgagaggttctctgtcaatcagcttgactctgatcactgggcccccattcactacgcctgctggtacggcaaagtggaagccacacgaatattgctggagaaaggcaagtgcaatccaaacctgttaaacggccagctgtcttccccacttcatttcgcagctggtggcggacacgcggagatagtgcaaatactcctcaatcatccagaaaccgatcgacacatcacagatcaacagggtaggtcacctctgaatatttgcgaagagaacaaacaaaataattgggaagaggctgccaagctgctcaaggaggccataaataaaccgtacgaaaaagtacgtatctataggatggatggtagttatcgcagtgtcgagctgaagcacggaaataatacaactgtccaacaaattatggaagggatgaggctgagtcaggaaacgcagcaatacttcacgatttggatctgctctgagaatctaagcctgcagttaaagccataccacaagccccttcaacacgtcagggattggcctgaaatactggccgagcttacaaacctggacccccagcgagagacacctcagttgttcctgcggcgggatgtaagactgcctctggaggtggagaaacagattgaagatcccctcgccattctgattctttttgacgaagcccgatacaatctcctcaagggcttctatacagcccctgatgccaagctcattaccctcgcctcccttctgctgcagatcgtgtatggcaattacgaatctaaaaagcataagcaggggtttctgaatgaggaaaatcttaaatccattgtccccgtgaccaagctcaagtccaaggcccctcactggaccaatcgtatcttacacgagtacaagaatctcagcacctctgagggcgtcagcaaggagatgcaccatctgcagaggatgtttctccagaactgctgggaaatccccacctatggcgccgctttctttacaggccagatatttacaaaagccagccctagcaatcacaaggttatcccggtctatgtgggtgtgaacatcaaaggtcttcatctgctgaatatggagacaaaggctctactgatcagtctgaagtatgggtgttttatgtggcagctcggagacacggacacttgtttccagattcatagcatggagaataagatgagctttatcgtccacactaaacaggccggcctcgtggtgaagctgctgatgaaactgaatggtcagcttatgccgacggagagaaacagctag

SEQ ID NO: 24731 - DNA, 2211 bp, synthetic construct
  misc_feature 1..2211: note = Description of Artificial Sequence: Synthetic coding sequence
  source 1..2211: mol_type = other DNA
atgggcaaccccgagaacatcgaggacgcctacgtggccgtgatccggcccaaaaacaccgctagccttaacagcagagaatatcgcgctaaatcctacgagatcttgctccatgaggtccctattgaaggtcagaagaagaaacgaaaaaaagtgcttctggaaacaaagctgcagggcaacagtgagattacacaggggattctcgactatgtggtcgagacaactaagcctatctctcccgctaaccaaggaatacgggggaagcgggtggttctgatgaaaaaatttcctctggacggggagaaaatgggaagggaagcctccctattcatcgttccctctgtagtaaaagataacaccaaatatacttataccccaggttgtcccattttttactgcttgcaggatattatgagggtctgcagtgagagttccactcactttgcaacactcaccgcacgcatgttaatcgccttggataagtggcttgacgagagacacgcccagtctcacttcattccagcactttttcgaccctcccccttagaacggatcaaaaccaatgtcatcaacccagcatatgccaccgagtctgggcagaccgagaactctctccacatggggtactccgcacttgagatcaaatccaagatgctcgcactcgagaaagcagacacttgcatttataacccgctcttcggctctgaccttcagtatacaaaccgggtggataaggtggtgatcaatccatactttgggctgggtgcacctgattacagcaagatccagatacccaagcaggagaagtggcaaaggtccatgtctagcgtgaccgaagataaagagaggcagtgggtcgacgactttcccttgcacaggtccgcctgtgaaggggattcagagctgctgagcagactcctcagtgaaaggttttctgtaaatcagctggacagcgatcattgggcaccaatccattacgcttgctggtatggcaaggttgaagccacgcgaatcctgctggaaaaaggaaagtgtaaccctaatctcctgaatgggcaactttcttcaccactgcattttgcagccggaggggggcacgccgaaatcgtgcagatcctgctgaatcacccggagactgatcgacacattacagaccagcaaggaaggtctccccttaacatctgcgaagagaacaaacagaacaactgggaggaggccgccaaactgctgaaggaggccattaacaagccgtacgaaaaagttcgtatttatcgcatggacggatcgtaccgatccgttgaactaaagcacggcaataatactaccgtacagcagattatggagggcatgcgtctgtctcaggaaacccagcagtatttcacaatttggatttgctcagaaaatttgtctctgcagctgaagccctaccataagcccctgcagcatgtgagagattggccggagatcttggcggaacttactaacctcgatcctcagcgggaaacaccacagctgttcctgcgcagagatgtcagacttcctctcgaggtggagaaacagatagaggacccactcgcaattttgatccttttcgacgaagcccgctacaacctgctgaaaggcttctataccgcccctgacgccaaactcatcaccttggcctccttgctcctgcagattgtgtacggcaactacgagagcaaaaagcataaacaaggtttccttaatgaagagaatctaaaatccattgtccccgttaccaaattgaaatccaaagctccacactggacaaatcggatcctccacgagtacaaaaacttgtctaccagtgaaggagtgtccaaggagatgcatcacctgcagagaatgtttctgcagaactgctgggagatccccacctatggtgcagcttttttcacaggacaaatcttcaccaaggcaagcccttctaatcacaaagtgataccagtctatgtgggggtcaacattaaggggctccatctgctcaatatggaaacaaaggctctgcttatatctctgaagtacggctgctttatgtggcaactcggcgacactgacacctgcttccagatacattcaatggaaaataagatgtcgtttattgtgcataccaaacaagctgggcttgtcgtcaagctgctgatgaagttgaacgggcaactgatgcccactgagaggaatagttag

SEQ ID NO: 24732 - DNA, 210 bp, synthetic construct
  misc_feature 1..210: note = Description of Artificial Sequence: Synthetic coding sequence
  source 1..210: mol_type = other DNA
atgggcaaccccgagaacatcgaggacgcctacgtggccgtgatcagacccaagaatacagcttctctgaactcccgggagtaccgagccaaatcttacgaaatattattgcacgaagtccctattgaaggccagaagaaaaagcgaaaaaaggtgctcctggagacgaagcttcagggaaattctgagattacacagggaattctgtag

SEQ ID NO: 24733 - DNA, 1698 bp, synthetic construct
  misc_feature 1..1698: note = Description of Artificial Sequence: Synthetic coding sequence
  source 1..1698: mol_type = other DNA
atgggcaaccccgagaacatcgaggacgcctacgtggccgtgatcagacccaagaacacagccagcttgaacagccgtgagtaccgggcaaagagctacgaaatcctgttgcacgaagtgccaatcgagggacagaaaaagaaacgcaagaaagttctgcttgagaccaagctgcaaggaaacagtgagatcacacaggggatactggattatgtcgtcgagactaccaagccaatatcccctgcaaatcaaggtataagaggcaagcgagttgtgctgatgaaaaagtttcctctcgacggggaaaagatggggagagaagccagtctgttcattgtcccctctgttgtgaaagacaacaccaagtacacatacacccccggctgccccatcttttactgcctccaggacatcatgagggtgtgttccgagtcatccacgcacttcgccacattgaccgcaaggatgcttatcgccttggataaatggcttgatgaaagacacgcccagtcacacttcatacccgcactattccgcccgtcaccgctggaacgaatcaagaccaacgtgatcaatcccgcgtacgctaccgagagtgggcagaccgagaactccctccacatgggatattctgcgctggaaattaaaagtaaaatgcttgcactggagaaggctgatacttgcatctacaatcccctcttcggtagcgacttgcagtacactaacagagttgataaggtggtaataaacccatacttcggactcggcgctcccgactacagcaaaatacagattcctaaacaggaaaaatggcagcgatccatgtcctcggtgactgaggataaggaacgccagtgggtcgatgactttccgctgcatcggagcgcatgtgaaggggactcagaactgttgagcaggctgctatcagaacgcttcagtgtgaatcagctcgatagcgatcactgggcccccattcattacgcctgttggtacggcaaggtggaggcaacacggatcctgctcgaaaaaggcaaatgtaacccaaatctgctgaatggccaactgagttccccactgcactttgcagcaggtgggggacatgcggaaatcgtgcagatcctgctaaaccaccctgaaacagataggcatattaccgatcaacaagggcgcagtccgttgaacatttgtgaggaaaacaagcagaataactgggaggaagcagccaagctgctgaaggaggctatcaataagccttacgagaaggtgagaatttaccgcatggacggaagttacaggtccgtcgagctgaagcacggaaacaacactacggttcaacagatcatggagggcatgaggctctcacaggagacccagcagtactttacgatatggatctgctccgaaaatctgagcctccaactaaagccttatcataaaccgctgcagcatgtccgggattggccggagatactggcagagctcacaaatttagacccccagagggagacacctcagttgttcctcaggagggatgtgaggcttccactggaggtcgagaagcagatcgaagacccactcgctattctgatactcttcgatgaggcacgatataacctactgaaaggattttacactgcccctgatgccaagctcatcactctggccagcctactgctgcagagcctgtggaaactttag

SEQ ID NO: 24734 - DNA, 78 bp, synthetic construct
  misc_feature 1..78: note = Description of Artificial Sequence: Synthetic coding sequence
  source 1..78: mol_type = other DNA
atgggcaaccccgagaacatcgaggacgcctacgtggccgtgatcagacccaagaacaccgctagtctgaacagctag

SEQ ID NO: 24735 - DNA, 39 bp, synthetic construct; identical to SEQ ID NO: 11271
  misc_feature 1..39: note = Description of Artificial Sequence: Synthetic coding sequence
  source 1..39: mol_type = other DNA

SEQ ID NO: 24736 - DNA, 117 bp, synthetic construct
  misc_feature 1..117: note = Description of Artificial Sequence: Synthetic coding sequence
  source 1..117: mol_type = other DNA
atgggcaaccccgagaacatcgaggacgcctacgtggccgtgatccggcctaaaaataccgcaagcctgaattccagggagtatagagctaaatcctatgaaattctacttcactag

SEQ ID NO: 24737 - DNA, 297 bp, synthetic construct
  misc_feature 1..297: note = Description of Artificial Sequence: Synthetic coding sequence
  source 1..297: mol_type = other DNA
atgggcaaccccgagaacatcgaggacgcctacgtggccgtgatccgccctaaaaacactgcgtctttgaatagccgcgagtatagggctaaatcatatgagatacttcttcacgaagtacccatagagggacagaaaaaaaaacgcaaaaaggtcctgctggagacaaagctgcagggcaactccgagatcactcagggaatccttgattacgtggtggaaacgactaaacccatttcacccgccaatcagggaatacggggaaaaagggtggtgctgatgaaaaagttcccctag

SEQ ID NO: 24738 - DNA, 555 bp, synthetic construct
  misc_feature 1..555: note = Description of Artificial Sequence: Synthetic coding sequence
  source 1..555: mol_type = other DNA
atgggcaaccccgagaacatcgaggacgcctacgtggccgtgatcagacccaaaaatacagccagtttaaacagccgcgagtatcgggcgaaatcctacgagatccttcttcatgaggttcccatagaaggccaaaaaaagaaacgaaaaaaggtgctgctggagactaaactccagggcaattctgagatcacgcaaggaatcctggactatgtggttgaaacgacgaaacccatcagtcccgccaatcaaggcatcagggggaagagagtggtgctcatgaagaagtttcctctcgacggagagaaaatgggcagagaggcctcgctattcattgtcccttccgttgtgaaagacaataccaagtatacatataccccgggttgccctattttctactgcctgcaagacattatgcgggtgtgcagcgagagttctacgcacttcgctactctgaccgcccgaatgctgatcgctttagacaaatggctggatgaacggcatgcccagtcacatttcatcccggccctcttcaggccgagcccgctcgaatag

SEQ ID NO: 24739 - DNA, 339 bp, synthetic construct
  misc_feature 1..339: note = Description of Artificial Sequence: Synthetic coding sequence
  source 1..339: mol_type = other DNA
atgggcaaccccgagaacatcgaggacgcctacgtggccgtgatcagacctaaaaatactgcgtctctgaattcccgcgagtatagggctaagagttacgaaatcctgcttcacgaagtgcccatcgaaggccagaaaaaaaagcggaaaaaggtgctcctcgaaacaaagctacaaggcaactccgagattacacaggggattttggattatgtggtggagactaccaagcccatctcgccagcaaatcagggcatacgcgggaagagggtggtgctcatgaagaaattcccccttgacggcgagaaaatgggaagagaggccagcctgtttatctag

SEQ ID NO: 24740 - DNA, 105 bp, synthetic construct
  misc_feature 1..105: note = Description of Artificial Sequence: Synthetic coding sequence
  source 1..105: mol_type = other DNA
atgggcaaccccgagaacatcgaggacgcctacgtggccgtgatccggcctaagaacacggccagtctgaactctagagaatatagagctaaaagttacgagtag

SEQ ID NO: 24741 - DNA, 177 bp, synthetic construct
  misc_feature 1..177: note = Description of Artificial Sequence: Synthetic coding sequence
  source 1..177: mol_type = other DNA
atgggcaaccccgagaacatcgaggacgcctacgtggccgtgatccggcccaaaaacaccgctagcttaaattctagagaatatcgtgctaaatcatacgaaattttactccatgaagtgccgattgaggggcagaagaaaaagcggaaaaaggtgttactcgaaacaaagctatag

SEQ ID NO: 24742 - DNA, 489 bp, synthetic construct
  misc_feature 1..489: note = Description of Artificial Sequence: Synthetic coding sequence
  source 1..489: mol_type = other DNA
atgggcaaccccgagaacatcgaggacgcctacgtggccgtgatccggcctaagaatacggctagtctgaacagccgggagtaccgcgccaagagttatgagattttactccacgaggttcctattgaagggcagaagaagaagagaaagaaggttttactggagacaaagctgcaaggaaactcagagatcactcagggcattctcgattatgttgtggaaacaacaaaacctatttctcctgctaatcaggggatccgaggcaagcgcgtggtcctgatgaaaaaatttcctcttgacggggagaagatgggccgggaagcctccctgtttatcgtgccaagcgtggtaaaggataacactaagtatacatacacaccgggatgtcctatcttctattgcctacaggatattatgcgggtgtgttcagagtcctcgacacattttgccacgctgactgcccgaatgctaatcgctctggacaagtag

SEQ ID NO: 24743 - DNA, 732 bp, synthetic construct
  misc_feature 1..732: note = Description of Artificial Sequence: Synthetic coding sequence
  source 1..732: mol_type = other DNA
atgggcaaccccgagaacatcgaggacgcctacgtggccgtgatcaggcctaaaaacaccgcatccctcaacagccgggaatacagagcgaaatcctacgaaattctattgcatgaggttcctatcgaagggcaaaaaaagaaacggaaaaaggttctactggagacaaaattgcaaggcaatagtgagatcacacagggcattctcgactatgtcgtggagacgaccaaacccatctcccccgctaatcaggggattaggggcaagagggtcgtgctgatgaagaagtttcctttggacggagaaaagatggggagggaagccagcctgtttattgtccctagtgtcgtaaaggacaatacaaagtacacttacacccccggctgccccatattttactgcctccaggatatcatgcgagtgtgtagcgagtcatctactcactttgccactctgaccgctcgcatgttaatcgccctcgacaagtggctggacgagcggcacgcccagtcacactttattcctgcactttttcggccatccccacttgagcgcattaaaacaaacgtgattaatccggcatatgccacagaatccggacaaacagagaactctcttcacatgggttactcagccctggaaattaagagcaagatgttagccctcgaaaaagccgacacatgtatatacaaccctctgtttggcagcgacttgcagtatacgaataggtag

SEQ ID NO: 24744 - DNA, 198 bp, synthetic construct
  misc_feature 1..198: note = Description of Artificial Sequence: Synthetic coding sequence
  source 1..198: mol_type = other DNA
atgggcaaccccgagaacatcgaggacgcctacgtggccgtgatccgcccaaaaaacactgcgtctctgaattcacgggaataccgggcaaagtcatacgagattctcctgcatgaggtacccattgagggacagaagaaaaagaggaagaaagttttgctagaaacgaaactgcaaggcaacagcgagatcacctag

SEQ ID NO: 24745 - DNA, 1089 bp, synthetic construct
  misc_feature 1..1089: note = Description of Artificial Sequence: Synthetic coding sequence
  source 1..1089: mol_type = other DNA
atggccaccgccgagaccgccctgcccagcatcagcaccctgaccgcccttgggcctttcccagatacacaggatgacttcctcaagtggtggaggagcgaagaggcacaggatatggggcccgggccaccagacccaacagagccgccacttcatgtaaaaagcgaggaccagccaggggaagaagaagacgacgagcgcggggctgacgctacatgggacttggacctcctcctaacaaatttcagtggaccagaaccaggcggcgctccacaaacctgcgccctggcaccgagcgaagcatcaggagcgcagtacccacctccacccgagaccctgggtgcgtacgccggtggcccgggactcgtcgccggcttgctgggcagcgaagaccacagtggctgggttcggcccgcattgcgcgcccgggcgccagacgccttcgtcggacctgcactagcgcctgccccagccccggagcccaaggcactcgctctgcaaccggtctaccccggacccggtgcagggtcttcaggaggatattttcctaggacggggctctcagttcctgcagccagcggagctccctacggtttgttgagcggataccctgctatgtacccggctccccagtatcagggacacttccagctatttagagggctgcaggggcccgccccaggtccagccacctccccaagttttctcagctgcctgggtcctgggacagtcgggactggcctgggcggaactgctgaggatccaggtgtgatagccgagacggcaccgagcaaacggggcaggaggtcctgggcccgaaagcggcaagcagctcacacttgcgcccaccccggctgtggcaaatcctacactaagagtagtcacctaaaagcccaccttcggacacacacgggagaaaaaccttacgcgtgcacatgggaaggctgcggttggagatttgcccgcagcgatgaacttacacggcattaccggaagcacaccggacagaggccatttcgctgtcaattatgtcctagggccttttccagatcagaccacctcgctcttcatatgaagagacatctgtag

SEQ ID NO: 24746 - DNA, 999 bp, synthetic construct
  misc_feature 1..999: note = Description of Artificial Sequence: Synthetic coding sequence
  source 1..999: mol_type = other DNA
atggccaccctgaaggaccagctgatctacaacctgctgaaggaggagcagacgccccagaataagattacggtggtgggtgtcggtgcagtcggtatggcctgcgccatttctatcctgatgaaggacttggccgacgaactggcactggtggatgtgatcgaagacaagctgaagggcgagatgatggacctgcaacacggatctctcttcttaaggactcccaagatcgtgtcagggaaagattataacgtcacagcaaattctaaactcgtgatcatcactgcgggagcgcggcagcaggaaggggaaagtcggctgaacctggttcagcgcaatgtcaatatctttaagttcattattccaaatgtggtgaagtattccccaaattgtaaactgctgattgtcagtaaccctgttgacatcctgacttacgttgcatggaaaatctccgggttccctaaaaatagagtgatcggatcggggtgcaatctcgacagtgctcggttccgatacctgatgggcgaacgactgggtgtgcatcccttgtcttgccacggctgggtcttgggagagcacggagattctagtgtgcctgtctggtctggaatgaatgtggctggagtgtctctgaaaactctccatccagacctggggactgataaagacaaggagcaatggaaagaagtgcacaaacaggtggtggaaagcgcctacgaagtgattaagcttaaagggtatacatcctgggcaatcgggttatctgtggctgacctggcagagtctattatgaagaatctgaggcgggtacaccctgtgtctactatgattaaaggcctctatgggatcaaggatgacgtgtttttaagtgtaccctgtattctggggcaaaacggcatctcagacttagtgaaagtaacccttacatctgaggaagaagcaaggctgaagaaaagtgccgacaccctgtggggcatccaaaaagagctgcagttctag

SEQ ID NO: 24747 - DNA, 825 bp, synthetic construct
  misc_feature 1..825: note = Description of Artificial Sequence: Synthetic coding sequence
  source 1..825: mol_type = other DNA
atggccaccctgaaggaccagctgatctacaacctgctgaaggaggaacagacaccacagaacaaaatcacagtggtgggggttggggcagtggggatggcatgcgccatctccatcttaatgaaagacttagccgacgagcttgccctggtagatgtaattgaggacaaattgaagggggaaatgatggaccttcagcacgggtccttgtttctgaggaccccgaagattgtgtcaggtaaagactacaatgtgacagcgaacagcaagttagtaatcataacagcaggcgcacgacagcaggaaggggagtcgcgactcaatttggttcagcggaatgtcaatatttttaaattcataatccccaatgtggtgaagtattcccctaactgtaaactgctgatcgtgagtaaccctgtggacatcttaacttacgtggcctggaagatttctggctttcccaagaatcgagtgataggctccgggtgcaacttggacagcgccagatttcggtaccttatgggtgagcggcttggggtgcaccccctgtcttgtcacgggtgggttttaggagagcacggcgactccagcgtcccagtctggtctggaatgaatgtggcgggcgttagtctcaaaaccctgcatccggatctggggacagacaaagacaaggaacagtggaaggagtgtcggtatactcttggagaccctaaaggggcagccatacttaagtcatctgatgtgattagttttcattgtctggggtacaacagaatcctggggggcggttgcgcctgttgccctttctatctcatctgcgattag

SEQ ID NO: 24748 - DNA, 999 bp, synthetic construct
  misc_feature 1..999: note = Description of Artificial Sequence: Synthetic coding sequence
  source 1..999: mol_type = other DNA
atggccaccctgaaggaccagctgatctacaacctgctgaaggaggaacagacaccccagaacaagatcaccgtagtgggtgtgggcgccgtggggatggcctgcgctatcagcattttgatgaaagatctcgccgacgaacttgctcttgtggatgtgatagaggacaagttgaaaggcgaaatgatggacctacagcatggatccctgttcctcaggacccctaaaatagtttcgggaaaagattacaatgtgactgccaactctaagctggtaataatcacagccggcgcgcggcagcaggagggggagtccagattgaatttggtccaacggaacgtcaatattttcaagtttatcattcccaacgtggtcaaatattcccccaactgcaaactgctgattgtgagtaatcctgtggacattttaacatacgtggcttggaagatctccggattccccaaaaacagagtcattggctccggttgtaacttggattccgcaagattccggtacttaatgggagaaagactgggagtgcatccactgagctgccatgggtgggtgctgggagagcacggcgacagctctgtccccgtctggtcgggcatgaatgttgccggggtttctctgaagacactccatcccgaccttggaactgacaaagacaaagaacagtggaaggaggtgcataagcaggtcgttgaatctgcctacgaagtaataaaactcaaaggctacactagctgggccatcgggttaagcgtggccgatctggccgagtccatcatgaagaatctacggcgagtgcaccccgtgtccaccatgataaagggcctgtatggcattaaagacgacgtgttcctttccgtgccttgcatcctgggacaaaacggtatttctgacctggtcaaagtaacactgaccagtgaggaagaagcgaggctcaagaagtcagccgacaccctgtggggaatccagaaggaactccagttttag

SEQ ID NO: 24749 - DNA, 825 bp, synthetic construct
  misc_feature 1..825: note = Description of Artificial Sequence: Synthetic coding sequence
  source 1..825: mol_type = other DNA
atggccaccctgaaggaccagctgatctacaacctgctgaaggaggagcagacccctcagaacaagatcaccgtagtgggtgttggtgcagtgggcatggcttgcgccatcagtatccttatgaaagacctggcagacgagcttgcgttagtagacgtgattgaggacaagctgaaaggagagatgatggacctccagcacggttctcttttcctgaggacaccaaaaattgtatctggaaaagtggatattctgacctacgtcgcctggaaaatcagcggctttcccaagaatcgcgtgatcggctctggctgcaaccttgacagtgcccgctttaggtacttaatgggagagcggcttggagtgcatcccctctcttgtcacggctgggtgcttggagaacacggagatagcagcgtgccggtgtggagcgggatgaacgtggcgggggtcagtctgaagacactgcaccctgatctcggcactgacaaggacaaagaacagtggaaagaagtccacaagcaggtggtggagagcgcttacgaggtcattaaactcaagggatatacctcctgggcgatagggctgtctgtcgctgatcttgccgagagtatcatgaaaaacctccgccgcgttcatcccgtgtcaactatgatcaaaggtctgtacggcattaaagacgacgtttttttatctgtgccatgtattctggggcagaatgggatctccgacctggtgaaggtgacgctgacttcagaggaagaagcgaggttgaagaaatcggcagacacgctttggggaatccagaaggagttgcagttttag

SEQ ID NO: 24750 - DNA, 918 bp, synthetic construct
  misc_feature 1..918: note = Description of Artificial Sequence: Synthetic coding sequence
  source 1..918: mol_type = other DNA
atggccaccctgaaggaccagctgatctacaacctgctgaaggaggagcagacgccccaaaataaaatcacagtggtcggggtcggagccgttggtatggcttgcgccatctccatcctgatgaaggacctcgctgacgaattggctattgtgtctgggaaagattataatgtaacagctaacagcaagttagtaattatcactgctggagcccgacagcaggaaggtgaatctcgtctaaacctggtccagcggaatgtcaacatcttcaaattcataatcccaaatgtcgtgaaatacagccctaattgtaagcttctgatagtgtcaaacccagtggacatcctaacttacgttgcctggaaaatttctggctttcccaagaatcgagtcatcggttccggatgcaacctagactccgcccgctttcgctacctgatgggcgagaggctgggcgtgcatccgctgtcttgccatggctgggtgctcggggagcatggcgatagctctgtaccggtgtggagcggaatgaacgttgccggcgtctccctgaagaccctgcaccccgatctggggacagataaagacaaggagcaatggaaagaggtccataaacaggtcgttgagtcagcatacgaagttattaaactgaagggctacacctcttgggcaataggcctgtctgtggccgacctggctgagagtattatgaagaatctgaggcgggtgcacccagtttccaccatgataaagggcttgtatgggattaaagatgacgtatttctgagcgttccgtgtatcctggggcagaacggcatcagcgatctggtgaaagtgaccttaactagtgaggaggaggcacgtcttaagaagtcagcagacacgttatggggcatccagaaagaacttcagttctag

SEQ ID NO: 24751 - DNA, 435 bp, synthetic construct
  misc_feature 1..435: note = Description of Artificial Sequence: Synthetic coding sequence
  source 1..435: mol_type = other DNA
atggccaccctgaaggaccagctgatctacaacctgctgaaggaggagcagaccccgcagaataaaatcactgtggtcggggttggggcagtgggaatggcgtgtgctatttctatactcatgaaggacctcgcagatgaactagcattagttgatgtgattgaagacaaactgaagggtgagatgatggacctccagcatggcagcttgtttcttaggacaccgaagattgtttcagggaaagactacaacgtgacagctaacagtaagctggtaataattacagccggcgctaggcaacaggagggcgaatcgcgattgaacttagtccaacgaaacgtcaatatcttcaagttcattatacccaatgtggtgaagtactcccctaactgcaagctcttgattgtgagtaatcccggggaagccttcgactag

SEQ ID NO: 24752 - DNA, 345 bp, synthetic construct
  misc_feature 1..345: note = Description of Artificial Sequence: Synthetic coding sequence
  source 1..345: mol_type = other DNA
atggccaccctgaaggaccagctgatctacaacctgctgaaggaggaacaaactccacagaataaaatcactgtagtcggggtcggtgctgtgggcatggcttgcgctatatccattctgatgaaggacttggcggacgagttggcattggtggacgtgatcgaggacaagctgaagggtgaaatgatggacctgcagcatggctccttgttccttagaacacctaaaatcgtttccggaaaggattacaatgttacagcaaatagcaaactcgtcatcatcacagctggtgctagacagcaagagggagagtcacgcctaaatctggtccagcggaacgtgtag

SEQ ID NO: 24753 - DNA, 219 bp, synthetic construct
  misc_feature 1..219: note = Description of Artificial Sequence: Synthetic coding sequence
  source 1..219: mol_type = other DNA
atggccaccctgaaggaccagctgatctacaacctgctgaaggaggagcaaacaccccaaaacaagattactgtggtcggcgtgggcgccgtcggcatggcctgcgctatctccattttaatgaaagacctggctgatgaactagccctcgttgacgttattgaggacaaacttaagggtgagatgatggatcttcagcatggttccctctttctgtag

SEQ ID NO: 24754 - DNA, 1086 bp, synthetic construct
  misc_feature 1..1086: note = Description of Artificial Sequence: Synthetic coding sequence
  source 1..1086: mol_type = other DNA
atgggcgagcccagcggcggctacacctacacccagaccagcatctttttgtttcatgcaaagatccccttcggttccaaatctaacatggccaccctaaaggaccagctcatctacaatctgctcaaagaggaacagacacctcagaacaagattacagttgttggggttggcgccgtgggaatggcctgtgccatctccattctcatgaaggatcttgccgacgaattagcactggtcgatgtgatcgaagacaagctcaagggagaaatgatggacctgcagcatggaagtctgttcctgcggacacccaagatcgtgagtggcaaggactacaacgtcacggctaacagtaagctcgttatcatcaccgccggggccaggcagcaggagggcgaatcaaggcttaatttggtccagaggaacgtgaacatcttcaagttcattatacctaacgttgtgaagtacagcccaaactgtaagctcttgatcgtatctaatccagtggatatcttaacatatgtcgcctggaagatctccggattcccaaaaaacagagttatcggatctggatgcaaccttgactcagccagatttaggtatctcatgggggaacgtttgggagtgcacccactcagctgccacggctgggtgctgggagaacatggggactcaagtgtgcccgtgtggagtggaatgaatgtagcgggtgtttctctgaaaaccctccatccagacctaggcactgacaaggacaaggaacagtggaaggaggtgcacaaacaggttgtagagtcagcctacgaagtcatcaagttgaagggctacacaagctgggctattggactttctgtggcagacctggctgaatctatcatgaaaaacctgagacgcgtgcacccagtgtccactatgatcaaaggactgtatggcatcaaggatgacgtctttcttagtgtaccatgtatcctaggacagaacggcatttctgatctggtgaaggtcacacttacgagcgaagaggaagctcgcctgaagaaaagtgctgacacattgtggggaatccagaaagagttgcagttttag

SEQ ID NO: 24755 - DNA, 999 bp, synthetic construct
  misc_feature 1..999: note = Description of Artificial Sequence: Synthetic coding sequence
  source 1..999: mol_type = other DNA
atggccaccctgaaggaccagctgatctacaacctgctgaaggaggagcaaacgccccagaataagataacagtcgtcggagtaggggctgttggtatggcttgcgcaattagcattttgatgaaagacttagcagacgaactcgccctcgtggacgtaatcgaggacaagctgaaaggagaaatgatggacctgcaacacggatccctctttcttagaactccgaaaattgtttccggcaaagattataatgtgacagctaacagcaaattagtaataatcaccgccggcgctagacagcaagagggcgaaagccggctgaacctggtccaaagaaatgttaacatcttcaagtttatcatacccaatgtggtgaaatattcaccaaattgcaagcttctcatcgtgagtaaccctgtagatattctgacctatgtagcttggaaaataagcggctttcccaaaaaccgggtcatagggtcaggctgcaacctggactcagccagattcagatatttgatgggagagcgtctgggcgtgcaccccctatcatgccatgggtgggtactgggggaacatggcgattctagcgtccccgtttggtccggcatgaatgttgcgggagtatccctgaagacgctgcatcccgacttggggactgacaaggataaagagcagtggaaggaggtgcacaaacaagtggtcgaatcggcctacgaggttattaaattgaagggttacacgagttgggccatcgggctgagcgtggcagatctggctgaatcaataatgaagaacctgaggcgtgttcaccccgtttcaaccatgataaagggattatacggtatcaaggacgatgttttcctgtctgtcccctgtattctgggacaaaacggtatcagcgacttggtcaaggtgactcttaccagcgaggaggaggcccgcctcaagaagtctgcagacactctgtggggtattcagaaagagctccaattctag

SEQ ID NO: 24756 - DNA, 474 bp, synthetic construct
  misc_feature 1..474: note = Description of Artificial Sequence: Synthetic coding sequence
  source 1..474: mol_type = other DNA
atggccaccctgaaggaccagctgatctacaacctgctgaaggaggaacaaaccccccaaaataaaatcactgtggtcggagtgggggcggttgggatggcctgcgctattagcattcttatgaaagatttggcagatgagctcgcactcgtggatgtgattgaggataagctcaagggggaaatgatggacctccagcacggctctttgtttctcaggacaccaaagatagtatcaggcaaggattataatgtaactgctaatagtaagttagttataatcaccgccggggcccgacaacaggaaggcgagtctcgccttaatctggtgcagcgcaatgtgaacatctttaaattcatcatcccaaacgtggtgaagtactctcccaattgtaagctcctgattgtaagcaatcccgtggacatcctcacgtatgtggcatggaaaatttccggcttccctaaaaacaggtag

SEQ ID NO: 24757 - DNA, 804 bp, synthetic construct
  misc_feature 1..804: note = Description of Artificial Sequence: Synthetic coding sequence
  source 1..804: mol_type = other DNA
atgggcagcgcctgcatcaaggtgaccaagtacttcctgttcctgtttaatctgatctttttcattttgggggctgtgatcctgggatttggagtctggatcttggctgataagtccagtttcatcagcgtacttcagactagctcctcctctctgcgtatgggcgcgtacgtctttatcggagtgggagcggtgacaatgctgatggggtttcttggctgtatcggcgcagtgaatgaggtgaggtgcctgctagggctttatttcgccttcctgctgctgatactgattgcccaagttacagctggcgcactgttctactttaacatgggcaaactgaagcaggaaatgggaggaatcgtcaccgaactgatccgggactacaactcatcccgcgaggactccctccaagacgcttgggactatgtgcaggcacaagtgaaatgctgtggttgggtctccttttacaactggaccgataacgctgaactgatgaacagacctgaggtgacatatccctgttcctgtgaagtgaaaggagaagaagacaacagcctgtccgttcgaaagggattttgcgaagctcccgggaatcggacccaatcggggaaccacccggaggactggccagtgtatcaggagggatgcatggagaaggtccaggcatggctccaggagaacctcggtatcatccttggcgttggggttggcgtggcaatcattgagctgctgggaatggtcctctctatttgcctctgtagacatgtgcactcggaagactacagcaaagtgcctaagtactag

SEQ ID NO: 24758 - DNA, 3393 bp, synthetic construct
  misc_feature 1..3393: note = Description of Artificial Sequence: Synthetic coding sequence
  source 1..3393: mol_type = other DNA
atgaagcggagcgagaagcccgagggctaccggcagatgcggcccaagacttttcccgcctccaactatactgtatctagccggcagatgctgcaggagatcagggagagcctgcgtaacctgtcaaagccttccgacgctgccaaggccgaacacaacatgtccaaaatgagtacagaggaccccaggcaggtgcggaacccacccaaattcggaacacaccacaaggctctgcaggagattcgcaactctttactgcctttcgctaatgaaacgaacagctccaggtcaacctctgaggttaaccctcagatgctccaggatttacaggctgctggttttgacgaggatatggtgatccaggcgttacaaaagaccaacaacaggtctatcgaggccgcaatagagtttatcagtaaaatgtcgtaccaggaccccaggcgcgaacagatggcggccgcggccgcgaggccaattaacgcctccatgaagcctggcaatgtccaacagtcagtaaaccgtaagcaatcctggaaaggttccaaagaaagcctggttccacagcggcatgggccccctctgggagaatcagtcgcatatcacagtgagagtcctaacagtcaaacagatgttggtcggcccctgtccggctccggcatctcggcttttgtgcaagcacacccctcgaacggccagcgcgttaatccaccgcctcctccccaggtgcggagtgttacccccccaccccccccccgtgggcagacaccgccgccaagagggacaactccgccaccgccttcctgggaacccaattcacaaaccaagcgatactcaggcaacatggaatatgttatcagtagaatctcccccgtccctcccggcgcgtggcaagagggttaccctcccccgcctttaaatacaagccccatgaacccaccaaatcagggacagagaggcatttcgagtgtaccagtgggacgtcagccaattattatgcaatcaagctcgaagttcaacttcccaagtgggagaccaggaatgcaaaacgggacaggccagacggactttatgatacatcaaaatgtcgttccagcggggaccgtcaatagacaaccaccccctccctaccccttaacagctgccaacggacagtctccctctgccctacaaacagggggtagcgccgcgcccagcagttataccaacgggtccatcccccaatctatgatggtgcccaacaggaactcacacaatatggagctttacaacatcagcgttcccggcctgcaaacaaattggccccagtccagcagtgcccctgcccagagctccccttcctccgggcatgagatcccaacgtggcagcccaacattcctgtgcggagtaacagtttcaacaacccactcggtaatagggcttcacattctgctaactcccagcccagtgctacaaccgtcacggcgattacccccgcccctattcagcaaccggttaagagcatgcgggtgcttaaaccagaactgcagactgctttggcaccgacacatccctcgtggatcccccagcccattcagacagttcaacctagccccttcccagaaggtacggctagtaacgtgaccgtgatgccccccgtggcggaagcgcccaactaccagggaccacccccaccgtacccgaagcatttgctccatcagaatcctagcgtgcctccgtatgagagcatcagcaagccttcaaaagaagatcaaccttccctgccaaaagaggacgagtctgaaaagtcttacgaaaatgtcgattctggggataaggagaaaaagcagatcaccacaagtcccatcacggtgcggaagaacaagaaagatgaagaacgccgggagtctcgcatccaatcatattccccgcaggcattcaagttttttatggaacaacacgtggagaatgttctgaagtcccatcaacagagattgcatcggaaaaagcagctagagaatgaaatgatgcgggttggcttgagtcaggatgcccaggaccaaatgcgtaaaatgttgtgccagaaagagagtaactacatacggctcaaaagagcaaagatggataagtccatgtttgtgaagattaaaactctgggcataggagcatttggggaggtgtgcctggctcgcaaggtggacaccaaagcgctttacgcaacaaagaccttacgcaagaaggacgtgctgctccggaatcaggtcgcccacgtcaaggcggaacgggatatcctggccgaagctgataacgaatgggtcgttagactatactacagctttcaggataaagacaacctttactttgtgatggactatatacccggcggggatatgatgagcctgttaatccgcatggggatctttccagaatcattagcccggttctatattgccgagctcacctgtgcagttgagtcagtccataaaatgggttttatccatagggacataaaaccagataatattctcattgatcgcgacggacacatcaaactgaccgactttggactttgtaccgggtttcgctggacccacgacagtaagtactaccagagcggtgatcaccctcgccaagattcaatggatttttcaaatgagtggggagatccatcctcttgccgctgtggagatcgacttaagcctctggaacgaagagctgctagacagcatcaacgctgcttagcgcatagcttagtgggcaccccaaactacatcgctcccgaagtgttattacgcacaggctacactcagttgtgtgattggtggagcgtcggagtcatactctttgagatgctggtcggtcaacctcctttcctggcccaaacgcctcttgaaacacagatgaaggtgataaattggcagacaagcctgcatatcccgcctcaagcaaaattaagcccagaagcttcagatctcataatcaaactgtgcaggggacccgaagacaggctgggaaagaacggcgctgacgagatcaaggcacacccattttttaagactatcgacttttcctctgatcttaggcagcagtctgcttcctatattccaaagattacccacccaacggacacttctaattttgatcccgtggatccagacaagctgtggtccgacgataatgaagaggaaaacgtcaatgacaccctcaatggctggtataagaatgggaaacacccggagcacgctttctatgagtttacattccgacggtttttcgatgataacgggtatccttataattacccaaagccaattgaatacgagtatattaactcccaaggttccgagcagcagtcagacgaggatgaccagaataccggaagtgagattaaaaatcgagacctggtgtacgtgtag

SEQ ID NO: 24759 - DNA, 2073 bp, synthetic construct
  misc_feature 1..2073: note = Description of Artificial Sequence: Synthetic coding sequence
  source 1..2073: mol_type = other DNA
atgaagcggagcgagaagcccgagggctaccggcagatgcggcccaagacttttccagcctccaactatacagtttcaagtcggcagatgctgcaggaaatccgcgaatcgctgaggaacctgtctaaaccaagtgatgccgctaaggcagagcacaacatgagcaagatgtcgaccgaggatccgagacaggtgcgcaatccccccaaatttggcacccaccacaaagcactccaggagattagaaactcattgctaccgtttgccaacgagacaaacagcagtcgttctacttccgaggtgaatccacagatgttgcaggacctgcaggccgctggattcgacgaagatatggtgatccaggccttgcagaagactaacaaccggtctatcgaggccgcaatcgagtttataagtaagatgtcctatcaggaccccaggagagaacagatggccgccgccgccgccagacccatcaacgcctcaatgaaaccaggtaacgtgcagcagtccgtcaaccgcaagcagagctggaaggggtccaaggaatcgttggtgccccagagacatgggccccccttgggcgagagcgtggcatatcactccgagagccccaactcccaaaccgacgttggaaggcccctctcggggagtggtatttccgcgtttgtgcaagcccacccttccaacgggcaacgggtcaatcccccccctccccctcaggttcgttcagtgactcctccacctccccccaggggacagacccccccaccccgcgggaccacgccacccccgccctcatgggaacctaattcccagacaaaacggtattcggggaacatggagtatgtgatttccagaatcagccccgtcccacctggggcatggcaggaaggatatcccccacctcccctgaacacatcccccatgaaccccccaaatcagggacagaggggcatttcctccgtgcctgtcggaaggcagcctattattatgcagagctcttccaaattcaatttcccaagcggaaggcctggaatgcagaacggcaccggacagacagattttatgattcatcagaacgtggttcccgctggtactgttaaccggcagcccccccctccataccctctcacagccgcaaacggccagagtccttctgcactccagacaggcggatctgccgcccctagcagctacaccaacggatccatcccccaaagtatgatggtccccaaccggaactcgcacaatatggagctgtataatatctcagtcccgggtctgcagacaaattggccacagtcctcgagtgcacccgcccaaagcagcccctctagcgggcatgagattcccacatggcagccaaacattcccgtcaggtcaaacagcttcaacaaccccttgggaaatcgcgccagccactccgctaattcccaaccgagcgctaccactgtgaccgccattacccctgccccaatccaacagcctgtaaagtctatgagagttcttaagccggaacttcagacggccctggctcccacgcacccaagctggatacctcagccgattcagactgtgcaaccctctcccttcccggagggaaccgccagcaacgtgacggtcatgcctcctgtggctgaagctccaaactaccaaggtccacctcccccatatcccaagcatctcctgcatcagaatccttcggtgcctccgtatgagagcattagtaaaccttctaaggaggaccagccctcactgcctaaggaggacgaatcagaaaagagttacgaaaatgtggactccggtgataaagagaaaaaacagataacaaccagccccataaccgtgcggaaaaacaaaaaagacgaggagaggcgcgaatcgaggatccagtcttattctccacaagcttttaagttctttatggaacagcatgtcgagaatgtgcttaaaagtcatcagcagcgccttcatcggaagaaacaactggagaatgagatgatgagggtgaagcctttcaagatgagtatctttattttaaaccatctgtttgcctggtgtctattctag

SEQ ID NO: 24760 - DNA, 3393 bp, synthetic construct
  misc_feature 1..3393: note = Description of Artificial Sequence: Synthetic coding sequence
  source 1..3393: mol_type = other DNA
atgaagcggagcgagaagcccgagggctaccggcagatgcggcccaaaaccttcccagccagtaattacaccgtctcttcaaggcagatgctgcaagagattcgcgaatctttacggaacctctcaaagccgtcggacgccgccaaggccgaacataacatgagcaaaatgagtaccgaggatcctcggcaggttagaaacccccctaaattcggcacccatcataaagcgttacaggagatacgaaactcgctgttaccatttgcgaacgagactaactcatcaaggtctacatccgaggtgaacccccagatgctacaggatctgcaggccgctgggttcgatgaagatatggtcatccaagcactgcagaaaacgaataatagatctatcgaagctgcgattgagttcatttctaagatgagctaccaggacccacggcgggaacaaatggcagcagccgccgcccgccccattaacgccagtatgaagcccggcaacgtgcagcaatccgtgaataggaaacagagctggaaaggctctaaggagtcccttgtgccccagaggcacgggccccccttgggggagtcagtcgcctaccattccgaatctccaaactcacagactgatgtcggtcgccccctctccggatccggtatttccgcctttgtacaagcacaccctagtaatggccaacgtgtgaaccctcctccccctcctcaggtgaggagcgtcaccccacctcctcccccgaggggccagacaccgccacctcggggcacaactcccccccctcctagttgggaacctaactctcagaccaagcggtactctggtaacatggagtatgtgatatcccgcatttccccagtaccacccggggcttggcaagagggctacccacccccccctctgaataccagtcctatgaacccaccaaatcagggtcagagagggatatcctctgtgcccgttgggagacagccaatcatcatgcagtctagctccaagttcaacttcccttcgggaagacctggaatgcagaatggcaccgggcaaaccgatttcatgatccatcagaatgttgtgcccgccggcaccgtgaaccgccagcctccgcctccttatcccctcaccgccgcgaacggtcagtccccaagcgcactgcagactgggggttcagctgccccctcctcctataccaatggatctattccacagtcaatgatggtcccgaatcgaaattcgcacaacatggagctgtacaacatctctgtgcctggtctgcagacaaactggcctcagagctctagtgcgcctgcacagtcctccccatcttccggccacgagatccctacctggcaaccaaacattcccgtccggagcaatagctttaataatccattgggtaacagagcctctcacagcgcgaacagccagccttcagccactacggttacagccatcacaccggcccctatccaacagccggtgaaaagcatgagggtcctgaagccagaacttcagactgccctagccccaacacatccctcttggattccccaaccaattcaaactgtgcaacccagcccattccccgaggggacagcaagtaatgtgaccgtcatgcctcccgtcgctgaagcccccaattaccaagggcctccgcctccgtaccctaaacacctgctgcatcagaacccgagtgtccctccttacgagtcgatttccaaaccctctaaggaagaccagccttcgttacctaaggaggacgagtctgagaagagctatgagaacgtcgattccggcgacaaagagaaaaaacaaatcaccacatcacctatcactgtacggaaaaacaagaaggacgaggagagacgggaatctcgcatacagtcctattccccccaagccttcaaattcttcatggaacaacacgtggagaacgtgttgaaaagtcatcaacagagactgcaccgcaaaaaacaacttgagaatgagatgatgagggttggcctctcacaggacgcccaggaccaaatgagaaagatgctctgtcagaaggagtccaattacattagactcaaaagggctaagatggacaagtcaatgttcgttaaaatcaagactttgggcattggcgcgttcggcgaggtatgtctggcccgcaaggtggataccaaagccttatacgccacgaaaacgctgagaaagaaggatgtgttgctgcggaatcaagtagctcacgtcaaagcagagcgagatattctagccgaggctgacaatgagtgggtggtacgcttatactacagcttccaggacaaagacaatttgtactttgttatggattacatcccagggggcgatatgatgtcgctccttatccgtatgggcatcttcccagagtcgttggcccgcttttacattgctgagcttacctgtgccgttgagtctgtacacaagatgggattcattcatcgagacattaaacccgataatatcctgatagaccgtgatggacatattaaactgaccgacttcggcctgtgtactgggttccgctggacacatgatagcaaatactaccagtcaggcgaccacccccggcaggactctatggattttagcaacgagtggggagacccgagctcttgtcgatgcggagataggctgaagccgctagagaggcgtgctgccagacagcatcagaggtgtctggcacattcgctggtcgggacccctaactatatagctcctgaggtgttgctcaggaccggatatacccaattatgcgattggtggtcagtgggtgtgatactttttgaaatgctcgttggtcaaccacctttcctcgcacagactcccctcgagactcagatgaaggtgataaactggcagacaagcctgcatatacctccccaagccaagctctccccggaagcttccgacctgattattaaattatgcagaggacctgaagatagactgggcaaaaatggcgccgatgaaatcaaagctcaccccttctttaaaaccattgacttctcctctgatcttcgacagcaaagcgcatcatacataccaaagattacacaccctacagacacatctaactttgacccagtcgacccggacaagttgtggagcgatgataacgaagaggaaaacgtcaatgatactctgaatggctggtataaaaatggcaaacaccctgaacacgcgttctatgaattcaccttcaggcgctttttcgatgacaatggctacccctataattaccctaagcccattgagtatgaatatatcaacagccagggcagtgagcaacagtctgatgaagacgatcagaacacaggttctgaaattaagaaccgggacctggtgtacgtttag

SEQ ID NO: 24761 - DNA, 3267 bp, synthetic construct
  misc_feature 1..3267: note = Description of Artificial Sequence: Synthetic coding sequence
  source 1..3267: mol_type = other DNA
atgcggcccaagaccttccccgccaccacctacagcggcaacagcaggcaacgactccaggagattagagaggggctgaaacagcctagcaaatcatcagttcaggggctgccagctggcccaaactcggacaccagcctggatgccaaggtcctcggcagcaaggacgccacacgtcagcagcagcagatgcgcgctacacccaaattcggtccgtatcagaaagccctacgggaaatacgttactcgctgttgccatttgcaaacgaatccggtacctccgccgccgctgaagttaacaggcagatgctgcaagaactcgtcaatgcaggctgtgaccaagagatggcaggccgagccctgaagcaaacaggctctagatccattgaggccgccctcgagtatatttcgaagatggggtacctcgatccgcggaatgagcaaatcgtcagggtgattaaacagacctccccaggcaaggggcttatgcccacccctgtaacgcggcgcccgagcttcgaagggactggggacagttttgctagttatcatcaactctccggcactccatacgagggacccagctttggtgcagacggtccaacagccctcgaggagatgcctcgcccctacgtggattatctgtttcccggagtgggtccccacggaccgggtcaccaacatcagcatcctccaaaaggttacggggctagtgttgaagccgccggagcacacttccccctccagggggctcactatggcaggccacatctgctcgtacccggagagcccctcggttatggagtgcagagatccccctctttccagtctaagactccccctgagacggggggctatgcctctctgcccaccaaaggacagggaggtcctccgggcgccggtctggcatttcccccccctgccgccggcctttatgtcccccacccccaccataagcaagccggcccagccgcacaccagctccacgtcctcggcagtaggtctcaagtatttgcatcagacagccccccacagagtcttcttaccccgtcaaggaattccctgaacgtcgatctgtacgaactaggatcaacctccgtccagcaatggcctgccgccacattggcccggagagattcacttcagaagccagggctggaagcaccaccacgggctcacgtggcattccgacccgactgcccagtgccatctcgcaccaattctttcaatagtcaccagccaagacctggaccacccggcaaagcagagccttcgctcccagcacctaacactgtcaccgctgtgactgccgcgcacatcttacaccccgtgaaaagcgtgagagttttacggcccgagcctcaaacggccgtgggcccttcacatccagcttgggtcccagccccagcacccgcgcccgcaccagcacccgccccggctgctgagggccttgacgcaaaggaagagcatgcactggccctaggcggcgccggggcgtttccactggacgtggaatatggaggaccggacagacgatgccccccacctccctatcccaagcaccttttgctgcggagcaagtcagaacagtatgacctggattcgctctgtgccggaatggaacaaagtttgagggccggtcccaacgaaccggaaggtggagataagtcgagaaaaagcgccaagggcgacaagggcgggaaagacaagaagcagatccagactagcccagtgcctgttaggaagaacagcagggatgaggagaaaagagaatcccggatcaaatcctacagcccatatgcattcaaattttttatggagcagcacgtagaaaatgttatcaagacctaccaacagaaggtaaatagacggctgcagttagagcaggagatggctaaggcaggcctgtgtgaggctgaacaggaacaaatgcggaagatcctgtatcagaaagagagcaattacaaccgcctgaagagagcaaagatggataagtccatgttcgtgaagatcaagacattgggcattggggccttcggggaagtgtgtctagcatgcaaggtcgatacccatgccctatatgctatgaaaacacttaggaaaaaggatgtgctcaacagaaaccaggtggcacacgtaaaggccgagcgcgacattctggctgaggcggataatgaatgggtcgtgaagctgtactattctttccaggacaaagactcactctattttgtgatggactatatacccgggggagatatgatgtccctgctgatcaggatggaagtcttccccgagcacttggccagattttacatagctgagttgactctggcaatcgagtcagttcacaagatgggttttattcacagggacattaaaccagataatattttgatagacctggacggtcacatcaaactgactgatttcgggctgtgtactggatttaggtggactcataacagcaaatactatcaaaagggaagtcatgttcgacaagatagcatggagcctagtgatctgtgggacgatgtgtcaaactgccggtgcggcgataggttaaaaacactggagcagagagctcgcaagcagcaccagagatgtctcgctcattccctcgtaggcactccgaactacatcgccccagaggtgctgctccggaagggctacactcagctgtgcgactggtggtctgtgggggtcattctttttgagatgttggtgggccagccacctttcctggcccctacccccactgaaacccagctgaaggttattaactgggaaaatacgttacacatccccgcacaagtaaaactgtctccagaagccagggaccttataacaaagctgtgttgttccgccgaccaccgcctgggaaggaacggcgccgatgacctcaaggcccacccctttttcagtgccatcgacttctcctctgatattaggaaacagcccgccccctatgtgcctacaatctctcaccctatggataccagtaactttgacccagtagacgaagagagcccatggaatgatgccagcgaaggatcgaccaaagcttgggatactctaacctctcctaacaataagcacccagagcacgccttctacgaattcacatttaggagatttttcgatgataacggctatccatttagatgccccaaaccatccggggctgaagctagccaggccgaatctagtgatctcgaaagctccgatctggttgatcagacggaaggatgtcagcccgtttacgtttag

SEQ ID NO: 24762 - DNA, 3267 bp, synthetic construct
  misc_feature 1..3267: note = Description of Artificial Sequence: Synthetic coding sequence
  source 1..3267: mol_type = other DNA
atgcggcccaagaccttccccgccaccacctacagcggcaacagcagacagaggctgcaagagatccgggaaggtcttaagcaaccatcaaaaagctctgtgcagggcctgcccgccggccctaactctgacacatccctggacgccaaagtgctggggtccaaggatgccaccaggcagcaacagcaaatgcgggccaccccaaaattcgggccataccagaaggcactgcgggagattcggtacagcctgctacctttcgccaacgagtctggaacttctgctgctgccgaggtgaacagacaaatgctccaagagctggtcaatgctggctgcgatcaggagatggccggccgagcccttaaacagacaggatcccgctctatagaggcggcacttgagtacatttccaagatgggatatctggaccccaggaacgaacagattgtgagggtcatcaaacagactagtccaggcaaaggactgatgcccacccccgtcacgcgaagaccttctttcgagggaacgggggattccttcgcctcttatcaccagctgagtggtaccccctacgaaggaccgtccttcggggccgacggaccaacagctctagaagaaatgcccagaccttacgtcgattacctgttcccaggcgtcggccctcacggccccggacaccagcatcagcaccctcccaaaggttacggcgcatctgtcgaagcagcaggagcccatttccccttgcagggcgcacattatgggcggccccacctactcgtccccggcgaacccttagggtatggcgtgcagcgatccccatccttccagagtaaaaccccccctgagacgggcggttacgcgagtctgcccacaaaaggccagggaggaccaccaggggctgggctcgccttccctccccctgccgccgggctgtacgtgccgcacccacaccataagcaggctgggcccgccgcacatcaattacatgtgttgggaagcaggagtcaggtttttgcctccgactcgccaccccaatccctgctgacgcccagccggaattccctgaacgtggacctttacgaactgggtagtaccagcgtgcagcagtggcccgccgcgaccttggcaaggcgagattccttgcagaaacccggactggaggcaccccctcgagcccatgtagccttcaggccagactgccccgtaccaagtagaactaactcttttaacagtcaccaaccacgccccggaccccccggaaaggcagagccttcgctgcccgctcctaatacagtgacagctgttacggctgcacacatactgcaccccgttaaatcagtcagagttctgagacctgaaccacagacagcggtcggtcctagccacccagcttgggtgccagcccctgcgccggccccggcccccgcccccgcacccgctgctgagggactcgatgctaaggaggagcacgcgcttgcgctggggggagcgggtgcctttccattggacgtggaatatggcggaccggaccgacgctgccccccaccaccatacccgaagcatcttttgttgcgttcaaagagcgaacagtatgaccttgacagtctctgtgccggtatggagcaatctttacgtgctggacctaacgaacctgagggcggcgacaagagccgaaagtccgcaaaaggcgacaagggtggcaaggacaagaaacaaattcagacatctcccgtgccagtgcggaaaaattccagggacgaggagaaacgggaatcccgaattaagtcttactctccgtatgcattcaagttttttatggaacagcacgtggaaaatgtcatcaaaacttaccagcagaaggtgaacaggcgccttcagttggagcaggaaatggctaaggctggactctgtgaggcggagcaggaacaaatgagaaaaatcctctaccagaaggagagcaactataataggcttaaacgcgcaaagatggataaaagtatgttcgtgaagatcaagacacttggtattggagcctttggcgaggtgtgcctggcgtgtaaagtggacactcatgcattatatgccatgaaaactcttagaaaaaaggacgtgctgaatcgcaatcaggtggcccacgttaaagctgaacgtgacatattagccgaggccgacaatgagtgggtggttaagttgtattactcttttcaggataaggactctctgtacttcgtcatggactacattccaggtggggacatgatgtcactcctgattcggatggaggtgttcccagaacatttggcccgcttttacatcgcagagttaacccttgcgattgaatctgttcataaaatggggtttattcacagagatatcaagcccgataatatcctgatcgaccttgacggtcatattaaattaacagacttcggcctctgcacaggtttcagatggacacataattcgaaatattatcagaagggctcacacgttagacaggatagcatggagccgtccgatctgtgggatgacgtgtccaactgtcgttgtggtgatcgactcaaaacccttgaacaacgggccaggaagcagcatcagaggtgcctggcccattctctcgtgggcactcctaattacatcgcacctgaggtcctcctccgcaagggctatacgcagttatgtgactggtggtccgttggcgtgattctgtttgaaatgttggtgggccagcctccttttctggcacctacacccactgagactcagttgaaggtgatcaactgggagaacactcttcatatcccagctcaggtcaagctctccccagaggcaagggacctaattaccaagctatgttgtagcgctgaccaccgcctaggccgcaacggggcagatgatctaaaagcacacccattctttagcgcaatcgactttagtagcgacattagaaaacagccagcaccttatgtcccgacaatatctcaccctatggatacttccaacttcgacccagtcgacgaggagagcccttggaacgatgccagcgagggaagcaccaaggcttgggacaccctcacctctcctaacaacaagcaccccgagcatgctttctatgagtttactttcaggcggtttttcgatgataacggatacccgttccgctgccctaagccaagtggtgctgaggcttcccaggcagagtcctcagatttagagtccagcgaccttgtggaccagaccgaagggtgccagccagtctatgtctag

SEQ ID NO: 24763 - DNA, 972 bp, synthetic construct
  misc_feature 1..972: note = Description of Artificial Sequence: Synthetic coding sequence
  source 1..972: mol_type = other DNA
atggcctacgtgcccgcccccggctaccagcccacctacaaccccaccctaccttactaccaacccatcccgggtggactcaacgttgggatgtctgtgtacattcagggagtggcatcagagcacatgaagaggttctttgttaacttcgtggtgggccaggatcccggaagtgacgtcgcatttcattttaaccctcgattcgacggctgggacaaggtagtgttcaataccctccagggaggtaagtggggctccgaagaacggaaacggagcatgccttttaagaaaggtgcggcgttcgagcttgtattcatcgtcctggccgagcactataaggtcgtcgtgaatggcaatcccttctacgaatatggccatcgcctccccctccagatggtgactcatctgcaggtggatggtgatctgcagctgcaaagtattaatttcattggtgggcagcctctccgacctcagggcccgccaatgatgcctccttatcctgggcctggccattgtcatcaacagctgaattctcttccgactatggaaggccccccgacatttaaccctcctgtcccctatttcggacggctgcaggggggactaacggcccgaagaacgatcatcatcaaaggctatgtacctcccaccggcaagagtttcgctatcaacttcaaagtgggaagctcgggcgacattgctctccacatcaacccacgcatgggaaacggcactgttgtgcgaaacagcctcttgaatggcagctggggcagcgaggagaaaaaaatcacacacaacccattcggacctggccaattctttgatctctccattcggtgcggactcgaccggtttaaagtttatgcgaatggacagcatctcttcgactttgcacatcggctgagcgcattccagagggtggacactctggagatccagggggacgtgaccctcagctacgtgcaaatttag

SEQ ID NO: 24764 - DNA, 1530 bp, synthetic construct
  misc_feature 1..1530: note = Description of Artificial Sequence: Synthetic coding sequence
  source 1..1530: mol_type = other DNA
atgaacaacgaggaggacctgctgcaggaggacagcacccgggacgagggaaatgaaacggaagcgaactcaatgaacacacttcgacggacaaggaagaaggtcacgaaaccctacgtgtgctcgacagaggtgggagaaacggatatgagcaattcaaacgattgtatgcgcgattccagtcagatcctcacgcctcctcagctgtcttcccggatgaagcatattagacaggccatggcaaagaatcgattgcaattcgttcgattcgaggcaacggatttgcacggagtcagtcggagtaagacaattccagcccactttttccaagagaaggtatcccatggcgtctgtatgccgcgaggatacctagaagtcatcccaaaccccaaggacaatgaaatgaacaatatcagggcaacttgctttaatagtgatatcgtcctgatgcctgagctcagtaccttccgggtactgccatgggcggatcggaccgctcgtgtgatatgcgacacgttcacagtcactggcgagcccttgctaacttcaccccgctatattgcaaagcgacagttaagtcatctgcaggccagtggtttttctctcctgagtgccttcatttacgacttctgcatcttcggcgtacccgagatcttgaacagtaagataatttcttttcccgcccttaccttcttgaataaccacgaccagccgtttatgcaagagctcgttgacggcctttaccacacgggcgcaaacgtcgagagtttttctagcagcacccgtccgggacagatggagatttcatttttacccgagtttgggattagttctgctgataatgccttcaccttaagaacaggcgttaaagaggtggctaggaagtacaactatattgcctcctttttcatagagaccgggttctgcgacagtggcatactgtcacactctctgtgggatgtagaccgcaaaaaaaacatgttttgctcaactagcggcaccgaacagctgacaattacaggtaagaaatggctcgctgggttacttaagcatagtgccgctctgagctgtctgatggctccctctgtttcatgcaggaaacgctacagcaaagatcggaaagaccttaagaaaagcgtccccactacttggggctacaatgataattcctgcattttcaacataaagtgtcatggcgagaagggaacccgtattgagaacaagttggggagcgcaaccgcaaatccttatctcgttctggcggccacagtggctgctgggctggatgggttgcatagttcaaacgaggttctggcgggcccagacgagagcactgacttttaccaagtagaaccttccgagatcccattgaagcttgaggatgctctggtggccttggaggaagatcagtgcctgagacaagcgcttggagagactttcattagatactttgtggcgatgaaaaagtatgagctcgagaatgaagaaatcgctgcggagcgcaataaattcttggaatatttcatctag

SEQ ID NO: 24765 - DNA, 627 bp, synthetic construct
  misc_feature 1..627: note = Description of Artificial Sequence: Synthetic coding sequence
  source 1..627: mol_type = other DNA
atgaacaacgaggaggacctgctgcaggaggacagcacccgggacgagggaaatgagactgaagcgaactcaatgaacacacttcggagaacacgaaaaaaggtaacaaaaccgtacgtatgcagcacagaggttggagagacagatatgtctaacagcaatgattgcatgcgagactctagtcagatactgacaccccctcagctcagcagtagaatgaaacatataaggcaggccatggctaaaaaccgccttcagtttgtgcgattcgaagctaccgacctacacggggtgtcaagaagtaaaaccatccccgctcacttcttccaggaaaaggtttcacacggggtatgtatgccccggggctatcttgaagttatccctaatccaaaggacaacgaaatgaacaatatcagagcaacctgcttcaatagcgacatcgtgttgatgcctgagctgtccacttttcgtgtgctgccttgggccgaccggaccgctcgggttatttgtgataccttcactgtcaccgtatcggggatgtcaattggaaggaagacctgctctgccgctctgcttgaattgtcctcatcaaggagcctgggtaaaaacggttggcaagattcatag

SEQ ID NO: 24766 - DNA, 504 bp, synthetic construct
  misc_feature 1..504: note = Description of Artificial Sequence: Synthetic coding sequence
  source 1..504: mol_type = other DNA
atgcactggggcaccctgtgcggcttcctgtggctgtggccctacctgttctatgtccaagccgtacctatccagaaagtccaggacgataccaagacgctaataaaaacaattgtgacaagaatcaatgatatttcgcacacccagtccgtcagcagcaaacagaaggtgacaggactcgatttcatccctgggttgcacccaatactaacactgtccaaaatggatcaaactctggccgtgtaccagcagatcttaacaagcatgccttcgcgcaacgtcatccagatcagcaacgatctagaaaacttgcgtgatctgctgcatgtattagcgtttagtaaatcctgtcatctgccctgggcgtctggtctggagacactggactccctgggaggggttctcgaagcatctggatattctactgaggtcgtcgctttgtccaggctgcaggggtctctacaagacatgctgtggcagcttgacctgagtcctggctgctag

SEQ ID NO: 24767 - DNA, 1791 bp, synthetic construct
  misc_feature 1..1791: note = Description of Artificial Sequence: Synthetic coding sequence
  source 1..1791: mol_type = other DNA
atgggcagcgtgagcagcctgatcagcggccacagcttccacagcaagcattgccgcgcatctcaatataaattaagaaagagcagccaccttaagaagctcaatcggtattccgatgggctcctacggttcgggttctcgcaggacagcggccacggtaagtcctccagcaaaatgggtaagtccgaagatttcttttatattaaagtcagccagaaggcaagaggtagccaccaccctgactacactgccttaagtagcggagaccttggcggccaggctggagttgatttcgatcccagtaccccccccaaattaatgcccttttccaatcagttggaaatgggcagtgagaaaggtgctgtgagacctacggccttcaaaccagtgctccctagatctggtgctatccttcacagctcaccagagtcagcatcccaccagctccaccccgccccacccgacaagcctaaggagcaggagctaaagcctggactctgcagcggggccttatcggacagcgggcgaaactccatgagctccctccctacccactctactagctccagttatcagttggatcccctggtgactcctgttgggcctacttccagatttggcgggtccgcacataatattacccagggaattgttttgcaagactcaaacatgatgagccttaaagccctgtccttttctgacggcggaagcaaactagggcactctaacaaagctgacaaaggcccaagctgcgtgaggtcccccatctccacagatgagtgctctattcaggagctagaacagaagctgttagagcgggagggtgcactgcaaaagctccagcgatcatttgaggagaaagagctcgcttcctctctggcatatgaggagcggcctcggcgatgtcgagatgaattagagggacctgagcccaagggcggaaataagttgaagcaggcctcccagaaaagtcaacgcgctcagcaggtcttacatttacaagttctccaacttcagcaagagaagcgccagttgcggcaggagcttgagtctttgatgaaagaacaggacctccttgaaaccaaactcagatcctatgagcgcgaaaagacaagctttggacccgccctggaggaaactcaatgggaggtgtgccagaagtcaggggaaatctcactgctgaaacagcagctgaaagagtctcagacagaggtgaatgcaaaagcgtcagagatacttggcttgaaggctcagcttaaggatacgcgcggaaagttggaaggtctggaactgagaacacaggacttggagggcgccctgaggaccaagggcctcgaattagaggtgtgcgagaacgagctgcagcgaaagaaaaacgaggcagagctgcttagagaaaaagtaaacctgctagaacaggaactgcaggagctaagagctcaggccgccctagctagggatatgggtccgcctacttttcccgaggacgttccagcccttcagcgggagctcgaaaggcttagagccgaacttcgagaagagcggcagggccacgatcaaatgagtagtgggtttcagcatgaacgtctagtttggaaggaagaaaaagaaaaggtgatccagtaccagaagcagctgcaacaaagctacgtggccatgtaccagcggaaccagcgcctagagaaagccttacagcagttagcacggggcgattctgctggcgaacctctggaagtggacctggagggggctgatattccttacgaagacattatcgctactgagatctag

SEQ ID NO: 24768 - DNA, 231 bp, synthetic construct
  misc_feature 1..231: note = Description of Artificial Sequence: Synthetic coding sequence
  source 1..231: mol_type = other DNA
atgggcagcgtgagcagcctgatcagcggccacagcttccacagcaagcactgccgcgcctctcagtacaagttgcgcaagagcagtcatttgaagaagctgaatagatacagtgatggcctcctccggtttggcttcagtcaagatagtggtcacggaaaggccatgactcgttgcccacgcgcctccagtatgtctggcagctgcggtagacggcggagacgaaggtag

SEQ ID NO: 24769 - DNA, 1722 bp, synthetic construct
  misc_feature 1..1722: note = Description of Artificial Sequence: Synthetic coding sequence
  source 1..1722: mol_type = other DNA
atgggcagcgtgagcagcctgatcagcggccacagcttccacagcaagcattgtcgcgcctcacaatacaaactgcggaagtccagccacctgaagaagctgaacagatacagtgatggcctgttgcggttcggcttttcacaggacagtggacatggtaagagttccagcaagatgggtaagtccgaggattttttttacataaaggtgagtcaaaaggctagaggctcacaccacccggactacacagctctcagttccggggacctgggcggccaagctggtgttgactttgatccttcaacacctcccaaattaatgcccttctctaaccagctggagatgggttccgaaaagggcgctgtacgcccaaccgcttttaagccagttctaccacggtcaggagcaattctgcattcatctccagaatctgcctctcaccagctacaccccgcacctcccgataagcccaaggaacaggagctgaagcccggactctgctcaggcgccctctccgactctggccgcaatagcatgtcttcgctgcctacacacagtacgagttcttcttatcagctcgaccccttagtaaccccagttggaccaacaagtaggtttggaggcagtgcacacaatatcactcaagggatcgtcctgcaggactccaatatgatgtccctcaaagcactctcgttcagtgacggcggatccaaactgggacattcaaacaaggccgataaaggcccctcttgtgtccggagtcccataagcacagatgagtgttccatacaagagctcgagcaaaagctgttagagcgcgagggggctctgcaaaagctgcagaggtcctttgaggagaaagaactggcctcaagccttgcctatgaagaacgaccacggcgttgtcgagacgagctggaggggccagagccgaagggggggaacaaactgaaacaggcttcccaaaaatctcaacgggcacagcaggtcctccacctgcaggtccttcaattacagcaggaaaagaggcaactgagacaggagctggagtccctcatgaaggaacaagaccttctcgagaccaaactgcggagctatgagcgcgaaaagactagcttcggacctgcccttgaggaaacccagtgggaggtgtgccagaagtccggcgaaatctcactgctgaagcagcaactgaaagaaagccagacagaggtcaatgcaaaggcctcagaaattctcggcctgaaggctcaactgaaggacactcgaggcaagttggaaggacttgagctgcgtactcaggatttggagggggccttgcgaaccaaggggctcgaactggaggtgtgtgagaacgaactgcaaaggaagaagaatgaagccgaactactcagggaaaaggtgaatctgctggagcaggagctgcaggagctgcgggcgcaggccgccctggccagagatatgggtccacccacttttccagaagacgtccctgctctccaaagagaactcgaacgactggtgtggaaagaggagaaggaaaaggtaattcaataccagaagcaactccagcaatcatatgtggccatgtatcagcggaaccagcgtctcgaaaaagctttacagcagctggcccgcggggactccgctggggagcctctggaggtcgaccttgagggagccgacatcccatacgaagacatcatcgctactgagatttag

SEQ ID NO: 24770 - DNA, 1791 bp, synthetic construct
  misc_feature 1..1791: note = Description of Artificial Sequence: Synthetic coding sequence
  source 1..1791: mol_type = other DNA
atgggcagcgtgagcagcctgatcagcggccacagcttccacagcaaacactgtagagcgtcccagtacaaactccgtaagtcatcccacctgaagaagctcaacagatacagtgacgggctgcttagattcggcttcagtcaggactcagggcacggcaagagctctagcaaaatggggaaaagtgaggattttttttatatcaaggtgtcccagaaagcccgcggctcccatcaccctgattatactgcgcttagcagcggggacttaggcggtcaggccggggtagattttgacccttcgacacccccaaagctgatgcctttctctaaccaactcgagatgggaagtgaaaaaggagctgtcagaccgacagccttcaagcccgtgctgcctcggtctggtgctattctccattcttcgcctgagtccgcctctcatcagctgcatcctgccccccccgataaacctaaagagcaagagctcaaacccggcctgtgctctggagcactgagtgactccgggagaaactctatgtcctcactccctacacacagcacgtcaagctcttatcaactggacccactggttacccccgttgggccgactagtcggtttggcggtagcgctcataacatcacgcaggggatcgtgttacaggacagcaacatgatgtcactaaaggctctcagcttcagcgacggaggctccaaattgggtcactccaacaaggcagataaggggccaagctgtgtgcgctcacccatctccactgacgaatgcagtatccaggagctcgagcagaagctgctcgagagagaaggagctctgcagaagctgcaacgcagttttgaagagaaggagctcgcatctagcttggcctacgaggagaggcctcggcggtgcagagatgagctcgaaggcccggagccaaagggcggcaataagctcaagcaggcttcccagaaaagtcagcgtgcacagcaagtactgcacctccaagtattgcagctgcaacaggaaaagagacagctgcgacaggaattggagagcctgatgaaggaacaagacctgcttgaaacaaagctgcgcagctacgagagagagaagacctcctttggcccagcacttgaagagacacaatgggaggtgtgccagaagtctggagagatttcactactcaagcaacagctgaaggaatcccagactgaggtgaacgccaaggcaagtgagattctcggcctgaaagcccagcttaaggacacccgcggcaagctggagggactggagcttagaacacaggatcttgaaggggcattgcgtacaaagggactcgagctggaggtgtgtgaaaacgagctgcagagaaagaagaatgaggccgaacttctcagggaaaaggtgaatttgctcgagcaggagctccaggaacttagggcccaggcagcactggcaagagatatgggtccgccaacgttcccagaagatgtacctgccctccaacgcgagctggagagactgagggcagagctacgagaggagcgccagggacacgatcaaatgtcatcaggattccagcatgaaaggctcgtatggaaggaagaaaaggagaaggtcatccagtaccagaagcagctgcaacagtcttacgtcgcaatgtatcaaagaaatcagagattggaaaaggccctgcaacagctagctcgcggtgacagcgccggcgagccattggaggtggacctggagggagcggatataccctatgaggatatcattgcaactgaaatctag

SEQ ID NO: 24771 - DNA, 1614 bp, synthetic construct
  misc_feature 1..1614: note = Description of Artificial Sequence: Synthetic coding sequence
  source 1..1614: mol_type = other DNA
atgggcagcgtgagcagcctgatcagcggccacagcttccacagcaaacactgcagggcaagccagtacaagcttcggaagtctagccacctaaagaaactgaatcgatactcagatggactgctgaggttcgggttcagccaagattccggacacggcaagagcagttccaaaatgggcaaatctgaggatttcttctatatcaaggtcagtcagaaagcgcgcggtagccatcatccggattacactgccctctccagcggtgatctgggagggcaggcaggcgttgacttcgaccccagtacccccccaaagctgatgcctttctcgaatcagcttgagatgggatccgagaaaggagctgtcaggccaaccgcctttaaacctgtgcttccaaggagcggggcaatattacattcatctcccgaatcagcctctcaccaactgcatccggctccaccagataaacccaaggagcaggaactcaagcctggactttgcagtggggctctctccgatagcgggagaaatagtatgagttctctgccaacacactcaacatcatcaagctaccagctcgatccactagtcacccccgtgggccccacatcacgtttcggcgggagcgcccacaatataactcaaggaattgtcctccaggatagcaatatgatgtcactaaaagccctttccttttccgacggcgggagtaagcttggccactccaataaggccgacaaggggccctcttgtgtaaggagcccaatttcaactgatgaatgttctatccaggagctggaacagaaactgctagaacgcgaaggggcactacagaagctgcagcgatcatttgaagagaaggagttggccagtagcttagcctatgaagagcggccacggcggtgtcgtgatgagcttgaaggccccgaaccaaagggaggcaacaagcttaagcaagcgtctcagaaatcccagcgagcccagcaggtgttgcatctgcaggtattgcagctccaacaggaaaaacgccagctgagacaggagctagagagcttgatgaaggaacaggaccttctggaaacaaaactgagatcctacgagagggagaagacttcctttggccctgctctcgaggagactcagtgggaggtgtgccagaaatcaggagagatatcactgctgaagcaacaattaaaggaaagccagactgaagtcaacgccaaagcaagcgaaatcctgggtctgaaggcccaacttaaggacactagggggaaactagagggccttgaacttcggactcaggacctggaaggcgcccttcggaccaaagggttggagctcgaagtatgcgaaaatgaactacagcgaaagaaaaacgaggcagagctcttgcgtgaaaagcacgaaagactggtgtggaaagaagagaaggagaaggtgattcagtaccaaaagcagctccagcagtcgtatgtagccatgtatcagcgaaatcaacgactcgagaaagcgctgcaacaacttgcacgcggcgattcggctggcgagccgctcgaggtagatcttgaaggtgcagacattccttacgaggatattattgcgaccgaaatttag

SEQ ID NO: 24772 - DNA, 1005 bp, synthetic construct
  misc_feature 1..1005: note = Description of Artificial Sequence: Synthetic coding sequence
  source 1..1005: mol_type = other DNA
atgaccgagaacagcgacaaggtgcccatcgccctggtgggccccgacgatgtggagttctgttcccctcccgcctatgccactttgactgtcaagccgtcgtcccctgcacgtctcctgaaagttggggctgtagtattgatctccggcgccgttttgttactgtttggagccatcggtgctttttatttctggaagggcagtgattcccatatctacaacgtgcactataccatgagtattaatggcaagctccaggatgggagcatggaaattgacgctgggaataacctggaaacttttaaaatgggctctggagccgaggaggccatcgccgtaaacgactttcagaacggcataaccggtatccgcttcgccgggggagagaaatgttatatcaaagcccaagtcaaagccaggattccggaggtgggggctgtcacaaagcagtctatatcatcaaaactggaaggaaaaattatgcctgtgaaatatgaggagaactcactaatctgggtagccgtggatcagcccgtgaaggataacagctttttatccagcaaagtgctggaactgtgtggggatttgcccattttttggctgaagcccacttatcccaaagagatacagcgtgaaagaagagaagtggtacggaagattgtacctactaccacaaagcggccccactcgggacctaggtccaatccaggtgcgggtaggcttaataacgaaacacgaccctccgtccaggaagactcacaagccttcaatccggataatccttaccaccaacaagagggcgagagcatgactttcgaccctcggcttgaccacgaggggatatgctgtatcgaatgtaggagatcttatacacactgccagaagatttgtgaacccttgggtgggtattacccatggccctataattaccagggctgtaggtcggcatgcagagtcattatgccatgctcgtggtgggtcgccaggatcttggggatggtttag

SEQ ID NO: 24773 - DNA, 390 bp, synthetic construct
  misc_feature 1..390: note = Description of Artificial Sequence: Synthetic coding sequence
  source 1..390: mol_type = other DNA
atgagcatcaacggcaagctgcaggacggcagcatggagatcgacgctgggaataacctagagacatttaaaatgggatccggcgccgaggaagctattgcggtgaatgacttccagaatgggattactggcattcgtttcgctggaggcgagaagtgttacatcaaagctcaagtgaaagctagaatcccagaagtgggtgctgtgaccaagcaatccattagttctaaactggaaggcaagatcatgcccgtgaagtacgaggaaaattctcttatctgggtagcggtggaccagcctgtgaaggacaacagcttcctgtctagcaaggtattggagctatgtggcgacctgcccattttttggctgaagccgacctaccctaagtag

SEQ ID NO: 24774 - DNA, 1002 bp, synthetic construct
  misc_feature 1..1002: note = Description of Artificial Sequence: Synthetic coding sequence
  source 1..1002: mol_type = other DNA
atgaccgagaacagcgacaaggtgcccatcgccctggtgggccccgacgatgtggaattttgctctccacccgcgtatgccactctaaccgtgaaaccatctagtccagctaggctgcttaaggtgggcgccgtggtactgatttctggggctgtgctgctgttgttcggtgccatcggggcgttttatttttggaaagggtcggacagtcacatttataacgtgcactacaccatgagtattaatgggaagctgcaggacgggtcgatggagattgatgcgggaaataacctcgagactttcaagatggggtcaggtgccgaggaggcaattgccgtgaacgacttccaaaacggtattaccgggatacgttttgctggaggggagaaatgttacataaaggcgcaggttaaagcgcgcatccctgaagtgggagccgtcaccaagcagtcaatctcctcgaaactggaggggaaaataatgcccgtgaaatacgaggagaactctctgatctgggttgccgttgaccagccagtaaaggacaacagctttctgtcctcgaaagtgctggagctttgcggcgatctccccattttctggttgaaacctacctacccaaaggaaattcagcgcgaacggcgcgaggttgttcggaagattgttccaacgaccaccaaacgcccacactctggtcccagaagtaatcctggcgccggtcgactgaacaatgagacaaggccctcagtccaggaggactcccaggcctttaacccagacaacccgtatcaccaggaaggagagagcatgactttcgatccccggctcgaccatgagggaatatgctgcatcgaatgcaggcgatcttatacccattgccagaaaatctgcgagcccctcgggggctattatccctggccctataactaccaggggtgtagatcagcctgcagagtcatcatgccttgtagctggtgggtagcccgcattttggggatggtatag

SEQ ID NO: 24775 - DNA, 408 bp, synthetic construct
  misc_feature 1..408: note = Description of Artificial Sequence: Synthetic coding sequence
  source 1..408: mol_type = other DNA
atgaacgaggtgatcatctacaacgtgctgctgctgcggaccatctcatgtatctctgagacctacggccactacctcattcattgtccttctaaaatatcacccgagctgctgaaaaaggagtcaattacaaattcttatgctcatttccaaatatacaatgtgcattacacaatgtcgattaatgggaagctgcaagatggcagcatggagattgacgcgggcaataacctggagactttcaaaatgggaagcggcgccgaagaagctattgccgttaatgacttccaaaatgttagtattttccatgcattccgggaatttaatcaagccagccttagggattttagcaactcccggagatcctctgtctcgcacacacaccccaacggaaattgctcactgtag

SEQ ID NO: 24776 - DNA, 2760 bp, synthetic construct
  misc_feature 1..2760: note = Description of Artificial Sequence: Synthetic coding sequence
  source 1..2760: mol_type = other DNA
atgcagcggagcatcatgagcttcttccaccccaagaaggagggcaaagcgaagaagccagagaaagaggctagcaattctagccgggaaaccgaacccccaccaaaggccgctctgaaggagtggaatggcgtagtgagcgaatcagactctcctgtcaaacggcctggccgaaaggcagcaagggtgttaggtagcgagggcgaagaagaagacgaggccctgtcacccgctaaaggccaaaaacccgcgctggactgcagtcaggtgagtcctcctagacctgccacatctccagagaataatgccagcctgtcggacaccagtcctatggatagtagccccagtgggatccctaagagacgaacagcgcggaagcaactccctaagcggaccattcaggaggtcttagaggaacagagtgaggacgaggaccgggaggccaagagaaaaaaggaggaggaggaggaggagacccccaaggaatccttaacagaagccgaggtggcaactgaaaaggagggcgaggatggtgatcagcccacaacccctcccaaacctcttaaaactagcaaggctgaaacaccaactgaaagcgtcagcgagcctgaggtcgccactaaacaagagctgcaagaagaggaagaacagacaaaaccaccgcggagggctcctaaaactctaagctccttcttcaccccccgcaagcccgccgtaaaaaaagaggtcaaggaggaagaacccggcgcaccaggtaaggagggggccgccgaaggacccttagacccttccggttacaaccctgcaaaaaacaactatcaccctgtggaagatgcctgttggaagcccggccagaaagtgccatatctcgctgtggcccgcaccttcgaaaagatcgaggaggtgagtgctaggcttcgaatggtcgaaactctctcaaatctgctccggagcgttgtggccctttccccacctgacttattgcccgttctgtacctgtctctgaaccatttaggccctccacagcaggggctggagttgggagtgggcgacggagtgcttctgaaagcggtggctcaggcaactggcaggcaactagagtcagttcgtgccgaggcagctgaaaaaggggatgtcggcctggtggctgaaaatagcagatctacacagcggcttatgttgccacctccaccacttaccgcatccggcgtgttctccaaatttcgagatatagcaaggctaacgggcagcgccagtacagccaagaagattgacattataaaaggcctcttcgtggcttgtcgccacagcgaggcgcggtttattgcccggtccttgagtgggaggttgaggctgggtcttgcggagcaatccgttcttgccgccttaagccaggcagtctccctgactcctcccgggcaagagttcccgcccgctatggtggacgccgggaaaggcaagactgccgaggcaagaaaaacttggttagaggagcagggtatgatactcaagcagacattttgcgaggtcccagatttggacagaatcattccagtgctgctggaacatggcctggaaaggcttccagaacattgcaagctttcaccaggtataccactcaaacctatgctggcccatcccacacgcgggatcagtgaggtgctgaaaaggttcgaggaggctgcctttacctgcgagtacaagtatgacggccagcgcgcgcagattcatgccctggagggcggggaggtgaagattttcagtagaaaccaagaggacaacactggtaagtacccggacatcatttccagaatccccaagatcaaactgccgtcagtgaccagctttatcctggacacagaagccgtggcctgggacagggaaaaaaaacagattcagccgtttcaagtcttgactacacgaaaaaggaaggaagttgatgcctctgaaattcaggtacaggtctgcctctacgccttcgacctgatttatttaaacggcgaatctctggttagagagccactgagtaggcggcgccaactcttgcgggaaaacttcgtcgaaacagagggagaattcgtcttcgcaacatcgctggatacaaaagacattgaacagatcgccgagttcctggaacagtccgttaaggattcctgcgaaggcctgatggtcaagaccctggatgttgacgccacctacgaaatagccaagcgcagtcacaattggctcaagcttaagaaggactatctggatggcgtcggcgatacattggatctggtcgtgatcggcgcctatcttggacggggaaaaagagctggacggtacggcggtttcctcctcgccagctacgacgaggatagcgaagagttacaagctatatgtaagctggggacggggttcagcgacgaagaacttgaagagcaccaccaatccctgaaggcacttgtcctgcccagcccaaggccttacgtgcgtatcgatggggcggtcattcccgaccattggttagacccctctgctgtatgggaagtgaagtgtgccgacttaagcctgtccccaatctatcccgcagctagggggcttgtcgattcagataagggaatttctttaaggttcccccgttttatcagagtgagggaggacaaacagcctgaacaggccaccactagcgcgcaagtggcctgtctgtataggaaacagtcccagatccagaaccagcagggtgaggacagtggttccgaccccgaggacacctactag

SEQ ID NO: 24777 - DNA, 2667 bp, synthetic construct
  misc_feature 1..2667: note = Description of Artificial Sequence: Synthetic coding sequence
  source 1..2667: mol_type = other DNA
atgcagcggagcatcatggccgccctgaaggagtggaacggcgtggtcagcgaatcagattcacccgtcaaacgaccaggaaggaaggctgccagggtgctgggaagcgaaggcgaagaagaggatgaggccctgagcccagctaagggacaaaaaccagctctcgattgctcacaggtgagcccgccaagacctgcaacttcccctgaaaacaatgcctccctgtccgatacttcacccatggacagctcaccctcaggcatcccaaaaagacgcactgcccgtaaacagctccccaagaggacgatccaagaagtccttgaggagcagtccgaggacgaagatagggaagcaaaaagaaaaaaagaggaagaggaggagaccccaaaggaaagtttaacagaagccgaagtagctaccgaaaaggagggagaggacggagaccagcctacaaccccaccaaagcccctgaagacctccaaggccgaaacaccaacggaaagtgtgagcgaaccagaagttgcaacaaagcaggaacttcaggaagaggaggagcagacgaagcccccccgccgggcgcccaagaccctatcttccttcttcaccccacggaagccggccgtgaaaaaggaggtaaaggaagaggagccaggcgcacctggtaaagaaggagcggctgaagggcctctggacccttccggatacaaccctgcaaaaaataattatcatcccgtggaagacgcatgttggaagcccggacagaaggtgccctatttggcagtcgcacggacattcgaaaagatcgaagaggtttcggcacgcttacggatggtcgagacactttccaacttgctgagaagcgttgtagctctgtccccaccagatctgctgcccgtcctttatctgtccctgaaccacctgggtccaccacagcagggcttagagctaggggtcggcgacggagtactcctcaaagctgtggcccaagctacaggaaggcaactggaatcagtgagggccgaggctgcagagaagggagatgttggtctggtcgccgaaaactcacgaagtacacagagacttatgcttccccccccccccctgactgcatctggcgtgttctcaaagtttcgcgatatcgcccgactaacaggatctgcatctaccgcaaagaagatcgacatcattaagggattgttcgtagcttgtaggcattccgaggcaagattcatcgctagaagtttatcaggaagactgaggcttggattggctgagcagtctgtcttggcggccctatctcaggcagtatcactgaccccccctggccaggagttcccacctgctatggtcgatgccggtaagggaaaaacagctgaagcgcgcaaaacatggctggaggaacagggcatgattctaaaacagacgttttgcgaggtaccggatctggaccgcattattcccgttctgctcgagcacggcttggagaggctccccgaacactgtaaattatcaccgggaatccctcttaaaccgatgttggcacaccccactagagggatttctgaggtcctaaagagattcgaggaagcagcctttacttgtgaatataaatatgatggacagcgagcacagattcacgcgctggagggcggtgaggtcaaaattttctctcggaatcaggaagataatacaggaaagtatcctgacattatttcgagaatcccaaaaatcaaactgccatctgttactagctttattctcgatacagaggctgtcgcttgggaccgcgagaaaaagcaaatacagccctttcaggtcctaacgacgcgtaagcgaaaggaggtagatgcctcagaaatccaggtccaggtgtgcctgtacgcgtttgacttgatttatctaaatggcgagagtttagtacgcgaacccctgtcccgtcgacgtcagttgctaagggaaaatttcgtcgagacagaaggtgagttcgtcttcgccactagtctggacacaaaagatattgagcaaattgcagagttcttagagcagagcgttaaggattcttgtgagggcctgatggtcaaaacacttgatgtggatgcaacatacgagatcgctaaacggtctcataactggttgaagcttaagaaagattacctagatggggtgggcgataccctggacctggtcgtaatcggggcatacctgggcagaggcaagcgagcgggcaggtacgggggctttctactggctagttacgacgaggattctgaggaactgcaggccatatgcaagctgggcactggctttagcgacgaggaactcgaggaacaccaccagtcgttgaaagcccttgtccttccttccccccgcccgtacgtacggattgacggcgccgtcattcccgatcactggctggacccctccgcagtctgggaagtgaagtgcgcagatctcagcctctcacctatttatccggccgcacgaggactggtggatagcgacaaaggcataagcctgcggtttccgcggttcattagagtgcgggaagacaagcaacccgaacaagccaccacgagcgctcaggtggcttgcttgtatcgaaaacagtcccagatccaaaaccagcagggcgaagatagtggcagcgatcccgaggacacttactag

SEQ ID NO: 24778 - DNA, 2556 bp, synthetic construct
  misc_feature 1..2556: note = Description of Artificial Sequence: Synthetic coding sequence
  source 1..2556: mol_type = other DNA
atgcagcggagcatcatgagcttcttccaccccaagaaggagggcaaggctaaaaaaccagagaaagaggcgagcaactcctctagagaaacggagccacctcctaaagccgcccttaaggagtggaacggggtggtgtccgaatcagactcgcctgtgaaacggcctggcagaaaagcagctagggtactcggaagcgagggggaggaagaggacgaagcgttatctccagccaagggacagaagccagccctggattgttcccaagtttccccacccagacctgccacttctcccgagaacaatgcttctctttctgatactagcccaatggattctagccccagcggaatcccaaaacgacgaacggaagccgaaactccaacagagagcgtatccgagccagaggttgctaccaagcaagagctacaagaagaggaggagcagaccaagccacccagaagagcgcccaagactttaagctctttcttcacccccagaaagcccgctgtgaagaaggaagttaaagaggaggaacccggggcccctggcaaggaaggtgccgcagaggggccgttagatcccagcgggtacaaccccgcaaagaacaattaccacccggtcgaggatgcctgctggaagccaggacagaaggtcccctacctggcagtggctcggacattcgaaaaaatcgaagaagtgagtgcaaggttacggatggttgagactttatcgaaccttttaaggtcagtggtggcactgtctccgccagatctgcttcctgtgctgtatctgtctttgaaccatctgggtccacctcagcaggggctcgaactgggcgttggcgatggcgtcttgctcaaagcagtggcccaggctaccgggagacagcttgagagcgtaagagctgaagcagcagagaagggtgatgtgggtctcgttgcggagaactccagatccacccaacggttaatgctcccccctcctcctctcaccgcctctggtgtctttagtaagttcagggacattgccaggctgactggaagcgctagtactgccaagaagatagacattattaaagggctctttgtcgcgtgccgccattccgaggcccggttcattgcgagatcactgagcggccggctgcgccttggtcttgcagagcagagtgtgctggccgccctgagtcaagccgtctctctgacacccccgggtcaggagtttcctcccgccatggtggatgcaggcaaagggaaaaccgccgaagctcgcaagacctggttagaggaacaagggatgatcctgaagcagacattttgtgaggtgccagatctcgatagaattattcctgtgctgctggaacatgggctcgaacgccttccagaacactgcaaattgtcacctggcatacccctgaagcccatgcttgcacaccctacaagaggcatatctgaggtcctgaagagattcgaggaagcggcatttacgtgtgaatacaaatacgacgggcagagagctcagatccacgcgttggaaggcggagaggtaaagatcttcagtaggaatcaagaagataacaccggcaagtatccagacatcatcagcaggatccccaagatcaagctgccctcggtcacaagtttcatactggataccgaggccgtcgcgtgggaccgggagaagaagcagatacaaccttttcaggtgctgacaacaaggaagagaaaagaagtcgacgcctctgagattcaggtgcaagtctgtttgtatgcatttgacctcatttacctcaacggagagtcgttggtacgcgaacccctttcccgaagaaggcaactgctgagagaaaattttgtagaaacagaaggcgagttcgtttttgcaactagtctagatacaaaagatatcgagcagatagccgagtttcttgaacagtcagtgaaagatagctgcgagggattgatggtcaagacactcgacgtggatgccacctacgaaattgccaaacggagtcacaactggcttaaattgaagaaggactatctcgatggagtaggagatactcttgacttggtcgtaattggcgcatacttgggacgtggcaaacgtgctggccgctacggcggattcttgctggcttcttacgatgaggattctgaggaactgcaagccatatgcaagcttggtactggtttttccgacgaggagctggaggagcaccaccagtcccttaaagctctggtgctccctagtcctcgcccatatgttagaattgacggtgccgtgataccggatcactggctggatccctccgccgtgtgggaggtgaagtgtgccgacttatccctgtctccaatctatcccgctgctcgcggattggtcgactcagataaaggaatcagtcttcgtttcccccgcttcatccgtgttagggaagataaacagccagagcaggcgacaacatccgcacaggtagcctgtttgtaccgtaaacagtctcagattcagaatcagcaaggcgaggatagtggcagcgaccccgaggacacttattag

SEQ ID NO: 24779 - DNA, 1248 bp, synthetic construct
  misc_feature 1..1248: note = Description of Artificial Sequence: Synthetic coding sequence
  source 1..1248: mol_type = other DNA
atgcagcggagcatcatgagcttcttccaccccaagaaggagggcaaagctaaaaagcccgaaaaggaagcttctaatagtagtagagaaacagaacctccacccaaggccgccttgaaggaatggaacggtgtggtatcagaatccgatagccctgttaaacgccccggccgtaaggcggcccgagtgttaggttcagaaggggaggaggaggacgaggccctgagtccagccaaaggccaaaaaccagccctggattgctcacaggtttctccaccccgaccagccacttcaccagagaataatgctagtctttcggacactagccccatggactcgtccccttctgggatcccaaagcgccggactgaggaagagactccaaaggagagcctgaccgaagccgaggtggcgactgagaaggaaggggaggacggagaccagcccacgacccctccgaagcccttgaaaacttctaaggccgagaccccgacagagagcgtttcggaaccagaggtggccacaaagcaagaactccaggaagaggaagaacagacaaagccgcctcgccgggcccccaagaccctctcttcattctttactcccaggaaaccagccgtgaagaaggaggttaaggaggaggagccaggtgccccaggaaaggagggggccgcggaaggcccactcgatcccagcggctataaccctgccaaaaataattatcacccagtcgaggatgcatgctggaagccaggccagaaggtcccctacctggctgtagctagaacatttgagaagattgaggaagtgagcgcacggctgagaatggtggagacattgtccaatttgttaagaagtgtggtagctctgtcccccccagacttattgcctgtgctctacctgtcgttgaaccatcttgggcccccacagcagggcctggaacttggggtaggtgatggtgtattactcaaagcagtggcacaggccactggacgcgaacgtcgggaaaccaggagtcataactgccatccacggcacccacacccgaggagccctctgaaagtgggtagttggtcccctagcggactgagacagcctaggaaagccacctggggatggtggccgcgtacagctgccgcacccagaggctcttgctgtcaccaccttcgtagcctgccccccgggagttcagcatcatcagccacctcaccaggcagcctggcggtgttgccccagccacgcaggtag

SEQ ID NO: 24780 - DNA, 2499 bp, synthetic construct
  misc_feature 1..2499: note = Description of Artificial Sequence: Synthetic coding sequence
  source 1..2499: mol_type = other DNA
gtgtgctgccccggcagcggcgcccgggaccagcggaaggcccggctgaccgatgaggaaaagtgttggacagggagagagaacagcgacgccaatatgcagagaagtattatgagctttttccaccctaagaaggaggggaaggctaaaaaacctgagaaagaagcttccaattcaagccgggaaacagagcctccacccaaggccgctctcaaggagtggaatggcgtggtatcagaaagcgactctcccgtgaagaggcccggcagaaaggcagcccgcgtcctcggctcagagggggaggaggaggacgaggctctctccccagcaaagggacagaaacccgcactggactgtagccaagtctcgccgcctagacccgccaccagccccgagaacaacgcgagtctaagtgacacgtccccaatggacagctccccgtctggaattccaaagcgccggaccgcccgtaagcagctgccgaagcggaccatccaggaggtgcttgaggaacagtctgaggacgaggatcgcgaggctaaacgaaagaaagaagaggaggaggagacccccaaggaaagcctgactgaagctgaggtggctacggagaaggaaggggaagatggagatcagcctaccaccccaccaaagcccctgaaaacatcgaaagcagaaacacctacagagtccgtgtctgagcctgaagtggccaccaagcaggagctgcaggaagaagaggagcagactaaaccccctcgcagagctccaaaaactctgtcttctttcttcacaccccgcaaacccgccgttaagaaggaggtcaaggaggaagagccaggcgccccgggtaaagagggcgctgccgaaggtccactcgaccctagcggttataaccccgcaaagaataattaccaccccgtggaggacgcatgctggaaacccgggcagaaggtgccctatttggctgttgcccgcacctttgaaaaaatcgaagaagttagcgcacggctgcgaatggttgagacactgtccaacctactgagaagcgtcgtggccctaagtcccccagacttgctccccgtgctttacctcagcttgaaccatcttggccccccccagcaaggcctcgagttgggtgttggcgatggcgtgctgctgaaggccgtggcgcaggcaactgggcgtcagttagagagtgttcgggcggaagccgcagagaagggggacgtcggtctcgtcgccgaaaatagcaggtctacccagcgtttgatgctgcccccaccgcctctcaccgcatcaggcgtattttctaaatttcgagacatcgccagactcactggatcagctagcacagcaaaaaagatcgacatcattaaaggtttgtttgtcgcctgtagacactccgaggcaagatttatcgcaagaagcctgagcgggcgtttgcgccttgggttagccgaacaaagcgtgctcgcggccttgtcccaggcagtatcattgactcctccaggtcaggagtttccccccgccatggtcgacgcaggtaagggcaagacagctgaggcgcgaaaaacgtggctggaagaacagggtatgatcctgaaacagaccttctgtgaagttcctgatcttgaccgcattatccccgtgctgctggagcacggcctcgagcgattgcctgagcattgtaaattgtcccccggtattccactcaaacccatgctcgcccatcccacacggggcatatccgaggtgctgaagagattcgaggaagccgcctttacctgcgagtataagtatgatggtcagcgcgcacaaatccatgctctcgagggcggagaggttaagattttcagcagaaaccaggaagataacaccgggaaataccccgatatcatatcccgcatccccaagatcaagctaccgtctgtcaccagcttcattctggatactgaagctgttgcctgggatagagagaagaaacagattcagccctttcaagtgcttacaactcggaaaaggaaagaggtggacgcctctgagatacaggtgcaggtgtgcctatacgcattcgatctgatttatctaaatggggaatctctggtcagagaacccctcagccgccgccgccagttgttaagggagaacttcgtggaaaccgagggagaatttgtgtttgccaccagtcttgacaccaaagatattgagcagattgctgagtttctggagcaatccgtgaaggactcatgtgagggcttgatggtcaaaacactcgacgtcgatgctacctacgagattgcgaagaggtcacacaactggctcaaactgaaaaaagactacttggacggcgtgggggacacactggatttagtggtaatcggggcgtatttgggtagggggaaacgcgccggccggtacggggggttcctgctggcatcctacgacgaggactctgaggagctgcaggcgatttgcaaagtgctggggaattggggttag

SEQ ID NO: 24781 - DNA, 2850 bp, synthetic construct
  misc_feature 1..2850: note = Description of Artificial Sequence: Synthetic coding sequence
  source 1..2850: mol_type = other DNA
atgagcctggccttcaagatcttcttcccccagaccctgcgggccctgtctagaaaggaactgtgcctcttcagaaagcatcattggcgtgacgttcggcagttctctcaatggtccgagacagatctgctgcacgggcacccgttgttcctccgcaggaaacctgtgctgagcttccaaggctcacacttaaggagccgcgccacctacctggtctttttaccagggctgcacgtgggcctgtgttccggcccgtgtgagatggcggagcaaaggttctgtgtggactacgctaaaaggggtaccgcaggctgcaagaagtgtaaagagaagatagttaagggtgtctgcagaattgggaaagtggtcccaaatccattctccgagtctggcggcgacatgaaggagtggtaccacatcaaatgcatgtttgaaaaactggagcgcgccagggcaaccacaaagaaaatcgaggatcttacggaactcgaagggtgggaagaactggaagataacgaaaaagaacaaatcacgcagcacatcgccgacttgtcatccaaggccgcaggtactccaaaaaaaaaagctgtggtccaggccaagctgacaactactggccaggtgacgtctcctgtaaagggagcgtcctttgtgacatcaacgaacccacgcaagttttcaggcttctcagcaaaacctaacaactctggagaagccccttctagcccaacaccaaagaggtctttatcctcaagtaaatgcgatccaaggcacaaggattgcttactcagagagttcagaaagctttgtgccatggttgctgataacccgtcatacaataccaagacccagattattcaggatttcctgcgcaagggctctgcaggagacggctttcacggagacgtttatttgactgtgaaactgctccttccaggcgtgatcaaaacggtctataacctgaacgataagcagatagtgaagttgttttcccgtatcttcaattgcaaccctgacgacatggcccgcgacctcgaacagggggacgtgagtgagacgattcgggttttcttcgagcagagtaagagcttcccccccgcagctaagtcactgctgaccatccaggaggttgatgagttcctactaagattgtctaaactgactaaagaagatgagcagcaacaagcactgcaagacatcgcctctcgatgcactgctaatgaccttaagtgcatcatccggctgattaagcatgaccttaagatgaacagtggggctaagcacgttctggatgccttagaccctaatgcctatgaagcatttaaagccagtagaaacttgcaggatgtcgttgaaagagtgctgcataatgcccaagaggttgaaaaggaacctggccaacggagggccctttccgtacaggcatccctaatgacaccagtccagcctatgctggccgaggcttgcaaatccgttgagtacgcaatgaagaagtgccctaatgggatgtttagcgagatcaagtatgacggtgagagagttcaagtgcataaaaacggcgaccacttctcttacttttccagaagtctgaaaccagtactgcctcacaaagttgctcactttaaggattatattccccaggcttttcccgggggacactccatgattctcgattctgaagtcctcctgatagataataagaccggtaagccactgccctttggaaccctgggcgtacataagaaggccgcgttccaagacgccaacgtttgtttatttgtgttcgactgcatatattttaacgacgtgtccctaatggatcggccgctatgcgaacggaggaaattcctccacgacaatatggtagagatccccaacaggatcatgttttcagagatgaagcgagtcaccaaggctctggacctagccgacatgattaccagagtaatccaggagggcttagagggcctggttctgaaagatgtgaaagggacatacgaacctgggaaaagacactggttaaaggttaaaaaagattacctgaacgagggtgcaatggccgacaccgctgacctggtggtgctgggtgcattttacgggcaggggagcaagggggggatgatgagtatcttcttgatgggctgttacgatcccggttcccagaaatggtgtaccgtaacaaagtgtgcgggcggccacgatgacgccactttggcccgactgcagaatgagctggatatggtgaaaatctccaaagacccgagcaaaattcccagttggcttaaggtgaataagatctactaccccgactttatcgtccccgatccaaaaaaagctgctgtgtgggaaatcacgggagccgaattctcaaaatcagaagcccataccgctgacggtatttcgattagattccccaggtgtacgcggatcagagatgacaaagactggaaaagtgccacgaaccttcctcagttgaaggagctgtaccaactgagcaaagaaaaggccgacttcaccgtggtcgcaggggatgaaggatcgtcaactactggtgggtcaagtgaggagaataaaggcccctcagggtctgccgtcagcagaaaggctccaagcaaaccatccgcctctactaaaaaagccgagggaaagttatctaactctaattcaaaagacggaaatatgcagaccgcaaaaccctccgctatgaaggtgggagagaaactcgccacgaagtcctcgcccgtcaaagtgggggaaaaacgaaaggctgccgatgaaacgctttgccaaacaaaacggagacctgcctctgaacagcgagggaggactgtaccggctggcagacggtag

SEQ ID NO: 24782 - DNA, 3030 bp, synthetic construct
  misc_feature 1..3030: note = Description of Artificial Sequence: Synthetic coding sequence
  source 1..3030: mol_type = other DNA
atgagcctggccttcaagatcttcttcccccagaccctgcgggccctgagccgcaaggaactgtgcctgtttcgcaagcaccactggagggatgtccgacagttctcacagtggagcgagacagatctcctccatgggcaccctctcttcctcaggagaaagcccgtcctatcattccaaggatctcatctgaggtctcgcgccacctacctggtatttctgcccggcctccacgttggactgtgctccgggccatgtgagatggctgagcagcgtttttgtgtagactatgccaagcgtggaaccgcgggctgcaaaaaatgcaaggaaaagatcgtaaagggggtgtgcaggataggaaaggtagtgccgaaccctttttccgagtctggaggggatatgaaggaatggtatcacattaagtgcatgttcgaaaagcttgagagagctagggccacaacaaagaaaatagaagacctcaccgaactggagggctgggaagagctggaagataatgagaaagaacagatcacacagcatatcgcggacctatccagtaaagcggccggtaccccgaagaagaaagccgtggttcaggcaaagctaacgaccaccgggcaggtcacatcaccggttaagggcgcatcatttgtgacgtctaccaacccaagaaaattcagtgggttcagcgccaaacccaataactcaggggaggctccttcctcacctacgccaaagcggagcctgtctagttctaaatgcgaccctcgccataaggattgtctgttgagggagttccgaaaactctgcgcaatggttgccgataaccccagttacaacacaaagacccaaatcattcaggacttccttagaaagggcagcgcaggtgatggcttccacggagacgtctatctgacagtgaaactgttgctacccggggtgattaagactgtctataatctgaacgataaacagatcgtcaagctgttttccaggatattcaattgtaatcctgacgacatggcaagagacctggagcaaggggatgttagtgaaactattcgtgtttttttcgaacaatccaaatcatttccacccgcggctaagagcttactgacgatacaggaagtagacgagtttctgctgagactctcaaagttaaccaaagaggatgagcagcagcaagccctacaggacatcgcatctagatgtacggccaatgacctgaagtgtattatcaggttaatcaaacacgatcttaaaatgaacagcggagcgaaacacgtcctggatgcactggacccaaatgcatacgaagcctttaaggcctccagaaacctacaggatgtcgtcgaaagggtgctgcacaacgcacaagaagtcgagaaggagccaggccaaaggcgggccttatctgtccaggctagcctgatgactcctgtgcagcctatgcttgctgaagcgtgcaaatccgttgaatatgccatgaagaagtgcccaaacggcatgttttctgaaattaagtacgatggagagcgggtgcaggtccacaagaatggggatcacttcagctacttctcacggtctctcaaaccagtccttccacacaaagtggcccatttcaaggactatatcccccaggcttttccgggcggacatagcatgatcctcgacagcgaggtgctcctgatcgataacaaaacggggaaacctttgccgttcggtactctgggggttcacaaaaaggccgcatttcaggacgctaacgtctgcttgttcgtgtttgattgcatctatttcaacgatgtgtccttgatggacaggccattgtgtgagcgaagaaagtttctccatgacaacatggtggaaatacccaaccggattatgttctcggagatgaagcgcgttaccaaagctctcgacttggccgacatgattacgcgcgtcatccaggaagggcttgagggcctggtgctgaaggatgttaagggcacctacgagcccggcaagcggcactggttaaaagtgaaaaaagattatcttaacgagggggctatggccgacacggccgatctagtggtccttggggccttttacggtcagggatcaaaggggggaatgatgtccatctttctcatgggatgttatgacccgggtagccaaaagtggtgcacggtaactaagtgcgcgggtggtcatgacgatgcgaccctcgcacgtctgcaaaacgaactcgacatggttaaaatttcaaaagacccgtccaaaattccttcatggctcaaagtgaacaagatttattatccagattttatcgtgccagacccaaagaaagccgcagtgtgggaaatcactggcgccgagttctccaagagcgaggcccacaccgccgacggtatttcaatccggttccccagatgtacccgaatcagagacgacaaagattggaaatcagccaccaacctcccccagctcaaagaactttaccaactgtccaaggagaaagcagacttcactgttgtggccggtgacgaaggatctagcactaccggtggttccagcgaagagaataaaggtcccagcggcagcgccgtatctagaaaggccccctccaagccctccgcctccacaaagaaggctgagggcaaactgtctaactccaactccaaggacggaaatatgcagacggcaaaaccttcagctatgaaggtcggagagaagcttgccacaaaaagcagtccagtgaaagttggtgaaaagagaaaggctgctgatgaaacactgtgccagacaaaggtcctcctcgatattttcactggcgtacggctttatctccccccttcaactccagatttttcacggctcagaagatacttcgtggccttcgacggagatctggttcaggagttcgacatgaccagcgctactcatgtcctgggctcacgggacaaaaatcctgctgcacagcaagtgagcccagagtggatttgggcctgtattaggaaaagaaggcttgtcgccccctgctag

SEQ ID NO: 24783 - DNA, 2736 bp, synthetic construct
  misc_feature 1..2736: note = Description of Artificial Sequence: Synthetic coding sequence
  source 1..2736: mol_type = other DNA
atggccgccagccagaccagccagaccgtggccagccacgtgcccttcgcggacttgtgttctacgctggagagaatccagaaatcaaagggccgcgctgagaagattcgccacttcagggagttcctcgatagttggcgaaaatttcacgacgcattgcataagaaccataaagacgttacggattcattttacccagccatgagactcatcctgccgcagctggaaagagagcggatggcatacgggatcaaagagaccatgcttgctaagctgtatatcgaactcctcaacctgccaagagatgggaaggatgcactcaagctgctcaattaccgaacccctactggcacccatggagatgccggcgacttcgcaatgatcgcctattttgtgctgaaacctaggtgtttgcagaaaggatcactcacaatccagcaggtgaacgacctcctagactctatcgcctctaataactccgccaagcggaaagacctcatcaaaaagtccctgctgcagcttatcactcaatcttctgcactggaacaaaaatggttgatcaggatgatcataaaagacctgaaactgggcgtctcacagcagacaatcttctcagttttccacaacgatgctgcggaattgcacaacgtgacgaccgacctagagaaagtgtgccgtcagctgcatgatccatccgtgggtctgagcgatataagcatcaccctcttctccgccttcaaacccatgctcgctgcaatcgcggatatcgaacacattgagaaagatatgaaacatcagagcttctacatagagactaagctggatggggaacggatgcagatgcataaagacggagacgtgtataaatacttcagcagaaacgggtataattacaccgaccagttcggagctagcccaaccgagggtagcctaactccctttatacataacgcattcaaagctgatattcagatatgcatcctggacggagaaatgatggcctacaatcccaatacccaaaccttcatgcagaaaggcacaaaatttgacatcaagaggatggtagaggatagcgatctacagacttgttattgtgtttttgacgttcttatggtaaataataagaagctgggacatgagaccctgagaaaaagatatgaaatcctctcatccatattcaccccaatcccaggacggatcgagatcgtacagaaaacacaggcacacactaagaatgaagtcatcgatgccctcaacgaagcaatcgacaagagagaggaaggaataatggtaaagcaaccattatccatttacaaacctgacaagaggggcgaggggtggctgaaaatcaagcctgaatatgtgtcaggattaatggacgagctggacatcctcattgttggcggctactggggaaaggggtcccgcggtggcatgatgtcccatttcctgtgcgctgtggctgagaagcctcctcccggcgagaagccctccgtgttccatacactgagccgagtcgggtccggctgtaccatgaaggaactctacgacctcgggctaaagctcgcgaaatactggaaacccttccatcgtaaagctccgccatcttccattctgtgcgggaccgagaagcctgaggtctatatcgagccttgtaacagtgtcattgtacagattaaagccgccgagatcgtcccctctgacatgtacaagaccggctgcacacttcgcttcccaaggattgagaaaattagagacgacaaggagtggcacgaatgtatgactctcgacgacctggagcagttaaggggcaaagcctcaggcaaattagcctctaagcatctgtatatcggtggagatgacgagcctcaggaaaaaaagaggaaagccgcccccaagatgaagaaggtcatcgggattatcgaacatctcaaggcccctaatctgactaatgttaacaaaatttctaacatcttcgaagatgtagagttctgtgtgatgagcggaacggactcacagccgaaaccagacttggagaaccggattgctgaattcggtgggtatatcgtgcagaaccctgggcccgatacttactgtgtgatagccgggtctgagaacattagggtgaagaacataattctaagtaacaagcacgacgtagtaaagccagcctggctgcttgaatgtttcaagacaaaatcctttgtgccctggcagccacgcttcatgattcatatgtgcccatcaaccaaagagcactttgccagagaatatgactgttacggcgactcatactttattgatacagacctgaatcagctaaaagaggtgttctccggcattaaaaactccaacgaacagactcccgaggaaatggcttcgttgattgccgacttagaatataggtattcctgggattgttccccactctccatgttcagacggcataccgtgtatctcgatagctacgctgtgattaacgatttgagcacgaagaacgagggcacacggttggccattaaggcacttgaactgaggtttcacggagccaaggtggtctcttgtctcgctgaaggtgtgtcccatgtcatcattggcgaggaccattcgcgagtcgccgattttaaagcgttcaggcgcacttttaaacgcaagtttaaaatcctgaaagagtcctgggtgacagattccattgataagtgcgaacttcaagaggagaatcagtatcttatatag

SEQ ID NO: 24784 - DNA, 2736 bp, synthetic construct
  misc_feature 1..2736: note = Description of Artificial Sequence: Synthetic coding sequence
  source 1..2736: mol_type = other DNA
atggccgccagccagaccagccagaccgtggccagccacgtgccctttgcagacttgtgtagcaccctggaaaggatccagaagtctaaagggagggctgagaagattaggcacttccgagagtttctagactcctggagaaaattccacgacgcgctgcacaagaatcacaaagacgtgaccgatagcttttatcctgctatgcgcctgatccttcctcagctcgaaagggaaaggatggcctacggcataaaagagaccatgctcgccaagctctatattgaactgctaaatttgccacgggacggaaaagatgctctgaagctgctcaactaccgaacacctacagggacacatggcgacgccggggactttgctatgattgcgtacttcgtactcaaaccccgctgcctgcaaaaaggctccctaacaattcagcaggtgaatgatctcttagattccatcgcttccaacaacagcgccaaaagaaaagacctgataaaaaagtctcttttgcagctcattacccagtccagcgctctcgagcagaaatggttgattagaatgatcataaaggatttgaagctgggcgtgtcacaacagaccatcttctccgtctttcataatgacgcagcggaactgcataatgtgacaaccgacttagagaaggtgtgcaggcagcttcatgacccctctgtgggactgagtgacatcagcatcaccctgttctcagcatttaaaccgatgttggcagccatcgccgatatagagcacatcgaaaaagacatgaagcatcagagtttttatatagaaaccaagctcgatggcgagcggatgcagatgcataaggacggcgacgtctacaagtatttcagtcggaatggctataactacactgaccaatttggcgcttctcctaccgaaggttcactaacacccttcatacacaacgcctttaaggcagacatccagatttgcatattagacggggagatgatggcctataatccaaacacccagacattcatgcagaagggcacaaaattcgatataaagagaatggtagaggattctgatcttcagacttgctactgcgtgttcgatgttcttatggttaacaacaagaaactcgggcacgaaacccttcgtaaacggtatgagatccttagcagcatattcaccccaattcccgggaggatcgagatagtgcagaaaacacaagcccatactaaaaacgaagtcatcgatgccttgaatgaagccattgataagcgggaggaaggtatcatggtcaaacaaccgctgtctatctataagcctgacaagcgaggtgagggttggttaaaaattaaacccgaatacgtctctggactgatggatgagttggacatccttattgtaggcggttactgggggaagggctcgcgaggtggtatgatgagtcattttctgtgcgccgtggcagaaaaaccccccccaggggagaagccaagtgtgtttcacacgctttctagagtgggcagcggatgcacgatgaaagagctgtatgacctcggactgaagctggctaagtattggaaaccattccatcggaaagctccaccttcatcgattctgtgcggtacagaaaagcccgaggtctatatcgagccttgcaattccgtgatagtgcagataaaagccgctgaaattgtaccatccgatatgtataagacagggtgtaccctgagattcccccggatagagaagatcagggacgataaggagtggcacgaatgcatgaccctggacgacttagaacaactccgcggaaaggcttcagggaaactagcatccaagcatctatatatcggcggcgatgatgaaccccaggagaaaaaaaggaaggcagcgcctaagatgaaaaaagtgatcggcattatagagcaccttaaagctcctaacctcacgaatgtgaacaagattagcaacatttttgaggatgtagagttttgcgtcatgagtggaacggattcacaacctaagccagacctcgaaaacagaatcgcggaatttggaggctacatcgtgcagaacccagggcctgacacttattgcgtgattgccgggagcgagaatatcagagtgaagaatatcattttgtctaataagcacgacgtggtgaagccagcttggctccttgagtgttttaagacaaagagtttcgtgccctggcaaccaaggttcatgattcatatgtgtccaagcaccaaagaacactttgcacgagaatacgattgctatggtgacagttacttcattgacacagatctaaaccagcttaaagaggtgttctctggaattaaaaacagcaacgagcagacacctgaggaaatggctagccttatagcggacctcgagtataggtatagctgggactgcagccccctgagcatgtttcgtcggcatactgtgtacctggattcctacgccgtaatcaacgacttatccaccaagaatgagggaacaaggctcgccatcaaggctctcgagttgcggttccacggtgctaaagtggtcagctgcctcgctgagggggtgtcacatgtcataataggcgaggatcactccagagtcgccgactttaaagccttcagaagaacctttaagcgaaagttcaagattttgaaagagtcttgggtgacagatagcatcgacaagtgcgaactgcaagaggaaaaccagtaccttatttag

SEQ ID NO: 24785 - DNA, 2736 bp, synthetic construct
  misc_feature 1..2736: note = Description of Artificial Sequence: Synthetic coding sequence
  source 1..2736: mol_type = other DNA
atggccgccagccagaccagccagaccgtggccagccacgtgccctttgccgacttgtgttctacactggaacgtatacagaaaagcaaagggagagctgagaaaataaggcatttccgggaatttctggacagttggaggaagtttcacgacgcacttcacaagaaccataaagatgtgacggactcattttaccctgccatgcggctgatcctgccccagctcgaacgggagcgcatggcttatggtataaaggaaactatgctggccaagttatatatagaactccttaacctcccacgcgacgggaaggacgccctgaaacttctgaactatcggacaccgacaggaacacatggtgacgccggagactttgcaatgatcgcctatttcgtgttgaagccacgatgcttgcagaaaggttccctcacaattcagcaggtcaatgaccttttggattcgattgctagtaataattctgccaaacgaaaagacctaatcaagaaatctttgctgcagcttatcacacagagtagcgcacttgaacagaagtggctgatcagaatgattataaaggacctgaaattaggggtgtcgcagcaaacgattttcagtgtctttcataatgatgctgcagagctgcacaacgttactacagatctcgaaaaggtttgtcggcagctgcacgaccctagcgtaggtttgtctgacatctcaatcacactgttcagcgcctttaagcctatgctagcggccatcgcagatattgaacatatcgagaaggatatgaaacatcagagtttttacatcgaaaccaagttggatggagagcggatgcaaatgcataaggacggcgatgtttataagtacttcagcaggaatggatacaactacactgatcagttcggcgcttcccccactgaggggtccctgaccccctttatccacaatgccttcaaagccgacattcagatctgtattttagacggcgagatgatggcgtataatcctaatactcagacattcatgcagaaaggtactaaatttgacatcaagaggatggtggaggacagtgacctgcagacctgttactgcgtttttgacgtcctcatggtgaacaacaaaaagttaggacacgaaactctgaggaaaaggtacgaaatcctgtcatccatttttactcccattccaggaagaatcgaaatagttcaaaagactcaggctcataccaagaatgaggtgatcgacgccctgaatgaggccatcgataagcgtgaagagggcattatggtgaaacagcccttgtcgatctataaacccgacaaacggggcgaaggttggctcaaaattaaacctgaatatgtctcgggcttgatggacgagcttgatatcctgatcgtcgggggatattggggcaaggggagtcgtggcgggatgatgagccactttctttgcgcggttgccgagaaacctccccctggagagaagccatccgtgttccatacactttcgcgcgtgggttcgggatgtaccatgaaggagctctacgaccttgggctgaaactggccaagtattggaagccttttcacagaaaggctcctccgtctagtatcctgtgcggcacagaaaaacctgaggtttacattgagccttgcaacagcgtgattgtccagatcaaagctgcagaaatcgttccgtctgacatgtacaagacagggtgtaccttgagattcccccgtatagagaagatcagagacgacaaggagtggcacgaatgtatgaccctcgacgatctggaacaacttcgtgggaaagcctccggtaagctggcatccaagcacctatacatcggtggcgacgatgagccacaggaaaagaaacggaaggcagcccccaagatgaaaaaggttatcggaatcatagagcacctgaaagctccaaaccttacaaatgtcaataaaatctcgaatatcttcgaagacgtggagttctgtgtcatgagcgggactgatagccagcccaaacccgatctcgagaatcgaattgccgaattcggcgggtatatcgtccagaacccaggaccagacacctactgtgtgatcgccggatctgagaatataagagtgaaaaatatcattctctctaataaacacgatgtggtcaaacctgcgtggttacttgagtgcttcaaaaccaagagctttgtcccatggcagccgcggtttatgatccatatgtgcccatccactaaggaacatttcgcaagggagtacgattgttatggagactcgtactttattgacactgacctgaatcagctcaaggaagtcttttcgggcattaaaaactcgaatgaacagacacctgaggagatggcttccctgatcgccgatttggagtaccggtattcctgggattgctctcccttgagtatgttccgacgacataccgtgtatctggactcttatgcggtgattaatgatctgtctaccaaaaacgagggtactcggctggcgatcaaagctctggagcttcggttccatggagcaaaggtggtatcttgtttagctgagggtgtgagtcacgtcatcataggggaagaccattcgcgagtggccgactttaaggcattcaggcggaccttcaagagaaaatttaagatattaaaggaatcatgggtcacagattctatcgacaagtgcgaactgcaagaggaaaaccaatacctaatctag

SEQ ID NO: 24786 - DNA, 1944 bp, synthetic construct
  misc_feature 1..1944: note = Description of Artificial Sequence: Synthetic coding sequence
  source 1..1944: mol_type = other DNA
atgcggctgaccctgctgtgctgcacctggcgggaggagcggatgggagaagaagggtcagagctgccagtctgcgcgagctgtggacagaggatttatgacggacagtacctacaggccctgaatgcagattggcatgccgactgctttcgttgttgtgattgtagtgcttcactgtctcaccagtactatgagaaagatggtcagctgttctgtaagaaagactactgggctagatatggagagagttgtcatggatgctcagaacagatcacaaaaggtctcgtcatggtggccggtgaactaaagtaccaccctgagtgtttcatttgcctgacctgtgggacttttattggcgacggtgacacctacaccctggtcgagcatagcaagctgtactgtgggcactgttattatcagactgtggtgaccccggttatcgaacagatcctcccagactcaccagggtcgcaccttccacacacggtcactctcgtgagcatacccgcttcgtcacacggaaaacgcggcctatccgtttcgatcgacccccctcatggacccccaggctgtgggacagaacactcccacacagtgagggtgcagggagtggacccaggctgcatgagtccagatgtgaagaattctatccacgtgggggatcgtatactggagatcaatggcacgccaatccggaacgtgcccttggacgaaatcgacctgctcatccaggagactagcagacttctccagctcactctggaacatgacccacacgacacactgggccatggactgggccctgagacttctcccctctcctccccagcttacacccctagcggagaggccggctcttccgcacgccagaagcccgtgctgcgaagctgcagcatcgaccgctccccgggagccggcagcctggggtctcccgccagccagagaaaagaccttggaaggtcagagtcgctgagggtggtgtgtcggccacaccggatttttcgtccatcagatcttattcacggggaggtgttgggtaaggggtgctttggccaggctattaaggtaacgcaccgggaaaccggcgaagtaatggtgatgaaagaactcattcgcttcgatgaggagacacagcgaacttttcttaaagaggtcaaagttatgcgctgtctcgagcaccctaatgtgctgaagttcattggggtgctttacaaggacaagcggctgaactttattaccgaatacattaagggaggaacactgcgaggtattattaaaagcatggatagccagtacccttggagccaacgcgtgtcatttgctaaggatatagcatccggcatggcatatttgcattcaatgaatatcattcaccgcgatctgaactcacataactgcttggtacgtgagaacaaaaacgtggttgtggccgattttgggctggcaaggttgatggtggacgaaaaaacacaaccagaggggctgagatctctgaagaaaccggacaggaaaaaaagatataccgtggttggaaatccatattggatggctcccgagatgatcaatgggagatcatacgatgagaaagttgacgtcttttccttcgggattgtactctgcgagatcatcgggcgggtgaacgcagaccccgattatcttcccagaactatggacttcggtctaaatgtgcgcggcttcctcgataggtattgcccccctaattgcccgccttctttttttcctattaccgtgcggtgttgtgacctggaccctgagaaaagaccaagttttgtgaagttagagcattggctcgaaactctccggatgcatctggccggccacctgccactgggtcctcagctcgaacagctcgatcgtgggttttgggaaacctaccgaaggggagaaagcgggctgcccgcacatcccgaggtaccggattag

SEQ ID NO: 24787 - DNA, 1944 bp, synthetic construct
  misc_feature 1..1944: note = Description of Artificial Sequence: Synthetic coding sequence
  source 1..1944: mol_type = other DNA
atgcggctgaccctgctgtgctgcacctggcgggaggagcggatgggcgaagaaggatctgaactacctgtctgcgcatcatgcggtcagcggatctacgacggacaatacctgcaggccctgaatgcagactggcatgcagactgctttcggtgctgtgattgttctgctagcctcagccaccaatactatgagaaagacggacaactcttctgtaaaaaggactattgggccaggtacggagaaagctgccacggatgtagcgagcagatcaccaaggggcttgtaatggttgccggggagctgaaataccatcctgagtgcttcatctgcctgacatgcggcacctttataggtgacggcgacacttacacactggttgagcatagtaaactctactgtggccactgttattaccagacggtcgtgacgcccgtgatcgagcaaatcttgcccgattcccctgggtcacacctgccacacaccgttacgttagtgtctataccagccagttcgcatgggaaacgaggactgtccgtgtcaattgacccaccccatggcccccccggttgcggcactgagcactcgcacaccgtgcgggtgcagggagtggaccctggctgcatgagtccagacgtcaagaactctatacacgtgggagatcggatactggaaatcaatggtacgccaatacggaacgtcccacttgatgagattgacctcctgatccaggaaacttctcgcctccttcaattgaccctggaacatgacccgcatgacacactggggcacggattaggccccgagacatccccgctctcttcccccgcctacactccatctggtgaggcgggcagctccgcccgccagaagcccgtcctgaggtcctgctcaatcgataggagccccggcgccgggagtctcggaagcccagcgtcacaaagaaaagacttgggcaggtcggaatctcttcgggtcgtctgtagaccccataggatattcaggccttcagatctgattcacggagaagttttgggcaagggatgtttcggccaggccattaaagtgacacaccgtgaaactggagaggtcatggttatgaaggaactgatcagatttgacgaagaaacacagcggacgtttttaaaagaggtgaaggtaatgcggtgtctcgaacaccccaacgttctgaaattcatcggagtactctataaggacaaacggctgaattttatcacggaatacataaagggcggcacattgaggggcatcattaagtctatggatagtcagtacccctggtctcagagagtttcattcgccaaggatatagctagtgggatggcgtaccttcactctatgaatatcatccacagagatctgaacagccataattgcctggtcagggagaacaaaaacgtggtcgtggccgacttcggattggcgagactcatggtggacgagaagacccagcccgaaggcctgcggagcctcaagaaacccgataggaagaaaaggtacactgtcgtcggaaacccctactggatggctcccgagatgattaacggcaggtcctacgacgagaaagtcgacgtgttcagtttcggcatagtgctctgcgaaattatcgggcgcgttaacgccgaccccgactatctgcccaggactatggactttggcttgaacgttcgagggtttctagacagatattgtcccccaaattgcccaccctctttttttccaatcacagttagatgttgtgatctggatcctgagaagcgcccttcctttgtgaaacttgagcactggctggagacccttcggatgcatttggctggacacctgcccctcgggccccagttggaacagctcgaccgagggttctgggaaacatatcgcaggggggaaagtggcctgccggcccacccggaggtgcccgattag

SEQ ID NO: 24788 - DNA, 1842 bp, synthetic construct
  misc_feature 1..1842: note = Description of Artificial Sequence: Synthetic coding sequence
  source 1..1842: mol_type = other DNA
atgctgctggccagcgccccccggcggcggcggttcctgcagcgggccaagtgctgtgattgctccgccagcttatcacaccagtactatgagaaagatggacaattgttttgcaagaaagattactgggccagatatggcgagagttgccatggttgctcagagcaaattacgaagggcctagtcatggtggccggcgagctcaagtatcatcccgagtgctttatttgtctgacatgtgggacctttatcggggacggtgatacttacacgctagtcgaacactcaaagctctactgtgggcactgctattaccagaccgtggtgacccctgtcattgagcagattctcccagatagccccggatcgcacttgccccatacagtgacgctggtgtctatcccggcgtcctcacacggcaagaggggactgtcagtttccattgaccccccccacggcccccccggatgtggaactgagcactctcatactgtgcgtgtccagggtgttgaccctggctgtatgtcgccggacgtaaagaactccatacatgttggagacaggattcttgaaattaacggtactccaattcggaacgtgcccctcgacgagatcgacttgttgatacaagaaacttcgaggctgctgcagctcacactggagcacgaccctcacgacacgcttggccacgggctgggacccgagacttctcctctgtcctcacccgcctacacccccagcggtgaggcggggtcctccgccaggcaaaaaccagtcttgcgttcttgtagcatcgatcggtcaccaggagctggatcactgggatctcccgcctcacagcgcaaggacctgggtcggtccgaatcgcttcgcgtcgtgtgcaggccacatagaatcttcaggccttcggatcttattcacggagaagtcctcggcaaaggatgcttcggtcaggctattaaggtgactcatcgcgagacaggggaggtgatggtgatgaaggagcttataagattcgacgaagagacacagcgtacttttctcaaagaggtcaaggtgatgagatgccttgaacacccgaacgtgctgaagttcataggtgtgctgtacaaagataagaggttgaatttcattacagaatatattaaaggggggaccttgcgcggcattatcaaatctatggactctcaatacccttggtcccagagagtcagctttgctaaagacatagctagcggaatggcttatctgcactcgatgaacataatccacagagacctcaacagccacaattgcctggttcgcgagaataaaaacgtggtggtggctgattttggattggcacgtctaatggtagatgaaaaaacccagcctgagggtctgagatccctaaagaaacccgatagaaagaagcggtataccgttgtggggaacccgtactggatggctccggagatgataaatggtagatcatacgacgaaaaagtggacgtctttagcttcggcatcgtactttgcgagatcattgggagggtcaacgccgaccccgattatttacctagaactatggacttcggactaaacgtgagaggcttcttggatcggtattgtccaccaaattgtcccccgagttttttccctatcacagtccggtgctgtgaccttgaccctgagaagagaccatctttcgtgaaactggagcactggctggagactctgcgtatgcatttagccggtcacctgccactcggcccccagctggagcagctggatagaggcttctgggaaacgtaccgcaggggggagtccggcctgccagctcacccagaggtaccggattag

SEQ ID NO: 24789 - DNA, 471 bp, synthetic construct
  misc_feature 1..471: note = Description of Artificial Sequence: Synthetic coding sequence
  source 1..471: mol_type = other DNA
atgatggtgctggacaaggaggacggcgtgcccatgctgagcgtgcaaccaaaaggaaagcagaaagggtgtgcagggtgcaatagaaaaatcaaagatagatacttgcttaaggcgctggacaaatactggcatgaagactgcttgaaatgtgcgtgctgcgactgtcgcttaggggaggtggggtcgaccctgtacacaaaagccaacctcatactctgccgaagagactatttgcgactgttcggcacaacagggaattgtgccgcctgttctaaattgatcccagcattcgagatggtgatgagggcacgcgataacgtgtatcacctggactgctttgcatgccagctgtgtaatcaaagattctgcgtgggcgataaatttttcctcaagaataatatgatactgtgccagatggactacgaggagggtcagctcaacgggacctttgaaagccaggtacaatag

SEQ ID NO: 24790 - DNA, 468 bp, synthetic construct
  misc_feature 1..468: note = Description of Artificial Sequence: Synthetic coding sequence
  source 1..468: mol_type = other DNA
atggtgctggaccaggaggacggcgtgcccatgctgagcgtgcagccaaaaggaaagcagaaggggtgtgctggttgtaatcgcaagataaaagaccgctatctcctcaaagccctggataaatattggcatgaggattgtttaaagtgcgcctgttgtgattgcaggctcggcgaagtcggatctactctctatacaaaagctaatctgattctgtgcagacgagattaccttagactgttcggcacgaccggcaactgcgcagcttgcagcaagcttatccccgcgttcgagatggtgatgcgtgcccgcgacaacgtgtaccacctcgattgttttgcctgtcaactctgcaaccagagattctgcgtgggtgataagttttttttgaaaaacaacatgatactttgccagatggactacgaagaaggccaactgaacggaacttttgagtcgcaagtgcagtag

SEQ ID NO: 24791 - DNA, 684 bp, synthetic construct
  misc_feature 1..684: note = Description of Artificial Sequence: Synthetic coding sequence
  source 1..684: mol_type = other DNA
atggagggcagcgccgtgaccgtgctggagcggggcggcgccagcagtcccgcggagaggaggtcaaagcggcggagaagatctggcggcgacggtgggggaggcggtggcgctcgtgcccccgaaggagtgagggctcccgcggccgggcagcccagagcaacaaaaggggcacccccccccccagggacacctcccccaagcccaatgtcaagcgcaatagaaaggaagtccctcgaccctagcgaagagcccgtggatgaagtgctccagatccctcccagcctgctgacctgtggcggatgccaacagaatattggggataggtatttcctgaaggcgattgaccagtactggcacgaggattgtctgagttgtgacctctgtggctgtaggctgggggaggtgggtcggagactgtactacaaattgggccgcaaactgtgccggagggactaccttagactctttggccaggacggtctgtgtgcctcttgcgacaaacgcattagggcgtatgagatgaccatgagagtgaaggataaggtgtatcatctggagtgtttcaagtgtgctgcctgccagaaacacttttgcgtgggggaccgctacctcttgatcaacagcgatattgtctgcgaacaagacatatacgagtggactaagatcaacgggatgatctag

SEQ ID NO: 24792 - DNA, 477 bp, synthetic construct
  misc_feature 1..477: note = Description of Artificial Sequence: Synthetic coding sequence
  source 1..477: mol_type = other DNA
atgagcagcgccatcgagcggaagagcctggaccccagcgaggagcccgtggacgaggtactgcagatcccaccctccctcctgacctgcggaggatgtcagcaaaacatcggcgacagatactttttgaaggcaattgaccagtattggcacgaggattgcctcagttgtgatctctgtgggtgccggttaggcgaggtcggtagacgtttgtactacaaacttggcagaaagctctgtagacgggattatttacgactgttcggacaggatgggctgtgtgcatcgtgtgacaagcggatcagagcatacgagatgaccatgcgggtaaaagataaagtttatcatctggagtgcttcaagtgtgctgcctgtcagaagcacttctgtgtaggcgatcgctatttgctcattaattcagatatcgtgtgcgagcaagacatatatgaatggactaaaatcaacgggatgatatag

SEQ ID NO: 24793 - DNA, 1677 bp, synthetic construct
  misc_feature 1..1677: note = Description of Artificial Sequence: Synthetic coding sequence
  source 1..1677: mol_type = other DNA
atgcaccggggcggccagcccctgaagaagcggcggggcagcttcaaaatggccgaacttgatcagttgccagacgagtcttcctccgcaaaagccctggttagcctgaaggaggggtctttatccaatacttggaatgagaagtatagctccttgcagaaaactccggtgtggaagggcagaaatacatcaagcgccgtagaaatgccttttcggaattcaaagcggtcccgactgttcagtgatgaggacgatcgccagattaacaccaggagtcccaagcgcaatcagcgggtcgccatggtgcctcagaagtttacagcaaccatgagtaccccagataaaaaagcctctcagaagatcggattcagactccgaaatctgctcaagcttcctaaagctcacaaatggtgcatctatgagtggttctatagcaacatcgataagcccttattcgagggcgataatgatttttgtgtttgtctgaaggaaagctttccaaatctcaagacaagaaaactgactagagtagaatggggtaaaatcaggagactcatgggtaaaccgcggcgatgttcatccgccttcttcgaagaggagcggagcgcccttaagcagaagcgccagaagattagacttttgcagcagcgaaaggtggccgacgtcagccagttcaaggacctgcccgatgaaatccctctccccctggtgatcggcaccaaagtcaccgccaggctgaggggtgtccatgacgggctattcactggccaaattgatgcagtggatacgctaaacgctacttaccgcgtgaccttcgatcgaaccggtctggggacccataccatacctgattacgaagtgctgagtaacgagccccacgaaacaatgccaatcgccgcattcgggcagaagcagagaccctccagattcttcatgactcccccccgactccattacaccccccctcttcagtcacctataatagataacgaccctctcttggggcagtctccctggcgctccaagatctctgggtccgacaccgagactttgggcgggtttccggtggagtttctgatacaagtaacacgactctccaaaatcttgatgatcaagaaagaacacataaagaaactccgggagatgaataccgaggcagaaaagctgaagtcgtactccatgccaatttcaatagaattccagaggcggtacgccacgatcgtcttggaactagagcagctgaacaaagatttgaataaggtgctgcataaagtgcagcagtactgctatgaattggcaccagaccagggactccaacccgcggaccagccaactgatatgaggcggcgctgtgaagaagaggcccaggaaattgttcgccacgcaaatagtagcacagggcaaccatgcgtagagaacgagaacctcactgatttgatcagtaggcttacggctatcctccttcaaatcaagtgtctggcagaaggcggcgacctcaatagttttgagtttaagagcctgaccgatagcctgaatgacataaagtccaccatagatgcatcaaacatctcatgttttcaaaataacgttgagatacatgttgcccacatccaatctgggctctctcagatggggaacttgcatgctttcgccgcaaacaacaccaatcgggactag

SEQ ID NO: 24794 - DNA, 1524 bp, synthetic construct
  misc_feature 1..1524: note = Description of Artificial Sequence: Synthetic coding sequence
  source 1..1524: mol_type = other DNA
atggccgagctggaccagctgcccgacgagagcagcagcgccaaggccctggttagcctcaaggagggctcattgtctaacacctggaacgaaaagtattcttcactccagaaaactccggtgtggaagggcaggaacacaagctctgccgtggaaatgaaattcaccgcgaccatgtcaaccccagacaagaaagcttcccagaaaattggatttcgactgcgaaatttactgaaattgccaaaggcacacaaatggtgtatttacgaatggttctacagtaacattgataaaccacttttcgaaggggataacgatttctgtgtgtgtctgaaagaatccttccccaatctgaagactaggaaactgaccagggtagagtggggtaaaatacgtcgcctcatgggtaagccgcgacggtgcagcagcgccttcttcgaggaggaacgttccgcattgaagcagaagagacaaaagatccgcctcctgcaacagcgcaaagttgcggatgtctcccaatttaaggacctgcccgacgagatccccctccccctggttattggtaccaaggtgacggctcgcctgcgcggggtccatgacggcctgttcaccggtcagattgacgcggtggatactctgaacgccacctaccgcgtgacattcgatcggactggcttgggcacgcacactatcccagactacgaagtgctgtcaaatgagccgcatgaaaccatgcctattgctgcttttggccagaaacagcgaccatccagattttttatgacccccccacggctgcactacacccccccactgcagtcgccaatcatagacaatgatcctcttttagggcagtccccatggagaagtaagatctcggggtctgatacagagaccctagggggattcccggtggagtttttaatacaggttactagactgagcaaaatattgatgataaaaaaagaacacattaagaaactgagagaaatgaacactgaggctgagaaactgaaatcttactccatgccaattagtatcgagtttcaacgccggtacgccactatcgtgctggaacttgagcagttaaataaggacctgaataaagtgctccacaaggtgcagcagtactgttacgagctggctcccgaccaagggctgcaaccagccgaccagcccaccgatatgagacggcgttgtgaggaggaagcccaagaaatcgtgcggcacgctaatagttctacaggtcagccctgtgtggaaaacgaaaacctcactgacctgatttcccggcttacagctatcctactccaaattaaatgcctcgcagagggtggcgatctcaatagtttcgaatttaaatctctgaccgacagcttgaacgatattaagagcacgattgacgcatccaacatctcatgctttcagaataacgttgagattcacgtagcccacatccagtccggattgtcacagatggggaacttgcacgccttcgcagctaataatacaaacagggattag

SEQ ID NO: 24795 - DNA, 1572 bp, synthetic construct
  misc_feature 1..1572: note = Description of Artificial Sequence: Synthetic coding sequence
  source 1..1572: mol_type = other DNA
atgcggccccggaccgagggcttcttcccccccgccggcgccagcctgccgttcagcacccggaataaacagcccgccgtgccagctgccgcagctagggcggctgagcacgcgcccggtgccggccccggtagagattctggggccggcacagccccgccggcgctccgtcgcagggcctctccctgcgggttgctccctcctttcttgccacctggtagcgcaggtggcggcggcggaggtgcccggagaggaccccccagcgccgctccacccccccgagcgggggctgggggtgccggccccgccagcgccagcagaggtggctccagcgctgctcggaggcggggtcagcgcgctcctcacagcaatttaccaaggaaagatagcctccggccaaccatgcacaggggcggacagcctctgaagaaacgcaggggcagcttcaagatggcggagttagaccagctccctgatgagtcctcatccgctaaggctcttgtcagtctcaaggagggttcactaagcaacacttggaacgagaagtatagcagcttgcaaaaaaccccagtgtggaagggcaggaacacttcctcagcggttgagatgccattcaggaattccaagcgttcaaggttattcagcgacgaagatgatcgacagatcaacacgcgctcacctaaaaggaaccagcgggtcgccatggttccacagaagtttactgcgacaatgtctacacctgataagaaggcgtcacagaaaatcggtttcaggcttcggaatttgcttaaactgccgaaggcacataagtggtgcatatatgaatggttctatagcaacattgataagccactatttgagggtgataatgacttctgtgtgtgtctgaaagaaagtttccccaatctgaagactagaaagttaacgcgggtcgagtggggcaaaatcaggcgactgatggggaagccgcgacggtgcagctctgccttcttcgaggaggagagatctgccttgaagcaaaaaagacagaagattcgcctgctgcagcagcgcaaggtggcagacgtgtctcagttcaaggacctgccagatgaaatccctctgcctcttgtcattggcacgaaggtaacagcccgattgcgcggggtgcatgacggactgtttactgggcagatagacgccgtggatactctgaatgcgacttaccgtgtgacgtttgacagaacagggctgggcacccacaccatacccgattatgaggtgctgagcaatgaacctcatgagacaatgccaatcgctgcatttggacagaaacagcggccgtcgcgcttctttatgacgccaccacgactgcattacacacctccattgcagtccccaatcattgataatgatccactcctgggacaaagcccatggcggagtaagatttctggctccgataccgagaccctaggggggtttccagttgagtttcttatccaggtgacgagactttccaagatcctgatgattaaagggacttaccaggaaattaagggcaacgagcacaggagccggaagatagggtag

SEQ ID NO: 24796 - DNA, 1842 bp, synthetic construct
  misc_feature 1..1842: note = Description of Artificial Sequence: Synthetic coding sequence
  source 1..1842: mol_type = other DNA
gagaccgccgagcagaacagcagcctggccgtgggcctgaacgaccagttacacgacctgagtcggtccaggtcaccagccgcacgatctagcgcatctaacattagggagcgtcgagctagaattgcccgcggccgctgggatcgagtcccggacgtggcgacccgcagggggcttttaaggcctgccgtttccgggaaggtgcgcggaagaaggcgcccgtcaaatgtcgggttcgggaactgcagcagcgcaaaggctctggtgtccctgaaggaagggtctctctctaacacctggaacgagaagtatagttctcttcaaaaaacaccagtgtggaaaggccggaatacctcttctgctgtggagatgccttttcggaactccaagaggtctagacttttcagtgacgaagacgacaggcaaataaacacaaggtcgccaaaaagaaaccagcgcgtggccatggtgccccaaaagttcacggcgaccatgtccactccagacaagaaggctagccagaagataggctttcgtcttcgcaacttattaaaattgccaaaggcgcacaagtggtgcatttacgagtggttctactccaacatagacaagcctctcttcgaaggtgacaatgacttttgtgtgtgcctcaaggaaagctttcctaaccttaaaacacgtaagctgacacgcgtagagtgggggaagattaggcgcctaatgggcaaacctcgcagatgttccagcgccttttttgaggaagaacggtccgccttgaaacaaaagcgccagaaaattcggttgcttcagcagaggaaggtcgcggacgtcagtcagtttaaggacctcccagatgagatccctctaccactggtgatcggcaccaaggtgacagccaggttgagaggtgtccacgatggtctatttaccgggcagatcgatgcagtggacactctgaacgccacctatcgcgtcacctttgatagaacagggttgggcacccatacaattcctgattatgaagtactttcaaatgaaccccacgagacaatgcctatcgccgcattcggccagaagcaaagaccttctagattttttatgacccctccacggctgcactatacaccacctctccagtcccccatcattgacaacgatcctctgctgggacagtctccctggcgttcaaagataagcggtagcgatactgaaactctaggggggtttcccgtcgaattcctgatccaagttacaagactgagcaagattctcatgatcaagaaggaacatattaagaaactccgtgagatgaacacagaagctgaaaaactgaagagctacagtatgccaatatctatcgaatttcagcgccgctacgcaaccatcgttcttgaacttgaacagctgaataaagaccttaacaaggtcttacacaaagtccagcaatattgttatgagttagctccagatcaaggtctccaaccagcagatcagcctacggacatgcgcagacgttgcgaggaggaagcccaggagatcgtgagacatgcaaattcatcaaccggccagccatgcgtagagaacgagaaccttaccgacctgatctcacgactcacagcgatactgcttcaaataaaatgcctcgccgagggaggcgaccttaactcttttgagttcaagtcgctgacagacagcctgaatgatattaagagcactattgacgccagcaacatctcatgcttccagaataacgttgagatccatgtagctcatattcagtctggcctgagccagatgggaaacttacacgcattcgccgccaataataccaatagagattag

SEQ ID NO: 24797 - DNA, 13800 bp, synthetic construct
  misc_feature 1..13800: note = Description of Artificial Sequence: Synthetic coding sequence
  source 1..13800: mol_type = other DNA
atgagcgagttcctgctggccctgctgaccctgagcggcctgctgcccatcgcccgagtactgaccgtgggcgcagaccgtgaccagcagttatgcgacccaggagaattcctgtgccacgaccatgtcacctgcgtgtcgcaaagctggctgtgcgacggcgacccagattgtcccgatgattcagacgaaagcctcgatacttgccccgaggaagtggagatcaagtgcccactgaaccatattgcctgtttaggaacaaacaagtgcgtgcatctctctcagctgtgtaacggggtgcttgactgcccagacggatatgacgagggagtccactgtcaggaattgctgagcaactgccaacagctgaactgccaatataagtgcaccatggttcgcaactccacccggtgttactgcgaagatggctttgagattaccgaggatgggcggagctgcaaagaccaggacgaatgcgctgtctacggaacatgctcccagacttgccgaaacacgcacgggagctatacctgctcatgtgtggaggggtatttgatgcagccagacaacaggagttgcaaggcgaaaatagaacccactgatcgtcccccaatactgttgatcgcgaattttgagaccatcgaggtgttctacctcaatggctctaaaatggcgactctttcttctgtcaacggcaatgagatccacaccctggacttcatctataacgaggacatgatctgctggattgagtcaagggagtctagtaatcagctgaaatgtattcagatcacaaaggcaggaggcttaaccgatgagtggaccattaacatacttcagtcctttcacaacgtacagcagatggccatcgactggttgacacgaaacttgtatttcgtcgatcacgtgggggacagaatctttgtgtgtaatagcaacggcagcgtttgtgtgaccctgattgacttagagctgcacaatccaaaagccatagcagtggatcctatcgcgggcaaactgttttttactgattacggcaacgtcgcaaaagtggagagatgcgatatggacggaatgaaccggactcggatcatcgactccaaaacagaacagccagcggcactggctttggatttggtgaacaaactggtttattgggtggatttatacctcgattacgtgggagtggtggattaccagggcaagaatcggcacaccgttatccagggcagacaggtgcggcacctgtacgggatcacagtcttcgaagattacctctatgccactaacagcgacaactacaacatcgtgcggatcaaccgcttcaacggaacagacatccactccctgatcaaaattgagaacgcatggggtataaggatttatcagaaacgaacacaacccactgtgcgaagtcatgcttgcgaggtggatccgtacggtatgccaggaggttgcagccatatatgccttctctcatctagctataaaactaggacttgccggtgcaggaccggcttcaacctcgggtcagacggacgatcctgcaagcgcccaaagaacgagctcttcctcttctacggcaaaggccggccaggtatcgttcgtgggatggacctcaacaccaaaatcgctgatgagtacatgattccaatcgagaacctagtgaacccccgtgccctggatttccacgccgagacaaattacatctatttcgccgataccacatcattcctgatcggccggcaaaaaattgatggcaccgagagggaaacgatcctgaaggatgatctggacaacgtggaagggatcgctgtggattggatcggaaacaatctctattggactaatgacggccaccggaaaacaattaatgttgcgcggttggagaaggcttcccaatctagaaaaacccttctagagggggaaatgtctcacccccgagggattgtggtggatcccgtcaatggatggatgtactggacggattgggaggaggatgagatcgatgactccgtgggtcggatcgagaaggcctggatggatggctttaataggcagatcttcgttacttcaaagatgctgtggcctaacggactcactttggattttcacactaacactctgtattggtgtgatgcctactacgaccatatcgagaaggtgtttctcaatggtacgcataggaagatagtgtactctggccgggagctaaatcacccatttggcctgtcacatcatggcaattacgtgttctggactgactatatgaatggaagcattttccagcttgacctgatcaccagcgaggtgactctcctgagacacgagagaccccctctatttgggcttcagatctatgatccgagaaaacagcagggtgacaatatgtgtagagttaataatggggggtgcagcacgctgtgcctggctattcccggtgggcgcgtttgtgcttgcgccgataatcagttgctagatgagaacggtactacatgtactttcaatccgggagaggccttgccccatatatgtaaagcgggagagttccgatgcaaaaatcgccactgcattcaggcaagatggaagtgtgacggcgacgacgactgccttgacgggagcgacgaagactctgttaactgctttaaccacagctgtcccgacgaccagtttaaatgtcagaacaacaggtgcatccccaagcgttggctgtgcgatggcgcgaatgactgcggcagtaatgaggacgagtccaaccagacgtgcacagctagaacatgtcaagtggatcagttttcatgcggtaatggccgctgtatcccacgcgcttggctctgtgacagggaggacgattgtggggaccagactgatgagatggcctcttgtgagtttcctacctgcgagcctctaacacagtttgtgtgcaagagcggcagatgcatttcatcaaaatggcattgcgatagtgatgacgactgcggagacggttcagatgaggtggggtgcgttcacagctgttttgataaccagttccggtgctcatctggccgttgcattcccggacattgggcgtgcgacggggacaacgattgcggagattttagcgatgaggcacaaataaactgtacaaaagaagagatacacagcccagcaggttgcaacgggaacgagtttcagtgccatcccgacggaaactgtgtccccgacctgtggcgttgtgacggcgagaaagactgtgaggacgggagtgacgaaaagggctgcaatggcacgatcaggttatgtgatcacaagacgaagttctcttgctggtcaaccggccgttgcattaacaaggcatgggtgtgcgacggagacatcgactgtgaggaccagagcgacgaggacgactgtgattcgttcctttgtggccctccaaaacacccatgtgcgaacgacacctcagtctgtctccagcctgagaaactatgcaatggcaaaaaagattgcccggatggctcggacgaaggatacctgtgcgacgaatgttccttgaataacggcgggtgctctaaccattgctctgtcgttccaggaaggggaattgtgtgctcttgccccgaaggcttacaattgaacaaggataataaaacttgcgaaattgtcgattactgttccaatcatctcaaatgctcgcaggtgtgtgaacagcacaagcataccgtcaagtgttcgtgctatgaaggatggaaacttgatgtcgatggcgaatcctgcacgtctgtagaccctttcgaggcttttataattttcagcattaggcatgagatcaggcgaatcgacttgcataaacgcgattattcattgttggtcccaggccttcgtaatactattgccctcgacttccattttaaccaatctctcttgtactggactgacgttgttgaagatcggatctataggggaaaactgtctgagagcgggggagttagcgccatcgaagtggtggtagagcatggcctggccacccctgaaggtctcaccgtagactggattgccggtaacatctactggatcgattcaaacttagaccagatcgaggtggccaagctcgatggaagccttcggactaccctcatcgcaggagctatggagcacccacgggccattgccttggacccccgatatggcatcttgttctggactgactgggatgctaacttccctcgaatcgagagcgcctctatgagtggggctgggcggaaaactatttacaaagacatgaagacgggcgcttggcccaatgggctgacagtcgatcacttcgaaaagaggattgtttggacagacgccaggtccgacgccatctactcggccctgtacgatgggacaaatatgatcgaaattatcagaggtcacgagtaccttagccaccctttcgctgtgagcctgtatggcagtgaggtgtactggaccgactggaggacaaatactctctccaaggctaataagtggacaggccagaatgtttctgttatacagaaaacctcagcccagccttttgatctacagatttatcacccttcccgtcagccgcaggcccctaacccgtgcgcagctaatgacggcaagggtccctgctcacacatgtgcctgattaaccacaataggtccgcagcctgtgcttgtccacatctgatgaagctaagcagcgataagaaaacttgctatgaaatgaaaaaattcctgttgtacgcacgtcggagcgaaatccggggagtggacatagataacccatactttaatttcataaccgccttcacagttcctgacattgacgacgtcacagtgatagacttcgacgcctcagaggaaaggttgtactggaccgacatcaagacccagaccatcaaaagagcttttatcaacgggacaggccttgagacagtgatatccagggacatccagtcaataagaggcctggctgtggactgggtgagcaggaatttgtattggataagctcagaatttgatgagacgcagattaacgtcgcgcggcttgatggatctctgaagacatccatcatacacgggattgacaaaccccaatgtctggctgcacatcctgtgaggggaaaactctattggacagacggaaataccattaatatggcaaatatggatggaagtaattccaagatcctgtttcagaatcagaaggagcctgtcgggttgtccatcgactatgttgagaacaagctatactggattagcagcggaaacggcacaattaatcgctgtaatctcgatggaggcaaccttgaggtgatcgagagcatgaaggaagagctaacaaaggccacagctctgaccatcatggacaagaaactatggtgggctgaccagaatctggcacaactgggcacctgcagcaagcgcgacgggcggaaccctacgatccttaggaataagaccagcggagtagtgcatatgaaggtgtacgataaggaggcgcagcaaggatccaactcttgccaacttaacaatggaggctgttctcagctgtgcctgccaacctctgagactacaaggacttgcatgtgcacagtaggatattacctgcagaaaaacaggatgtcgtgtcaggggatagagagtttcttgatgtattcggttcacgagggaattcgtgggatcccactggagccttctgataagatggacgcattgatgccgatttcaggtacgtctttcgccgtcggaattgacttccatgccgagaatgacaccatctactggactgatatgggctttaacaagatctcccgcgcaaagagggatcagacctggaaggaagatatcatcactaatggcctgggaagggtagaaggcattgccgtggactggattgcgggcaacatctattggacggaccacggcttcaatctgatcgaggtcgctagattgaacggtagcttccgctatgtgattatctcccagggcctcgaccagccacgatcgatcgctgttcaccccgaaaagggtttgctgttctggaccgagtgggggcagatgccctgcattggcaaagctcgcctcgacggcagcgagaaagtcgttctggtcagcatgggcatagcatggcccaatggaatcagtatagattacgaggaaaataagctgtactggtgcgatgcccgcacagacaaaattgaacggatagatctcgaaacgggtggcaatcgggagatggtgcttagcgggagtaacgtcgacatgttttccgtcgccgtctttggcgcatacatctattggagcgacagagcacacgctaatggatccgtgagacggggccacaagaacgatgcaacggagactattacaatgcgcacaggactcggggttaatctgaaagaggttaaaatctttaatcgggtccgggagaaaggaacaaatgtttgtgcacgggacaatggcggctgtaagcaactctgcctttaccgcggcaactcacgaagaacctgtgcgtgtgcccatggctatctggcggaagatggagtgacttgcttgagacacgagggctacctgttatattcaggtaggactattctcaagtctattcacctttccgacgagacaaacctgaattctcccattcgcccatacgaaaatccccggtacttcaagaacgttatcgccctcgcgttcgattacaaccagaggcggaaaggcacgaacagaatcttttatagtgatgcccatttcggcaacattcagttgatcaaagataactgggaagacagacaggtgatcgtggagaacgtcgggagcgtggagggcctagcataccaccgtgcttgggacacgttgtactggacttcaagcactacctctagcatcaccaggcacacggtggatcagacacggcctggagcttttgaccgggaagccgtcatcacaatgagcgaagacgaccacccccacgtgctcgctttagatgaatgccagaatttaatgttttggaccaattggaacgagcagcacccatccataatgcgatctactctcactgggaaaaatgcccaggtggtagtctccacggacattctcacccctaatggcctgacaattgactacagggcggagaaattgtacttcagcgacggcagtctgggcaaaattgagcgctgcgagtacgacggttcgcagcgccacgtaattgttaagtctgggcctggaaccttcctgtcgctcgcggtgtatgacaactatatcttttggtcagattggggccgtagagctatactgcgatccaataagtacactggaggagacacaaaaatcctccggagtgatattccccatcagccgatgggcataattgctgtggccaatgacaccaacagctgcgagctctcaccttgtgcacttctaaacggagggtgtcacgacctgtgcttgctcactcctaatggccgcgtgaattgtagctgtagaggcgataggatcctcttggaggacaatagatgtgtcaccaaaaattcaagttgcaacgcatactccgaatttgaatgtggaaatggggagtgcatcgattaccagctaacctgtgacgggatccctcattgcaaggacaaaagtgacgagaagttgttgtactgtgagaatagatcttgccgacgcggctttaaaccttgctacaatcgacgatgtatccctcacgggaagctctgcgacggggagaatgactgtggagataattctgacgaactggattgcaaggtttccacatgcgctacagtggaattccgttgcgctgatggtacatgtatcccccgcagtgcccggtgtaaccagaacatcgactgcgccgacgcctctgatgaaaaaaactgtaataataccgattgcactcatttttacaaattgggggtaaaaacaaccgggtttatccgatgtaacagtacatccctgtgtgtgctgccgacatggatatgtgatgggtccaatgattgcggtgattattcagatgaacttaaatgtccagtacagaacaaacataaatgcgaggagaattatttctcctgtcctagtggtcgttgcatcctcaacacgtggatctgtgacggacagaaggattgcgaggatgggagggacgagttccactgcgattcaagttgctcttggaatcagttcgcttgttctgcccagaaatgcatcagtaaacattggatctgcgacggagaagatgattgcggtgacgggctggacgagagcgattcgatttgtggggctattacctgcgcagccgacatgttctcctgccagggctccagggcctgcgtacctcggcactggttatgcgacggtgaaagggactgtccagatggctcagacgaactcagcactgctggatgcgctcccaataatacatgcgacgaaaatgccttcatgtgtcacaataaggtctgtatccctaagcaatttgtgtgcgatcacgatgacgattgcggcgacggtagcgacgaaagccctcagtgtgggtaccgccagtgtggaaccgaggagttttcttgtgccgatggtagatgcttactgaacactcagtggcagtgcgatggagactttgactgccctgatcacagtgatgaagcacccctcaatcctaaatgcaaatcagccgagcagagctgtaacagctctttttttatgtgtaagaacggccggtgtatcccatctggaggcctgtgcgataacaaggacgactgtggagacggctcagacgagagaaattgccacatcaacgagtgtctgtcgaagaaagtctcgggatgttcgcaggactgtcaagatcttcccgtctcctacaagtgcaagtgctggccgggatttcaattaaaagatgacggtaagacttgtgtcgacattgatgagtgctcatccgggttcccttgcagccagcagtgcatcaatacttacggcacctacaaatgtctgtgcactgatggttatgagatacagccagacaaccccaacggctgcaaaagtttgtccgacgaagagccttttctgattctcgctgatcaccacgagattagaaaaatcagcacagatggatctaattacaccctgctgaagcaagggcttaacaacgtgatcgcgattgatttcgactatcgcgaggagttcatctattggattgactcctccaggccaaatggatccagaattaaccggatgtgtttgaacggatctgacatcaaagttgtgcataacactgccgtgcccaacgcgttggctgtggactggatcggtaagaacctgtattggtctgacaccgaaaagcggatcatcgaggtttctaagttaaacggcctgtacccaacgatcctggtgagcaagagactgaaattcccccgggatctttcgctcgatcctcaggccggctacttatattggatagattgctgcgagtaccctcacatcggcagagtggggatggacggcactaaccagtcagtcgttattgagacaaaaatatcccgccccatggcactgacaatcgactacgtgaaccggagattatattgggctgatgaaaaccatattgagttcagcaatatggatgggtcccatagacacaaagtcccaaaccaggatataccaggcgtgatcgcattgactctatttgaagactatatctactggacagacgggaagacaaaatcactgtcccgagcacacaagacctccggggccgatagactatccttgatttatagctggcacgcaatcactgatatccaggtatatcacagttaccggcaaccggatgtctccaagcatctgtgtatgattaataacggagggtgttcacacctgtgtctgctggcacccggcaagacacatacctgtgcttgcccaaccaacttctatctcgctgccgataatagaacatgtctttcaaactgtactgcatcccagtttagatgcaaaaccgacaagtgtatcccattctggtggaagtgcgataccgtcgatgactgcggcgatggatctgatgaacccgacgattgccccgagtttaggtgtcaacccggcagattccagtgtggaacaggcctctgtgcactgcctgcctttatttgcgacggggaaaatgactgtggcgacaacagtgatgaactcaactgcgacactcacgtctgtctgagtggccagttcaagtgcactaagaaccagaagtgcattccagtgaacttacgctgtaacggacaggatgattgcggcgatgaggaggatgagagagactgcccggaaaacagctgctcccctgattatttccagtgcaagactacgaaacattgcatttccaagctgtgggtatgtgacgaagacccagactgtgcggatgcaagcgacgaagccaactgtgacaaaaagacttgcggacctcatgaattccaatgtaaaaataacaattgcataccggatcattggagatgcgatagtcagaacgattgttctgacaattctgacgaggaaaattgtaaacctcagacttgcacactgaaggactttttgtgtgccaacggggactgcgtgagcagccggttctggtgtgacggagattttgactgtgccgacggcagtgatgaaaggaattgcgaaacctcctgtagtaaagaccagttccggtgtagtaatggacaatgcatacctgctaaatggaaatgtgatggtcatgaagactgtaagtatggagaagacgagaaatcctgtgaacccgcaagccctacctgttcgagcagagagtacatctgtgcaagcgatggatgtatttctgcctcgctcaaatgcaacggggaatacgactgcgcggatgggtccgatgaaatggattgcgtgaccgagtgtaaggaagatcagtttcgatgtaaaaataaagcacattgtatcccaatccggtggctctgtgacgggatccatgactgcgtagatggatccgacgaagagaactgcgagagagggggaaatatttgccgagcagacgaattcttatgtaataatagcctctgcaagttacacttctgggtgtgtgatggagaagacgactgtggagacaattctgacgaggcccctgacatgtgtgtgaagtttctttgcccttctactcggccccatagatgccggaacaaccgaatctgcttgcagtccgaacagatgtgcaatggcattgatgagtgcggggacaatagcgacgaagatcactgcgggggtaaactgacctacaaggccagaccttgcaaaaaagacgaatttgcctgttctaacaaaaagtgtattcccatggatctgcagtgtgatagattagacgattgtggtgacggatccgacgagcaaggatgcagaattgcccctactgagtacacttgtgaggataatgtgaacccatgcggagatgacgcttattgcaatcaaatcaagaccagcgtcttctgtcggtgcaaaccaggattccaacgcaatatgaagaatagacagtgtgaagaccttaacgagtgccttgtcttcggcacctgcagtcaccagtgtattaatgtggagggctcttacaaatgcgtgtgcgaccagaactttcaggaacggaataatacttgcatcgcagaagggtcagaggatcaggtcctctacatcgcgaacgataccgatatattgggcttcatctacccttttaattactctggcgatcaccagcaaatctctcacattgagcacaattctaggatcactgggatggacgtctattaccagagagacatgatcatttggagcacgcaatttaatccgggaggtatcttctacaaaaggatccacgggcgtgaaaagcgacaggccaactcaggactaatctgcccagagtttaagagaccccgggatatcgctgtcgattgggttgctggtaacatttattggaccgatcactcgaggatgcactggttctcttattatacaacccactggacctcgctgcgttattctatcaacgtgggccagctgaacggcccgaactgcactagactgctgaccaatatggcgggtgaaccatatgccattgccgtgaatcccaaaaggggtatgatgtactggactgtcgtaggcgaccactcgcacattgaagaggctgccatggacggtaccctgcgtaggatcctggtgcagaagaacctgcaaaggcctactggactcgccgtagattattttagtgaacgcatttactgggctgacttcgagctgtccatcatcgggtcagtgctgtatgatgggtccaattcagtggtttccgtaagttctaagcaaggcctgctgcacccccaccgaatagatatcttcgaagattatatctacggcgccggccctaagaacggcgtgttcagggtccaaaaatttggccacgggtccgtagagtatctcgccctgaatatcgacaagactaaaggagtcctgatttcccaccggtacaagcaattggacttgcctaatccttgccttgacctggcctgcgagttcctatgtttactgaatcctagcggcgcaacttgcgtatgccccgaaggtaaatatcttataaacggcacttgtaatgatgactcactgcttgatgattcttgtaaactgacatgcgagaacggtggcaggtgcattcttaacgaaaagggggacctgcgatgtcattgctggcctagttatagcggtgagcgctgcgaggttaaccattgttccaactactgtcagaacggtggtacctgcgtgcctagcgtgctgggccgccctacttgtagctgcgccctggggtttaccggacctaactgcggtaagactgtatgtgaggatttctgtcagaacgggggtacctgcatcgtgacagccggcaatcagccatattgtcattgtcagcctgaatatactggagatcgctgtcagtactacgtatgccatcactactgtgttaattccgaatcttgtaccattggtgacgacggttccgtggaatgcgtatgccctacacgctacgagggacctaaatgcgaggtcgataagtgtgtacggtgtcatggcggccattgtattatcaacaaggatagcgaagatatcttttgcaattgcactaacggcaagatcgcttctagttgtcagctctgcgacggttattgctacaatggaggcacttgccagctggacccagagacgaatgtccccgtctgcctttgtagtaccaactggagtggcacacagtgcgaaaggccagcgccgaagtctagtaaatctgaccatatcagcacccgaagtatcgccatcatcgtgcctctggtgctgcttgtgactctgatcacaactttagtgatagggctggttctgtgcaagagaaaacgacgtacaaaaactatcagaagacagcccattattaatggcggtataaatgtcgagatcgggaacccgagctacaacatgtatgaggtcgaccatgatcacaacgatggaggacttctggatcccgggtttatgattgaccctaccaaggcacggtatatcggcggggggccaagcgcctttaaactgcctcatacagctccgccgatctacctgaacagcgacctgaagggccccctaacagcaggtccgacaaactattccaatcctgtttacgctaagctctacatggacggccaaaactgtcgcaacagcctcggctctgttgatgagcgcaaggagctcctccccaagaaaatagagattggaatacgggagactgtcgcttag

SEQ ID NO: 24798 - DNA, 2349 bp, synthetic construct
  misc_feature 1..2349: note = Description of Artificial Sequence: Synthetic coding sequence
  source 1..2349: mol_type = other DNA
atgagcgagttcctgctggccctgctgaccctgagcggcctgctgcctatcgcacgcgtcctaacagttggtgccgatcgggatcaacagctgtgtgacccgggagagtttctgtgccacgatcatgtgacgtgtgtgtcccagagctggctgtgcgatggtgacccagattgtccagatgacagcgacgagagtctggatactagtcggacgtgtcaggtagatcagttctcctgcggcaacggacgttgcatcccccgcgcttggttgtgtgatcgagaggacgactgcggggatcagacagacgaaatggccagttgtgaatttccaacctgcgagcccctgacgcaatttgtgtgcaagtccggccgctgtatctcttccaagtggcactgcgacagcgatgacgattgcggggatggcagcgatgaggtgggctgcgttcactcctgttttgataaccagttccgctgctcttccggacgctgcattccaggtcattgggcctgcgacggagataacgactgcggtgatttcagcgatgaagctcaaatcaattgcacaaaagaggaaattcatagcccagccgggtgtaacggaaatgaatttcagtgtcacccggatggcaattgcgtccccgacttatggagatgtgatggcgagaaggactgcgaggatgggagcgatgaaaaggggtgcaacggaaccatcaggctgtgtgaccacaagactaaatttagttgttggagcacagggagatgcattaataaggcctgggtgtgtgacggggacatcgattgcgaagaccaatcagatgaggatgattgtgattcctttctctgcggccctcctaagcacccctgtgcgaacgatacaagcgtctgtctccagccagagaagctttgtaacggaaaaaaagactgccccgatgggtcagatgaaggatacctgtgcgatgagtgtagcttgaacaatggtgggtgcagcaaccactgttccgtcgttccgggtcgcggcatagtctgttcctgtccagagggattgcagcttaataaggacaacaagacttgcgaaatagtggattactgcagcaaccatctgaagtgttcacaggtttgcgagcaacacaaacacacggtcaagtgtagttgttatgaaggatggaaactggacgtggatggcgaatcgtgtacaagcgtggatcccttcgaggctttcattatattctctatccgccacgagataagacgcattgacctccataaacgcgattactccttgctcgtacccggcctcagaaacaccatagcactagatttccatttcaatcagagcctgctctattggacagacgttgtagaggatcggatttaccgagggaagctgagtgaaagtggaggcgtttccgcgatcgaggtcgtcgtggaacacggcctcgctacccctgaaggcctgacagttgactggatcgccggcaatatctactggattgactcaaatctagatcagatcgaggtcgcaaaattagacggatccctgagaacaactttgatcgctggcgctatggagcacccgcgggcaattgcattggatccccggtatggtatcctcttctggactgattgggatgctaattttcctcgcatcgagtccgcctcaatgtccggagccggacgcaaaacaatctacaaagacatgaagaccggcgcctggccgaatggactaaccgtcgaccattttgagaaaaggattgtgtggaccgacgcaaggagcgatgctatctatagcgcgctgtatgatgggacaaatatgattgagattatccgcggtcacgagtatctctctcacccatttgcagtcagtctgtacggttctgaagtgtattggactgactggcgtaccaatactctgtccaaggcaaataaatggacagggcagaatgtaagcgtcatccagaagacgtctgctcagccgttcgatcttcagatttaccatcccagtcggcagccccaggccccaaatccatgtgcggcaaacgacggaaagggaccctgctcccatatgtgccttataaatcacaaccgcagtgccgcatgcgcttgtccccatctgatgaagctgagctctgacaagaagacttgttacgagatgaagaagtttctgctttatgcccggaggtccgagatacgcggcgtggatattgataatccctacttcaattttattacagcatttaccgttcccgatattgacgacgtaacagttattgattttgacgcaagcgaagagaggctgtattggactgatataaagactcagacgatcaagcgtgccttcattaatggctag

SEQ ID NO: 24799 - DNA, 13614 bp, synthetic construct
  misc_feature 1..13614: note = Description of Artificial Sequence: Synthetic coding sequence
  source 1..13614: mol_type = other DNA
ttcctgcacagcggccccgaggaggtggagatcaagtgccccctgaaccatatcgcatgcctgggcaccaacaagtgcgtacatctcagccagctttgtaacggcgtgcttgactgtcccgatggatacgacgaaggtgtgcattgtcaaggagagtccatctgtcagcagctcaactgcactatgtataaatataaatgcacgatggtgagaaatagcaccaggtgctactgtgaagacggcttcgagatcactgaggacggacgaagctgtaaggatcaggacgagtgtgccgtctatggcacttgtagtcagacctgccggaatacgcacggaagttacacctgctcctgtgtagaaggctatctaatgcagccagataatagatcatgcaaagccaagattgagcctaccgaccggccccctatattgttgatagctaacttcgagactattgaagtgttttacctcaatggaagcaagatggccacactgagctctgtcaatgggaacgagatccacacccttgacttcatctacaatgaagacatgatttgctggatcgagtctagggagtccagtaaccaactaaaatgtattcaaattactaaggccggcggacttactgatgaatggacaattaacatcttgcagtcgtttcataatgtgcagcagatggctatcgactggctgactcggaacctgtattttgtcgaccatgtgggggatagaatctttgtatgcaacagcaacgggtccgtctgcgtcaccttaatcgatttagaactgcataatccaaaagctatcgccgttgaccctattgctggtaagctcttctttacagattatggaaacgtggcgaaagtcgaaaggtgtgacatggacgggatgaaccgcacaagaataatcgattctaaaaccgagcagccagccgccctcgcgcttgacctggtcaataagcttgtatactgggtggacttgtacttagactatgtgggcgtggtcgactatcaggggaagaatcgacacacggttattcaaggccggcaggtgaggcacctgtacggaataacagtcttcgaagactatctctacgcaactaattccgataactacaacattgtgcgcattaatcgttttaatggcaccgatatccacagtttgatcaaaattgagaatgcatggggaatcaggatttaccaaaagcggactcagcccactgtgagatcacatgcttgtgaagtcgacccctacggaatgccagggggctgcagtcacatttgcctgctatcctccagctataagacacggacctgtaggtgtcggactggctttaatctggggagtgatggcaggagctgtaaaaggccaaaaaacgaactgttcctgttttatgggaagggaaggccgggcatcgtacggggcatggatctcaatactaaaatcgccgacgagtacatgatcccaatcgagaatctagtaaaccctcgagccctcgattttcatgccgagacgaactatatttattttgcggataccacaagcttcttgattggaaggcagaagatagatggcacagagcgtgagacaatactcaaggacgacttagacaacgtggaggggatcgctgtggattggatcgggaacaacttatactggacgaacgacggacaccgtaagaccatcaacgtagcgcggctggaaaaagcaagccaaagtcggaaaactttgctggagggggaaatgagccaccctcgcggtattgtagtggacccagtcaacggatggatgtactggaccgactgggaagaagacgaaattgacgacagcgtgggccgcatagaaaaagcgtggatggatggtttcaatcgacagattttcgtcacctccaaaatgctctggccaaatggactgacactcgacttccacactaacactctctattggtgtgacgcatattatgatcacatcgagaaggtcttcctgaatggaacccatcgaaagatcgtctactcgggccgcgagctgaaccacccattcggattgtcacaccacggcaactatgtgttctggaccgattatatgaatggttctatcttccagcttgacctgattacttccgaggtgaccttgttgcgtcatgagaggccacccctctttggcttgcagatatatgacccccggaaacagcaaggcgacaacatgtgtcgtgtgaataacggcgggtgtagtacactctgcctcgccattccagggggccgtgtgtgtgcttgcgctgacaatcaactcctcgatgaaaatggaacaacatgcaccttcaaccccggggaggccttgccccacatctgtaaggctggggaattcaggtgtaaaaatagacactgcatccaggcgcggtggaagtgcgacggcgacgacgattgtctagatggatcagacgaggatagcgtgaattgttttaatcatagttgtcctgatgaccaattcaagtgccagaataacagatgtatccctaaacggtggctttgcgacggagccaacgactgtggaagtaatgaagacgagagtaatcagacatgcaccgccagaacctgtcaagttgaccagtttagctgcggaaatggccgctgcattccacgggcctggctatgcgatcgggaggacgactgcggtgaccaaactgatgaaatggccagctgcgagttccctacgtgtgaaccgcttacccaattcgtgtgcaagtccggacgctgcattagttccaaatggcattgcgactctgacgatgactgcggagacgggagcgacgaggtgggctgtgtccattcttgtttcgacaatcagtttagatgctctagcgggaggtgcattcccgggcactgggcttgtgatggcgacaacgactgtggagacttttctgacgaagctcagatcaattgtaccaaggaggagatccatagtcccgctgggtgcaacgggaatgaatttcagtgtcatccggatggaaactgtgtcccagacctgtggaggtgcgatggagagaaagactgcgaggatggcagtgacgaaaagggatgcaacggaacaatccgcctgtgcgatcataaaactaaattttcttgctggtcaaccggtagatgtattaacaaagcatgggtctgcgatggcgatatcgactgcgaagaccagagtgacgaagatgattgtgatagttttctatgtggaccacccaagcacccctgtgcaaatgacactagtgtgtgcctgcagccagagaaactgtgcaatggcaagaaagactgtcccgatggatctgatgagggctacctgtgcgatgaatgctccctgaacaatggcggatgttcaaatcattgctctgtcgtgcccggacgcggcatcgtgtgctcttgtccagaaggtctccagcttaataaagacaacaaaacgtgtgagatagtcgactattgctccaaccaccttaaatgtagccaggtatgtgagcaacacaaacatacagtaaaatgctcttgttatgagggctggaaattagatgtggacggcgaaagctgcacaagcgttgacccattcgaagcttttataatctttagcatcaggcacgagattcggagaatcgacctacataagcgggattacagcctgctggtacccggactccgtaatacaatcgcactggattttcattttaaccagtccctgctgtactggaccgatgtggtggaagacagaatctatcgcggaaagctgagcgaaagtggcggcgtgagcgctatcgaagtagtcgtcgagcacgggctggccacccccgaaggactgactgtggactggatcgcagggaacatctattggatcgacagcaatctcgatcagatcgaagttgccaagctcgatggctcactgcgaacaaccctgatcgccggtgccatggagcaccctagagccatcgcccttgatccaaggtacggcatcttgttttggacggattgggacgcaaacttccctcggattgagtccgcttccatgtccggcgccggtaggaaaaccatctacaaggatatgaaaaccggggcctggccaaacggtcttactgtggatcacttcgagaaacggattgtctggacagatgcacgaagtgatgccatctattctgccctgtacgatggtacaaatatgatcgagataattaggggtcatgagtatctgagccatcctttcgctgtttccctgtacgggtccgaagtttactggaccgactggagaacaaataccctatccaaggctaataagtggacaggacagaacgtgtcggtgatccaaaagacctccgcccagccctttgacctccaaatatatcatccatcacggcaacctcaggctccaaatccttgcgctgctaatgatggtaagggaccctgtagccacatgtgtctgattaaccacaatcgatctgcagcatgtgcatgtccccacctaatgaaactgtcttcagataaaaaaacttgctatgagatgaagaagttcttgttgtacgccagacgctccgagattcgcggcgtggacatcgacaacccttattttaatttcatcacagcttttaccgtgccagacatcgacgacgtcaccgttatcgatttcgacgcttcagaagagaggctgtactggaccgacatcaaaacacagacgataaagagggcctttatcaatggcactggactggaaaccgtcatatcccgcgacatccaatccattcgcggcctggccgtcgattgggtgagccgtaatctgtattggattagcagcgaattcgacgagacccagatcaatgtggcccgcctcgacggtagtctcaaaacatctatcattcacggaatcgacaaaccacagtgtctcgcagcccatcccgtgaggggcaaactttattggacagacggaaatacgatcaacatggctaatatggacggctcaaacagcaaaatcttgtttcagaaccaaaaagaaccggtgggactcagtatcgactacgtggagaacaagctgtactggatctcctccggaaacgggacaatcaacagatgcaatttagacggaggcaacttggaagtcatcgagagcatgaaggaagagttgacgaaagcgacagccctcactatcatggacaagaagctgtggtgggcggaccaaaacctggctcaactcgggacgtgctccaaacgggacggacggaatcctacaattcttcgcaacaagacctcaggcgtggtgcacatgaaagtctatgataaggaggcgcagcagggaagcaatagttgccaactcaataatggtgggtgtagccagctttgtctgcctactagtgagaccacacggacgtgcatgtgtaccgtaggctattatctgcagaagaaccgcatgagttgtcaaggtatcgagtcttttctcatgtacagtgtccacgagggcattcgtggcatcccactggagcccagcgacaaaatggatgccctcatgccaattagtggtacatcattcgctgtggggatcgattttcatgccgaaaacgacactatttattggaccgacatgggattcaacaagattagcagagccaaacgtgatcagacttggaaggaagatataataacaaatggtctcgggcgagtcgaaggcatcgctgtcgattggatagcgggaaacatatattggaccgaccatggtttcaacctgatcgaagttgcccgcttgaacggctcatttcggtacgtcatcatttcacaggggttggatcagccccggtccattgcggttcatcccgagaagggcctcctcttttggaccgaatggggtcagatgccgtgcatcgggaaggctcgcctggatgggtctgaaaaagtggtgctggtgtccatgggtatcgcatggcctaatgggatttctattgactatgaggaaaataaactctactggtgtgacgcccgaacggataaaatcgagcgcattgacctcgagacgggtgggaacagagaaatggtcctgagtggctccaatgtcgatatgttttcagttgccgtttttggggcatatatttattggagtgatagagctcacgctaacgggagtgtcagaaggggccataagaacgatgctacagaaactatcacgatgcgtactgggctgggagtgaatcttaaagaggtgaagattttcaaccgggtaagggaaaaaggaaccaacgtctgcgctcgagacaatggtggatgcaagcagttatgcttgtatcgaggcaatagtaggagaacctgtgcttgcgctcacggctacttggcagaagacggagtcacttgcctgcggcatgaaggatatctcctgtattctggcaggacaatcctgaagagcatacatctcagtgatgaaacaaaccttaattcccctattagaccctatgagaacccacgatatttcaaaaacgtgatcgctctggcttttgattataaccaacgtcgaaaaggcaccaaccggattttctacagtgatgcccactttggaaatatccaactgataaaagacaattgggaagataggcaggttatcgttgagaatgtcggatctgtagaaggactcgcttatcaccgagcctgggataccctgtattggacgagctccacaacaagctcgataactcgacatacagttgaccagaccagaccaggagctttcgacagggaggccgttattaccatgagcgaagacgatcatccacacgtattagccctcgatgagtgtcagaatttgatgttctggacaaattggaacgaacagcatcctagtatcatgaggtctacattaactggcaagaacgcccaggtcgtggtgtcgacagatatcctgacgcctaatgggcttacaatcgattatagagcggagaaactttactttagcgacggcagtctaggcaaaattgagagatgcgagtatgacgggagccagaggcatgtaatcgtaaaaagcgggcccggaaccttcctaagtctggctgtgtacgacaactacatcttctggtctgactggggacgccgtgccatacttcgctctaataaatataccggcggcgacactaagattctgcgctcagatatcccgcatcaacccatggggattattgccgtcgcgaatgacacgaattcctgcgagctttctccatgcgccctcttgaacggtggttgtcacgacttgtgtttactcactcccaatgggcgggtgaactgttcctgtaggggggacagaatactgctggaggacaacagatgtgtgactaagaactcttcatgtaatgcttattctgagttcgaatgtggcaatggggaatgcatagattaccagctgacctgcgacggcattccccactgtaaggacaagtctgacgagaaactgctctattgcgagaatcgaagctgccgcagaggcttcaaaccctgctataatcgacggtgcatacctcacgggaagctttgtgacggcgaaaacgactgcggcgacaactctgacgaactggactgtaaggtcagcacttgcgcgacggtggaattccgctgtgcagacggtacttgcatacccaggtccgcccgctgcaaccagaacatcgattgtgccgatgctagcgatgaaaagaattgtaacaatacggactgcactcatttttacaaattgggggtcaagacaacaggctttatcaggtgtaatagcacatcactgtgtgtgctaccgacctggatttgtgatgggagcaacgactgcggcgattactccgacgagttgaaatgcccagttcaaaataagcataaatgcgaggaaaattacttctcctgtccttccggaagatgcatcctaaacacgtggatctgtgatggacagaaagactgcgaagatggacgggacgagtttcactgcgatagtagttgctcctggaaccagtttgcctgctctgcacagaaatgcattagtaagcactggatatgtgatggcgaagatgactgcggggacggacttgacgaatcagatagcatctgtggggcaattacatgtgcggcggacatgttttcatgtcaagggtcgagggcttgcgtacctcgtcattggctatgtgacggggagcgcgactgccccgatgggtcggatgaactctcaactgccggttgtgccccgaacaacacctgcgatgagaatgccttcatgtgtcataacaaggtctgtataccaaaacaattcgtgtgtgaccacgatgacgactgtggcgatggatccgatgagagccctcaatgcggctaccgacagtgcggtaccgaagaattcagttgcgctgatgggcgctgcctactgaatacgcaatggcagtgcgacggcgattttgactgtccagatcacagtgacgaggcccctctcaatccaaaatgcaaaagcgccgagcagtcctgcaatagcagcttttttatgtgtaaaaatggtaggtgtatcccatccggtggtctgtgtgataacaaagatgattgtggtgacggctctgacgaaagaaattgccacattaatgagtgtttgtccaaaaaggtttcaggatgtagccaagactgccaggacctccccgtgagttataagtgcaagtgttggccgggatttcagctgaaagatgacggaaagacgtgtgtggacattgacgaatgctccagcgggtttccctgtagccaacagtgcataaacacctacgggacttacaaatgcttatgcaccgatggctatgagatacagcccgacaacccaaacggttgtaagtctttatcggatgaggaaccctttttaattttggcagaccaccacgaaatccggaaaatctcaaccgacggctctaactatactcttctcaaacagggcctaaacaatgtcatagccatagattttgactaccgcgaagaattcatctactggattgattcctcccggccgaatgggagtaggattaaccggatgtgcctgaatggatcggacataaaagttgttcataacacagccgtccccaacgccctcgccgtggactggatcggcaaaaatctctattggtcagacaccgagaaaaggataattgaagtgtccaaactgaacggcctttatccaactatcttggtgtcaaagagactgaagtttcccagggacctctcacttgacccccaggctggatatttgtattggatcgattgttgtgaatatccccatatcggccgggtggggatggatggcactaaccagtccgtggtgatcgagacaaaaatttcacggcccatggccctgacaattgactacgtgaacagaagactatactgggcagacgaaaaccacattgaattttcgaatatggacggtagtcaccgccacaaagttccgaaccaagatattcctggagtaatcgccctaacactgtttgaggactacatatactggactgacggtaaaactaaatccctcagtcgtgcccacaaaaccagcggcgcggacagattgtccctcatttattcttggcacgccatcactgatatccaggtgtaccactcgtatagacaacccgatgtgtctaagcacctttgtatgattaacaacggcgggtgcagccatctgtgtctgctggcgcccgggaaaacccacacttgcgcttgccctaccaacttttatctggccgcagacaatcggacgtgcttatctaattgcacagcctcccagtttagatgcaaaactgacaagtgcatccccttctggtggaagtgcgatacagtcgatgattgcggcgacggatcagacgagccagatgactgcccggagtttcgctgccagcccggaaggtttcagtgtgggaccggtctatgcgcactgccggcatttatctgcgacggggaaaacgactgcggcgacaattctgacgagctgaattgtgacacacatgtgtgcctgtccggacagtttaaatgtactaaaaatcaaaaatgtatacccgtaaacctacgatgcaatggacaggacgactgcggggatgaggaagatgaacgggactgcccagaaaattcctgttctcccgactattttcaatgtaaaaccactaagcattgtattagcaaactgtgggtgtgtgacgaagatccagattgcgccgatgcttcagacgaggctaattgtgataagaaaacatgtggcccgcatgagttccagtgcaagaataataattgcatccctgatcactggcgctgcgattctcagaatgattgttcagacaacagtgacgaggagaattgcaagccgcagacctgtactctgaaagacttcctgtgcgctaatggcgactgtgtgtcttctcgcttttggtgcgacggggatttcgattgcgccgatggctccgacgaacgcaactgtgagacatcctgcagtaaggatcagttcaggtgctcgaacggccaatgcatccctgcgaaatggaagtgtgacggccatgaagactgcaaatatggcgaggatgagaagtcctgtgaacccgcctcacccacctgtagtagcagggagtacatctgtgcctctgacggttgtatttcggccagcctcaagtgtaatggtgaatatgactgcgccgatggctccgatgagatggactgtgtcaccgagtgtaaagaggaccagttcagatgtaaaaacaaggcccattgtattcctatccgctggctgtgtgatggaattcatgactgcgtcgacgggtcggatgaggagaattgcgaaagaggcggcaacatctgtagagccgacgagttcctgtgcaacaactcactctgtaaactgcacttctgggtgtgtgatggcgaggacgattgcggggataactctgacgaggccccagatatgtgcgttaagttcctgtgcccttcaacacgaccccaccggtgtaggaacaatcgaatatgcctacagagcgagcagatgtgcaatggaattgacgagtgtggggataatagtgatgaggatcattgcggtggaaagcttacttacaaggcccggccttgtaagaaggatgaattcgcttgtagtaacaagaagtgtatcccaatggatctgcagtgcgaccgtcttgacgattgtggagacggctccgatgaacagggctgcaggattgctccaaccgagtacacctgcgaagataatgtgaatccgtgtggcgacgatgcttactgcaatcaaatcaagactagtgtgttctgcaggtgtaagccggggttccagaggaacatgaagaatagacagtgtgaggatctgaatgagtgtctggtgtttgggacctgtagccaccagtgtatcaacgtcgaagggagttacaaatgtgtgtgcgaccagaactttcaagaaagaaacaacacttgcatagctgagggcagcgaggaccaggttctgtacatagccaacgacaccgacatcttgggcttcatttacccattcaactatagcggggatcaccaacaaatttcccatatagagcacaacagccggattaccgggatggatgtctactatcaaagagatatgatcatttggagtacgcagtttaaccccggaggaatcttttacaaaagaatccatgggcgcgaaaagcggcaggctaatagcggactgatctgccctgaattcaagaggcctcgagacatcgcagtcgattgggttgctggaaatatctattggacagatcatagtcgtatgcactggttctcctactacacgacacactggacctcattgagatactctataaatgtcgggcaacttaacggcccaaattgcactcgattgctgacaaatatggctggtgaaccctacgcaatcgcagtaaaccccaagagaggaatgatgtactggactgtagttggagatcactctcacattgaggaagccgccatggatggaacgcttcgcagaattctggtccagaaaaatttacagagacctacagggttggccgttgactatttcagcgagcggatctattgggcggacttcgagctatcgatcattggtagcgttctgtatgatggatcaaattcagttgtgagtgtttccagtaagcagggcctgctgcacccacaccgcatagacatctttgaggattacatttatggcgctgggccaaagaacggggttttcagagtgcagaagttcggccacggaagcgtggagtatttagctctgaacatagataagacaaaaggtgtgctgatatcccacagatacaagcaactggacttgcctaatccctgcttggacctggcctgcgagttcctctgcctgctgaaccccagcggagccacttgtgtctgtcccgagggcaaatatctcataaacggcacatgtaatgatgatagtctgctggacgactcatgcaaacttacatgcgaaaatggcggccgttgtatattgaatgaaaaaggcgatcttaggtgccactgctggccaagttacagcggggaacgctgtgaagttaatcattgtagcaattattgtcagaacggcgggacatgcgtgccttcagtccttggacgacctacgtgtagctgcgctctggggttcacaggaccaaactgtggcaagacagtttgcgaagatttctgccaaaatgggggtacctgtattgtgactgcaggcaaccagccatattgccactgccagcctgaatataccggagacaggtgtcagtactacgtatgccatcattattgcgtgaattctgagtcgtgcaccataggcgatgacggctctgtggaatgtgtgtgtcccactcgatatgaaggtcccaaatgtgaggtggataagtgcgtcagatgccatggggggcactgcattatcaacaaggattcagaggacattttttgtaattgtaccaacggaaaaatcgcttctagttgccaactatgcgatggctactgctacaatggaggaacttgtcaattagatcctgaaactaatgtaccggtctgcctctgttccacgaactggtccggcacccaatgtgagcggcctgcaccgaagtcgtccaaatctgaccacatctctacgagatccatcgccatcattgttcccttggtgttgctggtcaccctcatcacaaccctggtgattggtctggtcctgtgcaagagaaaacgaagaacgaagactatccggaggcagccgattattaatggggggatcaatgttgagatcggaaatccaagttataatatgtatgaggtagaccacgaccacaatgacggcggacttttggatcccggtttcatgattgatccaaccaaggcacgttacattgggggaggtccctccgctttcaaactcccccacaccgcaccaccaatctatctgaactctgacctgaaggggcctttgaccgccggaccaacgaattatagcaaccctgtgtatgctaagctgtatatggatggacaaaactgcagaaactctctcggatcggtcgatgagcgaaaagaactgctgccaaagaaaattgaaattggaatccgtgagaccgtcgcttag

SEQ ID NO: 24800 - DNA, 843 bp, synthetic construct
  misc_feature 1..843: note = Description of Artificial Sequence: Synthetic coding sequence
  source 1..843: mol_type = other DNA
atgtgccccccccaggcccaggccgaggtgggccccaccatgaccgaaaaggctgaaatggtgtgtgccccgagtccagccccggcccccccacctaagccggcctcccccggtccccctcaggtggaggaagtgggacaccggggtggctcatcccccccaagacttcctcccggtgtcccggtcataagcctcggccatagccgcccccctggagtggccatgccaaccaccgagctgggaacgctgcgcccccccctgctacaactttccacacttggtacagccccaccaaccctggccctgcactaccacccacaccccttcctcaatagcgtttatattgggccagctggaccattttccatctttccttcaagcaggctaaaacggcgccccagccattgtgagctggacctggcagaaggacaccagccgcagaaggtggctcggagggtcttcacaaactctagagaacggtggagacagcagaacgttaacggcgcgtttgccgaactgcgcaagctcctgccaactcatcctccagatcgcaagttgtctaagaatgaggtactccggctggctatgaagtacatcggtttcctggttagacttctcagagaccaggccgccgcactggcagctggacctactccccccgggcctagaaagagaccggttcaccgcgtccccgacgacggggcacggagaggctctggccgccgcgctgaggccgccgccagatcacagcctgcaccccctgccgaccccgacggcagccctggaggcgcagccaggcctatcaagatggaacagacagctctttcccccgaggtgcgctag

SEQ ID NO: 24801 - DNA, 1620 bp, synthetic construct
  misc_feature 1..1620: note = Description of Artificial Sequence: Synthetic coding sequence
  source 1..1620: mol_type = other DNA
atgggctgcggctgcagcagccaccccgaggacgactggatggagaacatcgatgtatgtgagaattgccattatcccatcgtcccactggacggaaaggggaccctgcttattcgcaatgggtccgaggtgagagacccactcgtcacttatgaaggcagcaatcctccagcgtctccattacaggacaatctggttattgccctccattcctacgagcctagccatgatggggacttgggatttgaaaaaggtgagcagttacgtatactggaacaatcaggcgagtggtggaaggcccagagcctcaccactgggcaagagggcttcataccattcaatttcgtagccaaggccaatagcttggagcccgaaccgtggttctttaaaaatctgtcgcgtaaagatgctgaaaggcagttgcttgcccctggtaatacgcacggcagttttctgatacgcgagagtgagtcaaccgccgggagtttttctctcagcgtgcgtgattttgaccagaaccagggcgaggtggtaaagcactataagatccgcaacttggataacggtggcttctatatttctccccgcatcacctttccagggcttcatgaacttgtgcgccactatacaaatgccagcgacggcctttgtacaagactgtccagaccctgtcagactcagaaaccgcagaaaccatggtgggaggatgagtgggaagttccaagagaaaccctcaagctcgtcgagaggttgggggccgggcagtttggtgaggtctggatgggttattataacgggcacacgaaagtcgccgtcaagtccctcaagcagggcagcatgtcccccgatgcatttctggccgaagctaatctcatgaagcagctccagcatcagaggctggtacggctatatgcagtcgtgactcaggagcctatttacatcattacagagtatatggaaaatgacaccctcttggacagccagctggaggagaaaggcctcggggcctcaccatggggaaaccttgggcagcagctgctcttgttgccaacaggatctctcgtggatttccttaagacaccttccggaatcaagctcaccatcaacaagttgctcgacatggccgctcagatagccgaaggcatggctttcatcgaagaaaggaattacatccaccgcgatctgcgagctgccaacattctggtctctgacaccctttcatgcaaaatagccgactttggcctggcccgacttatcgaggataacgagtatactgctcgtgagggcgctaaattcccgattaaatggactgcacccgaagctattaactacggaacgtttacgatcaaatctgatgtctggtccttcgggattctacttactgagatcgtgacccatgggcgaattccttatcccgggatgacaaatccggaggtaatacagaacctggaacgcggatacaggatggttcgcccagacaattgcccagaggagctttaccagcttatgcggctctgttggaaagaacgccccgaggacagacccaccttcgactacctgagaagcgtactggaggacttttttaccgctactgaaggtcagtatcagccgcagccatag

SEQ ID NO: 24802 - DNA, 1530 bp, synthetic construct
  misc_feature 1..1530: note = Description of Artificial Sequence: Synthetic coding sequence
  source 1..1530: mol_type = other DNA
atgggctgcggctgcagcagccaccccgaggacgactggatggagaatattgatgtttgcgagaactgtcactaccccattgtgccccttgatgggaagggcactctgttgattcgtaacggtagcgaggtccgcgaccctttggtgacgtacgagggctccaacccccctgcaagtccactgcaagacaacttggtgattgccctgcacagttacgagccaagtcacgacggcgatctgggcttcgagaagggcgagcaactgagaatattagaacaaagcggagagtggtggaaggctcagtctctcacaactggccaggagggctttattcctttcaactttgttgcaaaagccaacagcctggagccagaaccgtggttttttaaaaacctgtcacgaaaagacgccgaaagacagttgctcgcccctggtaatactcacggatctttcctgattagggaatcagaatccaccgcagggtcattctccctgagcgtgcgcgattttgatcaaaatcagggcgaggtggtgaagcattacaaaattcgaaatctcgataacgggggcttttatatatccccgagaataacattcccgggtctgcatgagttggtgagacactacaccaatgcctccgacgggctgtgcacacggctcagccgcccatgtcagactcagaaaccgcaaaaaccctggtgggaagatgaatgggaagtccctagagaaactctgaaactcgtggaaagattgggggctggccagttcggagaggtgtggatgggttactacaatggccacaccaaagtagccgtgaagtcactaaagcaggggtcaatgtctcctgatgcttttcttgccgaggcaaacctgatgaaacagctacagcaccaaaggcttgtccgcctgtatgctgttgtgacccaggagcctatctatattattactgaatatatggagaacgggagcctagtggatttccttaagacgccctctgggatcaaattgaccatcaacaagctcctagatatggcagcgcagatcgcggagggaatggcattcatcgaggaaagaaactacattcacagggaccttagagctgctaatattctcgtctcagatacactcagctgtaagatcgcggatttcggcctggctcgtcttatcgaggataatgaatacacagccagagagggagcaaagtttcccatcaagtggactgcacccgaagcgatcaactacggcacatttacaattaagagcgatgtgtggagcttcggcatcctgttgaccgagatcgtgactcacgggcgcatcccatatcctggcatgacaaatcctgaagttatccagaatctggagcggggctacagaatggtcaggcccgataattgcccagaggagctgtatcagctgatgcgtctttgctggaaggagcgccccgaggaccgtcccacgtttgactaccttcggagcgtcctggaagacttttttactgcaaccgagggccagtaccagcctcagccttag

SEQ ID NO: 24803 - DNA, 1551 bp, synthetic construct
  misc_feature 1..1551: note = Description of Artificial Sequence: Synthetic coding sequence
  source 1..1551: mol_type = other DNA
atgggctgcggctgcagcagccaccccgaggacgactggatggagaacatcgacgtttgcgagaattgtcactacccgattgttcctctggatgggaagggaaccctgctgatcaggaacggaagtgaagttagagacccacttgttacctatgaaggcagcaaccctcctgcttcacctttgcaaggtgacccacgccaacaaggcctgaaagataaggcgtgcggcagcctcgccgtaggcttccacctgagtccaacttactttctgcccggactagcattcctggtgcctcatccagtgacaccaggctttctgccaatacctgctcgcttttctttgatgccacttgtgtttaccgataatctggtgatcgccctgcactcttacgagccaagtcacgacggagatctcggtttcgagaagggggagcagctgcgcattctcgaacagagcggcgaatggtggaaggcccagtctttaacaacaggtcaggaagggtttatacctttcaattttgttgccaaggctaatagtctggagcccgagccgtggttctttaaaaatctgtcccggaaagacgccgaacgacagctcttagcacctggtaacacccacgggagtttccttattcgtgagtccgaaagtactgccggtagtttttctctgtctgtgagagacttcgaccagaaccagggtgaggtagtcaagcattataagatccggaacctagacaacggagggttctacataagcccacggattacattcccaggtcttcatgagttggtcaggcattatacacggtactacaacggacataccaaggtagctgttaagtcactgaagcagggctctatgagtcctgatgcgtttttggccgaggctaatctgatgaagcagctccagcatcagcggctggtgaggctgtacgcggtcgtgacacaggagcctatctatattatcactgaatacatggaaaacggttccctggtggatttccttaagactccctcaggcatcaagctgactatcaacaaactcctggatatggcagcgcagattgcagagggcatggcttttattgaagagagaaattatatacacagggatctcagagccgcaaacatcctcgtttccgatactttatcttgcaagatcgccgacttcggtctggcccggctgatcgaggacaacgagtacacagcccgggaaggagccaaattcccaataaaatggaccgcacctgaggctattaattacggtaccttcacaataaagagtgacgtgtggagtttcggcattcttttgactgagatagttactcacggccgtatcccctatcctggaatgactaaccctgaggtgattcagaacctggaaaggggctaccggatggtcaggccagacaactgtcctgaggagctgtaccaattgatgagactgtgctggaaagaaagaccagaggataggccaacgttcgactatttaagatccgtgctggaggacttctttaccgccaccgaaggccagtaccagccacagccatag

SEQ ID NO: 24804 - DNA, 750 bp, synthetic construct
  misc_feature 1..750: note = Description of Artificial Sequence: Synthetic coding sequence
  source 1..750: mol_type = other DNA
atgggctactacaacggccacaccaaggtggccgtgaagagcctgaaacaggggtcaatgagccccgacgcctttctggccgaagctaatctaatgaagcagctccagcatcaacggctggtacggctctatgctgtcgtgacccaggagccaatttatatcataacagaatatatggaaaacgggagcctggtggatttcttgaaaactcctagcgggattaagctgactattaacaaactgttggacatggccgcccagattgccgaagggatggccttcatcgaggagcggaactatatacacagagacctgcgggcagcaaacatcctggtgtcagacactctatcatgtaaaatcgctgacttcggcctcgcacgtctgatcgaagacaatgaatatacagcccgcgaaggcgccaagttccccatcaagtggactgcaccagaagctattaattacggcacctttactattaaatccgacgtgtggtcatttgggatcctattgactgaaattgtgacccacggaagaattccctacccagggatgaccaatcccgaggtgatccagaacctggaacgcggatacaggatggtaagacccgataattgtcccgaagaactgtaccaattgatgaggctatgttggaaagagaggccagaggaccggccgaccttcgactaccttcgcagcgtcctagaggatttcttcacagcaaccgaaggccaataccaaccccagccttag

SEQ ID NO: 24805 - DNA, 1611 bp, synthetic construct
  misc_feature 1..1611: note = Description of Artificial Sequence: Synthetic coding sequence
  source 1..1611: mol_type = other DNA
atgggcatccccggcagccacaacctgcggtacttctggaacttccccggacagggcccaatcatctcagacgtcggaggggcagatttaggaggagcccccagtgcccctagctctattccgtcaggtactatgggctgcgggtgtagttcacacccagaggatgactggatggaaaatattgatgtctgcgagaattgccattaccccatcgtgcccctggacgggaaaggcactctcctgatccgtaacggatcagaagtgagggaccccttagtgacctacgagggatccaacccccccgcatctcccctgcaggataacttggtaattgccctacactcatacgagcctagtcacgacggcgatctggggttcgaaaagggggaacagctccggatcctcgaacagtctggcgaatggtggaaggcacagtcccttacaacagggcaggaaggatttatacctttcaactttgtcgcgaaggcaaactcccttgaaccggagccttggttctttaagaacctgtctagaaaagatgcagagcgacagcttctggcccccggaaatacccacgggtcattcctgatcagggaatcagagagtaccgccggaagcttctcgctttctgtgagggattttgaccagaaccagggcgaagtggtgaaacactataagataagaaaccttgacaatggtgggttctacatttcccctaggattaccttcccaggactgcacgaactagtgagacactatacgaatgcaagcgatgggttgtgcaccaggctgagtcgcccctgtcagactcagaagccccagaagccatggtgggaggatgaatgggaggtcccacgcgaaaccttgaagctagtggagcggttgggtgccggacagtttggggaggtgtggatgggctattataacggtcataccaaggtggccgtaaagagccttaagcagggttctatgtcaccggacgctttcttagcagaggccaatcttatgaagcaattacaacaccagcgcctggtcagactgtacgccgtggtgacccaggagcctatctatatcatcaccgaatatatggagaacggctctctcgtcgattttctgaagacaccatccggaataaagctcaccattaacaagctgctcgacatggcagcccaaattgctgagggaatggcttttattgaagaacgaaattatatacatagggacctgcgcgctgctaatatactggtgtcagacaccctgagctgcaagatcgctgattttgggctggctaggcttattgaagacaacgaatataccgcaagggaaggagcaaaatttccgataaagtggactgcccccgaggcaatcaattacggcactttcacacatggccgcatcccatacccagggatgaccaatcccgaggtgatccagaatctcgagagaggatacagaatggtgagacctgacaattgcccagaggagctctatcagcttatgaggctgtgctggaaagagcgcccggaagaccgacctacttttgattacctgcgatctgtgctcgaagatttcttcactgccacagagggtcagtaccagcctcagccttag

SEQ ID NO: 24806 - DNA, 1200 bp, synthetic construct
  misc_feature 1..1200: note = Description of Artificial Sequence: Synthetic coding sequence
  source 1..1200: mol_type = other DNA
atgccccagctgagcggcggcggcggcggcggcggcggcgaccccgagttatgcgctacagacgagatgattcctttcaaggatgagggggaccctcagaaggagaagatcttcgcagagatatcacatcctgaggaggagggagacctggccgacatcaaatccagcctggtgaacgaaagcgaaattatccctgcaagcaacgggcacgaagtggcaaggcaagcgcagacctctcaggaaccttatcacgacaaagcacgcgagcacccggatgacggaaagcaccccgatggcggcttgtataataagggtccgagctatagtagttactctggatacataatgatgcctaatatgaataatgatccgtatatgtctaatggatctttatcccctccaattccaaggaccagcaataaggtccctgttgtgcaaccttcccatgctgtccacccgcttactcccctgataacctactcagatgaacatttctcccctggatcacaccctagccacatcccgtccgacgtcaattctaagcagggcatgagcagacatcctccagcgccagatattcctacattctaccctctgtcacccgggggcgtgggtcagattacaccacctctgggttggcaagggcaacctgtctacccaataactggaggcttcaggcagccctatccatccagcttatcagtcgataccagcatgagccggttctctcatcatatgatacctggccctcctgggccacacaccactgggattcctcatcctgccatcgtgaccccccaggtgaagcaggagcacccccacacagactcagatttgatgcacgttaagccacagcacgagcagcggaaagagcaggagcccaagcggccccatataaagaaacctttaaatgcctttatgctttacatgaaggaaatgcgggccaatgttgtcgctgagtgtactcttaaggaaagcgcagccatcaaccagattttgggtcggagatggcatgccctgtcacgggaagagcaggccaaatactatgagttggcacggaaagagaggcagttgcacatgcagttataccctggctggtcagcacgggataactacggtaagaagaagaaaagaaagagggagaagctgcaggagagcgctagcggaacaggcccccgcatgacggccgcatacatttag

SEQ ID NO: 24807 - DNA, 1161 bp, synthetic construct
  misc_feature 1..1161: note = Description of Artificial Sequence: Synthetic coding sequence
  source 1..1161: mol_type = other DNA
atgccccagctgagcggcggcggcggcggcggcggcggcgaccccgagttgtgcgccaccgatgaaatgatcccatttaaggatgagggtgatccccagaaagagaagattttcgccgagataagccatccagaagaggaaggcgatctggccgacataaagagcagcctggtaaatgagtccgaaatcataccagcatctaatggccatgaagtcgcccgccaggcccaaacctctcaggagccgtaccatgacaaagcacgggaacaccccgatgacggcaagcaccctgacggcggactctataataagggaccatcttacagcagctactcaggctacataatgatgccaaatatgaataatgacccctacatgtccaacgggagtttgagcccacccatacccaggacatctaataaagtaccagtggttcagccgagtcatgcggtacaccccctaacaccccttattacatactccgacgagcacttttctcctgggtctcacccaagccacatcccgtcagatgttaattcaaaacagggaatgagccggcacccaccagctcctgatattcccactttctaccccctctccccaggaggcgtgggccagataaccccaccgttaggctggttctcccatcatatgatacccggcccacctggtccacacacaactggcataccccaccccgcaatcgtgacaccccaggttaaacaggagcacccacacaccgattctgatctgatgcatgtaaaaccacagcatgaacaaaggaaagaacaggaaccaaagcgcccacatatcaagaagccccttaatgccttcatgctctacatgaaagagatgcgtgccaacgtggtggctgagtgtactctgaaggagtcagccgctataaaccaaatactaggccgacgctggcatgctctgtcccgcgaggagcaagccaaatactatgaactggctcgcaaggagcgacagctgcatatgcagctgtaccccggctggtcagcgagggacaattatggtaagaagaagaagagaaaaagggaaaagctgcaggagagcgcgagcggcggcaaacggtcctctttcccaacctgtaaggcaaaagctgcgacaccgggccctctgttggagatggaagcttgctag

SEQ ID NO: 24808 - DNA, 1116 bp, synthetic construct
  misc_feature 1..1116: note = Description of Artificial Sequence: Synthetic coding sequence
  source 1..1116: mol_type = other DNA
atgccccagctgagcggcggcggcggcggcggcggcggcgaccccgagctatgtgccacagacgaaatgatcccattcaaggatgaaggagacccccagaaggagaagatcttcgcggaaatcagccatcctgaggaggaaggtgacctcgccgacatcaagagctctttagtgaacgaatcagagattatcccagctagcaatggccacgaagttgcccgccaggctcagacgagtcaagagccataccatgataaagcacgcgagcaccccgacgatgggaaacacccagacggtgggctgtataataagggacctagttattcatcatacagcggatatataatgatgcctaatatgaataacgatccctacatgagtaatggctcactcagtcccccaatcccaaggaccagtaataaggttcctgtggtccagccttcccacgccgtccatccactcaccccacttatcacttattcagacgaacatttctctcccgggagtcatccaagccatattccaagtgacgtgaattctaaacagggcatgagcagacatccccccgcccctgacatccccacattctacccactgtctcctggaggcgtggggcagattactccacccctgggatggtttagtcatcatatgattccaggcccgccagggccccacactaccggaatacctcaccctgccattgtaacgccacaggtgaaacaagaacacccacacactgacagcgacctcatgcacgtgaagccgcagcatgaacaaaggaaggaacaggagccaaagaggccgcatatcaaaaagccgcttaatgccttcatgctgtacatgaaagagatgagagcaaatgtggtggccgaatgcacgttgaaggaaagcgctgctattaaccagattctcgggagacgatggcatgccttatcacgcgaggaacaggcaaaatactatgagctggcacggaaggagagacaattgcatatgcagttatatcccggctggtccgctcgcgacaattatggcaaaaagaagaaacggaagcgagaaaaattacaggagtcagcctccggaactggccctaggatgacagcagcttacatctag

SEQ ID NO: 24809 - DNA, 912 bp, synthetic construct
  misc_feature 1..912: note = Description of Artificial Sequence: Synthetic coding sequence
  source 1..912: mol_type = other DNA
atggccgaggtggcccggcaggcccagaccagccaggagccctaccatgataaagcaagggaacaccctgacgatggaaagcacccagacggaggactgtacaacaagggaccgtcctattcatcctactctggctatattatgatgcccaatatgaacaatgatccttatatgagcaatggttctctcagcccgcctatcccgcgaacgtccaacaaagtgccggtggtacaacccagtcacgctgtgcacccactgacaccccttataacatatagcgacgagcattttagccccggcagccacccttcacatattccgtccgatgtgaactcaaagcagggcatgagcaggcacccgccagcccccgacattccaaccttttatccgttaagtccagggggagtggggcagattacacctccccttggttggttcagccatcatatgatacccggccctccggggccgcacacaaccggtatcccccacccggcaatcgttactcctcaggtgaaacaggagcatcctcatactgatagtgacttaatgcacgtgaaaccacaacacgaacagcggaaagaacaggagccaaagaggccacacatcaaaaaaccacttaatgcatttatgctatatatgaaggaaatgcgggcgaatgtggtcgcagaatgcactttaaaggaaagtgcggccatcaatcagatactgggccgcagatggcatgcattgtcccgggaggagcaggcgaagtactacgaattagctagaaaggagcggcagctccacatgcagctgtatcccgggtggtcagccagggacaattatggaaagaagaaaaaaagaaagcgcgagaagctccaggagagtgctagtggaaccgggcctcgtatgaccgcggcgtatatctag

SEQ ID NO: 24810 - DNA, 1500 bp, synthetic construct
  misc_feature 1..1500: note = Description of Artificial Sequence: Synthetic coding sequence
  source 1..1500: mol_type = other DNA
atgaacgacgaccccagcatggaggagaacggcgtggagcgggtgtgtccggaaagcctcctgcagagccgtgagtattcctctctgccccttccccgtcacacatcctccacggatggtaccatcactagctctgatccgggactggagatactgaatatggcatcttgcgacttggaccgaaacagcctgtgcaagaaagaggaagatacccgcagtgcctcaccaacaattgaggcccagggaacctctcctgctcacgataacatcgccttccaggactcgacttccaaggacaagaccattctaaacttggaggccaaagaagagcccgaaacaatcgaggaacataagaaggagcatgctagcggagacagcgtggtgtcgccattgcctgtcactacggtgaagtcagtcaatctgcgccagtccgagaatacaagtgccaatgagaaagaggtggaagccgagttcttacgtctctccttgggcttcaaatgtgactggtttacactggagaaacgcgttaagctcgaggaacggagccgcgacctggctgaagagaacctgaaaaaagaaataacaaactgtttaaaactgttggagagtcttacacccctctgtgaagatgataaccaggctcaggaaattatcaagaaactagaaaagagcattaagtttttatcccagtgtgcggctagagtggccagtcgagccgagatgctaggggctatcaatcaggagtcccgtgtgtctaaggcagttgaggtgatgattcagcatgtagagaatttaaaacggatgtatgccaaggagcacgccgagctcgaggagttgaaacaagtgctactgcaaaatgaaagaagctttaacccactcgaagacgacgacgattgccagattaagaaaaggtcagcttcccttaatagcaagcccagcagcctcaggagggtgacaattgcatctctgcctagaaatattggtaatgccggaatggtcgccgggatggaaaataacgatcggttcagtcgccgcagcagcagttggagaatcctgggctctaaacagtcagaacatcggcctagcctgccccgcttcatatccacgtacagctgggcagatgcggaggaagaaaaatgtgagttgaagaccaaggatgatagcgagccgtccggagaagagaccgtcgagagaaccaggaaaccatctctgtccgaaaagaagaacaaccctagcaagtgggatgtttccagcgtctacgatacaatcgccagttgggcgactaatctgaagtcttcgatcagaaaggctaataaggccctttggctcagcatagcctttattgtactttttgcagcattgatgagtttcctgaccggacaactgtttcaaaagtcagtcgacgcagctccgacacaacaggaagactcttggacatctttggagcatatcctctggccattcacgcggctgaggcacaacggccccccccctgtgtag

SEQ ID NO: 24811 - DNA, 1500 bp, synthetic construct
  misc_feature 1..1500: note = Description of Artificial Sequence: Synthetic coding sequence
  source 1..1500: mol_type = other DNA
atgaacgacgaccccagcatggaggagaacggcgtggagcgggtgtgccccgagtccctgctgcagagtagagaatacagttccctgccgctgccccggcatacctctagtactgatggaaccattacttccagcgatccaggactggagatcctgaatatggcctcttgtgacctggatcgtaatagcctctgtaagaaagaagaggatactcggtcagcaagccccaccatcgaggcccaagggactagccccgcccacgacaacatcgcatttcaggacagcacaagcaaggacaagacaatcctgaatctggaggccaaggaggaacccgaaaccatcgaggaacacaagaaagagcatgcctccggcgactccgttgtttccccactacccgttactactgtgaaatcagtcaacctcagacagtccgagaatacgagtgctaacgagaaggaagtagaagccgagtttttgcgcctctctctcgggttcaagtgcgattggttcaccttggaaaagcgagtcaagctggaggagcggtccagggacctggcagaagaaaacttgaagaaggagatcacaaattgtctgaagctgttggagagtttgactcctctgtgtgaagacgataaccaggctcaggaaattatcaagaagttagagaaatcaatcaaatttctgtcccagtgtgctgcaagagttgcgagcagggcagagatgcttggggctatcaatcaggagtcccgcgtgtccaaagccgtggaggttatgatacagcatgtggaaaatctgaaaaggatgtacgcaaaagagcacgccgagctcgaggagcttaaacaggtgctgcttcagaatgaacggtcctttaatccactggaggacgatgacgactgccagattaaaaaacggagtgccagcttgaatagtaagccaagctcactgcgtagggtgactatcgcctcactaccgagaaacatcggcaatgccggaatggtggcaggtatggagaacaacgacagattctcccgacgttcttctagctggcgcatactcgggtcgaagcaaagtgagcatcgccccagccttcccagatttatcagcacgtattcttgggctgatgccgaggaggaaaagtgtgaactgaagaccaaggatgactctgaaccctcaggggaggaaacagttgaacgtactaggaaaccatccctgtccgaaaaaaaaaataaccctagtaagtgggatgtttcaagcgtatacgacaccatagcaagctgggcgaccaacctgaagtctagcatacgaaaggccaataaagctttgtggctcagcattgctttcatcgtgctgttcgctgccctgatgagcttcctgacagggcagttgttccagaaatctgtggatgccgctcccacccagcaagaagatagttggacatcactcgagcacatcctctggccctttacccgcttacgccacaatggccctccaccagtttag

SEQ ID NO: 24812 - DNA, 1500 bp, synthetic construct
  misc_feature 1..1500: note = Description of Artificial Sequence: Synthetic coding sequence
  source 1..1500: mol_type = other DNA
atgaacgacgaccccagcatggaggagaacggcgtggagcgggtgtgtcccgagtccctgcttcagtcccgggaatacagtagtcttccactgccccggcatacctcctctactgacgggacaattacctcctctgatcccggcctggaaatcttgaatatggcatcttgtgacctggatcgcaactctctgtgcaaaaaagaggaggatacaaggtccgcctcccctaccattgaggcgcaggggactagccctgcacacgataacatcgcattccaggacagcacctccaaagacaaaactattctgaacctggaggccaaagaagaacccgaaactatcgaggagcataagaaggaacatgcctccggggactccgtggtctcaccactgccagtaacaacggtgaagtcagtgaatttgcgtcagagcgaaaatacctccgcaaatgaaaaagaggtcgaagccgagttcctgcggctcagcctgggatttaagtgcgactggttcacactggagaagagggtgaagctagaagagagaagtagggacttggcggaagagaatctcaaaaaagagattaccaattgcctgaagctcctcgaaagtctaaccccgctatgtgaggacgacaaccaggcacaggagatcatcaagaagttggaaaaatccatcaaatttcttagtcagtgtgccgctcgagttgccagccgcgccgaaatgctgggtgccattaatcaggagtcaagggtgagcaaagcagtggaggtcatgatccagcatgtggaaaaccttaaacggatgtatgctaaagagcatgccgaattggaagagctcaaacaggttctgctgcaaaacgagcggagctttaatccactggaggacgacgacgactgtcagattaagaaaagatccgcttcccttaactccaagcccagcagcttaagacgtgtcacgattgctagcttgccccgcaacatcgggaatgcgggcatggttgcgggtatggagaataatgatagattctccaggcgtagctcttcatggcgaatcctggggagcaaacagagcgaacaccgaccatcccttcctaggttcattagtacgtactcctgggccgatgctgaggaggagaaatgtgagctgaaaacaaaggacgactcagagccgagcggcgaagagacagtcgagcggactcgtaaaccgtctctttctgagaagaaaaataatccctctaagtgggacgtgtcctcagtctacgatacaatcgcctcctgggccaccaatctgaagtcaagcattagaaaggccaataaagctctttggctgtcaatagcctttatcgttctgtttgctgcgctcatgagctttctgacgggacagttgttccagaaatcggtggacgcggcgccaacgcagcaggaagatagttggacgtctctggagcacatcttatggccatttaccaggctgcggcacaacggacccccccccgtttag

SEQ ID NO: 24813 - DNA, 234 bp, synthetic construct
  misc_feature 1..234: note = Description of Artificial Sequence: Synthetic coding sequence
  source 1..234: mol_type = other DNA
atgaacgacgaccccagcatggaggagaacggcgtggagcgggtgtgcccggaatcactcttacagtcccgcgaatattctagtctgcccctgcccaggcacacaagttcaaccgacgggacgatcacctcctcagaccccggtctggaaattctcaacatggcatcatgcgacttggatcgaaatagcctgtgcaaaaaagaggaggacacacggtccgcgagtccgacttag

SEQ ID NO: 24814 - DNA, 27 bp, synthetic construct
  misc_feature 1..27: note = Description of Artificial Sequence: Synthetic coding sequence
  source 1..27: mol_type = other DNA
atgaacgacgaccccagcatggagtag

SEQ ID NO: 24815 - DNA, 618 bp, synthetic construct
  misc_feature 1..618: note = Description of Artificial Sequence: Synthetic coding sequence
  source 1..618: mol_type = other DNA
atgaccccccccgagcggctgttcctgccccgggtgcggggcaccacccttcatctgttgctgctgggactgctgctggtcctgctaccaggcgcgcagggcctccctggcgtcgggctgactccttccgcagcccagaccgctcgtcagcatcccaagatgcacctcgctcactcaaccctgaagcctgccgcgcacctcatcggtgacccgtcgaagcagaactctctgctgtggagggcaaacacggatagagccttcctgcaggacggtttctctctctccaataactccttgctggtacccacaagcggcatctactttgtgtatagtcaggtggtctttagcggaaaggcatactcaccgaaagccactagtagtcccctgtacctggcccacgaggtgcagctctttagtagtcagtatcctttccatgttcctttgctgtcttctcagaagatggtctatcctgggctccaggagccttggctccatagcatgtatcatggcgctgcattccagctgacgcagggcgaccagctctccacacacactgacggcatcccgcaccttgttctttcgcccagcaccgtgtttttcggggcctttgccctatag

SEQ ID NO: 24816 - DNA, 618 bp, synthetic construct
  misc_feature 1..618: note = Description of Artificial Sequence: Synthetic coding sequence
  source 1..618: mol_type = other DNA
atgaccccccccgagcggctgttcctgccccgggtgcggggcaccacactccatctgcttctgctgggattgctcctagtactgctgcctggagcccagggcctgccgggagtgggcctgacacctagtgccgcacagacagcgagacagcatcccaagatgcacctggctcattcaactttgaagcccgcggcccacctgatcggcgaccccagtaaacagaatagcttactgtggagagcaaacactgacagagccttcctccaggacgggttttccctctcaaacaacagcctcttagttcccactagtggaatctatttcgtgtattcacaagtagtgtttagcgggaaggcctactctccaaaagctactagctcacccctgtacctcgcccacgaggtacagctgttttcttcccaataccctttccacgtgccccttctatcatctcagaaaatggtttaccccggtttacaggagccctggctccattctatgtatcatggggccgccttccaactgacccagggcgaccagctctctacacacacagatggtattccacatttggttcttagtcccagtactgtattctttggagccttcgccttatag

SEQ ID NO: 24817 - DNA, 417 bp, synthetic construct
  misc_feature 1..417: note = Description of Artificial Sequence: Synthetic coding sequence
  source 1..417: mol_type = other DNA
atgaccccccccgagcggctgttcctgccccgggtgcggggcaccaccctacacctcttactgttgggactgcttctcgtgctcctgcccggagcccagggtttacctggggtcggcctcactcccagtgctgcccagacagcacgccaacaccccaagatgcatcttgcacactcaaccctcaaacctgccgcccatctgattggcgacccgtccaagcagaacagcctgttatggcgtgccaacaccgatagagccttcttgcaggatggattctctttatccaacaactcattgcttgtgccgacaagtggcatctacttcgtctatagtcagggatcttcaccacccctgctgtggccctttcagcagttgaagtccagcctgataaaatcacctgaactgagcaaaaaatag

SEQ ID NO: 24818 - DNA, 2010 bp, synthetic construct
  misc_feature 1..2010: note = Description of Artificial Sequence: Synthetic coding sequence
  source 1..2010: mol_type = other DNA
atggagggcaacaagctggaggagcaggacagcagccccccccagagtacgccggggcttatgaaaggaaacaagcgcgaggagcagggactcggtccggaaccagctgcaccccagcaacccacagctgaggaggaggctctcatcgaatttcatagatcttatcgggaactgttcgagttcttttgcaacaacacgacaattcatggtgcaattagacttgtgtgttcacagcacaaccgcatgaaaaccgcattctgggccgtgctatggctgtgcaccttcgggatgatgtattggcagttcggattactgttcggagaatatttctcctacccagtcagcctgaatattaacttaaacagtgataaactggtgttccccgcagtgactatatgcacgctgaatccctatcgctatccagaaattaaggaagaattggaggagctggacagaataaccgagcaaaccctgtttgatctctacaagtattcctccttcacaaccctggttgctggtagccggagtaggcgggatctgagagggactttacctcacccactccagcgcctccgggtgcctcctcccccccatggcgccaggagggcccggagtgtagctagctccctccgcgacaataaccctcaggtggattggaaagactggaagatcggctttcaactgtgcaaccagaacaagagcgattgtttctatcagacgtattctagcggcgtggacgccgtgcgagaatggtatcggtttcattatatcaacattttatcccggctacctgagactttaccgtccctggaagaggacacactgggtaattttatctttgcctgccgcttcaatcaagtgtcctgcaaccaggcaaactacagtcacttccaccatcctatgtatgggaactgctacacctttaacgataagaacaattccaatctctggatgtcatccatgccaggtattaacaatggtctctcactgatgctgcgtgcagagcaaaatgactttattcctcttttgtctaccgttactggcgcaagggtcatggtgcacggccaagacgagcccgcgtttatggatgatgggggattcaatttgcggcctggagttgaaacatccatatctatgcgcaaggagaccctggaccgactaggtggcgattacggcgactgcacaaagaatggaagtgatgtgcccgtggaaaacctgtacccatccaaatatacacagcaggtttgcattcactcgtgctttcaagagagcatgattaaagaatgcggttgcgcatatatcttttatccaagacctcagaacgtagagtattgcgactatagaaaacattcttcttggggctattgctactacaagttgcaggtagattttagctcagatcatctaggatgcttcacaaaatgccgtaagccttgcagcgtgactagctatcagttaagcgccggatacagccgctggcctagcgttacctcccaggagtgggtgttccagatgctgtctaggcaaaataattacacagttaataataaaagaaatggggtggccaaggtaaacatcttttttaaagaattaaattacaaaaccaacagcgagtccccgtctgtgaccatggtgacattgctgtcaaatcttggctcacagtggagcctgtggtttggtagctctgtgttgtcagtggtagagatggccgaactggtattcgacctgctcgtgataatgttcttgatgcttttacgccgcttccgatcaaggtattggtcgcccggcaggggagggcggggggcccaggaggtggcgagtaccctagccagctctccacctagtcacttctgcccacacccaatgtctctgagtttaagccagcccggacccgccccgtcaccggcccttactgccccaccacccgcatatgcaacactgggccctaggccttcacccggcggtagtgcaggtgcctcctctagtacttgccctctaggcgggccttag

SEQ ID NO: 24819 - DNA, 987 bp, synthetic construct
  misc_feature 1..987: note = Description of Artificial Sequence: Synthetic coding sequence
  source 1..987: mol_type = other DNA
atgggcctggaggagatcgccccctgcaccagcaagcggaagacccagtgccgttgccagccagggatgttctgcgccgcctgggccctggagtgtactcactgtgagttactcagtgactgccctccgggcaccgaggccgaactaaaggacgaggttggaaaaggaaataaccactgcgtgccttgtaaggcaggtcactttcagaacacgtcgagcccgagtgcccgttgccagccccacacaagatgtgaaaatcaggggctcgtggaagcagctcctggcacagcgcagtccgatacaacgtgcaagaaccctctggaacctctgccgccagagatgtcaggtacaatgctgatgctcgctgtcttgctgccactggcctttttcttattgctcgctacggtgttctcctgtatctggaagagtcaccctagcctgtgtagaaagctgggcagtctccttaagcgcagacctcaaggcgaaggacctaaccctgtggcagggagttgggagccccctaaggcccacccatactttcctgacctcgtgcagccattactccctatcagcggtgacgtctctcccgtcagcacggggttgcccgctgcccccgtcctggaggccggtgtaccccagcagcagtctcccctcgatcttactagagaaccacaattagagcctggagaacagagccaagtggctcatgggacgaacgggattcacgtcacaggcggctccatgaccatcaccgggaatatctacatctataacggcccagtcttgggcggcccccccggtccaggtgatcttccagcgaccccagagcctccctaccccattcctgaagagggggaccccgggccaccaggcctttctacccctcatcaggaggatggtaaagcttggcacctggccgagacagaacattgtggcgctacgccaagcaataggggacccaggaaccaattcatcacacatgactag

SEQ ID NO: 24820 - DNA, 1725 bp, synthetic construct
  misc_feature 1..1725: note = Description of Artificial Sequence: Synthetic coding sequence
  source 1..1725: mol_type = other DNA
atggccctggcccggggcagccggcagctgggcgccctggtgtggggcgcctgcctctgcgtactcgtgcacggccagcaggctcagcccggccagggttcagaccccgcaaggtggcgacaacttatccaatgggaaaataatggtcaagtatattcactcttgaacagtggtagtgagtacgtccccgccgggccacagcggagcgagtcctcatcacgtgttctgctggccggggccccccaggcccagcaacgacggtcacacggcagcccccggaggagacaggcgccaagcttgcccctgcctgggcgtgttggttcagacactgtgaggggacaggcccggcaccccttcggcttcggacaagtgcctgacaactggagagaagtggccgtgggcgacagcaccggaatggcccgtgctcgaaccagcgtctcccagcaacggcatggaggttccgcttcttcggtgtcagcatctgccttcgccagcacttatagacagcagccctcctacccacagcagtttccctatccccaagccccctttgtgagccaatacgagaattacgaccctgcttcaagaacctacgaccaggggtttgtctattatcgtccagctggggggggagtgggggcaggtgccgccgccgtagccagcgccggggttatttatccctatcaacccagggcaaggtacgaagaatatggcggcggagaagagctgcctgagtacccaccccagggtttctaccccgcccccgaaagaccatatgtgccaccaccaccaccaccccccgatgggttagatagaagatacagtcacagtttgtatagcgagggaacacctggctttgaacaggcgtatcccgacccggggcctgaggccgcccaagcgcacggcggtgatccacgacttggctggtaccccccatacgcgaacccccccccagaagcttacggacctccacgcgctttggaacccccgtatctgcccgtccggagctctgacaccccacccccaggaggagaaaggaatggagcacagcagggtaggctgtccgtgggtagcgtctaccgtcctaaccaaaacgggcgggggctcccagatctcgtacccgacccgaactacgtgcaggcctccacctacgtgcagcgagcgcatctctacagcctgcgttgcgcagccgaagagaagtgccttgccagcacagcttacgctcctgaggcgacggactatgacgtgagggttttgctgcgttttccacagcgcgtgaagaaccaaggcaccgcagatttcttacccaatcgcccccggcacacgtgggaatggcactcctgccaccagcactatcactctatggatgagttctcacactacgacctattggatgccgcaacagggaaaaaggtggctgaggggcacaaagctagtttttgtttggaggattcaacctgtgactttggtaacttgaagcggtacgcatgcacttcacatactcagggtctttcccccgggtgttacgacacctataatgccgatatcgattgtcagtggatcgacatcaccgatgtccagcctggcaattacatactgaaagtacacgtgaatcccaagtatatcgttcttgagagcgattttacaaacaatgtggtcagatgcaatattcactatactgggagatatgtgtccgcaaccaactgcaagatcgtccagtcgtag

SEQ ID NO: 24821 - DNA, 1311 bp, synthetic construct
  misc_feature 1..1311: note = Description of Artificial Sequence: Synthetic coding sequence
  source 1..1311: mol_type = other DNA
atggcccgggcccggaccagcgtgagccagcagcggcacggcggcagtgcgtccagcgtgagcgcttccgcatttgcatccacttacaggcaacagccttcctacccccagcagtttccgtacccacaggcacctttcgtaagtcagtatgaaaattatgaccctgcatccaggacttatgatcaaggatttgtctactatagacctgcgggaggtggcgtgggggctggtgccgcagctgtcgctagtgccggtgtgatatacccttaccagccgagagcccggtacgaggagtatggggggggtgaagagctccccgagtacccgccacaaggcttctaccctgcccctgaacgcccctacgtgccccctccccctccaccccctgatgggctcgaccgacggtactcacactcactttatagcgaaggaactcctggcttcgaacaggcgtacccggatccgggcccggaagctgcccaagctcatggtggagaccccagactggggtggtatccgccctatgccaaccccccccccgaagcctatggccctccccgcgccctggagcctccgtatcttcctgtgagatctagcgatacccccccccctggaggagaacgaaacggagcacagcagggtagactgtcagtggggagtgtgtatagacctaaccagaacgggcgaggcctgcctgacttggtgccagacccaaactacgtccaggccagtacatacgttcagagagcgcacctctactcactgcgctgcgccgctgaagaaaagtgtctagccagcacggcgtacgctccggaagccaccgattatgacgtgcgcgttctactgagatttccacagcgcgtgaaaaaccaggggacagccgactttttgccaaacagaccacgtcacacttgggagtggcactcttgccaccagcactatcatagcatggatgaatttagccactacgacctgctggatgcggctacagggaagaaagttgccgaaggacacaaggcaagtttttgcctggaagacagcacgtgtgattttggaaatctaaaacgctacgcttgcaccagtcacacccagggcttatcaccgggatgctatgacacgtacaatgcagatatcgattgccagtggatcgacatcacagacgttcagccgggcaattatattctcaaagtgcacgtcaatccaaaatatatcgtgctagagtctgatttcaccaataatgtggtgcggtgtaatatacactacacaggccgttacgtatcggcgacaaattgcaagattgtccagtcttag

SEQ ID NO: 24822 - DNA, 636 bp, synthetic construct
  misc_feature 1..636: note = Description of Artificial Sequence: Synthetic coding sequence
  source 1..636: mol_type = other DNA
atgaccaccctgacccggcaggacctgaacttcggccaggtggtggcagatgtgctctgtgagtttttagaggtggcagtgcacttgattctatacgtgcgagaggtgtatcccgtaggaatatttcagaaacgaaagaagtataacgttccagttcaaatgtcctgccaccctgagctcaaccagtacatccaggataccctgcactgtgtgaaacccctcttggagaagaatgatgtggaaaaggtcgtggtagtgattctcgacaaggagcacaggccggtcgaaaaatttgtctttgaaattacccagcctccattacttagcatttccagcgattcacttctcagccatgtcgagcagctgctgcgcgcatttattctgaagatctcggtctgtgacgcagtgttagaccacaatccacctggctgcacatttaccgtcctagtgcacactagggaggctgccacccggaacatggagaagatccaggttatcaaggacttcccctggatcttggctgatgaacaggatgtgcacatgcacgatcccagactgatccctctgaagacgatgacatcagatatcctgaaaatgcagctctacgtcgaagagcgtgcacacaaggggtcatag

SEQ ID NO: 24823 - DNA, 318 bp, synthetic construct
  misc_feature 1..318: note = Description of Artificial Sequence: Synthetic coding sequence
  source 1..318: mol_type = other DNA
atgaccaccctgacccggcaggacctgaacttcggccaggtggtggctgatgtgctgtgcgaatttctggaagtagccgtgcatctgattctttacgtgagagaggtgtaccccgtggggatctttcagaaacggaagaaatataacgtgcctgtacagatgagctgccaccccgagctaaaccagtacattcaggacacattgcactgtgtgaagcccctgctggagaaagtgagagtccactgggctccgcagccatcccatcctatgctgactccagttcccgtttgctcacagagtaactctgggatgggatag

SEQ ID NO: 24824 - DNA, 531 bp, synthetic construct
  misc_feature 1..531: note = Description of Artificial Sequence: Synthetic coding sequence
  source 1..531: mol_type = other DNA
atgaccaccctgacccggcaggacctgaacttcggccaggtggtggccgacgtgctgtgcgaatttctcgaagtggccgtgcacctcatcctgtacgtgagagaggtctacccggtggggatatttcagaagcggaaaaaatacaacgttccagtccagaatgatgttgagaaagtcgttgtggtcatcctggataaggagcatagacccgtagagaagttcgtttttgagatcacccagcccccgcttctttctatttcaagcgactccctgttgtcgcatgtggaacaactcctcagagcctttattttgaagatcagtgtgtgcgacgcagtcctcgatcacaacccgcctggggtgagcacaccacatccactgtttccatggcatttccatggttacctgggcctggtgtgcgtgccccgctccatgtttggttgcagtgaaacccaccttttcctcaccttgcgggttcatttgctgtgggaggccagcctgatcgactctacatggctcccttctccttattag

SEQ ID NO: 24825 - DNA, 636 bp, synthetic construct
  misc_feature 1..636: note = Description of Artificial Sequence: Synthetic coding sequence
  source 1..636: mol_type = other DNA
atgaccaccctgacccggcaggacctgaacttcggccaggtggtggcagacgtgctgtgtgagttcctagaggtcgccgtgcacttgatactatacgtgagagaagtctatcccgtggggatatttcaaaagagaaagaaatacaatgttcctgtccagatgagctgtcatccggagctgaatcagtatatacaggatacccttcattgcgttaagcctctactcgaaaaaaatgacgtggaaaaagtggtggtggtgattctggataaagaacacagacctgttgagaaatttgtctttgagatcactcagccacctctgctctcaatttcgtccgactcattactcagccatgtggagcagctgctgagagcattcattcttaaaatcagcgtatgtgatgctgtgctggaccacaatccgccagggtgtaccttcacagtgctggtccacacccgcgaggcagcgacccgcaacatggaaaagatacaggtgatcaaagatttcccctggatcctcgccgacgaacaagacgtgcatatgcatgatcctagattaatccctttgaaaactatgacttcagacatccttaaaatgcaattgtatgtggaagaacgcgcgcataagggatcttag

SEQ ID NO: 24826 - DNA, 675 bp, synthetic construct
  misc_feature 1..675: note = Description of Artificial Sequence: Synthetic coding sequence
  source 1..675: mol_type = other DNA
atgaccaccctgacccggcaggacctgaacttcggccaggtggtggcagatgtcctctgcgagttccttgaagtggcagtacacctaatcctctatgtgcgggaagtgtacccagtgggtattttccagaagcgtaagaaatacaacgtgccagttcagatgtcctgccatcctgagctgaaccagtatatccaagacactctccattgcgtcaagccattattagagaagaacgacgtggagaaagtcgtggtcgtcattctggacaaagaacaccggccagtggagaaatttgtgttcgagataacgcagccccctttgctgtctatcaggtgggcagctcccgctcctcgcccactggccggcatcagcagcgacagtttgctatcccacgttgaacaactgctccgagcgtttatcctaaaaatctcagtctgtgatgcagttttggaccacaaccctcctggatgtacctttaccgttctggtccacactcgggaggccgcgaccagaaacatggagaagatccaggttatcaaggattttccttggatcttggctgatgagcaggacgtgcacatgcatgaccctagactaatccctctgaagaccatgacctcggacatcctgaaaatgcagctatatgtcgaggagagagcccacaagggcagctag

SEQ ID NO: 24827 - DNA, 675 bp, synthetic construct
  misc_feature 1..675: note = Description of Artificial Sequence: Synthetic coding sequence
  source 1..675: mol_type = other DNA
atgaccaccctgacccggcaggacctgaacttcggccaggtggtggccgatgtcctgtgcgagttccttgaagtcgcagtgcacctcatcctctacgtgagggaagtttaccctgtcgggatttttcagaaaaggaagaagtataacgttcctgtgcaaatgtcatgccaccctgagctgaaccaatacattcaggataccctgcactgcgtgaagcctctgcttgagaagaacgacgtggaaaaggtggttgtcgtaattctggacaaagaacaccgcccagtggagaaattcgttttcgaaatcacacagcctcccttgctgtccatccgctgggcagccccagctccaagaccactggctggaatcagctcagactccttactgtctcacgtggagcaattgctcagggccttcatcttgaagatcagcgtctgcgacgccgttctcgaccacaacccgcccgggtgtaccttcactgtcctcgttcacacgcgcgaggcagctacacgtaatatggaaaaaattcaggtgattaaggactttccttggattttggccgacgagcaggacgtgcacatgcatgaccctagattaataccgcttaagaccatgacctctgatattctgaagatgcagttgtatgtggaggagcgggcccacaagggctcctag

SEQ ID NO: 24828 - DNA, 636 bp, synthetic construct
  misc_feature 1..636: note = Description of Artificial Sequence: Synthetic coding sequence
  source 1..636: mol_type = other DNA
atgaccaccctgacccggcaggacctgaacttcggccaggtggtggccgatgtcctgtgcgagtttcttgaggtggctgtgcatctgattctttacgttagggaggtatatccagtaggcatattccaaaagagaaagaaatataacgtccctgtgcagatgagttgtcatccagagttaaatcagtacatacaggatacactccattgcgtcaagccattactggagaagaacgatgtggagaaggttgtagttgtgatcctggataaggaacataggccagtggagaagttcgtatttgagataacgcaacctcccctcttgtctatctcctctgacagcctgctgtctcatgtggagcagctcctgcgagcattcatactgaaaattagtgtatgtgatgcggtactcgaccacaatccgccgggctgtacttttaccgtgctggtccatacaagagaagccgccacccggaacatggaaaagatccaggtgattaaggatttcccctggatactggcggatgagcaggacgtgcacatgcatgacccccgtctgattcccctcaagactatgacttcagacattttgaagatgcagctgtacgttgaggagcgggcacataaaggatcatag

SEQ ID NO: 24829 - DNA, 597 bp, synthetic construct
  misc_feature 1..597: note = Description of Artificial Sequence: Synthetic coding sequence
  source 1..597: mol_type = other DNA
atgaccaccctgacccggcaggacctgaacttcggccagggccgggaggccggtcccgcaggacccggagcgggagccagcggcccggcaggtttccttgagagagccactggtctctgcccacccgctgttgtggccgacgtgctttgcgaatttctggaggtggcagttcatctgattctgtacgtgagagaggtctatcccgtcgggatattccagaaacgaaaaaagtacaacgtgccagtgcagatgtcctgccatccagagctgaatcagtacatccaggacacccttcactgcgtgaaaccacttctggaaaagaatgatgtagagaaggttgtggtggttattcttgataaggagcatcgccctgttgaaaagtttgtgttcgagatcacccagcctccccttttatcgatttctagtgacagcctcctatcccacgttgaacagctgctgcgggctttcattctgaaaatcagcgtctgcgacgctgtgttggaccataacccccctgggtgtacgttcaccgtcttagttcacactagggaagctgcaactcgaaacatggagaagatccaggtgatcaaggtgtag

SEQ ID NO: 24830 - DNA, 504 bp, synthetic construct
  misc_feature 1..504: note = Description of Artificial Sequence: Synthetic coding sequence
  source 1..504: mol_type = other DNA
atgaccaccctgacccggcaggacctgaacttcggccaggtggtggccgacgtgttatgcgaatttctggaagtggccgtccacctcattctctatgttagagaggtctaccccgtcgggatcttccaaaaacgcaaaaagtataacgtgcccgtgcaaatgagctgtcatccagaactgaaccagtatatccaggatactctccactgcgtgaagccactgttagagaaaaatgatgtggagaaagtagttgtggttatactggacaaagagcacagacctgtcgagaagtttgtcttcgagataactcaaccaccactgctctcaatctccagcgacagcctgctgtctcatgttgaacagctgttgcgtgcgttcatcctgaaaatttccgtgtgcgacgccgtgctcgatcacaatcctcccggttgcaccttcacagtgttggtccacacgagggaagctgcaactaggaacatggaaaagattcaggtcattaagtag

SEQ ID NO: 24831 - DNA, 3159 bp, synthetic construct
  misc_feature 1..3159: note = Description of Artificial Sequence: Synthetic coding sequence
  source 1..3159: mol_type = other DNA
atggccggcatggacagcggcaacctgaagaccgcccggctgtggcgtgacgctgctctcagagcaaggaagctcagaagcaatttgagacagctgacgctgacagcagccggggcctgtccaggcgccggagccgatgccctcgagtcccctgcttctcctcaactcgtgcttcctgccaatctgggcgacatagaggctctcaatttaggtaacaatggtctggaggaagtgcccgagggacttgggtctgctttgggcagccttcgagtgctcgtgctccgcaggaaccgttttgctcggctgcccccagccgtagccgagctggggcatcacctcaccgagcttgatgttagtcacaatcggttaaccgccctaggggctgaagtggtgtccgccctccgggaactgcgcaaactcaacctgtctcataatcagcttcccgcacttcccgctcagcttggagccctggctcatttggaggagctagacgtgtcattcaatcgattggcgcatctgcccgattcgctgtcctgtctttcacgcctgcggacactggatgtggaccacaaccagttaacggcctttcctcgccagctgctgcagctggtcgcgctggaggagctagacgtatcatctaaccgcttgcggggcctgcccgaggatattagtgccctcagagcccttaaaatcttgtggctcagcggtgctgagctggggacactcccggcggggttctgtgaacttgcttcactggaatcgctcatgttggacaataatggtctccaggccctgcccgctcagttcagttgcctgcaacgcctgaaaatgctcaatttaagttccaacctgttcgaagagttccctgccgcactcttgcctctcgctggcctcgaggaactgtatttatcgcgcaatcagctgactagcgtgccttccctgatcagcggactcggccggctcctgaccctttggttagataataatcgcattcgctacctgcctgactccatagtggagttgacggggctcgaggagcttgtgctgcaggggaaccaaattgcggtactgcctgaccatttcgggcagctctcccgtgtagggttgtggaaaattaaggataatccactgattcaaccaccgtacgaggtctgtatgaagggcataccatatattgccgcctatcagaaggagctggctcactcacaacctgccgtccagccccgacttaaacttcttctgatgggtcataaagcagctgggaagacactactccgacattgtctgaccgaggagagagtagaagggtgtcccggagggggcgacaaggaaaaatgctacccacctagcccaccccctgtgagcaagggcattgaggtgacttcttggaccgcagatgcctctagggggctccgattcatagtgtacgacttggccggagatgagtcctacgaggtgatccagcccttcttccttagccctggtgccctgtacgtgctggtcgtgaacctagcgacctatgagcctcgccacttccccaccactgttggctcgttcctccatagggtgggagcacgcgttcctcacgcagtggtctgcattgtaggcacacacgcagacctttgcggtgagcgcgagcttgaggagaaatgcctcgatatacaccggcagatagcccttcaggagaagcatgacgccgagggactgtcgcgcctggccaaggtggtggatgaagcattagctagagacttcgagctacggtccgcttcacctcatgctgcatattacggcgttagcgataagaatctgcgccgtaggaaggcccactttcagtatctactgaaccaccggctgcaaatcctttcccccgtgctgcccgtgagctgccgagatccaagacatcttagaagacttcgcgacaaactgctgtctgttgcagagcacagagagatattccccaacctgcacagagtgctcccccggtcctggcaggtgctcgaagaactgcattttcaacctcctcaagcccagcgcctgtggctgtcctggtgggatagtgctaggctgggactgcaagccggactgaccgaggatcgtctgcagtcagcgctgtcataccttcatgagtccgggaagctgctatacttcgaagactcacccgcgttgaaagagcacgtgtttcacaatcttacacgattgatcgacatcttaaacgtctttttccagcgcgacccaagtctgctcctgcacaagttactcttggggaccagtggggagggcaaggccgagggagaatcctccccgcctatggctcggtctacgccatcgcaagagctgttgcgcgcgactcagctgcaccagtatgtggaaggatttctgctgcacgggctgttgcccgcccatgtgattagattactgttgaagccccatgtgcaggcgcagcaggatttgcagctgctcttggagttactcgagaaaatgggcctttgctactgtctcaacaagccaaagggcaaacctctgaacgggtcaaccgcgtggtataagttcccttgctatgtgcaaaacgaagtgccccacgccgaggcatggataaacggcaccaacctggctgggcagtcctttgtggcggagcagttgcagatcgaatatagctttccgtttacattcccactggggctgttcgcccggtactctgtgcagataaatagccacgtggtgcatcggtccgatggcaagttccagatcttcgcctacagaggaaaggtccctgtggtcgtgtcctaccgtccagctagaggcgtgttgcagcctgataccctgagcatagccagtcacgccagtttgccaaacatctggacggcatggcaggctataaccccacttgtggaagagctgaacgtgctgctgcaggagtggcccggactgcactacaccgtgcatatattatgctccaagtgcctgaaaagggggagtcccaacccacacgcttttcctggcgagctgttatcgcaaccccgccccgagggtgtggctgaaattatctgccctaagaacggatcagagagggtcaatgtggccctcgtgtacccacccacccctaccgtgatatcaccatgttctaagaaaaacgtaggtgaaaaacataggaatcagtag

SEQ ID NO: 24832 - DNA, 549 bp, synthetic construct
  misc_feature 1..549: note = Description of Artificial Sequence: Synthetic coding sequence
  source 1..549: mol_type = other DNA
atgggcaagggccggttcgacgagaaggagaacgtgagcaactgcatacagctcaagacttccgtgattaaggggatcaagaatcaactcattgaacagtttccaggaatcgaaccatggttaaatcagattatgcctaaaaaagaccccgtcaagatagtgcgatgtcatgaacatattgagatcttaacggttaatggcgaactgctgtttttccggcagagagaaggtcccttctaccccactttacgactgttgcataaatatccgttcatcctgccgcaccagcaagtcgacaagggcgccattaaattcgttctgtcaggggccaatatcatgtgcccagggttgacatctcctggcgctaaactctatcccgccgctgtggacacaattgtagcaattatggctgagggcaaacagcatgctctgtgcgtgggcgtgatgaaaatgtccgcagaagatatcgagaaggttaacaaagggattggcattgagaatatccattaccttaatgacggtctttggcacatgaagacatacaaatag

SEQ ID NO: 24833 - DNA, 546 bp, synthetic construct
  misc_feature 1..546: note = Description of Artificial Sequence: Synthetic coding sequence
  source 1..546: mol_type = other DNA
atgttcaagaagttcgacgagaaggagaacgtgagcaactgcatccagctaaagacaagtgtcataaaaggcatcaaaaatcagctaatcgagcagtttccagggattgagccatggttgaatcagattatgccaaaaaaggatcccgttaaaatagtacgatgtcatgaacatatcgagatactcacagttaacggggaactgctgttctttcgccagagggagggtcccttttacccaaccctgcgcctgctacacaagtacccattcatattgccacatcaacaggtagataaaggagcaattaagtttgtgctgtcaggagccaatataatgtgtccagggttaactagtcctggcgccaaactgtaccccgccgccgttgatacgatcgtggcaatcatggcagaggggaaacagcacgctctttgtgtcggagtgatgaagatgtctgccgaagatattgaaaaagtgaataagggcatcggaatcgaaaatatacactacttaaacgacggactttggcacatgaagacttataaatag

SEQ ID NO: 24834 - DNA, 2226 bp, synthetic construct
  misc_feature 1..2226: note = Description of Artificial Sequence: Synthetic coding sequence
  source 1..2226: mol_type = other DNA
atggccctgttcaccccctggaagctgagcagccagaagctgggcttttttcttgttacattcggctttatctggggcatgatgctgctacactttactattcaacaaagaactcagcctgagtcttccagcatgttgcgggagcagatcttagatctatctaagagatatataaaagctctggctgaggagaaccgcaatgtggtggatgggccctacgccggcgtcatgacagcctatgaccttaaaaagacccttgcggtcctcctggacaacattctgcagagaatcggaaaattagagtctaaagtggacaatcttgtcgtcaatggaacagggaccaattcgactaactccacgactgcggtgccctctcttgttgctcttgaaaagattaatgtggccgatataatcaacggggctcaggaaaaatgcgtgctcccccctatggatgggtatccccactgtgaagggaaaatcaaatggatgaaggacatgtggagatctgacccatgttatgccgattacggagtggatgggtctacttgtagcttttttatctatctgtcggaggttgagaactggtgtccccatctgccctggcgcgcaaagaatccgtacgaggaggccgatcataactctctggccgaaataaggacagactttaacatcttgtactcgatgatgaagaaacacgaggaatttaggtggatgagactaagaatccgacgcatggctgatgcatggatacaggctatcaagagcctggcggaaaagcagaacttggagaaaagaaagcgtaagaaggtccttgtccatcttggccttcttaccaaagagtcaggcttcaaaatcgcggaaaccgccttctcaggcggcccattaggagagcttgtgcagtggtcggaccttattaccagcttgtacttgcttggacatgacatcaggatctcagcttctctggccgaactcaaggagattatgaaaaaggtagtgggcaatcgttctggctgcccgaccgtaggcgacagaattgtcgagctgatctacatagacatcgtaggattggcccagttcaaaaaaacgttgggaccttcatgggtgcactaccagtgcatgctgagagtccttgacagcttcggcaccgagccggagtttaaccatgcaaactacgcacagtccaagggccacaaaaccccatggggcaaatggaacctaaatcctcagcagttttacacgatgttccctcatactcccgacaacagtttcctgggatttgtggtggaacagcatttaaatagtagtgacattcaccacattaatgaaatcaaacggcagaatcaatctttggtatacgggaaggtggatagtttctggaaaaacaagaaaatctacctagatatcatccatacttatatggaggtgcacgcaacagtgtatggatcgtccacaaaaaatattccaagctatgttaagaatcacgggatcctctctgggcgcgacctgcaatttctcctgcgggaaaccaagctgtttgtcggactgggatttccttatgaggggccggcacccttggaagctatcgccaatggctgtgcttttctgaacccaaaatttaatccacccaaaagctctaagaacactgactttttcattgggaaacccactctccgggagttgacaagtcagcatccttatgcagaggtttttatcggcagaccacatgtgtggactgtggatctgaataaccaggaagaggttgaggacgcagtgaaggccattctgaaccagaagattgaaccgtacatgccttacgaatttacatgtgaagggatgcttcagagaatcaatgcctttattgaaaaacaggacttttgtcacggacaggtcatgtggccccctctgtctgctcttcaggtgaaattggcagagcctggtcagtcttgtaagcaagtctgccaggagagccagcttatttgcgaacctagtttcttccaacacctcaacaaagacaaagacatgttgaagtataaggtgacctgtcaatcttctgaattagctaaggatattttggttccatcatttgaccccaagaacaagcattgtgtgtttcagggcgaccttctccttttctcatgcgcaggggcccaccctagacaccagagagtgtgtccctgcagagatttcattaaggggcaggtggcactgtgcaaggactgtctgtag

SEQ ID NO: 24835 - DNA, 2226 bp, synthetic construct
  misc_feature 1..2226: note = Description of Artificial Sequence: Synthetic coding sequence
  source 1..2226: mol_type = other DNA
atggccctgttcaccccctggaagctgagcagccagaagctgggcttcttcctcgtaacctttggatttatttggggaatgatgctattgcacttcaccattcaacagcggacgcagcctgagtcctctagtatgctaagggaacagatcttggacctgtccaagcgatatattaaggccctggctgaagaaaatcgaaacgtcgtggacggaccatacgcaggggttatgacagcatacgatctcaagaagaccctggctgttctgctcgacaatattctgcagcgtattgggaagctcgagtctaaggtcgacaaccttgtggtgaatggaacagggaccaactcgaccaactctacgactgccgttccttccttggttgcattggaaaagataaatgtagctgacatcattaacggagcccaggagaagtgtgtgcttcctcccatggacggctacccacattgcgaggggaagatcaagtggatgaaggacatgtggcgctctgatccttgttacgccgattacggagtcgatggaagtacatgctctttctttatctatctttccgaggtggagaactggtgccctcatctgccatggcgcgccaaaaacccatacgaggaggcggaccataattcgctcgctgaaatcaggacagacttcaatatcctgtactccatgatgaaaaagcatgaggaattccggtggatgcgccttcgcattagacggatggctgatgcatggatacaggcaatcaaaagcctggcagagaagcagaacctggaaaagcggaaacgtaaaaaagtcctggtacacctgggcttgctgactaaagagtccggatttaagatcgctgagactgctttcagtggtggtcccctgggagagctagtccagtggagtgacctcattaccagcctctatttattgggacatgatatcaggattagtgctagcctggccgaattgaaggagataatgaaaaaagtggttggcaaccggagcggctgtcctacagtcggagacagaatagtcgaactgatctatatcgacatcgtggggctagctcagttcaagaagaccctgggcccctcatgggtgcattatcagtgcatgctaagagttctggacagtttcgggaccgaacctgagtttaatcatgccaattacgcacagtccaaaggtcacaagacaccttgggggaagtggaatttgaatccacagcagttctacaccatgtttccccacacaccggataacagttttttggggttcgtcgttgaacagcatctaaatagttctgacatccaccacattaacgaaattaaacgccagaaccagagtctggtctatggaaaagtggattctttctggaagaataaaaagatctatctggacattattcacacctacatggaagtgcacgccacagtttacgggtctagtacaaagaacatcccaagttatgttaagaatcatggtatcctgagcgggcgggacctccaatttttgctgcgtgaaactaagctgttcgtggggcttggattcccctacgagggtcccgctcctctggaggccattgctaatggctgcgctttcctcaatcccaagttcaaccctcccaaatccagtaaaaacacagatttctttattggaaagcccacattgagggagctaacttctcagcatccatacgccgaggttttcatcggccgtccccacgtttggaccgtcgatctcaacaaccaggaggaagtcgaagatgccgtgaaagcaatactgaatcagaagattgaaccctacatgccctatgaatttacttgtgaagggatgctgcagcgtattaatgcattcatcgaaaagcaagacttttgccacgggcaggtgatgtggccccctctctccgccctacaggtgaagcttgctgaacccgggcaatcctgcaagcaagtgtgccaggagtcacaactaatatgcgaacccagcttcttccaacacctgaacaaggataaagatatgctaaagtacaaggtgacgtgccagtcatcagaactcgcaaaggacattctcgtgccaagctttgatcccaagaataagcattgcgtcttccagggagatttgctgctttttagttgcgccggtgcacacccccggcatcagcgcgtatgtccatgcagagatttcatcaaggggcaggttgcgctgtgtaaagattgcctgtag

SEQ ID NO: 24836 - DNA, 1410 bp, synthetic construct
  misc_feature 1..1410: note = Description of Artificial Sequence: Synthetic coding sequence
  source 1..1410: mol_type = other DNA
atgcacagcttcccccccctgctgctgctgctgttctggggcgtggtgagccattcctttcccgccaccctggagactcaagagcaggacgtagatcttgtgcaaaagtaccttgagaaatactacaacctgaagaatgatggcaggcaggtggagaagcgcaggaactctggcccggtcgtcgagaaactgaagcagatgcaggagtttttcgggcttaaggtgaccgggaaacctgatgcagaaacactgaaggtgatgaaacagccccgttgtggcgtgccagacgtagctcagtttgttctaacagagggaaacccgagatgggagcagacccatctgacctatcgaattgagaactatactccagatctgcctcgcgccgacgtggaccatgctatagagaaagctttccaactgtggagcaacgtgacgccactaacgttcacaaaggtgtcagagggacaagcagacataatgatcagctttgtgcggggtgatcatagggataactccccattcgacggtccaggaggaaacctcgcgcatgctttccagccaggtcctggcattgggggggacgcgcacttcgacgaggatgaacggtggaccaacaactttagggagtataacctgcaccgcgtggccgcgcacgagctgggccatagcctaggtttatctcacagcacagacatcggcgcgttgatgtatccgtcatatactttttccggagacgtacagctcgcacaggatgatattgatggcatccaggcaatttatggcaggtcacaaaatcccgtgcagcccattggacctcagaccccaaaggcttgcgattccaagctgacatttgacgccattacaactattcggggcgaggtgatgttttttaaagaccggttctatatgcgaaccaatcccttctaccctgaagtggagctgaatttcatctccgtcttttggccccaactgcccaacggactcgaggccgcttacgagtttgccgaccgtgatgaggtgaggttctttaaaggcaacaagtattgggcagtgcaggggcagaatgtgctgcatgggtatccaaaagatatttacagtagttttggattcccgagaacagtcaaacatatcgacgccgccctgtctgaggagaacaccggcaagacttatttttttgtggccaataagtattggagatacgatgaatacaaaagaagcatggatcccggatatcccaagatgatcgcacacgacttccccgggatcggccataaagtggacgctgtgtttatgaaagacgggttcttctatttttttcatgggacccgacagtacaagttcgatccgaaaactaagaggattctgaccctgcagaaggccaattcttggttcaactgtcgaaagaactag

SEQ ID NO: 24837 - DNA, 1431 bp, synthetic construct
  misc_feature 1..1431: note = Description of Artificial Sequence: Synthetic coding sequence
  source 1..1431: mol_type = other DNA
atgatgcacctggccttcctggtgctgctgtgcctgcccgtgtgctctgcatatcctcttagcggtgccgcaaaggaggaagatagcaataaggacttggcccagcagtatctcgagaaatattataacctagagaaagatgtaaagcagtttagacggaaggattccaatttgattgtgaagaagatccaaggcatgcagaagttcctaggacttgaagtgacaggcaagctggataccgacaccctggaggttatgagaaaaccaagatgcggggtgcccgatgtggggcatttcagtagtttccctgggatgcccaaatggaggaagacccaccttacttatcggattgtgaactataccccggacctaccacgtgacgccgtagactccgccatcgaaaaagcactcaaagtctgggaggaagttacccccctgacattttccaggctgtatgagggcgaagccgatatcatgatctctttcgcagtgaaagagcacggcgacttttactcattcgatgggcctggccacagcttagcacacgcttacccccctggccctggtctatatggcgacattcacttcgacgatgacgagaaatggaccgaagacgcgagtggtactaatttgtttttagttgcagctcatgagctggggcactccctgggcctctttcatagcgctaatacggaggcccttatgtatcccctgtacaactccttcactgagcttgcccaattcagactgtcccaagatgacgtcaacggtattcagtcgctgtacggcccacccccggcttccactgaggaacccctcgtccctacgaagtcagtacccagtggatctgaaatgccggccaagtgcgatccagccttgtcgtttgacgctatctccaccctgcggggcgagtaccttttctttaaagatcggtatttttggcggcgctctcactggaaccccgaacctgagttccatctaatttcggctttttggccttctctgcccagttacttggacgccgcctatgaagtgaactcgagagatacggtgtttatcttcaagggcaacgagttctgggccataagaggcaatgaagtgcaggctggatacccccgaggtattcacaccctcggcttcccccccacaatccgcaagattgacgcagccgtcagtgacaaggagaagaagaaaacttacttctttgcagccgataaatactggcgatttgacgagaattcgcagtcgatggaacaggggttccctaggctcatagccgacgattttccaggggtcgaacccaaggttgacgccgtgcttcaggctttcggattcttctattttttttctggtagctcacaatttgagttcgatcctaatgccagaatggtgacacatattcttaagtctaattcttggctgcattgctag

SEQ ID NO: 24838 - DNA, 930 bp, synthetic construct
  misc_feature 1..930: note = Description of Artificial Sequence: Synthetic coding sequence
  source 1..930: mol_type = other DNA
atgccccggcactgcagcgccgccggctgctgcacccgggacacccgtgaaacacggaaccggggaatcagcttccataggctccctaaaaaggataatcccaggcgtggcttgtggctcgctaattgccagcgccttgatccctctggacagggcctgtgggaccccgcctcagaatatatctacttctgttcaaagcacttcgaggaagattgctttgagctcgtggggatcagcggctaccatagactgaaggaaggagccgtgccaactatctttgaatctttttccaagttacgtagaactacgaaaaccaagggacactcgtacccacccggccccgcagaagtgtccaggttgagacgctgtcgcaagagatgttctgagggtcgcgggcctacgacgccattctctccccctccacctgccgacgtgacgtgcttccccgtggaagaggctagcgcaccagccactctcccggcttcacccgccggacgtttggagcccgggttatcatctcccttctcagatctgctgggacccctcggggcacaggccgatgaagcgggatgctctgcccagccaagcccggaacggcagccttccccacttgagcctcgtcccgtgtcccctagcgcctatatgctgcgcctgccccctccggcaggggcttacatccagaatgagcactcttaccaggtgggaagtgctttactctggaaaagacgagcagaagccgctctcgacgcactggacaaagcccaacggcaactccaggcatgcaagaggagagagcagagactgagactaagactgaccaagctacaacaggaacgcgccagggagaagcgtgctcaggcggacgctcgccagaccctgaaggaacatgtgcaagattttgcaatgcaactgtcatcctcaatggcttag

SEQ ID NO: 24839 - DNA, 1416 bp, synthetic construct
  misc_feature 1..1416: note = Description of Artificial Sequence: Synthetic coding sequence
  source 1..1416: mol_type = other DNA
atgcaccccggcgtgctggccgccttcctgttcctgagctggacccactgtcgggccctaccactgcccagcggaggggacgaggatgatctgtcggaagaggatctgcagttcgcagaacggtatctgagaagttattatcacccaacaaacttggccggcattctgaaggagaacgccgcttcctctatgaccgagcgattgcgggagatgcagtccttcttcggactggaggttactggaaagttggatgacaacaccctggatgtaatgaaaaaacctcgatgcggggtgcctgacgttggcgaatataacgtgtttccgagaaccctcaagtggagtaagatgaatctgacctacaggatcgtaaactacacgccagatatgacccacagtgaggtggagaaggccttcaagaaggcttttaaggtgtggtctgatgtgacgccactcaattttacccggctgcacgatgggatcgccgatattatgatctcctttggaattaaggaacatggggacttctatcccttcgatgggcccagcgggttgcttgctcatgcgttccctccgggacctaactacggaggagatgcgcactttgatgatgacgaaacctggaccagctcttccaaaggctataacctcttcctcgtagctgcacacgagttcggccattctttaggtctcgatcacagcaaagatccaggggcactgatgttccccatctatacatacacaggtaagtcccactttatgttaccggatgacgatgtgcagggaatccagagtctctatgggcctggcgacgaggatccaaatcctaaacatcccaagactcctgacaaatgtgacccctccttgtcactcgacgcaattacgagtttacggggcgagacaatgatttttaaagacagatttttttggcgccttcacccccagcaggtcgatgcagagttatttctgacgaagtccttctggcccgaattgcctaaccggatcgatgctgcctacgagcaccccagtcatgaccttatcttcatcttcagaggccgtaaattctgggcattgaatgggtatgatattttggaaggttatccaaagaaaatttccgaacttgggcttcctaaagaggtaaaaaagatttccgccgctgtgcactttgaagacacgggaaaaaccttgcttttttctggaaaccaagtatggaggtacgacgataccaaccatataatggacaaggactatcctcgactgatcgaggaagattttcccggcattggggacaaagtggatgctgtatacgaaaaaaatggctacatttatttttttaatggaccgatccagttcgagtattccatatggtcaaataggattgttagagtcatgccagcaaactctatcctgtggtgttag

SEQ ID NO: 24840 - DNA, 1470 bp, synthetic construct
  misc_feature 1..1470: note = Description of Artificial Sequence: Synthetic coding sequence
  source 1..1470: mol_type = other DNA
atgcaccccggcgtgctggccgccttcctgttcctgagctggacccactgtagggccttgcccttgccgtccggaggtgacgaggatgacctcagcgaggaagatctgcaatttgcggaaaggtatctccgttcatattatcacccaactaatctggccggtatacttaaggaaaacgccgccagctcaatgacagaacgcctgcgtgagatgcagagcttttttggtctcgaggtgactggtaaactggacgataacacactggatgtgatgaagaagccaaggtgcggagttcccgacgtcggggagtacaacgtgttcccaaggactctgaagtggtctaagatgaacctgacgtatcgcatcgttaattacaccccggatatgactcacagcgaggttgagaaagcctttaagaaagcttttaaggtgtggagcgacgtgacacccctcaatttcacccgactacacgacggcattgcagatatcatgatctcctttgggattaaggagcacggtgacttttatcccttcgacggcccttcaggactactcgctcatgcatttccgccagggcccaattatgggggagatgcacatttcgacgatgacgaaacatggacctccagctctaaggggtacaatttattcttagtggcagcacacgaattcggacacagccttggcctcgaccactctaaggatcctggcgcactgatgtttccaatatacacatacactggcaagagccactttatgctgccagatgatgatgtacagggaatccaatccctttacggacccggggacgaagaccctaatccgaagcaccctaagaccccagacaagtgtgaccccagcttatctctggatgcaatcacctctctgagaggagaaacaatgatctttaaagaccgatttttctggaggctgcacccacaacaggttgacgcagagttgtttctgaccaaatctttttggccagagttgcccaacaggattgatgccgcttatgagcatcccagtcacgacctgatctttatcttcaggggaagaaaattctgggcgttaaacgggtatgacattcttgaagggtatccaaagaaaatcagcgagctaggtctgcctaaagaggtgaaaaaaatcagcgctgccgtccacttcgaggataccgggaagaccctgctcttcagtggtaatcaggtttggcgctatgatgacactaatcacattatggataaggattacccccgtctgatcgaagaggattttcccggcatcggtgacaaggtggacgccgtttatgaaaaaaatgaatctcactcggtgactcaggcaggtgttcactgccgaaacttgagcagcctgcaacctccccctcccggctttaaacgctttagctgcctgtctttgtggtcctcttgggattaccgcctttatctgttcttccagagaactcacacagtgtag

SEQ ID NO: 24841 - DNA, 1152 bp, synthetic construct
  misc_feature 1..1152: note = Description of Artificial Sequence: Synthetic coding sequence
  source 1..1152: mol_type = other DNA
atgcaccccggcgtgctggccgccttcctgttcctgagctggacccattgtagggccttgccactgccctccggaggggacgaggacgatctatctgaggaagacttacagttcgcggaacgctacctacgcagctactatcatcctaccaatttagcagggatcctgaaggagaatgccgcaagttccatgacagagcgactgagagagatgcagtcatttttcgggctggaagtaacaggtaagctggatgataacactctggacgtaatgaaaaagccgcggtgtggcgtgcccgacgtgggtgaatacaacgtcttcccacgcaccctgaaatggtccaagatgaatcttacctataggattgttaactatacaccagatatgacacactctgaagtcgagaaggcctttaaaaaagcctttaaggtctggagcgacgtcacaccactcaatttcaccagattacacgatggtatagcggacatcatgatctcgttcgggatcaaggagcatggcgatttctaccctttcgacggtccttcaggcctgctagcgcacgcctttcccccgggaccaaactacggcggagatgctcattttgacgacgatgaaacatggacctcttcgtctaaaggctacaacctgttcttggtggctgcgcacgagtttggacacagcctaggcctagaccacagcaaggaccccggcgctctgatgttccccatctatacatatacaggcaagtctcactttatgctccccgatgacgacgtgcaaggtattcaatcactttacggtcccggagacgaggacccaaaccctaagcatcctaaaacccctgacaaatgcgatcctagcctgtctctggacgctataacgtcactccggggggaaaccatgatcttcaaagaccgattcttctggaggctgcatcctcagcaggtggacgcggagctgtttctcacaaagtccttctggcccgagctacccaaccgaattgatgctgcgtacgaacatccctctcacgaccttatatttatttttcgaggccgaaagttttgggctttaaacgggtacgacatcctggaaggctacccgaaaaaaatttccgagctcggcctgccaaaggaggtgaacaagctgcagtag

SEQ ID NO: 24842 - DNA, 1749 bp, synthetic construct
  misc_feature 1..1749: note = Description of Artificial Sequence: Synthetic coding sequence
  source 1..1749: mol_type = other DNA
atgagccccgccccccggcccccccggtgcctgctgctgcccctgctcacccttgggaccgccttagccagccttggcagcgctcagtcatcgtccttttcccctgaggcatggctacagcagtatggctacctcccgcccggcgatttacggacacatacccagcgtagtccccaaagcttgtcagcagcaatcgccgcaatgcagaaattctatggattacaggtcaccggaaaagcggatgcggatacaatgaaggcaatgcgtcggccccgctgtggggtcccagataaatttggggctgagatcaaagcaaatgtccggagaaaacgttatgctattcagggcttaaaatggcagcataacgaaataacattctgtatccaaaactacaccccaaaggtgggagagtacgcaacttacgaagctattaggaaggcattccgcgtttgggaatccgccacaccattgagatttagggaagtgccatacgcctatattagggagggacatgaaaagcaagccgatattatgatattttttgctgaagggttccacggcgatagtacacctttcgatggggagggcggtttcctggcccatgcctacttccctggtccaaatattgggggagatacacatttcgacagcgcggagccctggactgtacggaacgaagacctgaacggaaacgatattttccttgtggccgtccatgagcttgggcatgccctggggctcgaacattccagcgatcctagtgcaattatggcccccttctatcagtggatggatacagaaaactttgtgctgcctgacgacgatcggagggggattcaacagttgtatgggggggagtctgggttccccaccaaaatgcctccacagcctcggaccacctccaggcccagtgttcctgacaagcccaagaatcctacttacgggccgaatatttgcgacggcaatttcgataccgtcgctatgctgaggggtgagatgtttgtattcaaggagcgctggttttggagggttcgcaacaaccaagtcatggatgggtatcccatgccgattgggcagttctggagggggctaccggcatccattaacacagcgtatgaaaggaaagatgggaagttcgtttttttcaaaggagacaaacactgggtctttgatgaggcctccctggaacccggataccctaagcacattaaggagctcggacgcggcttgcctacagacaaaatcgacgccgccctattctggatgccaaacggaaagacctacttttttaggggcaataaatactaccggttcaatgaggagttgagagctgtggacagcgagtacccaaaaaacataaaggtctgggaagggatccccgaaagccctcgcgggagcttcatgggcagcgatgaagtcttcacatatttctacaagggcaacaagtattggaagtttaataatcagaagctgaaggtcgagcccgggtatcccaaatctgccctaagagactggatgggctgcccctctggcgggcggccagacgaaggcactgaggaagaaactgaagtcatcattattgaagtggacgaggagggcggcggcgccgtctccgcagctgcagtcgtcctccctgtgcttctgcttctgctcgttctggccgtgggcctggctgtcttcttctttagaaggcacggcacccctcggaggctgctgtattgtcagcgctctctactggataaggtgtag

SEQ ID NO: 24843 - DNA, 2052 bp, synthetic construct
  misc_feature 1..2052: note = Description of Artificial Sequence: Synthetic coding sequence
  source 1..2052: mol_type = other DNA
atggccagcggccccggcagccaggagcgggagggcctgctgatcgtcaagttggaagaagactgtgcgtggtcacaggaacttccacctccagatcccggtcctagtcctgaagcaagtcacttgaggtttaggcggttcaggtttcaagaagcagccggtccccgcgaggcccttagtcgactgcaggagctttgccatgggtggctgaggcctgagatgcggaccaaggaacagatcctcgaacttttagtgctggaacaattcctaacgatattgccccaagagatccaaagccgggtgcaggaactgcatcccgagtcaggagaagaggctgtcactctggttgaggatatgcagcgtgaactgggccgtctgcggcagcaggttacaaatcacggcagggggaccgaggtgctcctggaggaaccgctgcctctggaaactgccagggagagtccatccttcaagttggaacctatggagaccgagagaagtccaggccctaggctgcaggaactgctgggcccttcccctcagcgggacccccaagcagttaaggaacgggccttgtccgcgccttggctatctctcttccctccggaaggcaacatggaagataaagaaatgacaggcccgcagctccccgaatccctggaggacgtggccatgtacatctctcaggaggagtggggacaccaggatccctccaagcgcgcactgagcagagacaccgtccaggaatcctacgagaacgtcgacagtctggaatctcatatccctagccaggaagtgccaggaacccaggtgggccaggggggaaagttgtgggatcctagcgtgcagagctgcaaagagggcttgtccccacgcggccctgccccaggggaggaaaagttcgaaaacctggagggggttccctccgtgtgcagtgaaaatatacaccctcaggtgctgctgcccgatcaggcaaggggtgaggttccatggtcacctgaattgggccgtcctcatgatcggagccaaggcgattgggcgccgccccctgagggaggcatggagcaggcgctggcaggcgcctcatctggaagagagctgggcaggcctaaggagctacaaccgaagaagctgcatctgtgccccctttgtggtaagaacttcagcaataattcgaacctgatacgacaccagagaatccatgctgcagaacggctttgcatgggcgtagactgcaccgagatctttggagggaaccctcgatttctgtctctccatagagcccatctcggcgaagaggcccacaagtgtctcgaatgcggaaaatgtttttcacagaacacacacctcacacgccaccagcgtacacacactggggagaagccgtaccagtgtaatatctgtggcaaatgcttcagctgtaatagcaacctccaccgtcatcagagaacccacacaggtgagaagccttacaagtgccctgagtgtggagaaattttcgctcacagctctaatctgttacggcatcaacggatacacaccggcgagagaccctataagtgtcctgaatgcggcaagtctttctctaggagttctcatttggttatacacgaaaggacacatgaacgggaaaggttatatcctttcagtgagtgtggcgaggcagtgtcagactcaaccccttttctcaccaatcatggagcccataaagctgagaagaaactgtttgaatgcctgacatgcggcaagtcctttaggcaggggatgcacctaacccggcaccagaggactcacacaggagagaaaccgtataaatgcacgctgtgcggggagaacttctcccatcgtagcaatctgatccggcatcaacggatccacacgggagaaaaaccttacacctgtcatgagtgcggcgactctttctctcactcctccaacagaattaggcacctgcgcacccatactggagaaagaccgtacaagtgctcggaatgtggggagagtttttccagatcctcacggctcatgtcccaccaacggacacataccggctag

SEQ ID NO: 24844 - DNA, 1755 bp, synthetic construct
  misc_feature 1..1755: note = Description of Artificial Sequence: Synthetic coding sequence
  source 1..1755: mol_type = other DNA
atgcagaagttcttcggcctgccccagaccggcgacctggaccagaacacaatcgaaacaatgagaaaaccaaggtgcgggaacccagatgtggctaattacaacttcttccctaggaagcctaaatgggacaaaaatcaaattacctatcgaatcatcggctatactccagacctggacccggaaaccgtcgacgatgcatttgccagggctttccaggtgtggagcgatgtgacaccactgagattctccaggatacacgatggggaggccgatatcatgatcaattttgggcggtgggaacacggcgatggctatcccttcgacgggaaagacggcctgttagcccatgctttcgcccctggcacgggtgttggtggtgactcccacttcgacgatgacgagttatggaccctcggggaaggccaagtcgtgagggtcaaatacgggaacgctgatggtgagtactgcaagtttccctttcttttcaacgggaaggagtacaattcttgcaccgatacgggtagatcagatggctttctgtggtgtagcaccacttacaattttgaaaaagatggcaagtacggattctgcccccatgaggcgctgttcactatgggggggaatgcagagggacagccatgcaaattccccttccggttccagggtacatcctatgacagttgtacaacagagggccgcaccgatggctataggtggtgcggcacgacagaggactacgatagagacaaaaagtacggcttttgtcccgagacagctatgagcacagtgggtggaaatagcgagggggctccctgtgtgttcccatttactttcctggggaataagtacgaatcctgtacgtccgcagggcgcagcgatggcaaaatgtggtgtgcaaccacagcgaattacgatgacgaccgcaagtgggggttctgtccggaccagggatactccttgtttctagttgctgcccatgaattcggccacgctatgggattggaacacagccaagaccctggtgccctgatggctccaatctacacatacacaaagaacttccgattgtctcaggatgacatcaaaggtatacaggagttatacggggccagtccagatatcgaccttggcaccgggcccacaccaaccctaggaccagtcactccagagatatgcaagcaggacatcgtctttgacgggatcgctcaaatacgcggcgaaatcttttttttcaaagatcgcttcatctggcggacagtaactccccgcgataaaccaatgggcccactgctggtcgcaaccttctggcctgaactgcctgaaaaaatcgacgccgtctatgaagcaccccaagaggagaaggccgtattctttgctggtaacgagtactggatttactccgccagcacactggaacgggggtaccctaaacccctcaccagtctaggtttaccaccggacgtgcagagagtggacgccgcttttaattggtctaaaaataaaaaaacgtacatttttgcgggcgataagttctggaggtataacgaagtgaagaagaagatggaccctggatttcctaagttgatagctgacgcatggaatgctatcccagataatctggacgccgtcgttgatctgcaagggggcggacattcctacttttttaaaggcgcttattacctcaagctcgaaaatcaatctctgaaaagcgtgaaattcggatccatcaagtctgactggttgggttgctag

SEQ ID NO: 24845 - DNA, 1434 bp, synthetic construct
  misc_feature 1..1434: note = Description of Artificial Sequence: Synthetic coding sequence
  source 1..1434: mol_type = other DNA
atgaagagcctgcccatcctgctgctgctgtgcgtggccgtgtgcagtgcctacccattggatggcgccgcgcgcggggaggatacttccatgaacttagtccagaaatatcttgaaaactattacgacttaaagaaggatgttaagcaatttgtccggcggaaagacagtggcccggtcgtaaagaagattcgggagatgcagaaatttttggggctggaggtgacaggcaagttggactctgacacgttggaggttatgcggaagcctcgctgcggcgtccctgatgttggtcatttcagaacctttccggggatccccaagtggcggaagacgcatcttacttatcgcatcgtcaactacacacctgacttacctaaggacgctgtggactcagcagtggaaaaagccctaaaagtctgggaagaagtgacaccactcacctttagtcgcctatatgaaggcgaagctgatattatgatatccttcgccgtgcgcgagcacggggatttctacccatttgacggaccgggcaatgtgctggcacatgcttacgcccccggtcctggcattaacggagacgctcactttgacgatgatgagcaatggactaaagataccacaggaacaaacctgtttctcgtggccgcccacgagatcggccatagtctaggcctcttccatagcgctaacaccgaggccctcatgtacccactgtaccactcattaactgatctcacccgctttaggttgagtcaggacgacattaacggtattcaatccttgtacggccctcctcctgacagtcctgaaaccccactcgtgcccaccgagccggtgcctccagagcctggcactcctgctaactgcgaccccgccctctccttcgatgccgtgagcacactgagaggagagatcctgatatttaaagacaggcatttctggaggaagtctctgagaaagctggaacctgagctccatctgatatctagtttttggccttctctgccgagcggcgtggacgccgcttacgaggtgacctctaaggaccttgtgtttatctttaagggcaatcagttttgggctattcgcgggaatgaagtccgcgcgggttatcctagaggaattcacacccttgggtttcctccgactgtgcgaaaaattgatgcagccatttcagacaaagaaaagaataaaacatatttctttgtggaggataaatattggagattcgacgagaagagaaatagtatggagccgggatttcccaagcagatcgcggaagacttcccaggcattgatagcaaaatcgatgctgtttttgaagagttcgggttcttttatttttttacggggagttcccagcttgaattcgatccaaatgcgaaaaaggttactcacacgttaaaaagcaattcttggctgaattgctag

SEQ ID NO: 24846 - DNA, 804 bp, synthetic construct
  misc_feature 1..804: note = Description of Artificial Sequence: Synthetic coding sequence
  source 1..804: mol_type = other DNA
atgcggctgaccgtgctgtgcgccgtgtgcctgctgcccggcagcctggccctgcctttgccccaggaggcggggggcatgagcgagcttcagtgggagcaggctcaggattacctcaagcggttctacctgtatgactccgagacaaaaaacgcaaactcgcttgaagcaaagctgaaggaaatgcagaagtttttcgggctgcctattaccggcatgttgaactccagagttattgaaatcatgcagaagccccgctgcggcgtacctgatgttgccgagtactctctgttccccaacagccccaagtggacctctaaggtagtcacatatcgcattgttagctacacccgagacctccctcatattacagtagacagactcgtctccaaagccttaaacatgtggggtaaagagattcctttgcacttcaggaaggtagtctgggggaccgccgacataatgataggattcgccaggggagcgcacggggatagctatcccttcgacggacccggcaacacgctcgcgcatgccttcgctccaggcactggcttgggaggtgatgcacacttcgatgaggacgagcgctggacagacggaagctccctggggatcaattttctgtatgctgccactcatgagctgggccatagtttgggcatgggccactcctcagaccctaatgctgttatgtaccctacttacggcaatggtgatccacaaaactttaaactgagtcaagacgatatcaaggggattcagaagctctatggaaaacggtccaactctagaaagaagtag

SEQ ID NO: 24847 - DNA, 2124 bp, synthetic construct
  misc_feature 1..2124: note = Description of Artificial Sequence: Synthetic coding sequence
  source 1..2124: mol_type = other DNA
atgagcctgtggcagcccctggtgctggtgctgctggtgctgggctgttgcttcgccgcaccaagacagaggcagtctactttggttctgttcccaggcgatctgaggacaaatctgaccgaccgccagcttgccgaggagtacctgtaccggtacggatacaccagggtggctgaaatgcgcggggaaagcaagtcgctagggcctgccttgttactcctgcagaagcaattgtccctgccagagaccggtgagctggactccgccactttaaaggctatgaggaccccacgatgcggtgtgcctgacttaggtcggttccagacgttcgagggcgacctgaaatggcaccatcataacatcacatactggattcagaattacagcgaggatttgcccagagcggtcattgatgacgccttcgccagagccttcgccctgtggagcgccgtaactcccctgaccttcacaagagtgtactcacgagacgcggacatcgtgattcaattcggagtggcagaacacggagatggataccctttcgacggaaaagatgggctccttgcacatgcattccctccaggtccaggcattcaaggggacgcacacttcgacgacgatgagctgtggtcgctaggtaagggcgttgtggttccaaccaggtttgggaacgccgatggggccgcttgtcacttcccctttattttcgagggcaggagttactccgcttgcacaactgacgggaggtctgacggtctgccgtggtgctccaccaccgccaactatgacacagatgacaggttcggcttctgccccagcgagaggctctacacacaggacggcaatgcagacggtaagccctgtcagttcccattcatttttcagggccagtcttacagcgcgtgcactactgatggacgtagcgacggttatagatggtgtgctacgacagcaaactatgacagagataagctgtttggcttttgccccaccagagccgacagcactgttatggggggcaatagcgcaggggagctctgtgtgttcccatttacattcctgggcaaggagtacagcacctgtacgtccgagggaagaggcgacgggaggctctggtgtgctaccacatctaactttgacagcgacaagaaatggggcttttgcccagatcaaggatactccctgtttctcgtggccgcccacgaattcggccatgctctgggtctggatcactctagcgtgcccgaggctctcatgtaccctatgtatagattcaccgagggccccccactccataaggacgacgttaacgggattcggcacctgtatggaccgagacctgagccagagccacggcccccaacgactacaacaccccagccgaccgcgcctcccaccgtttgcccgaccgggcccccaactgttcatcctagtgagagacctactgccgggccgacaggtcctccctcagcgggtcctacaggcccaccaacggccggccctagtactgctacgactgtgcccctgtcccccgtggacgatgcttgcaacgtgaacatttttgacgccatcgctgagattgggaatcaactttacctgtttaaggacggcaagtattggcggttcagtgagggccgggggagccggcctcagggtccctttttgattgccgacaagtggccggccctgccaaggaagctcgactctgtctttgaagaacgcctttcaaaaaagctcttttttttttccgggagacaggtgtgggtgtacaccggagcaagtgtgctcggccctcgaagattagataagctcggcctgggagccgacgtggcccaggtcaccggggcactgcggagcggccggggtaaaatgttgctattctctggccggcggctttggcgctttgacgtgaaagcgcaaatggtagacccccggtctgccagtgaggtggatcgcatgttcccaggagtgcctctggatacccacgacgtcttccagtatagggagaaagcatatttctgccaggaccgcttttactggcgggttagctctcggtcagagctgaaccaggttgaccaagtgggatacgttacatacgatatcctgcagtgtcctgaagattag

SEQ ID NO: 24848 - DNA, 834 bp, synthetic construct
  misc_feature 1..834: note = Description of Artificial Sequence: Synthetic coding sequence
  source 1..834: mol_type = other DNA
atgggcggcaacagcgccggcgagctgtgcgtgttccccttcacctttctcggtaaggagtactccaacttcgattcggataagaaatggggcttttgtccggatcagggctattctttatttttggttgcagctcacgagtttggacatgccttaggtctggaccactcaagcgttcctgaggctctcatgtaccctatgtacagatttactgaaggccctccactccataaagacgatgtcaatggaattcgccacctttacgggccacgtcccgagccggagccacgccccccgaccacaactacaccccaacctacagcaccccccactgtatgccccacaggcccccccaccgtgcacccaccgttcctcattgcggataagtggcctgcacttcctcgcaaactcgatagtgtatttgaagagcgtcttagcaagaagcttttctttttctccggccgacaggtctgggtttataccggggccagcgtcctgggaccacgccgactcgataaactgggccttggagcagacgtggcacaggtcacgggagccctccgcagcgggaggggtaagatgcttctcttcagcgggcgtcggctgtggcgttttgacgtcaaagcacaaatggtcgaccctaggagcgccagtgaggtggacagaatgttccctggtgttcccttagatactcatgacgtgttccagtatcgagaaaaggcttatttctgccaggaccgattctactggcgagtgtcctcacgaagtgaacttaaccaggtggaccaggtggggtacgtgacgtatgatattctgcagtgcccagaggattag

SEQ ID NO: 24849 - DNA, 324 bp, synthetic construct
  misc_feature 1..324: note = Description of Artificial Sequence: Synthetic coding sequence
  source 1..324: mol_type = other DNA
atggccggcgaggacgtgggcgccccccccgaccacctgtgggtgcatcaggagggcatctaccgggatgagtaccagagaacatgggtagcagtggtagaagaggaaaccagttttctgcgcgctagggtgcagcagatccaagtgccattaggggacgcagcccgccccagccatttactgacatcacaactgccgttgatgtggcagctctacccagaggagcggtacatggataacaattctcgtttgtggcagattcaacatcacctcatggtgaggggcgtacaggaactgctgctgaaactgttacccgatgactag

SEQ ID NO: 24850 - DNA, 324 bp, synthetic construct
  misc_feature 1..324: note = Description of Artificial Sequence: Synthetic coding sequence
  source 1..324: mol_type = other DNA
atggccggcgaggacgtgggcgccccccccgaccacctgtgggtgcaccaagagggcatctaccgggatgagtaccaacgaacgtgggtggcggtggtcgaagaagaaacttctttcctccgggcccgtgtgcagcagattcaagtgccgctgggagatgcggctcgcccttctcacttgctgacctcacagctcccactgatgtggcagctgtacccagaagagaggtatatggataacaactcaagactttggcagatccaacaccatttgatggtgcgcggagtacaggagttgctacttaagctgctgcccgatgattag

SEQ ID NO: 24851 - DNA, 1329 bp, synthetic construct
  misc_feature 1..1329: note = Description of Artificial Sequence: Synthetic coding sequence
  source 1..1329: mol_type = other DNA
atggtgcggagccggcagatgtgcaacaccaacatgagcgtgcccactgacggagcggtgaccacgagtcagatcccagccagtgagcaggaaaccctcgtccgccccaagcctctcctgctgaaactgctgaagagcgtgggggctcagaaagatacatacacgatgaaggaagttcttttttacctcggccaatacatcatgacgaagcgtctctacgacgagaagcagcaacatatagtgtattgttcgaacgatttattaggggatctctttggagtcccctccttctccgtgaaggagcaccgcaagatctacacaatgatctaccgtaacctggtggtagtgaaccagcaggaagagaactctgacgagctcagtggagagcggcagaggaagcggcataaatccgatagtatcagcctaagtttcgacgagagcctcgccctgtgtgtgatccgggaaatttgctgcgagaggagctcctccagcgagtcgaccggaacaccctcaaatcctgacctagatgccggtgtgagcgaacacagcggagattggctggaccaagactcagtgtccgaccaatttagcgttgagttcgaagtggagtccttggattctgaagattattctctgtctgaagaggggcaggagctttcggacgaggatgacgaggtgtatcaggtgaccgtttaccaggccggtgagtctgacacggattcctttgaggaggacccagagatctctctggctgattactggaaatgtacgtcatgtaatgaaatgaacccaccactgccatcccattgtaatcggtgctgggccttgcgcgaaaattggctgcccgaggacaagggcaaggacaaaggggagatctcagagaaagctaagcttgaaaactctactcaggcagaggaaggtttcgatgtacccgattgcaaaaagacgatcgtaaacgatagtagagagagctgtgtggaggaaaacgacgacaagattacacaggcttctcagtcccaggagtccgaggactatagccagccctcaacatcttcatccatcatttacagctcacaagaggatgttaaggaatttgaacgcgaggagactcaggataaggaggagtctgttgagagctccttgcccctgaatgccatcgagccgtgtgtcatctgccagggccgaccgaagaatggatgcatcgtgcatgggaagacaggtcacctcatggcgtgctttacctgtgctaaaaaactgaagaagcgcaataagccatgtccagtgtgtaggcagccgatccagatgattgtgttaacatatttcccatag

SEQ ID NO: 24852 - DNA, 1311 bp, synthetic construct
  misc_feature 1..1311: note = Description of Artificial Sequence: Synthetic coding sequence
  source 1..1311: mol_type = other DNA
atgtgcaacaccaacatgagcgtgcccaccgacggcgccgtgaccacgtcccaaatccctgccagcgagcaggaaactttagtgaggcctaaaccactgctcttgaaactcctgaagtccgtcggtgcccagaaggacacttatacaatgaaagaagtattgttctacctgggacagtatatcatgaccaagcgcctatacgatgagaagcaacaacatattgtgtattgttcaaatgacctgcttggcgatctgttcggcgtaccctcattttctgtgaaagagcatagaaagatttataccatgatctacaggaacctggtggtcgttaatcagcaagaggagaattctgacgagttgagcggagaacgccagcggaagcggcataagtctgactcgatttccctgtcgtttgacgaatctctggcactgtgcgtgattcgcgagatttgctgtgagaggagtagcagctccgaaagcactggcaccccgtccaatccagacctggatgcgggggtaagtgagcactcaggagattggctggaccaggacagtgtgagcgaccagttcagcgttgagtttgaggtggagtcactagattctgaagactacagcctgtctgaggagggacaggagctttccgacgaggacgacgaagtgtaccaggtcacggtgtaccaagctggggaatcagatactgactcctttgaggaagatcctgagatttcactcgctgactactggaaatgtacaagctgtaatgagatgaatcctccattacccagccactgcaatcgctgttgggccctacgagaaaattggctgcctgaagacaaagggaaagataaaggtgagattagcgagaaagctaagctggagaacagcacccaagctgaggagggcttcgatgtacctgattgcaagaagacaattgtcaacgactcccgggagagctgtgtggaagaaaatgatgacaagattactcaagccagtcagtcccaggagagcgaagattacagccagccctccacctccagttcgatcatctactcctcacaagaggacgtgaaggaattcgagcgagaggagacccaggataaagaagaaagtgttgaatcttcccttccacttaatgccatcgagccctgtgtgatctgtcaagggcggcctaaaaacggctgcattgtgcatggtaagactggtcacctcatggcctgctttacctgcgctaagaagttaaagaaacgcaacaagccttgtccagtgtgtcgacagccgatccagatgatagttcttacctatttcccgtag

SEQ ID NO: 24853 - DNA, 966 bp, synthetic construct
  misc_feature 1..966: note = Description of Artificial Sequence: Synthetic coding sequence
  source 1..966: mol_type = other DNA
atgtgcaacaccaacatgagcgtgcccaccgacggcgccgtgaccactagtcagatacctgcatctgagcaagagacactggtgaggcctaagccccttctgctgaagctgctcaagtccgtgggggcccagaaggacacctacacgatgaaggaggatctggacgcgggcgtgagtgagcacagcggagattggctagaccaagactctgtgagcgaccagttcagtgtggagttcgaggtcgagtccctggactctgaggattacagcctctctgaggagggccaggaactgtcagacgaggacgacgaggtgtatcaggtgactgtgtaccaggccggtgagtctgataccgacagcttcgaggaagaccccgagatctcccttgcagactactggaaatgtacttcttgtaacgaaatgaatccgccgctcccttcacattgcaatcgctgctgggctcttcgggagaattggttacctgaggacaaaggtaaagataaaggggaaattagtgaaaaagcgaaactggagaacagcacgcaagctgaggaggggtttgatgttccggactgcaaaaaaactattgtaaacgactccagggaaagctgtgtagaggagaatgacgacaaaatcacacaggcatcccagagccaagagagcgaagattattcacagccaagcacgtcttctagtatcatttatagctcgcaagaggacgttaaagaattcgaacgggaggagactcaagataaggaagaatcagttgagagcagcctgcccctcaatgcgatcgaaccctgcgtcatatgtcaaggccgacctaaaaacggttgcatagtccacggcaagaccggtcatctgatggcatgtttcacttgcgctaaaaaattgaaaaaacgaaacaaaccatgtcctgtctgtcgacagccaatacagatgatcgtattgacctacttcccatag

SEQ ID NO: 24854 - DNA, 1359 bp, synthetic construct
  misc_feature 1..1359: note = Description of Artificial Sequence: Synthetic coding sequence
  source 1..1359: mol_type = other DNA
atggtgcggagccggcagatgtgcaacaccaacatgagcgtgcccactgacggtgcagtgacaacctcacagataccggccagcgagcaggaaactctggtaaggccaaaaccgctgctgctgaagcttctgaagtctgtgggagcgcagaaagacacatacaccatgaaagaaaaaatctacaccatgatctaccggaatttagtcgtggtaaaccagcaggagagtagtgattcagggacttccgtgtctgaaaaccggtgccacctggaaggcgggagtgaccaaaaggacctggtgcaggaacttcaagaggagaaaccaagttcttcccatctggtgtcacggccttctacctcatcccgtcggcgcgccatcagtgagacagaggaaaatagtgatgaattgtctggggaaagacagcggaagcgccacaaatctgactctatcagcctgtcatttgatgagagtttggcactgtgtgtgatccgggaaatatgttgtgagcgttcgtcgtcatctgaaagcacaggtacaccctcaaatccagacttagatgctggcgtatccgagcacagcggtgactggttagaccaggacagcgtgtctgatcagttcagcgtcgaattcgaggttgagagtctggacagcgaagactactcgctgagcgaggagggccaagagcttagcgatgaggatgacgaggtttatcaggtgaccgtctatcaagctggcgaaagcgacacagactcttttgaagaggatcccgagatcagcttagccgactattggaaatgtacctcctgcaacgagatgaatcctcccctgccctcacattgcaataggtgctgggccttgagagagaattggttacccgaagacaagggtaaggacaagggggaaatttccgaaaaagccaaactggagaattccacccaggccgaagaggggttcgacgtgccagattgcaaaaaaacaattgtcaacgacagccgcgaaagctgtgtcgaggaaaacgatgataagatcacacaagccagccaaagccaggaaagcgaagactatagtcaaccatctaccagcagtagtatcatatattcttctcaggaggacgtgaaagagttcgaaagggaagaaacccaagataaagaagagtctgtcgagtccagcctccctttgaatgctatcgaaccatgcgtaatttgtcagggcagacctaaaaacggctgtattgtgcatgggaaaactggacaccttatggcatgcttcacatgcgctaagaaactcaagaagaggaacaagccttgtcctgtgtgtaggcagcccatccagatgatcgttctgacctattttccctag

SEQ ID NO: 24855 - DNA, 771 bp, synthetic construct
  misc_feature 1..771: note = Description of Artificial Sequence: Synthetic coding sequence
  source 1..771: mol_type = other DNA
atgtgcaacaccaacatgagcgtgcccaccgacggcgccgtgaccacctctcaaattccagcatccgaacaggagacactggtccgccccaaaccccttcttctcaaattgctcaaaagcgtgggagcccagaaagatacttacacaatgaaagaggtcctgttctacttaggccagtacataatgaccaaacggttatatgatgaaaaacagcaacatatcgtctactgttctaatgatctactgggcgacctgtttggcgtgccgtcattcagcgtcaaggaacataggaagatctatactatgatctaccgtaatttggttgtggtcaaccaacaggagtcctctgacagtgggactagcgtatccgaaaataggtgccacctcgaaggaggatcagatcagaaagatctggtgcaggaacttcaggaagagaaaccatcatcctcgcatcttgttagtcgtcctagcacatcctctagacgtagggcaatttctgaaacagaggagaactccgacgaattgagtggcgaacgacaaagaaaacgtcacaagtctgatagcatttcactcagctttgacgaatctctggccctatgcgtgatcagagagatttgctgtgaacgatcctcctcctccgagtcaacaggtacaccttccaaccccgatctactccttggcgtgtaccaggtcacggtgtatcaggcgggtgagtcagacaccgactcattcgaggaagaccctgaaattagcctggcacactatctgtag

SEQ ID NO: 24856 - DNA, 798 bp, synthetic construct
  misc_feature 1..798: note = Description of Artificial Sequence: Synthetic coding sequence
  source 1..798: mol_type = other DNA
atgagcgtgcccaccgacggcgccgtgaccaccagccagatccccgcaagcgagcaggaaactttagatctggacgccggtgtgtctgagcactccggggactggctggaccaggatagtgtgtctgaccagttcagcgttgagtttgaggtggagtccctcgatagcgaggactactccttatccgaggaagggcaggaactttcagatgaggatgatgaagactactggaagtgtacatcttgcaatgaaatgaacccgcctttgccatcgcactgtaatcgctgctgggccctccgggagaattggctgcccgaagacaaggggaaggataagggtgagatctctgagaaggcgaaactagaaaactctactcaggcagaggaggggtttgacgtacctgactgtaaaaagaccatcgtgaatgactcaagagagtcctgtgtcgaagaaaacgatgacaaaatcacacaggcctcccagtcccaggaatctgaagactactctcagcccagcacaagtagctctattatctatagctcacaggaggacgttaaagaatttgagcgggaagaaactcaggacaaggaagaaagcgtggagagctctctgccactgaatgcaatagagccctgcgtcatttgccagggcagacctaagaatggctgtattgttcatggaaagacaggacatcttatggcctgtttcacttgcgccaagaagctcaagaagcggaacaagccttgccccgtgtgtcgtcaacctattcagatgatagttttaacttacttcccctag

SEQ ID NO: 24857 - DNA, 1401 bp, synthetic construct
  misc_feature 1..1401: note = Description of Artificial Sequence: Synthetic coding sequence
  source 1..1401: mol_type = other DNA
atgtgcaacaccaacatgagcgtgcccaccgacggcgccgtgaccacgtcacaaattccagcaagcgaacaggaaacactcgttcttttctaccttggccagtacataatgactaaacggttgtacgacgagaagcagcaacacattgtgtattgcagtaatgatctgttgggcgatctgtttggtgtccctagcttttctgtaaaggagcataggaaaatatacaccatgatctataggaatctcgtggttgtcaatcaacaagaatcttccgacagcggaactagtgtgagcgaaaacaggtgtcacctggaaggcggcagtgatcaaaaagacctggtgcaagaactccaagaagagaagcctagctcatctcacttagtgtctcgaccttccacgtctagccggagacgggccattagtgagacagaggagaactcagatgagctgtcaggggagcggcagaggaagcgtcacaagagcgatagcatttccttgtcattcgacgagtccctcgccctgtgtgtcattagggagatttgctgcgaaagaagctcctcctccgaaagcacaggaaccccctccaatccagatctggatgctggggtgtcagaacattcaggggactggttagaccaagatagtgtttctgaccagttttcagtcgagtttgaagtagagtccttggattccgaggattattccctcagcgaagaaggacaagaacttagcgacgaggatgacgaagtttaccaagtcaccgtctaccaagcaggtgagtccgatacagattcttttgaggaggacccagaaatcagcttggcggactactggaaatgtacatcatgcaatgagatgaacccgccactacccagtcattgcaacagatgctgggcccttcgagagaattggctgcccgaggataaaggaaaggacaagggcgaaatcagcgaaaaagccaaattggagaattctacacaggccgaggagggcttcgatgtgccagactgtaaaaagaccattgttaatgatagtagggagtcttgtgttgaggaaaatgacgacaaaattactcaggcatctcaatcacaggaaagcgaagattattcacagcccagcacctcaagttccataatttacagttctcaggaggacgtgaaagagttcgagcgggaagaaacgcaagataaagaagagtccgtcgagagctcccttcccttgaatgctatcgagccttgcgttatctgccaaggaaggccaaaaaacggatgtattgtgcacgggaaaacaggacacctaatggcttgttttacctgcgcaaagaaactgaagaagcgcaataaaccatgtcctgtgtgtcgccagccgatccaaatgattgtgctcacgtactttccatag

SEQ ID NO: 24858 - DNA, 966 bp, synthetic construct
  misc_feature 1..966: note = Description of Artificial Sequence: Synthetic coding sequence
  source 1..966: mol_type = other DNA
atgtgcaacaccaacatgagcgtgcccaccgacggcgccgtgaccacatctcagatcccagcaagcgagcaggaaaccttggtgagacctaaacctctgctcctgaagctcctgaagtccgtcggggcccagaaggacacatacactatgaaggaggatcttgatgctggagtcagcgagcactcaggagactggcttgaccaagacagcgttagcgatcagttctccgtggaatttgaggtagaatcccttgatagcgaggattacagtctgtccgaagaggggcaggaactgagcgacgaggatgacgaagtctaccaggtcactgtctatcaggctggcgagagtgacaccgactcattcgaggaagaccccgaaatctcgctggccgattactggaagtgcacatcatgcaacgaaatgaatcccccattgccttcgcattgtaatcgatgttgggcgctacgggaaaactggctgccagaagacaagggaaaggataaaggggaaatcagcgaaaaagctaaactggagaatagtacgcaagccgaagaaggttttgatgttcccgactgcaagaaaacgatcgtgaatgattcccgcgaatcgtgcgttgaagagaacgatgacaagatcacccaggcatcacagtcccaggagagcgaggactactcccagccatcaacctctagttcaattatctacagctcacaggaggatgtgaaagagttcgagagagaagagactcaagataaggaagagtctgtagaatcgtcgctgccccttaacgcgattgaaccttgcgtgatctgtcaaggcaggcccaaaaacggttgtatcgtgcatggcaagactggacatttgatggcatgcttcacttgcgcgaaaaagctcaagaaacgcaacaagccatgccccgtctgtagacagcccatccagatgattgtgctcacatatttcccttag

SEQ ID NO: 24859 - DNA, 480 bp, synthetic construct
  misc_feature 1..480: note = Description of Artificial Sequence: Synthetic coding sequence
  source 1..480: mol_type = other DNA
atgtgcaacaccaacatgagcgtgcccaccgacggcgccgtgaccacgtctcagatccccgctagcgagcaagagactctggtaaggcctaagcccctccttctgaagctgctcaagagcgtcggggctcagaaggatacttacaccatgaaggaagaccttgacgctggcgttagcgagcatagcggagactggttagatcaggacagtgtctcagatcagttctcggtggagtttgaagtggagtctctcgattccgaggactacagtttgtctgaagagggccaggagctgtccgacgaggacgacgaggtctaccaagtgaccgtgtaccaggccggtgagagtgatacagactctttcgaagaggaccccgagataagcttagccgattactggaaatgcctgaaaaagaggaataaaccttgtcctgtctgccgccagccaatccagatgattgtattgacatacttcccttag

SEQ ID NO: 24860 - DNA, 891 bp, synthetic construct
  misc_feature 1..891: note = Description of Artificial Sequence: Synthetic coding sequence
  source 1..891: mol_type = other DNA
atgtgcaacaccaacatgagcgtgcccaccgacggcgccgtgaccacatcacagatccctgccagtgagcaggagaccctcgaccttgatgccggcgtcagcgagcactctggcgattggttggatcaagattccgtctctgaccaattcagcgtcgaatttgaggttgaatccctggactctgaggattactcacttagcgaagaaggtcaggaactcagtgatgaggacgacgaggtgtaccaggtgaccgtctaccaggcaggcgaatccgataccgacagctttgaggaagaccctgaaatcagccttgctgactactggaagtgcaccagctgcaacgagatgaacccacctctgccaagccattgtaataggtgctgggccctgcgcgaaaattggcttcccgaagataagggaaaggacaaaggcgagatttcagagaaagctaagttagaaaattcaacacaagctgaagaaggtttcgatgtgcccgactgcaagaaaaccatcgtcaatgactcccgcgaaagctgcgtggaggagaatgacgacaaaatcacccaggccagccaatcccaggagtcagaggattattcacagccaagcacgtcttccagcataatatactccagccaggaagatgtgaaagagtttgaaagagaagagacacaggataaagaagaaagcgtggagagctctctgcctctcaacgccatcgaaccttgcgttatatgccaagggagaccgaagaacggttgcatcgtgcatggcaagaccggccacctgatggcttgcttcacctgtgccaagaaactcaagaagaggaacaagccttgcccagtgtgtaggcagccaattcagatgattgtcctgacatacttcccatag

SEQ ID NO: 24861 - DNA, 732 bp, synthetic construct
  misc_feature 1..732: note = Description of Artificial Sequence: Synthetic coding sequence
  source 1..732: mol_type = other DNA
atgtgcaacaccaacatgagcgtgcccaccgacggcgccgtgaccactagccaaattcccgcgtcggagcaggaaacccttgtgagacctaaaccgctgctactcaagctgcttaagagcgtcggggcccaaaaggacacatacacaatgaaggaggactattggaagtgcacgtcctgcaatgagatgaacccccccttgccttctcactgcaacaggtgttgggcactacgtgagaattggctgcccgaagacaagggaaaagataaaggagagatatcagaaaaagccaagctcgagaactccacccaggcagaggaagggttcgatgttccagattgcaaaaagacaatcgttaacgactctagggaaagttgtgtcgaagagaacgatgacaaaatcacccaggcaagtcaatcccaggaatccgaagattattcgcagccgtccacaagttcctcgatcatctatagttcccaggaagacgttaaggaatttgaacgtgaggaaacccaagacaaggaggaatcggtggagtcaagtctccctctgaatgccatagagccctgcgtcatctgccaggggaggccaaaaaacggttgcattgtgcatgggaagactgggcaccttatggcctgcttcacctgcgctaaaaaactaaaaaaacgcaataagccctgcccggtctgtcgtcaacccattcagatgatcgtgcttacatattttccatag

SEQ ID NO: 24862 - DNA, 657 bp, synthetic construct
  misc_feature 1..657: note = Description of Artificial Sequence: Synthetic coding sequence
  source 1..657: mol_type = other DNA
atgtgcaacaccaacatgagcgtgcccaccgacggcgccgtgaccaccagccagattcccgccagcgaacaggagaccttagattactggaagtgtacgagctgcaatgaaatgaatccccctctgccttcccactgtaataggtgctgggctctgcgcgagaattggctgccagaggataagggaaaggacaagggagagatctccgaaaaggccaagctagagaactccacacaagccgaggagggcttcgacgtgccagactgcaaaaagacaattgtgaacgacagcagagagtcctgcgtggaagaaaacgacgataagattacccaggccagccagtctcaagagagcgaggattattctcaacccagcacctcaagctcaatcatctatagcagccaggaagacgtaaaggagtttgaacgggaagagacgcaagataaggaggagagcgtcgagagctccctccctctgaacgctatcgagccgtgcgttatttgccaggggcgccccaagaacggctgtattgtccatggcaagaccggccacttaatggcctgcttcacatgtgccaaaaaattgaaaaaacgaaacaagccttgcccagtgtgcagacaacccatccagatgattgttctaacatacttcccttag

SEQ ID NO: 24863 - DNA, 657 bp, synthetic construct
  misc_feature 1..657: note = Description of Artificial Sequence: Synthetic coding sequence
  source 1..657: mol_type = other DNA
atgtgcaacaccaacatgagcgtgcccaccgacggcgccgtgaccacatcccaaattccggccagcgagcaggaaactctcgactattggaaatgtactagttgcaatgagatgaatccccctctgccgtctcattgtaacaggtgctgggccctccgtgagaattggctgcccgaggacaaaggaaaagacaagggtgagatttctgagaaggcgaaattagagaacagcacacaagcagaggagggcttcgatgtccccgattgtaagaagactattgtgaatgacagtcgcgagagctgcgtggaggaaaatgatgataagatcacacaggcaagccagtcacaggagtcagaagactattcccaaccctccacgagctcatctatcatatatagttctcaggaggatgtgaaggagtttgaacgggaggaaacacaggataaggaagagagcgtggagagcagtctgcctctgaacgccattgaaccttgtgtgatctgccagggaagaccaaagaatggctgtatcgtgcatgggaaaaccgggcacctaatggcgtgcttcacctgcgctaagaagctcaagaagaggaacaagccatgcccggtgtgccggcagccaattcagatgattgtgcttacctactttccctag

SEQ ID NO: 24864 - DNA, 771 bp, synthetic construct
  misc_feature 1..771: note = Description of Artificial Sequence: Synthetic coding sequence
  source 1..771: mol_type = other DNA
atgtgcaacaccaacatgagcgtgcccaccgacggcgccgtgaccacaagtcagatccctgccagcgagcaggagacgctcgtgagacccaagccactccttctgaagctactgaagtctgtcggagcccagaaagatacttacacaatgaaggaagtgcttttctatctgggccagtacataatgacgaaacgactatatgacgaaaaacagcagcacatcgtctattgcagtaacgaccttctcggcgatctgttcggagttcccagtttttccgtcaaggagcacagaaaaatctacaccatgatctaccgcaacttggtggtggttaatcagcaggagagcagcgattcaggtacaagcgtgagtgagaaccgatgccacctggaaggtggcagcgatcagaaggatctggtgcaggaattacaggaggagaagcctagttcttcgcacttggtgtcacgtcccagcacatcttccagaagacgggccatcagcgaaactgaagagaactctgacgagctgtccggtgagcgccagaggaaacgtcacaagagtgattctatctctctttcattcgacgagagtttagctctgtgtgtgatacgagagatttgctgcgaacgaagttcaagtagcgaatcaacaggcacaccaagtaaccctgatctcgacgccggcgtgtaccaggtgacagtctaccaggcaggcgaatccgacactgatagtttcgaggaggatccggagatctccttagccgactactggtag

SEQ ID NO: 24865 - DNA, 813 bp, synthetic construct
  misc_feature 1..813: note = Description of Artificial Sequence: Synthetic coding sequence
  source 1..813: mol_type = other DNA
atgtgcaacaccaacatgagcgtgcccaccgacggcgccgtgaccaccagccagatccccgccagtgagcaggaaactttggatcttgacgcgggtgtatcagagcattctggggactggctggatcaggattccgtctcggaccagttctcggtggaatttgaagttgagagcttagactctgaggactacagtctgtccgaagaaggacaagaactttccgacgaggatgacgaggactactggaagtgcacgagctgtaatgaaatgaatccaccactgcccagtcattgcaataggtgttgggcacttcgggagaactggctgcccgaagacaaaggaaaggataagggcgagatatccgaaaaggcaaagctcgagaactctactcaggccgaggaagggtttgacgtcccggactgtaagaaaacaattgtaaacgacagccgggaaagctgcgtcgaggagaacgacgataaaattactcaggcctcccagagccaggaaagtgaagattattcccagccgtcaacgagctcgtctatcatctactcatcacaggaggacgtgaaggagtttgagagggaggagacccaagataaagaagaatcggtggagtcttccctcccgctgaacgcgatcgagccatgcgtcatttgccaaggaaggcctaagaatggctgcatcgtacacggaaaaacgggccacctgatggcctgttttacatgtgccaaaaaactcaaaaagcggaataagccctgccccgtttgccgccagcctatccagatgattgtgttaacatactttccttag

SEQ ID NO: 24866 - DNA, 1494 bp, synthetic construct
  misc_feature 1..1494: note = Description of Artificial Sequence: Synthetic coding sequence
  source 1..1494: mol_type = other DNA
atggtgcggagccggcagatgtgcaacaccaacatgagcgtgcccacggacggtgccgtcactacgagccagatccccgcatctgagcaagaaacgctcgtgagacctaaaccattactgctcaagcttctgaagtctgtcggagctcaaaaggacacatatacaatgaaggaagtgctgttctatctgggccagtacattatgactaagagattatacgacgagaaacaacaacacattgtttactgtagcaacgacctgctgggagacttattcggagttccatccttttccgtcaaagaacaccgcaagatatacacgatgatctacaggaacctggtcgttgtcaaccagcaggaaagcagcgactcaggcacttccgtttcagagaatcgttgtcatctggaggggggcagtgatcaaaaagatctcgttcaggagctgcaagaggaaaaaccatcttcatcccatctggtgagtcgtccatccacctcaagtcgaagaagagctattagtgaaaccgaggagaatagtgatgagttgtccggtgaaagacagaggaaacggcataagtcagacagcatctcactctcctttgacgagtctctcgccctgtgcgtaataagggaaatttgctgcgagcgcagcagctcgagtgaaagtactgggaccccaagcaaccctgacctagatgccggcgttagcgagcactccggcgattggttggatcaggattccgtcagcgaccaattcagcgtagagttcgaagtggagagccttgatagcgaggattactcattgtccgaagagggccaggagttgtccgatgaagacgacgaagtttaccaggtcaccgtgtaccaggccggagagtccgatacggatagtttcgaggaggaccccgagatcagtctagctgactactggaagtgcacgtcttgcaacgaaatgaatccacccctgccgagtcattgcaaccgctgttgggccctgcgggaaaactggttgccagaagacaaggggaaagataagggcgagataagcgagaaggccaaactggagaattctacacaggccgaggagggtttcgatgtaccagactgcaagaagaccattgtcaacgatagccgggagagctgcgtggaggaaaacgacgacaagatcacccaggcatcgcagagccaggagtccgaggattactcgcagccctctacgtccagctctatcatctactcttcacaggaggatgtgaaggagtttgaaagggaagagacccaagataaagaggaaagcgtcgagagcagtctgcccttgaatgctatcgaaccttgcgtcatttgccaaggccgacctaaaaatggttgcatagttcacggcaagacgggacatctgatggcgtgcttcacctgcgcgaaaaagttgaaaaaaaggaataagccctgtcctgtgtgtagacaaccgattcagatgatcgtgctcacgtatttcccttag

SEQ ID NO: 24867 - DNA, 393 bp, synthetic construct
  misc_feature 1..393: note = Description of Artificial Sequence: Synthetic coding sequence
  source 1..393: mol_type = other DNA
atgtgcaacaccaacatgagcgtgcccaccgacggcgccgtgaccaccagccagatccctgcttcagagcaggagaccctcgttcgccccaagcctctgttacttaaactccttaaaagcgttggggcccagaaggacacatatacgatgaaggaatttgagagagaagagacccaggacaaagaggagagcgtggagagtagcttgcccctgaatgccatagagccatgtgttatctgtcaggggaggccgaaaaatggatgcattgttcacggaaagacgggacatctgatggcttgttttacctgcgccaagaaactgaagaagcggaataaaccttgcccagtatgcagacaacctatccaaatgatcgtcctgacttattttccctag

SEQ ID NO: 24868 - DNA, 774 bp, synthetic construct
  misc_feature 1..774: note = Description of Artificial Sequence: Synthetic coding sequence
  source 1..774: mol_type = other DNA
atgtgcaacaccaacatgagcgtgcccaccgacggcgccgtgaccacatctcaaatccccgctagcgagcaggagactctggtgagacctaaaccgttgctgctgaagctccttaagagtgtcggcgcccaaaaagacacatataccatgaaggaggtgctattctacctgggacaatatattatgacgaaacggctctacgatgagaagcagcagcatatcgtttactgtagcaatgacctcctgggcgatctcttcggcgttcctagcttctcggtcaaggagcaccgaaagatttacactatgatctacagaaatctggtggtggtgaaccaacaggagtcttccgacagcgggactagtgtctctgaaaacagatgccacttagagggcggcagcgatcagaaggatcttgttcaggagctgcaggaagagaaaccttcctcatctcacctggtgtcccgaccatctacaagcagtcgtagacgtgctattagtgagacagaagagaactccgacgagctgtccggcgaaagacaacgcaagagacataaatccgactctatttccctgtcatttgatgaatctctggcgctgtgtgtgattagagaaatctgctgtgaaaggagctctagttctgaaagcaccgggacgccttctaatcctgatctagatgctggggtgagcgaacacagtggagactggttggaccaagactcagtgtcagaccagttctccgtggaatttgaagtcgagtctctggatagtgagtag

SEQ ID NO: 24869 - DNA, 891 bp, synthetic construct
  misc_feature 1..891: note = Description of Artificial Sequence: Synthetic coding sequence
  source 1..891: mol_type = other DNA
atgtgcaacaccaacatgagcgtgcccaccgacggcgccgtgaccacatcccaaatcccagcgtccgagcaggaaaccctggatctggacgccggagtgtcagagcatagtggcgactggcttgaccaggattcggttagtgatcagtttagcgtcgagttcgaagtcgaatcacttgacagcgaagactacagcctttccgaagagggtcaggaactgtccgatgaagatgatgaagtttaccaggtgacagtataccaggctggtgaaagcgatactgacagcttcgaagaggacccagagataagtctggccgactactggaaatgtacctcctgtaacgagatgaaccctcctctgccatcgcactgtaacagatgttgggctttaagggaaaattggctgccggaagacaagggcaaggacaaaggtgaaatcagcgaaaaggcgaaactggagaattctactcaagcagaggaaggatttgacgtgcctgactgcaaaaagacaatcgtcaatgattcccgtgagtcctgtgtggaagaaaacgatgacaaaattacacaagcctctcagtctcaggagtccgaggactattcacaacccagcacaagttctagtatcatttactccagccaagaagacgtcaaggagttcgagagggaggaaacccaggacaaagaggaatctgtggaatccagccttcctcttaacgcgattgagccctgcgttatatgtcagggccgcccaaaaaacggatgtattgtgcatgggaagacgggacatctaatggcttgtttcacatgcgcaaaaaaattgaagaaacggaataagccatgccccgtgtgtaggcagcccattcagatgattgtgctcacatactttccctag

SEQ ID NO: 24870 - DNA, 1341 bp, synthetic construct
  misc_feature 1..1341: note = Description of Artificial Sequence: Synthetic coding sequence
  source 1..1341: mol_type = other DNA
atgtgcaacaccaacatgagcgtgcccaccgacggcgccgtgaccacctcgcagatccctgcttccgagcaggagacactagtgcgccccaaaccactgttgcttaagctgctcaagagcgttggggcccagaaggacacatacacaatgaaagagaagatatataccatgatttaccgaaacctggtggtggtgaatcagcaggagtctagtgacagtggcacatcagtgagtgaaaataggtgccatcttgaggggggcagtgaccagaaggacctagtgcaggagctgcaggaagaaaaaccgtcctcaagccaccttgtgtctaggccaagcacgtcaagcagaagacgggcaattagtgagacggaggaaaactcagacgaattatcgggcgagcggcagcgaaagaggcacaagtctgactccatcagtctgagttttgatgagagcctcgcactgtgtgtgataagagagatctgttgcgagaggagcagctctagcgagtctacaggcactccaagcaaccctgacctggacgctggcgttagtgaacactccggcgattggctcgatcaggattctgtgagtgaccagttcagcgtagagttcgaagttgagagcctggactcagaggactatagcctgtcggaggagggccaggagctgagcgatgaagacgatgaggtctatcaggtgaccgtataccaggctggcgaatccgacactgacagctttgaggaagatcccgaaatatcgctggctgactactggaagtgtacctcatgcaatgagatgaacccgcccctgccgtcacattgcaaccggtgttgggccctgcgagagaactggttgccggaggataaaggtaaagacaagggggagatcagtgagaaggcaaagctcgagaactcaacccaggcagaagaggggttcgacgtccctgactgtaagaaaacaatcgtgaacgactcccgagagagctgcgttgaggagaacgatgacaagatcacccaggcaagtcagtcacaagaatctgaagactactctcagccttctacatcatcaagcatcatatatagtagtcaggaagacgtgaaagagttcgaacgtgaagaaactcaggacaaggaggagtcggttgagagttctctgccactgaatgctatcgagccttgcgtcatctgtcagggacgacccaaaaacggatgcattgtccacggtaaaacaggacatcttatggcctgtttcacctgcgccaagaagctgaagaaaaggaataagccgtgcccagtgtgtcgacagcctatccaaatgattgtgctaacgtatttcccatag

SEQ ID NO: 24871 - DNA, 642 bp, synthetic construct
  misc_feature 1..642: note = Description of Artificial Sequence: Synthetic coding sequence
  source 1..642: mol_type = other DNA
atgcccaacttcgtggtggactggcgggtgtacaccgacagcctgtttctgactgtcgattttggtctgtgtgccgaggagagctctacctccaggaaaagaacaacagaggatgacatacccactttgcctacctcagaacacaagtgtatccacagcagagaagacgaagacttaatcgagaaccttgcgcaggacgaaacatccagactggatctgggtttcgaagaatgggacgtggcagggctcccgtggtggttcctgggaaatttacgcagtaactacacaccgcgctctaacggatccacagatctacagacaaaccaggatgtaggaacagctatagtcagtgacaccacagatgatttgtggttcctgaatgaaagtgtcagtgagcagctgggagttggcatcaaagtagaggcagccgacacagagcaaacttccgaagaggtgggtaaggtctctgacaaaaaagtcattgaggttgggaagaatgacgacctagaagacagtaagtcgctgtccgacgatactgatgtggaagtgacatcggaggatgagtggcagtgcacagaatgcaagaaattcaattctccatcaaagcgttactgcttccggtgttgggccttgcgaaagtag

SEQ ID NO: 24872 - DNA, 396 bp, synthetic construct
  misc_feature 1..396: note = Description of Artificial Sequence: Synthetic coding sequence
  source 1..396: mol_type = other DNA
atgaccagcttcagcaccagcgcccagtgcagcaccagcgacagcgcctgccggattagtcctgggcagatcaaccaggttcggcctaaactcccattgctgaagatactccacgcggctggagcgcaaggtgagatgttcactgtgaaggaggtaatgcattatctcggacaatatatcatggtcaagcagctctacgaccaacaggaacagcacatggtgtactgtggtggggatctgttaggcgaattactggggaggcagtcattcagcgttaaggatcccagtcccctttacgatatgctgcgcaagaatctggtgacactggcgacggctactactgagatggggcatctgttctgccggatcagtcatgctcttgagctcgctgattag

SEQ ID NO: 24873 - DNA, 1473 bp, synthetic construct
  misc_feature 1..1473: note = Description of Artificial Sequence: Synthetic coding sequence
  source 1..1473: mol_type = other DNA
atgaccagcttcagcaccagcgcccagtgcagcaccagcgacagcgcctgtagaatctcacctgggcagattaaccaggtccggccaaagttaccactattaaagatcctgcatgcagccggcgcccagggcgagatgtttaccgtgaaagaggttatgcattatctgggtcaatacattatggtaaaacagctctacgaccagcaggaacaacatatggtctattgcggaggggacctgctgggggagctcctgggcaggcagtcattctcagtgaaagacccaagtcccctctacgatatgctgcggaaaaatctggtgactttggcaacagccacaaccgatgcagctcagactctcgcactcgctcaagaccactcaatggatataccttcccaggatcagctgaaacagagcgcggaagaatccagcacttcccgtaaaaggacgactgaggatgacatccccacactgccaacctcagaacacaaatgcatccattccagggaagacgaggatctcatagaaaacctggcccaggacgagacttccaggttggatttgggtttcgaagaatgggacgtggcaggcctgccttggtggtttctagggaatctgcgctcaaattacacacctaggagcaacggcagcaccgaccttcagacaaaccaggatgtgggcactgccattgtgagcgatacaacagatgacctttggttcctgaacgaatcagtgtcagagcagttgggggtgggaattaaggtagaggcagcggatacagagcagacatcggaagaagttggaaaggtgtccgacaaaaaagtgattgaggtgggaaaaaacgacgatctggaggactcaaaatcattgtctgatgatacagacgtcgaagtcacatctgaggatgaatggcaatgtaccgagtgcaaaaagttcaatagtccttccaaaagatattgtttcagatgctgggctctgcgcaaggattggtacagcgactgcagtaagctaacacactcattgtcaacctccgatattactgcgattccggaaaaggaaaacgaagggaatgatgttcctgactgcagaaggacaatatcggcccctgtggtgagaccaaaggatgcgtatatcaaaaaagaaaacagcaagctcttcgacccctgcaattcagtggaatttctcgacctagcacacagctcagagtcccaggaaacaatctcttcaatgggcgaacagttggataaccttagcgagcagaggaccgacacagaaaacatggaggactgtcaaaacttgttaaagccatgttctttgtgcgaaaaacggccccgggatggaaacattatacacggtcgcacagggcatctggtcacctgctttcactgcgctagacggttaaaaaaagccggcgccagctgtcccatttgcaagaaagaaatacaattggtgataaaagtcttcattgcctag

SEQ ID NO: 24874 - DNA, 495 bp, synthetic construct
  misc_feature 1..495: note = Description of Artificial Sequence: Synthetic coding sequence
  source 1..495: mol_type = other DNA
atgaccagcttcagcaccagcgcccagtgcagcaccagcgacagcgcgtgccgtattagccctggtcagatcaatcaggagaacgaaggtaacgacgtgcctgactgtcggcgtacgattagcgcacccgtcgtcagaccaaaagacgcttacatcaagaaagaaaattcgaagctgttcgacccttgcaatagtgtagagttcctcgaccttgctcacagctctgaatcgcaggagactatttctagcatgggggagcagctggacaacctgtctgagcaaaggactgacaccgaaaatatggaggactgtcagaatctgctcaagccttgtagcctctgtgagaagagacctagggacgggaacattattcacggaaggaccggccatctggtaacatgcttccactgtgccagaagactgaaaaaggctggtgcctcatgccccatttgcaagaaggaaatccaattagtgatcaaggttttcattgcttag

SEQ ID NO: 24875 - DNA, 423 bp, synthetic construct
  misc_feature 1..423: note = Description of Artificial Sequence: Synthetic coding sequence
  source 1..423: mol_type = other DNA
atgaccagcttcagcaccagcgcccagtgcagcaccagcgacagcgcctgcagaatatcaccgggccaaatcaaccaggtccggcccaaactgcctctgctgaagatcctgcacgccgcaggcgcccaaggggagatgtttacggtgaaggaagtaatgcattaccttggccaatatattatggttaagcaactgtatgatcagcaagaacagcatatggtctattgtggtggcgacctgctcggagagctgctggggcgccagagttttagtgtaaaagaccccagcccattgtatgatatgcttaggaagaatctcgtcacgcttgcaacagccacgacggcgaagtgcaggggcaagtttcactttcagaagaaaaactatcggagacgataccctcacaccgcctacctgcgcgcatag

SEQ ID NO: 24876 - DNA, 516 bp, synthetic construct
  misc_feature 1..516: note = Description of Artificial Sequence: Synthetic coding sequence
  source 1..516: mol_type = other DNA
gacctgatcgagaacctggcccaggacgagaccagccggctggacctgggcttcgaggagtgggatgtggccgggctgccttggtggtttttaggtaacttacggagtaattacacaccaaggtccaatggctctacagatctgcagacaaaccaggtcatcgaggtggggaaaaacgacgatctcgaagacagcaagagcctgtccgatgatacagacgtcgaggtcacatctgaagacgaatggcagtgcacagaatgtaagaaattcaactcgcctagcaagcggtattgctttagatgctgggctctaaggaaggactggtattctgattgtagcaaactcacacatagcctgtccacaagcgatattacggctatccccgaaaaggagaacgaaggaaatgacgtccctgactgtcgaaggactatttccgctcctgtggtgaggcctaaagatgcgtatattaagaaagagaattctaagttgttcgatccctgcaactcagtcgagtag

SEQ ID NO: 24877 - DNA, 1323 bp, synthetic construct
  misc_feature 1..1323: note = Description of Artificial Sequence: Synthetic coding sequence
  source 1..1323: mol_type = other DNA
atgaccagcttcagcaccagcgcccagtgcagcaccagcgacagcgcttgcagaatttcccctggacagatcaaccaggtgaggcccaaactcccattgctcaagatcctgcatgcagccggcgctcagggtgaaatgttcactgtgaaggaggtgatgcattacctgggacagtatatcatggtaaaacaactgtacgaccagcaagaacaacatatggtctactgtggtggtgacctgttgggagagctgctcggtcgccagtcgttctcggtgaaggacccatcccctttgtacgatatgctcaggaaaaatctggtgactttggcgacggccacgaccgacgctgcacagaccctcgctctggcacaggatcactctatggatatcccctcccaggatcagctgaagcaatccgctgaagaaagttccacatctagaaagcgcactacggaagatgatattcctaccctgccaacatcagagcataagtgtattcacagcagggaggatgaagatctgatagagaatcttgcacaggacgaaacttcgcggttggatctcggctttgaagaatgggacgtggccggcctgccatggtggttcctagggaatttgaggagcaactataccccaaggagcaacggtagcacggacctgcaaactaatcaagtgatagaagtgggcaaaaacgatgatcttgaggactcaaagtctctttccgacgataccgacgtggaggttacctctgaggacgaatggcagtgcaccgagtgtaagaagtttaacagtccaagtaagcgatactgctttcggtgttgggccctgcggaaagattggtacagcgactgcagcaagcttacgcatagcctttccacatctgatattactgctatcccagaaaaggagaacgagggtaatgatgtacctgattgccgccggactatatccgccccagtcgtacgtcccaaggacgcgtatattaaaaaggaaaacagcaaactgtttgacccgtgtaactctgttgaatttctggatcttgcccattcctcggagagtcaagaaactatctccagtatgggagaacagttggacaatctgtcggagcagaggacagatactgaaaacatggaagattgtcagaatctgctgaagccttgtagcctgtgtgagaagcggccacgcgatggaaacatcattcacggccgaaccgggcatttagtgacttgctttcactgcgcacgtcgtctgaaaaaggccggcgcaagctgtccgatctgcaaaaaggagattcagcttgtgataaaggtgtttatcgcttag

SEQ ID NO: 24878 - DNA, 384 bp, synthetic construct
  misc_feature 1..384: note = Description of Artificial Sequence: Synthetic coding sequence
  source 1..384: mol_type = other DNA
atgaccagcttcagcaccagcgcccagtgcagcaccagcgacagcgcctgccgtataagccctggccagatcaaccaggtccggcctaagttgcctctcctgaagattctacacgctgcaggcgctcagggagaaatgtttacagtgaaggaagtaatgcactacctcgggcagtatatcatggtaaaacaactgtacgatcagcaggagcaacatatggtgtactgcggcggggacctgctgggggaactgttgggccgacaatcattttctgtgaaagatccctctcccctgtatgacatgttgcgcaaaaacttggtgaccctggccaccgcgacaactggatgccagaggagagtgaatgggccccagagggcttggtag

SEQ ID NO: 24879 - DNA, 462 bp, synthetic construct
  misc_feature 1..462: note = Description of Artificial Sequence: Synthetic coding sequence
  source 1..462: mol_type = other DNA
atgaccagcttcagcaccagcgcccagtgcagcaccagcgacagcgcctgtcgaatctcaccaggccagatcaaccaggtccgccctaaactccctttgctaaagatccttcatgcagcaggggctcagggagaaatgtttacagtgaaggaggtcatgcactacctggggcagtacattatggttaaacagctctacgatcagcaggagcagcacatggtttattgtggcggggacctgcttggcgaactgcttggccgtcagagcttctcagtgaaggatccatcccctctgtacgacatgctaaggaagaacttagtgactctggccacagcgactacaggcagccaatacggctacagtaagtcccgtcctactgaggcgaagtgtcgcggcaagtttcacttccagaaaaagaattaccgacggagatacccacacactgcctatttgcgggcctag

SEQ ID NO: 24880 - DNA, 7650 bp, synthetic construct
  misc_feature 1..7650: note = Description of Artificial Sequence: Synthetic coding sequence
  source 1..7650: mol_type = other DNA
atgctgggcaccggccccgccgccgccaccaccgccgccaccacctccagcaacgtcagtgtgcttcaacagtttgcctctggtctaaaatcacggaatgaggaaacaagagccaaggccgccaaagagctacagcactacgtgacgatggaactgcgtgagatgagccaggaggaaagtactcgcttctacgaccagctaaatcaccacatattcgaactggttagttcttcggacgcgaacgagcgcaagggaggcatattagctatcgccagtttaattggggtggaggggggaaacgccacacgaatcggacgatttgctaattacctccgcaatctactccctagcaatgaccctgtcgtgatggagatggcaagtaaagccattgggcgattggccatggccggagacaccttcacagctgagtacgtcgagtttgaggttaagcgcgccctggaatggttaggggcagaccgcaacgagggccgcaggcacgcagccgtgcttgttctgcgagagctggctatctctgtgcctaccttcttctttcagcaggtccaaccatttttcgataatatcttcgtcgcagtgtgggatccaaagcaggctattcgtgaaggcgccgtggcagcattaagagcctgtctgatcctgacgactcagagggagcccaaggagatgcaaaagccccagtggtaccggcataccttcgaagaagcggagaaagggtttgatgaaactttggctaaggagaaagggatgaatagagatgatcggatccacggcgcactgttaatcctgaacgaacttgtgagaatctcttccatggagggggagcgcttgcgcgaggagatggaggagatcactcaacaacaactcgtgcacgacaagtattgcaaggatttgatgggcttcggcaccaaaccaagacatatcactcccttcacaagttttcaagccgttcaaccacagcagtcaaacgctcttgttgggctgctggggtacagtagccatcaggggttgatggggtttggcaccagcccgtctccggcaaaaagcacgctggtggagtcccgctgctgtcgagatctaatggaggaaaagttcgaccaagtatgtcagtgggtcctgaaatgtagaaacagcaaaaatagtctgattcagatgacaattcttaacctacttcccagattggccgcttttcggccgtctgccttcacagacactcaatatctccaggacacaatgaaccacgtcctgagttgcgtaaaaaaggaaaaagaacgtacagccgcctttcaggcgctgggtctactgagcgtggctgtgaggagcgagttcaaggtgtacctaccacgtgtcttagatataataagggccgcgctgcctccgaaagattttgcccacaagcggcagaaggcgatgcaggtagatgctacggtattcacttgtatttctatgctggcacgtgcgatggggcctggcattcagcaggacattaaagagcttctcgagcctatgctcgccgtcggactctcgccagcgctgaccgcagtgctgtacgatctgtccaggcagatcccacagctgaagaaagacatacaggatgggctccttaagatgcttagtctcgtgctgatgcacaagccactgcgccacccgggaatgcccaaggggttagcccaccaactggcctctccaggactgactaccctaccggaggcatccgatgtcggatccatcaccctggcattgcgcactctgggctcattcgaattcgaggggcactccctgacacagttcgtcaggcattgcgccgatcactttctgaattcagagcataaggagataagaatggaggcggcccgaacatgtagccgcctgctcacaccgtccattcatctgattagcggacacgcacacgttgtctcccagaccgcggtacaggtggtggcagatgtactttcgaaactgctcgtggtcggcataaccgaccctgatccagacatccgctactgcgttctcgcatccctcgacgagcggtttgacgcgcaccttgctcaggctgagaacctccaggcattgtttgtggctctgaatgaccaggtattcgaaattcgggagctggccatttgcacagtgggacggctatcatcgatgaaccccgcattcgtcatgcccttcctcagaaagatgctgatccagattctgacagagctggaacactccggtatcgggcggataaaggagcagtcggctaggatgctggggcatctggttagcaatgcgccccggctgataagaccttacatggagcctattctgaaggcattgattttgaagttgaaggaccctgatcccgacccgaacccaggggtgatcaataacgtcttggctactatcggagagctggcacaggtatccgggctggaaatgaggaagtgggttgatgagctgttcatcatcatcatggacatgctgcaggactccagtcttctcgccaagaggcaggtcgccctttggaccctgggccagctcgtcgcctcgaccggatatgtcgtggagccctaccggaagtacccaacactactagaagtcctgcttaatttcttgaagacagagcagaaccagggcacaaggagggaggccattcgcgtcctcggtctgcttggagctctggatccatacaaacacaaggtaaacattggcatgattgatcagagccgggacgcttctgccgtgtccctgtctgaatccaagtctagccaggattcctccgactacagcacatctgagatgctcgtgaatatggggaatctgcctctggacgagttctaccccgccgtctcaatggtcgccctaatgagaatattcagggatcagtcactttcccatcaccacaccatggtcgtccaagccatcactttcatcttcaaatcattgggacttaaatgcgtacagtttctgcctcaagtcatgccaacgttcctgaatgtgatcagagtgtgcgacggcgcaatccgtgaattccttttccagcagctcggaatgctggtgtctttcgtgaagtcccacatccggccctatatggacgagattgttactctgatgcgggagttttgggtgatgaatacaagtatacagagcacaattatactgctgatagaacagatcgtcgtagcactgggcggagagttcaaactgtaccttccacagctaataccgcacatgctccgggttttcatgcatgataactcacccggccgcatagtttccatcaaattactggccgccatccagttgtttggagccaaccttgacgattatctgcatctgctgttgcctccaatcgtgaagctcttcgacgccccagaagctccgctgccctccagaaaggcagcactagagaccgtcgatagactgaccgagtccctggactttacagactacgcgtctagaatcatccaccctatcgtgagaactctcgatcagagtccagagctcaggtctacggccatggatacactctctagcttagtcttccagctgggcaagaagtaccagatattcataccgatggtgaacaaggtgctcgtccgccacaggataaaccatcagagatacgacgtattaatatgtagaattgtcaagggatacaccctggctgacgaagaggaagacccccttatctatcaacaccggatgcttcggtctggccagggggacgcactggcctccggacccgtggaaaccggacctatgaaaaaactccatgtcagtacaataaatcttcaaaaggcctggggagcggctcgcagagttagtaaggacgattggctcgaatggctgcgccgcctgtcactagagctgctcaaggactctagttcccccagtctgcgttcatgctgggccttggcccaggcatacaacccaatggcacgggacttgtttaacgcggcatttgtgtcctgctggtctgaactgaacgaggatcaacaggatgaactcattaggtcaattgaacttgctctcacctcacaggacattgcggaagtcactcagacgctacttaacctggcagaattcatggagcattccgacaagggccccttgcctcttcgcgatgacaacggaatagtgctgcttggcgaacgagccgccaaatgtagggcctatgctaaggctcttcattacaaggagttggaattccagaaaggacctacgcccgccatccttgaatccctgatttccatcaataataaattgcagcaacccgaagccgcagccggagtgttggaatatgcaatgaaacactttggcgagctggagatacaggcaacctggtacgagaagctgcatgaatgggaggatgctctggtggcgtacgataagaagatggacaccaataaagatgaccccgaactgatgctgggccggatgcgttgcttggaggccctgggtgaatggggacagttgcatcagcagtgttgcgaaaagtggactcttgtgaacgatgaaacccaagctaagatggccagaatggctgccgcagccgcctgggggttgggtcagtgggactcaatggaagaatatacctgtatgatcccgcgcgatacacatgacggagcattctatcgggcggtgctcgccctccatcaggacctgttctccctggcacagcagtgtatcgataaagcacgtgatctactggacgcagaactgactgctatggctggcgaatcctacagtagggcttatggggccatggttagctgtcatatgctaagtgagcttgaggaagtgatccagtataaactggtgccggaacggagagaaattattcggcagatctggtgggaacgcctccagggctgccagaggatcgtagaggactggcagaaaatactcatggtgaggtcactagtggtgtccccccacgaagatatgcggacatggctgaagtatgctagcctctgcggaaagagcggaagattggccctggctcataaaactctcgttctgttgctgggagttgatccttctcgacagctggatcaccctctcccaactgtccacccccaggtgacgtatgcatatatgaaaaacatgtggaaatctgcaagaaaaattgacgccttccagcacatgcagcactttgtgcagaccatgcagcagcaagctcagcatgctatcgccaccgaagatcagcagcataagcaggagctacacaagttgatggcaaggtgcttcctgaagttaggagagtggcagctcaatttgcaggggattaatgagagtacgattcccaaggtcctccaatattattcggcggctaccgagcatgaccgctcttggtataaagcctggcacgcctgggccgtaatgaacttcgaagccgtgttacactacaaacaccagaaccaagcacgagacgagaagaagaagctccggcatgcctctggggccaatatcactaatgcaacaacagcggccacaactgcagccaccgctactacgaccgcgtctactgaaggctcaaattctgagtcagaggccgagtcgactgaaaacagccctactccttccccccttcagaagaaagtaacagaagatttatctaagacactcctgatgtacaccgtgccagccgtgcagggattcttccgctccatctcgctaagtcgcggaaacaacttacaagacactctgcgggtgctgaccttatggttcgactatggccactggcctgacgtcaatgaagcgcttgtggaaggcgtaaaggctatacagattgatacctggttgcaggttattcctcagctcatcgcacgcatagacacgcccaggcctctggtggggaggctaattcaccagctgctcaccgatataggcagatatcatccccaagccctcatctacccacttacagtggcaagtaagtccacaaccaccgccaggcataatgccgcaaataaaatcctgaagaacatgtgtgagcattcaaataccctagtccaacaggcaatgatggtgtcagaggagctgatccgagtggctatcttgtggcatgagatgtggcacgaggggctggaagaggccagtaggctatattttggtgagcggaacgtgaaggggatgtttgaggtcctggagccattgcatgctatgatggagagagggccccagaccctgaaagagacctctttcaaccaggcctacggcagggatctaatggaagcccaggagtggtgccgaaagtatatgaaatccgggaacgtgaaagatctgacacaggcatgggatctgtattatcacgtctttaggaggatctctaaacagctgcctcaattgacgtcgctggagctgcagtatgtgagccccaaactgctgatgtgtcgggacctggagctggctgttcctggcacctacgatcccaaccagccgattatccggattcagagtattgctcccagccttcaagttatcacatccaagcagcgccctcgcaaactcaccctgatggggtcgaacggacacgagttcgtgtttctactgaaggggcatgaggatttacgccaggatgaacgagtcatgcaactcttcgggctggttaatacgctgctggccaatgaccctacttcattgcggaaaaacctgtctatccagagatatgcagtgatcccactgtccacaaatagcggacttatcgggtgggtgccccactgtgacactttgcatgccctgattagagattatcgagagaaaaagaagatcctcctcaacattgagcatcgtattatgctgagaatggcacctgactacgatcatctcaccctgatgcagaaggttgaagtctttgagcatgcagttaacaacacagccggtgacgacctcgccaagctgctgtggctaaaatctccaagttctgaagtgtggtttgatcgtagaaccaactatactcggtctttggcagttatgtccatggtcggctacatcctggggttgggcgatagacatccctccaatctgatgctcgatcgactgtccgggaaaatcctccatattgatttcggagactgcttcgaggtggccatgacaagggaaaagttcccagaaaagataccatttaggctgactcgcatgctaaccaatgccatggaggtcaccgggctggatggcaattaccgcatcacctgccacactgttatggaggtattgcgggagcacaaggattccgtgatggctgtgctagaggcctttgtgtatgatcctttgttgaattggagactaatggatacaaacactaagggaaataaaaggagcagaactcgaactgattcatatagtgctgggcagtccgtggaaattctggacggcgtggagttgggcgagcccgcacataagaaaacgggtactacagtgccggagtccatccattctttcattggtgacgggctggtgaagccagaagcactgaataagaaggctatccagattatcaatagggtgagagataaactgaccggccgcgatttttcccatgatgatacgcttgacgtgcccacgcaagtggaactcctgattaagcaggcaacttcccacgagaatctttgccaatgctatatagggtggtgccccttttggtag

SEQ ID NO: 24881 - DNA, 2265 bp, synthetic construct
  misc_feature 1..2265: note = Description of Artificial Sequence: Synthetic coding sequence
  source 1..2265: mol_type = other DNA
atgaacttcgaggccgtgctgcactacaagcaccagaaccaggccagagacgaaaaaaaaaagcttaggcatgcctcgggggccaacattacaaacgccacaactgcagccaccaccgcggccaccgcgacaacaaccgctagcaccgagggatccaactcagagtcggaagcggaatcaactgagaactcccctactcccagcccgcttcagaagaaggtcacagaagacctttcaaagaccctcctgatgtacaccgtgccagcagtgcaaggtttctttagatccatcagcctgtcacgagggaacaacctccaggacacccttagggtcctgaccctgtggtttgactatgggcactggcctgacgttaacgaagctctggttgaaggggtgaaggcaatccagattgacacctggctgcaggtcattccacagttgatagccagaatcgatacacctcgccctttagtcggtaggctcatacaccagcttctgaccgatattgggcgataccaccctcaagctctgatctaccctctgacggtcgccagcaaatccacaaccaccgcgagacacaacgccgccaacaaaattctgaagaacatgtgcgaacattctaataccctggtgcagcaagctatgatggtgagtgaggaactgatccgcgttgccattctctggcacgagatgtggcacgaaggtctagaggaggcctctcgcctgtatttcggcgagcgaaatgtgaagggaatgttcgaagtgctggagccgctgcatgcaatgatggagaggggcccgcagaccctgaaggaaacctcttttaatcaagcgtatgggagggacctgatggaagcccaggagtggtgtcgcaagtatatgaaatccggcaatgtgaaggaccttacacaggcctgggacttgtactatcacgtcttccggaggatcagcaagcaacttccgcaactgacgagcctagaactccaatatgtgtctccgaaattgcttatgtgccgcgacttggagctggccgtgcctggcacgtacgatccaaaccagcccataattagaattcagtcaatcgcgccgagcctccaggtcatcaccagtaaacagaggccccggaagctgactttgatgggatctaatgggcatgagttcgttttcctgcttaagggacacgaggacttgagacaagacgaaagggtgatgcagctgttcggcctagtgaacacactgctggctaatgaccccacaagcctccgcaaaaacttatcaatccagaggtatgctgtcattcctcttagtacaaattcaggcctgatcggttgggtgccacactgcgatacgttacatgccctgattcgggactatcgcgagaagaagaaaattctcctgaacatagagcatagaatcatgctgcgtatggcaccagactacgaccaccttactcttatgcagaaagttgaggtgtttgagcacgcagtgaataatactgccggggacgatctggcaaaactgctctggctgaagagtcccagcagtgaagtgtggtttgaccgccgtactaactacactcggtccctcgccgtgatgtctatggtggggtacatactgggtctcggagaccgacatccatctaacctgatgctggaccggttaagtggaaagattctgcacatcgattttggcgattgtttcgaggtggctatgacacgcgaaaaattcccagagaagattccatttagactaactcgcatgctgactaacgcgatggaggtgaccggccttgacggtaattaccggatcacctgccataccgtaatggaggtgctgcgcgagcataaagatagcgtgatggcggtgctcgaggcgttcgtgtatgatcccctcctgaattggcggctgatggataccaacacaaaggggaataaaagaagccgcacaagaactgacagctactctgctggccagtcggtggaaatcttggacggcgtagagctgggtgagcccgcccacaagaaaactggcacgacagtgcccgagagcatccattcctttattggcgatggcctggtgaagcctgaggccctcaacaagaaggcaattcagatcattaacagagttcgcgataagttgacgggcagagatttctcccacgacgacacgcttgacgtcccaactcaggtggagctgcttattaagcaggcgacttctcatgaaaatttatgtcagtgctatataggatggtgcccattctggtag

SEQ ID NO: 24882 - DNA, 486 bp, synthetic construct
  misc_feature 1..486: note = Description of Artificial Sequence: Synthetic coding sequence
  source 1..486: mol_type = other DNA
atgctggaccggctgagcggcaagatcctgcacatcgacttcggcgactgtttcgaagtcgcgatgacacgcgagaagttcccggagaagattccctttcgccttactcgcatgctcactaatgcgatggaggtaacaggtttggatgggaattatcggattacttgccataccgtaatggaagttcttcgagaacataaggacagtgtgatggcagtattggaggctttcgtgtacgaccccctcttgaactggcgactcatggatacaaacactaaaggcaataaaagaagcaggaccagaaccgattcatacagcgccggacagtccgtggagatcctggacggagttgaactcggcgagcctgctcataagaaaacgggaactaccgtacccgaaagcatccacagcttcatcggtgatgggttagtgaagccagaggccctgaataaaaaggccatccaaatcatcaaccgcgtgaggtag

SEQ ID NO: 24883 - DNA, 5187 bp, synthetic construct
  misc_feature 1..5187: note = Description of Artificial Sequence: Synthetic coding sequence
  source 1..5187: mol_type = other DNA
atgctgggcaccggccccgccgccgccaccaccgccgccaccaccagcagtaatgttagtgtccttcagcagttcgctagtggccttaagtcgcggaacgaggaaacccgagccaaagctgcaaaagaactccagcactatgtgacaatggagctgagggagatgtctcaggaggagtcgacccgtttctatgatcagctgaaccatcacatttttgagttagtttcatcgagcgacgcaaatgagaggaaaggagggattctcgcaattgcctcacttatcggggtagaaggaggaaatgcgaccagaattggcagatttgcaaattatttacgcaatcttctgcccagcaacgatcccgtggtgatggagatggcctccaaagccatcggtcgcctcgccatggccggtgacactttcactgccgagtatgtcgagttcgaagtgaagagagctcttgagtggttgggggctgaccgaaatgaaggccggagacatgctgctgtgctcgtgttgcgtgagctggctattagtgtgcctacctttttctttcagcaggtgcaaccatttttcgataacatcttcgtggcagtttgggatcctaagcaggctattagggagggcgcagtggcagcactcagagcatgtcttatactgacgacgcaaagggagcccaaagaaatgcagaagccgcagtggtatagacatacctttgaggaggctgagaagggcttcgatgagaccctagccaaggaaaagggcatgaatagagatgaccgaatacatggggccctgttaatcctgaatgagcttgtccggatctcgtccatggaaggtgagcgcctgcgtgaagagatggaggagattacccagcagcaattggtacatgacaagtattgtaaggatctgatggggtttggcaccaaaccgcgccacattacacctttcacttctttccaggcggtgcagccccagcagagtaacgctctggtcggactcctcgggtattcctcccaccagggactcatgggattcggaacctccccaagcccagcaaagtcaaccttggtggagagcaggtgctgtagggacctaatggaagagaaatttgatcaggtctgccagtgggtccttaagtgccgcaatagcaaaaactcgctgattcagatgacaatcctaaatctcctccctcgtctggccgccttcagaccctctgccttcacggacacacagtatctccaagatactatgaatcatgtgttgtcatgcgtaaaaaaggaaaaagaaagaactgccgcttttcaggcactgggactcctctcagtagctgtgagaagtgagtttaaggtctatctgccacgcgtactagacatcatacgggctgcccttcccccgaaagattttgcccacaaaaggcagaaggcgatgcaggtggatgctactgtcttcacgtgcatttcaatgctggccagggccatgggccctgggatccagcaggatattaaggaactactggagccgatgctggcagtaggcctgagccctgcgcttactgccgtgttatatgatctgagtaggcagataccccagttgaagaaagacattcaagatgggctgttaaaaatgctctcattggttctcatgcacaagcccctgcgacatcccggaatgcccaagggcctggctcatcagctggcgtccccaggccttacaactctgccagaagcttccgacgtcggctcgatcacactcgccctgcgcactctggggagcttcgaatttgagggacatagcctgactcagttcgttaggcactgcgcagaccacttcctcaacagtgaacataaggaaattaggatggaagctgcacgcacatgtagccggctccttaccccatcgatacatctaatttccggtcacgctcacgtcgtctctcagacagccgtgcaggtcgtggccgatgtcctgagtaaactgctcgtagtcgggatcacggatcctgatcccgacatacgatactgcgtgctggcgtcgttggatgagcgctttgacgcgcatctggcccaagctgaaaatctgcaggctttgttcgtcgccttgaacgatcaggttttcgaaatccgggagctcgctatctgtacagtgggcaggctgtcttccatgaacccagcttttgtcatgcccttcctcagaaagatgttgattcaaatacttactgaattggagcacagtggtatcggccgcattaaggagcaatctgcgcggatgctgggacatctagtctcaaacgcgcctcgactgatcaggccctacatggagccaattctgaaggcactgatcttgaagttgaaggacccagaccctgatcctaaccctggcgttattaacaatgtgcttgccacaattggagaactcgctcaggtgtccggtctcgagatgcggaagtgggttgacgagctctttatcatcatcatggatatgctgcaggacagcagtctgttggccaagaggcaggtggcactgtggacacttgggcagcttgtcgccagcaccggctacgtagtcgagccatataggaaatatcccacattgctggaagtgctcctgaactttctgaagactgagcagaaccaaggtacccggcgcgaagcaatcagagttttgggactcttgggggctcttgacccctacaagcacaaagtgaatataggtatgatcgaccagagcagagatgcttctgcagtttctctcagcgagtcaaagtcgtcccaggattcatccgattactccacctccgaaatgctcgtaaacatgggcaacctgcctctggatgaattttatcccgccgtcagcatggttgcattaatgagaatcttccgggatcagtcgctttcacaccaccacactatggttgtccaagcaatcacatttatcttcaagtcccttggcctgaagtgtgtgcaatttctgccacaggtgatgccaaccttcctgaatgtaatccgggtttgcgacggggcaataagagaattcctcttccagcagctagggatgctggtgtctttcgtgaagtcccacattcggccctacatggacgagatcgtgacactcatgcgggagttctgggtaatgaataccagcattcagtctacaatcatccttctgatcgaacagattgtagtcgcgctgggaggggaatttaagctttatttgccacagcttatccctcatatgctaagagtgtttatgcatgataattcaccaggacgcatcgtgagcattaagctgttggccgcgatacagcttttcggcgctaacctcgatgattatctgcacctcctgttgccccccattgtcaagctcttcgatgcccccgaggctcccctgccatctaggaaggccgctctagagaccgtggatcgtctcacagagtctctcgatttcacggattacgccagccgcataatccatccaatagtgcggacactcgaccaatctccagaactgcgcagtactgctatggacacactcagttcccttgttttccagttgggcaaaaaataccagatttttattccaatggtaaataaggttctcgttaggcacaggatcaatcaccaacggtacgatgtcctgatctgtagaatagttaagggctatacgttagctgatgaagaagaagaccccttaatatatcagcacagaatgcttcggtccggacaaggcgatgctttggcctctggacctgtagagactggaccgatgaagaagctgcacgtctcaactataaacctgcagaaagcttggggggccgctagaagagttagcaaagacgactggcttgagtggctacgcaggctctcattagaacttctcaaggacagctcaagtccaagcttgcggtcctgctgggccctggctcaggcgtacaacccaatggcccgcgacctgtttaacgcagcatttgtgagttgctggagtgagctgaatgaggaccagcaagatgagctgattcgatccatcgaattggccctgacaagccaggatatagctgaggttacacagacgctcctaaacttggccgagtttatggaacattccgataaggggcccctgcccttaagagacgataacggaatagtactgctgggggagcgggctgctaagtgtagggcctacgctaaagcgttacattacaaggagttggaattccagaagggtccaacacccgccattttggaatcccttatttctattaataataaactgcaacagccggaggcagctgctggggtcttggagtacgccatgaaacattttggcgaattggagatacaagccacctggtatgagaagctccacgagtgggaggacgctctggtggcttacgacaaaaagatggatacaaacaaggatgatccagaactcatgctcgggagaatgcggtgtctggaagcgctgggggagtgggggcaactgcaccagcaatgttgtgagaaatggactctcgtcaatgatgagacccaagccaaaatggcgaggatggccgccgccgcagcttgggggttgggacagtgggactcaatggaggagtacacatgcatgataccccgagatacacacgacggggctttttacagagcagtcctcgcgctgcatcaggatctgttcagtctggcacagcagtgcatcgataaggctcgggacctcttagatgccgagttgacagccatggcaggtgaatcctactcaagagcttatggagctatggtgtcgtgccacatgcttagcgagttagaggaagtaatccaatacaagctcgtgccagagcggcgggagattatcagacagatctggtgggagcgcctgcaaggctgccagcgaatcgtggaagattggcagaagattcttatggtacggagcttggtggtttccccacacgaggacatgcgtacatggttgaaatatgcgagcctgtgtgggaaaagcggaagactagcaattgcccccctgaacatgggcacagcaaattccgcacaacccagatcccttagatcctggaggacatggatccgcatcctggattgtaaggacacagaagacgccgacctgacgcctgcaacctaccccaaaacttcattggtgtgtggtcagcagcagaagtgcctgcaggaccgccctaagtag

SEQ ID NO: 24884 - DNA, 6270 bp, synthetic construct
  misc_feature 1..6270: note = Description of Artificial Sequence: Synthetic coding sequence
  source 1..6270: mol_type = other DNA
atggaggacacccaggccatcgactgggacgtggaggaggaggaggaaacagaacaatcatccgagtcattgcggtgcaatgtggagcccgtggggagactccacatcttttccggagcccatggccctgagaaagattttcccctgcatctcgggaaaaatgtagtcgggagaatgcccgactgctctgtggcacttcctttcccgtcaatctccaaacagcacgcagaaattgaaatcctcgcatgggacaaggcacctattcttcgagattgtggcagtctgaatggcactcagatcttaaggcctccaaaagtcctttcacccggtgtgagccatcgtttaagggaccaggaactgattctgttcgcagatctgttgtgccagtaccatagattagacgtgtccctgccgtttgtgagtcggggcccactgaccgtcgaagagaccccccgggtgcagggggagacccagccccagcgactactactggctgaggatagcgaagaagaagtcgactttctaagtgagaggcgcatggtcaaaaagagcagaacaacctcctcgtccgtgatcgtgcccgaaagcgacgaggagggacactcgcccgtcctgggtggcctgggaccccctttcgcatttaatctgaattccgacactgacgtcgaagaagggcagcaacctgctactgaggaggctagcagcgccgcccgtcgcggagcaacggtcgaggcgaagcagtcggaggcagaagtggtcactgaaatccagctggaaaaagaccagccactggttaaagaaaaagataatgatacaaaagtcaaaaggggtgccggaaacggcgtggtgccagccggagttattctggagaggtcacagccgcctggagaggattcggatactgacgtcgatgacgacagtcgcccacctggacgaccagccgaggtccaccttgagagagcacagccattcggtttcatcgattccgatacagatgcagaagaggagaggatccctgccacccccgttgtgatcccgatgaagaaaaggaagattttccatggggtcggcacacgaggcccaggtgctcccggactggcccatctccaggagtcccaggctggaagtgatacggacgtggaagagggaaaggccccacaagccgtccctttggaaaagtcccaggcatctatggtcatcaacagcgatacagatgacgaagaagaggtgtcagcagcgcttacattagcacatctgaaggaaagccagcccgcaatatggaacagggacgctgaagaagatatgccccagcgcgtggtgctactccagcggagccagactacaacagagcgggattctgacacagatgtggaagaggaagaattgccagtggagaacagagaagcggtgttaaaggaccacaccaaaatcagggctttggtgagggctcactcagaaaaggatcagcctccctttggagacagcgacgatagtgttgaggctgacaagagctcacccggtatccacctggagcgatctcaggcgagcaccacagtggacatcaatacccaggtggagaaggaggtgcccccgggaagcgccataatccatattaaaaagcaccaggtgagtgtcgaggggactaatcagacggacgtgaaggcagtaggggggccagcgaaattgctggttgtttctctggaggaggcttggcccctgcacggtgactgtgagactgacgctgaggaaggcacctcccttaccgccagcgttgttgcagatgtgagaaagtcccagctgccagcagaaggtgatgccggagcagaatgggcggccgccgtgctgaaacaggaaagggcccatgaggtgggcgcccaggggggtccgcctgtcgctcaggtcgaacaggacctgccaatcagtcgagagaacctgactgacctggtggtagacacggatacactcggggaaagtactcagccgcaacgggaaggcgctcaggttccaaccgggcgggaaagagaacagcacgtgggtggcaccaaagactcagaggacaattacggagactccgaggatcttgacttgcaggctacacaatgttttctagagaatcagggcctggaagctgtgcagtcaatggaggacgagcctacacaagcatttatgctgaccccaccacaagaactggggccatcacattgctcttttcagacaaccggcaccctagacgagccatgggaggtgctcgccacacaacccttttgtctcagagagtccgaggatagtgaaacacagccgtttgacacccatctggaagcttacggtccatgcctgtccccgccgcgtgccatccctggagatcagcatcccgagtcccctgtccacaccgagccaatggggattcagggacgcggaagacaaactgttgataaggtgatgggcattccaaaagagactgccgagagagtagggcccgagcgggggccattagagagggagacagaaaagctcctcccagaacgccagaccgacgtgacaggtgaggaggagttgaccaaggggaagcaggacagggagcagaagcagttactggccagagacacacagcggcaggaaagcgataagaacggtgaatccgccagccctgaaagggacagagaatctctaaaggttgaaatcgagacgtccgaggaaattcaagagaagcaggtacaaaaacagactctcccctcaaaagcctttgaacgcgaggttgagaggcctgtagcaaatcgggaatgcgaccccgcggagctggaggaaaaagtcccaaaagtgatcttggaacgagacactcagcgtggggaacctgaaggtggcagtcaggaccagaagggccaagcaagctctccgactcctgagcctggggttggcgcaggtgatcttcccggccccacctctgccccagtgcccagcgggtcacaaagcggcggaaggggtagccccgtgtccccacgtagacaccagaagggcctgttgaattgcaagatgcccccagcagagaaagcctccagaatccgcgcggcggaaaaagtgtcgcggggcgaccaggagtcccctgatgcttgtttgccgcctacagttccggaagcacccgctcccccacagaagccgcttaattcgcagagccagaagcacctggccccccccccactactgtcccctttgcttccgtcaataaaacccacagtgcggaagaccaggcaagatgggagccaggaggccccagaagcaccactcagttcagaactcgaaccctttcaccctaaacctaagattcggacacgaaagtcgtctaggatgaccccttttcctgcgacctccgccgccccagaacctcacccgtctacgagcaccgcccaaccagtcacccccaagccaacatcccaggcgaccaggtcacgcacaaatagatcatctgtgaaaactccggagccagtagtgcccaccgcccctgaactgcagcccagcacgtccactgaccaacccgtcacatccgaacccacttcacaggtgacaagggggagaaaatcccgatccagcgtgaaaacacccgaaactgtggtccccacagctttagagctccaaccttctacatctactgaccggcctgttacatcggaaccaactagccaggccaccaggggcagaaagaataggtcttctgtcaagacccctgaacctgtcgtgcccaccgccccagaattacagccctcgacaagtaccgatcagccagtgacatccgagccaacttaccaggcaacgcggggtaggaagaatagatctagcgtcaagactcctgagcccgttgttcctaccgcgccggaattaaggccctcaacatccaccgatcggcccgttacaccgaagcccacaagtcgtaccactcgatctaggaccaacatgtcatcagttaaaactcccgagacagtggtcccaacagctcccgaactgcaaattagtacgagcacagaccaacctgtgactccaaaaccgacttccaggaccacaaggtcaagaacaaacatgagctccgtgaaaaaccccgagtctacggtacctatcgctcctgaactgccacctagtacaagtactgaacagcccgttactccagaacctacctccagggctacacgcgggcgaaagaatagaagcagcggcaagaccccagagacacttgtgccaaccgcccccaagttggagccttccacttcaaccgatcaacccgtgactcctgagcctacctcacaggctacaagggggcggacaaaccgttcttccgtgaaaacccccgagacagtcgtccctaccgcgcccgaactgcagcccagcactagcacggatcaaccagtcactcctgagccaacatctcaagctacgaggggcaggacggatcggtcatctgtcaagacccctgagacagtcgtcccaaccgcaccggagctgcaagctagtgcaagcacagatcaaccagtcactagtgaaccaacctctcgaacgactagaggccgtaagaatcggtcaagcgtgaagacccccgagaccgtcgtgcccgctgcgcctgagctgcaaccatcaacaagtacagaccagccggtgacacccgagccaacaagtagagcaactcgtggcaggacaaacaggagcagcgtgaaaactccggaaagcatcgtgcccattgcccccgaactccaaccgtcgacgtcaagaaaccagctcgtgactccagaacctactagccgcgcaacacgatgtcggaccaaccgctcttccgtcaagaccccagaaccagtagtgcctacggcacctgagccccaccccaccacctctacggatcagccagttacacctaagctgacatcaagagccacacgaaggaagacaaatcggagtagtgtcaagacgcctaagcccgtggagcctgccgcaagcgacctcgagccttttacaccgacggatcaatctgtgacccccgaggccattgcccagggcgggcagtccaagacactgcgctctagtaccgtcagagctatgccagtgccaacgaccccagagtttcaatctcccgtgactaccgaccaacctatcagcccagaacccatcactcagccgtcttgcattaaacgtcagcgggctgcaggtaatcccggctctctcgctgcaccaatcgatcacaaaccctgttctgcgcctctcgaacctaagtcgcaagcttcaagaaatcaaagatggggggccgtgagggccgccgaaagtcttaccgcaatcccggaacccgcaagcccacagctcctggagactcccattcacgcaagtcagatccagaaggtcgagcccgccggccgtagcagatttacacctgagctgcagcctaaagcatcccaatccagaaaacggagtctggcaacaatggattccccgcctcaccaaaagcaaccccagagaggggaagtgtctcagaagacagtgattatcaaagaggaagaagaggatacagctgaaaagcctggcaaggaggaggacgtggttacccctaagcctgggaaacgcaaacgagatcaagccgaggaggagcctaataggatcccttcccgaagcctacgcagaaccaaactgaaccaggagtctactgcacctaaggttctgttcacgggtgtcgtagatgctaggggtgaaagagcagtactagccctgggtggcagtctggccggatccgctgcagaagctagccacctcgtgaccgatcggatccggcggaccgtgaagttcctgtgtgccttgggccgcggtattcctatcctctcacttgactggcttcaccagtctcgcaaagctggattttttttaccacctgacgagtatgtggtaactgatcccgaacaggagaagaactttggattttcgcttcaggacgccttgagtcgggcaagagaacggcggttgctggaggggtatgaaatctacgtcacgcccggagtacaaccgccaccgcctcagatgggtgaaatcatctcctgctgcgggggtacctacctgccgtctatgccccggagctacaagccccaaagagtggttattacatgcccacaggacttcccacactgctccatccctctgagggtcggactgcccttattgtcacccgaatttctgctcacaggtgtgcttaagcaggaggctaaacccgaggccttcgtgttatcacccctggaaatgagcagcacgtag

SEQ ID NO: 24885 - DNA, 489 bp, synthetic construct
  misc_feature 1..489: note = Description of Artificial Sequence: Synthetic coding sequence
  source 1..489: mol_type = other DNA
atggaggacacccaggccatcgactgggacgtggaggaggaggaggagactgagcagtcctctgaatccttacgctgcaacgtggaacctgtgggtagattgcatatcttctccggggcacacggtcccgagaaagattttccactgcacctgggcaaaaacgtggttggaagaatgcctgactgctccgtcgctctaccctttcctagcataagtaaacaacatgcagaaatagaaattctggcgtgggataaagctcccatactgagagattgtggttccttgaatgggacacagatcctgcgccctcctaaggtcttatctcctggcgtgagtcatcgcctaagggaccaggaactgattttgttcgcagaccttttgtgtcagtaccataggctcgatgtgtcattgccattcgtgtctcggggtccactgaccgtagaggagaccccaagagtccagggcgaaacacagccgcagaggttatag

SEQ ID NO: 24886 - DNA, 384 bp, synthetic construct
  misc_feature 1..384: note = Description of Artificial Sequence: Synthetic coding sequence
  source 1..384: mol_type = other DNA
atggaggacacccaggccatcgactgggacgtggaggaggaggaggaaacagagcagagctccgaaagtctacggtgcaatgtagaacccgtggggagacttcatattttttccggggcccacggacccgaaaaggacttccccctccatctcggaaagaacgtagtgggcagaatgcctgattgtagtgtggccctcccattcccctctatttcaaagcagcacgccgagatcgagattcttgcctgggacaaggcccctattctgcgtgattgcggtagcttgaatggcacgcagatcctgcgtccaccgaaggtgctttcacctggggtgtcccaccggctgagagatcaggagctgattttgttcgcggacctgctgtag

SEQ ID NO: 24887 - DNA, 921 bp, synthetic construct
  misc_feature 1..921: note = Description of Artificial Sequence: Synthetic coding sequence
  source 1..921: mol_type = other DNA
tgacacgtgggcggcaccaaggacagcgaggacaactacggcgactcagaagatcttgatctgcaggccacgcagtgtttcctcgaaaatcaaggactggaagccgttcagagcatggaagacgagccaacacaggctttcatgctgactcctccccaagagctgggtcccagccactgctcgttccagactacaggtctcttgaattgcaaaatgcctcctgccgagaaagcctcaagaatacgagcggccgaaaaagtgtcgcgaggtgatcaggaatcccctgatgcctgccttccacccaccgtgccggaggctcctgcaccgccgcagaaaccactgaatagccaatcccagaaacacctggcacctcccccactattgtcaccgcttctcccaagcatcaagcccacggtaagaaaaacacggcaggacgggtcacaggaagcgcccgaagcccctttgagtagtgagctggaacctttccacccaaaacctaagattaggacacgcaagtcgtcacgaatgactccatttcccgcaacatctgccgcacctgagccccatccatcaacatcaacagctcaacccgttacgccaaaacccacatcacaggccactcggtctcggactaatcgaagctctgtgaagacgcccgagcctgtggtgcctacagcccccgagctccagccctcaacctctactgatcaaccggtgacgtctgagccgactagtcaggtgactaggggccggaagagcagaagctctgtgaaaacccctgagactgtggtaccaacagcactggaactgcagccatccaccagcaccgatcgccccgtgacttctgagcccacaagccaggccacccggggtaggaagaacagatcgagtgtgaagacccccgagcctgtagtgccgtag

SEQ ID NO: 24888 - DNA, 342 bp, synthetic construct
  misc_feature 1..342: note = Description of Artificial Sequence: Synthetic coding sequence
  source 1..342: mol_type = other DNA
atggaggacacccaggccatcgactgggacgtggaggaggaggaggaaaccgaacagtcctctgagagcctgcgttgcaatgtggaaccagtggggagactacatatcttcagtggggcccacgggcccgagaaggatttccctctccaccttggtaaaaacgtggtgggcaggatgccggactgcagcgttgccttgccctttccgtctatctccaagcaacacgcggagatcgagatcttagcctgggacaaagcccctattctgagagactgtggatctttgaacggtacccagatactgcgtccacctaaagtgctgtcccctggtgtgtctcattag

SEQ ID NO: 24889 - DNA, 5409 bp, synthetic construct
  misc_feature 1..5409: note = Description of Artificial Sequence: Synthetic coding sequence
  source 1..5409: mol_type = other DNA
atggaggacacccaggccatcgactgggacgtggaggaggaggaggagacagaacaaagtagtgagagtctacgctgtaacgtggagccagttggacgattacacatcttcagtggggctcacggtcccgaaaaagacttcccactacaccttggcaaaaatgttgtcggaaggatgcccgattgctcagttgcgttgcccttccctagcatcagtaagcagcatgctgaaatcgaaattctggcttgggacaaagcgccaattctgcgggactgtggaagccttaacggcacccaaattcttcgccctcctaaggtcctttcccctggagtttctcatcggttgcgggaccaggagctgatcctgtttgctgatctcctctgccagtatcacagacttgacgtcagcctaccttttgtgtcgcgaggcccattgactgttgaagagaccccaagagttcagggcgagactcagcctcaaaggctcctcctggccgaagatagtgaggaggaagtcgactttctgagtgagagacgcatggtgaaaaaatcccgaaccactagcagttccgtgattgtgcccgagtcagacgaagaggggcactcccctgtcttaggcggtctggggcccccatttgcgtttaatttgaatagcgatacggatgtggaggaggggcagcagcccgcaactgaggaagcctcctctgctgcacgacgcggcgccaccgtggaagcgaaacagagtgaagctgaagtggtcaccgaaatccagttagaaaaggatcaaccacttgtaaaggagaaggataacgacacaaaagttaagcggggagcagggaatggagtagtccctgcaggtgtcatcctcgaacgcagccagcctcctggggaagacagtgacaccgacgtcgacgacgactctaggccacctggacgtccagcggaggtgcatttggaacgcgcacagccatttgggttcatcgattccgatacggacgccgaagaggaacggatcccagccaccccggtggtcattccgatgaagaagcgcaaaatattccatggtgtgggcacccggggacctggcgcaccagggctcgcccacctgcaagaaagtcaagcaggctcagataccgatgttgaggaaggcaaagcacctcaggccgtgcctctggagaagtcccaggcaagcatggtgattaattccgacactgacgatgaggaggaggtgagtgccgcattaactctggcacacctgaaggaaagccagcccgccatctggaatcgcgatgctgaggaagacatgccacaacgcgtggtgctcctgcagagaagtcagacaaccacagaaagggattccgacaccgatgttgaggaagaggaactacctgtagagaatagggaagcagttctgaaggatcataccaagatccgcgcattagtgcgagctcatagcgagaaggaccagccccccttcggcgactccgacgactccgtggaagcagataaaagcagtccaggcatacacctggagaggtcacaagcttccactaccgtggacatcaatacacaagtagagaaggaggtgcctcccggtagtgccatcattcatattaagaaacatcaggtgagcgtggaagggacaaaccagaccgacgtgaaagctgtgggtggccccgccaaactcctagtggtgtccctggaagaagcctggcccttgcacggtgattgcgaaacagatgcagaagaggggacctctctcacggcgtccgtcgttgccgatgttcgcaagtcccagctgcctgccgaaggtgatgctggagccgaatgggccgccgctgtgcttaaacaggagcgcgctcacgaagtgggagcccagggcgggcccccagtggctcaggtcgagcaggacttaccaatttcccgtgagaatctcaccgacctggtggtggacacggatacactgggcgagtctacccagcctcaacgcgaaggcgcacaggttcccaccggtagagaacgagagcaacacgtcggcggaactaaagattcagaggataactacggagattcagaggatttggacctgcaggccacccagtgcttcctggagaatcagggcctggaggcagtgcagtccatggaggatgagccaacccaggcatttatgctaactcctcctcaagagctgggtccctcccactgctcattccaaacaactgggacgcttgacgaaccctgggaagtattggcgacccaacctttctgtctacgtgagagtgaagatagtgaaactcagccatttgacacccacctggaggcttatggaccctgtctctcacctcctcgggcaattccgggggaccaacatccagagtcacctgtgcacactgagcccatgggcattcagggacgtgggagacagacggtcgataaggtgatgggaattcctaaggagaccgccgagcgggtagggccagagcgtggacctctcgaaagagagacggagaaactgcttcccgagcgacagactgacgtcacgggagaagaggaactcacaaaggggaaacaggatcgggagcagaaacagctgctggccagagatacccagaggcaggaatctgataaaaatggagaatccgcttctccggaacgtgatagggaaagtctaaaagtggaaatcgaaacaagtgaggagatacaagagaagcaggtgcaaaagcagacattgccctcaaaagcgttcgaaagggaggttgagaggcccgtggccaatcgggaatgtgatccggcggagcttgaagagaaggtgcccaaagtcatcctggaaagagacacacagcgcggcgagccagagggaggtagccaggaccaaaaagggcaagcctccagccctacacccgagcctggggtcggggccggcgaccttcctggacccacaagcgctccagtccccagcggttcacaatcaggcggtaggggctcgcccgtttctccgagacggcaccagaaagggctgctaaactgcaagatgccccccgctgaaaaagcttctcggattcgcgccgccgaaaaggtcagccgtggtgaccaggagtcacccgatgcttgtcttcctcctacagtaccagaagctccagcccccccacagaagcctctgaattctcagagtcagaaacacttagctccaccacctttgttgagtcccttactaccgtctatcaagcctaccgtgaggaaaacccggcaggatgggagtcaggaggctcccgaggcccccttatcaagtgaattggagccattccatcccaagccaaaaattaggacaagaaaaagctcacggatgacacctttccccgccacctcagccgccccaaagttggagccttctacatctaccgaccaacctgtgaccccagagccaaccagtcaggcgacacggggccggactaatagatcgtctgtgaagacacctgagacagtggtgccaactgcaccagaactccagccatccacttctaccgatcagcctgtgacgcccgagcctactagtcaagccacgagaggtaggaccgatcgatctagtgtcaagacgcctgaaacagtcgtgcccactgctcccgagctgcaagccagcgcctctacagaccagcctgttacttcagagcctaccagtagaacaaccagagggcgcaagaacaggtcctctgttaagactcctgaaactgtggtgccggcagcaccagagcttcagccatcaaccagtaccgatcagccggtaacacccgaaccaacttcgcgcgcaactcgcggccggaccaatcgcagctcggtgaaaacccccgagtcgattgtgcctatcgcaccagaactgcaaccctctacatcgcgtaaccagctcgtgactcctgagccaacttcgcgcgccacccgttgcagaacaaacagaagctccgttaagactcccgaacccgtggttcccaccgcccccgaaccccacccaaccacttccacagatcaacctgtgacccccaagctgacgagtcgagctactcgccgtaaaaccaaccggagttccgtcaaaactcctaagcctgtggaaccggccgcctcagacctcgaaccctttacccctacagatcagtcagtcacaccagaggcaatcgcacagggagggcagagcaagactctgagatcatccactgtcagagcgatgcccgtccccaccacccctgaatttcagtcacccgtgacaacagaccaacctattagtcctgaaccaatcactcagcccagttgcatcaaacggcaaagggccgctgggaatcctggctctctcgcagccccaattgaccacaaaccctgctctgctcccctcgagcctaagagtcaggcctcacgtaatcaacggtggggtgcagtgcgcgcagccgagtccctgaccgctatcccagaaccagcctcacctcaacttctcgaaacacctatccatgcatcccagatacagaaggttgagcctgccggccggtctaggtttactcctgaattacagcctaaggcgagccagtcccggaagcggagcctcgcaaccatggacagccctccccaccagaagcagcctcagcgaggtgaggtctctcagaaaacagtaatcataaaggaagaagaggaggacacagcagagaagcctggcaaagaagaagatgttgtaacccctaaacctggtaagcggaaaagggatcaagccgaggaagaacctaaccggatcccctcaagatcactccggagaaccaaactgaaccaagagagcacagctcccaaggtcctgttcacaggagtcgtggatgctcgtggggagcgagctgtgctggcccttggagggagcctagcagggtcggccgcggaggcctctcatctggttaccgacagaattcggagaactgttaagtttctgtgtgccctgggacggggcattcccattctgtctttggactggctgcatcaatctcggaaagccgggtttttcctgccccccgatgagtacgtggttaccgatcctgaacaggaaaagaactttggcttctctctacaggatgcactgtcccgggcaagggaacgccggctactggagggatacgaaatttatgtgacacccggtgtgcagcccccacccccccagatgggcgaaattatctcctgttgcggaggcacctacctgcctagcatgccacgcagttacaagccccaacgggtagtgattacctgtccccaggatttcccccattgctctattccactccgagtaggactgccgctcctgtctccggaatttctgttaaccggcgtcctgaagcaagaggcaaagccagaagccttcgtcctgtctcccttggaaatgagtagcacctag

SEQ ID NO: 24890 - DNA, 666 bp, synthetic construct
  misc_feature 1..666: note = Description of Artificial Sequence: Synthetic coding sequence
  source 1..666: mol_type = other DNA
atggaggacacccaggccatcgactgggacgtggaggaggaggaggaaactgaacaatccagcgagtccctccgttgtaacgtcgaaccagttggcaggcttcacatttttagtggtgcccacggtcctgagaaggactttccactacacctgggaaagaacgttgtgggtcgaatgcccgattgctcggtagcactgccattccccagcatcagtaagcaacatgctgagatcgagatcctggcttgggataaggctcccatattgcgcgattgtggcagtcttaatggcacccaaatcttgagttcctcgctccccccaccccagactagcctgttgcccctatccctgcgcttacgcttgctgggtgaagaacaaatagaccccttgagccgccttctcaaacaactctccccacagccactgtcctataggcttcccccccctcaaacgtccctatcgcctcttagcccccatctgggcccgctaggggaggagaaaatcgggcccctatctcgccctttaaaacagctttgtccacaacccctgtcaagctctctgcctcccccccaaacaaacttaagtccgctgtccccacatcttggtccactgggcgcaggacaaattgggccccttagtcgtccgttgaatcagctttccctctag

SEQ ID NO: 24891 - DNA, 738 bp, synthetic construct
  misc_feature 1..738: note = Description of Artificial Sequence: Synthetic coding sequence
  source 1..738: mol_type = other DNA
atggaggacacccaggccatcgactgggacgtggaggaggaggaggagaccgagcagtccagcgagagtctccgctgtaacgttgagccagtcggcagactgcatatttttagcggcgcccacggtccagaaaaggactttcctctgcaccttggcaaaaacgtcgtgggacgtatgccggactgcagcgtggcgctgccatttcccagtatctcaaagcaacatgccgaaattgaaatcttggcgtgggataaagctcctatccttcgggattgcggaagtctgaatggcacacagatcttacgccctccaaaagttctgtcacctggggtgtcacatcggctgcgcgaccaggagctgatcttattcgccgacctgctgtgtcaatatcaccggttggacgtgagcctgcctttcgtttctcggggcccactcacagtggaagagacccccagggtacagggtgagacacagccacaacgtttacttttagctgaagattccgaagaggaggttgattttctttcagagagacggatggttaagaaatcaagaaccactagcagctcagtgatcgtgcctgagtcagatgaagaaggccacagcccagtccttggcggacttggaccaccttttgctttcaatctgaacagtgatacagacgtggaggaaggtcaacaaccggctacagaggaagcctcctccgccgctaggagaggcgcgacagtggaggcttag

SEQ ID NO: 24892 - DNA, 735 bp, synthetic construct
  misc_feature 1..735: note = Description of Artificial Sequence: Synthetic coding sequence
  source 1..735: mol_type = other DNA
atggaggacacccaggccatcgactgggacgtggaggaggaggaggaaactgaacagtcgtctgagtccctgcgttgcaatgttgaacctgtcggacggctgcatattttctcaggcgcccacgggccagagaaagactttcccttgcacttgggcaaaaatgtggttggcagaatgccggattgctctgtcgccctaccctttcccagtatttccaaacagcatgccgagatagaaatacttgcatgggacaaggccccaatactgcgcgattgtgggtccctgaatggcacacaaatcctacgaccaccgaaagtgctaagcccgggggttagtcaccggctacgggatcaggagctgattctcttcgcagatctgctctgtcaataccaccgactggacgtgtctctgccctttgtctcacgcggccccctgactgtcgaagagacgccaagggtgcagggcgaaacacaaccgcaacgcctgctgctggccgaggactctgaggaggaggtggactttctgagcgagagaagaatggttaagaagagcagaacaacttcttctagcgtgatcgtgccagaatcagacgaggagggccacagtcccgtcctgggtgggcttggccccccgttcgctttcaacctgaactcagatacagacgtggaagaggggcagcaaccccaccgcggcgggctgctatcatgccagaagcggtgtcactgtcgggggtag

SEQ ID NO: 24893 - DNA, 5478 bp, synthetic construct
  misc_feature 1..5478: note = Description of Artificial Sequence: Synthetic coding sequence
  source 1..5478: mol_type = other DNA
atggaggacacccaggccatcgactgggacgtggaggaggaggaggaaaccgaacagagcagcgagtcactgagatgcaatgtcgaacccgtaggccgccttcacatattcagcggggcgcatggcccagagaaagacttccccctacatctcggtaaaaatgttgtcggccgcatgcctgattgtagtgttgctctccctttcccaagcatctcaaaacagcacgcagaaattgaaatcctggcctgggacaaggcccctattctccgagattgcggtagcctgaatggaacccaaatactccggccccctaaagtgctttcacctggagtgtcccatcgactgcgagatcaagagttaattctgttcgcagacctcctctgtcaatatcacagactggatgtatcactaccattcgtgtcacgaggccctctgactgtggaagagactccacgggtgcagggcgaaacacagccgcagcgcctcttacttgccgaggactcagaggaagaagtggattttttgagtgagcgaaggatggtcaagaagagtaggactacctccagttcggtcattgtccccgaaagcgacgaggagggacactctcccgtcctgggcggtcttgggccaccgtttgcctttaacttaaatagcgacacagatgtggaagaaggacagcaacccgccaccgaagaagcctcctcagccgcaaggagaggggccactgttgaggctaaacagagcgaagccgaggtggtgaccgagatccaacttgaaaaagaccagcccctcgtaaaggagaaggataacgacaccaaagtgaaacggggagccggtaacggggtcgtaccagctggcgtaatcctggagcgttctcaaccaccaggagaggatagcgatacagatgtggacgacgattccaggcctccgggcaggcccgcagaggtccatcttgagagggcccagccgttcggattcatcgactctgatacagatgcggaggaggaacgcatccccgctaccccagtggtgatccccatgaagaagcggaaaatctttcacggagtgggtaccagaggacccggcgctccgggcttagcccatttacaggagtcacaagccgggtctgatacagacgtggaggagggaaaagcaccccaggctgtgcccctggagaagtcccaggcttccatggtgataaactcagacaccgacgatgaagaagaagttagcgccgcactgactctcgcccacctcaaagaaagccagccagccatatggaatcgcgatgccgaggaagacatgccgcagcgagtcgttttgctgcagaggagccaaacaaccactgagagggatagcgacactgatgttgaagaggaggaactccctgtggagaaccgcgaggcagtgctgaaagaccataccaagatcagggctctggtgcgggcacattccgaaaaagaccagccaccctttggggactcagatgattccgttgaggcagataagagcagccctggaattcatctggagcgttcacaggcctccactacggttgatataaacacacaagtcgaaaaagaggtccctcctggcagtgccatcattcatataaagaagcaccaggtttccgtagaaggaaccaaccagacggatgtgaaagccgtaggaggaccagctaaactgctcgtagtgtctctcgaggaggcttggcctttacacggggattgcgaaactgacgccgaggagggcactagtctgactgccagcgttgtggctgatgtgcgcaagtctcagctgccagccgagggagacgctggagcagagtgggcagccgccgtgctcaaacaggagcgcgcacatgaggtcggggcccagggtggaccaccagttgctcaggtggaacaggatttgcccattagccgtgagaatttgacggacttggtggtggataccgatactttaggagagagcactcagccacagagagagggggcccaggtgcctacaggaagagagcgcgagcagcatgtgggtggcactaaagacagcgaagacaactacggcgatagcgaagacttggatctccaggctactcagtgttttctcgagaaccagggcctcgaagccgttcagtctatggaggacgagcccacacaagctttcatgctgactccgccacaagaactagggccgagtcattgcagtttccagaccaccggcctgcttaactgcaagatgcctcccgcagaaaaggcgagccggatccgagctgccgaaaaggtctctaggggagaccaagaaagtccggacgcatgcctccctccgacggtgcccgaggcacccgcgcctcctcaaaaacctcttaatagccagtctcaaaaacatctggcaccccccccactgctgtcaccattgctcccctccatcaaacctacagtgaggaaaaccagacaggacggttcccaggaggccccagaggcacccctgtcatctgaacttgaacccttccacccgaaaccaaaaatacgcacccggaaaagttctaggatgacaccatttcccgcgactagcgccgccccggagccccatccgtctacttccaccgctcagccagttacccccaagccaacctcccaggctacccgctctcggaccaaccgctcatccgtgaaaactcccgagcccgtggtcccaacggcccccgagctgcagccctcgactagcacagatcagccagtgacctcagaacccacctcccaggtcacgagggggagaaagtctcggtctagcgtaaaaactcccgaaactgttgtacccacggctcttgaacttcagcctagcactagcactgatcggcctgtgacttccgagcctacatctcaggccacacggggccggaagaaccggtcatccgttaaaactccggagccagtggtgcctactgcaccagaactccagcctagtacgagtaccgatcagccggtgacctcagagcccacctaccaagctacccgtggcagaaaaaacagaagctctgtgaagacgccggagccagttgtgcccacagcgcccgagttgcgaccgtccacttcaacagaccgcccggttacacctaaacccactagccgcacaaccaggtctcgcacgaatatgtcatccgtgaaaacgcctgagaccgtcgtcccgaccgccccggagctccaaatttcgacctcaactgaccagcccgttactcctaagccaacttcccgaacaacccggtctcggactaatatgtctagcgtgaagaaccctgaatctacagtgcctattgcccccgaactgcctccgtccacaagtacagaacagcctgttacaccagaacctacaagtcgggcaacacgtggtcgcaagaatagatcctctgggaagactcccgagacccttgttccaactgcacccaagctggaaccttcaacttccacagaccagccggttacccctgagccgaccagccaggccaccagaggccggacgaacagaagctcagtgaaaactcccgagaccgtggtgccaacagctccagagctccagccatctacctctaccgaccagcccgtcacccccgagcctacatctcaagccacaagaggtaggacagatagatcctccgtgaagactccggaaaccgtcgtgcctacggcccccgaactgcaggcctcagcctctaccgaccaaccagtgacgtctgagcccaccagtcggacaacccggggccggaaaaacaggtctagcgttaaaacaccagaaacagtggtgcctgccgcaccagaactgcaaccctccacctcaactgaccagcccgtcacgcccgaacccactagcagagccacgcgcgggcgcacaaaccggtccagcgtgaaaactcctgagtctatcgtgcccatcgctcccgaacttcagccgtcaacctcacgtaatcagctggtcacaccggagccaacttctcgtgctacacgttgtcggaccaatcgctctagcgtgaagacaccagaaccagtcgtcccaactgccccagaaccccaccccaccacaagcaccgaccaaccagtgacgccaaagctgaccagtcgggcaacgcggagaaaaacgaaccgtagtagcgtcaaaactcctaaaccagttgagccggccgctagcgatctcgagcccttcacccctactgatcaatctgtgaccccggaggctattgcccagggcggccagtctaagaccttgaggtcttccacagttcgcgcaatgcccgtcccaacgactcctgagttccagtcacctgtgacaacggaccagcctatttctcccgaaccgatcacccagccaagctgtattaagcgacagcgggctgccggaaaccccggaagtctggcggcaccgattgatcacaaaccttgctccgccccactggagcctaagtcccaagccagtaggaaccaacggtggggggcagtccgggcagctgagagcctcaccgccattccggagcctgcttcaccccagttgcttgagacacctatccacgcctcccaaatccagaaagtggagcccgcaggccggtctcgcttcaccccggaactacaacctaaggccagccaaagccgcaaacgaagtttggcaactatggatagccctccacaccagaagcaaccacagcggggtgaggtatcacaaaagactgtgatcatcaaagaagaagaggaggatacagcagagaaaccagggaaagaggaagatgtcgttactcccaaacctggcaagagaaaaagggatcaggctgaggaagagcctaatcgcatcccatcccgaagcctccgaagaacaaaacttaatcaagaatccaccgccccaaaggtcctgttcaccggtgtcgttgacgcccggggggaacgcgctgtcttagctttgggcggatccctggctgggagcgcagcggaagcttctcatctggtcaccgaccgcattcgacgcactgtgaaattcctgtgtgcactgggccggggcatccccattctcagtctcgactggctgcatcagtcgagaaaggctgggttcttcctgccgcctgatgaatacgtcgtaacagatcctgagcaggaaaagaactttggcttttcattgcaggacgctttgagtagggctcgggaacgcaggctgctggagggctatgagatttacgtgacaccaggcgtccagcccccacccccacagatgggggaaatcatctcttgctgcggtggcacttaccttccatctatgcccagatcgtacaagccacagcgggttgtgattacctgcccccaggactttccccactgttctatcccacttcgtgtgggtctgcctctacttagccctgagtttctgttaaccggagtgctgaagcaagaggcaaaaccagaagcctttgttttgtccccccttgagatgtcaagtacttag

SEQ ID NO: 24894 - DNA, 4968 bp, synthetic construct
  misc_feature 1..4968: note = Description of Artificial Sequence: Synthetic coding sequence
  source 1..4968: mol_type = other DNA
atgtaccaccggctggacgtgagcctgcccttcgtgagccggggccccctgactgttgaggaaacccctagggtccagggcgaaacccagcctcagcgcctcctcctcgctgaggactccgaagaggaggtggactttcttagcgaacgcagaatggtcaaaaaatccagaactacgtctagttccgtcattgtgcccgagtctgacgaggaaggccacagccctgttctcgggggtctgggaccacctttcgctttcaatctgaattcagacactgacgtggaagaggggcaacagcccgccaccgaggaggcttctagtgccgctagacgaggtgcgacagtggaggcaaaacaatccgaagctgaagtagtcacagagattcagctcgaaaaggaccagcccttggtcaaagaaaaagacaacgatactaaagtaaaacggggcgctggcaatggcgtggtacctgccggagttattctggagcgttcccagccccccggcgaggatagtgataccgacgtggacgacgactcacggccaccaggtagaccagccgaggtgcacctcgaaagggcccaacctttcggattcatcgacagtgacaccgatgccgaagaggaacgcatcccggctacccctgtggtgataccaatgaaaaaacggaaaatatttcatggggttggcacgcgcggcccgggagccccgggactggctcacttgcaagagagccaagctgggagcgatacagatgtcgaggaggggaaagcaccgcaggcggtgcccctggaaaaaagtcaagcttctatggttattaacagcgataccgacgacgaagaagaagtcagcgcagccttaacgcttgctcacctgaaggaatcgcagcccgcaatctggaatcgcgacgctgaagaagatatgccccagcgggtcgtgctgctgcagcggtcgcagacaactaccgagcgggattcggatacggatgtcgaggaagaggagctgccagtcgaaaatcgagaggcagtattgaaagaccacacaaagattcgggcacttgtacgggcccattctgagaaagaccagccacctttcggggactccgatgacagcgtggaggctgacaaatcgtccccaggaatccacctggagcgctcccaggcgtctactacagtggatatcaatacccaggtggagaaagaggttccacccgggtccgccattatacatattaaaaagcaccaggtctctgtcgaaggaacaaaccagacggacgtcaaagcagtcggaggtcctgctaaacttctggtagtgagcctcgaagaagcctggccgctgcacggggactgtgagacggatgcggaagaaggaacttcactcaccgcttctgtagtggccgatgtgagaaagtctcagcttcccgccgaaggcgacgcgggtgctgagtgggcagccgccgtgctaaagcaggagcgcgcacacgaagtgggcgctcagggaggaccacccgtggcccaggtggagcaggaccttccgatctcccgtgaaaacctaacagatttggtagtcgacacagatacactgggtgaaagtacccaaccgcagcgtgaaggcgcgcaagtaccgaccggccgggaacgcgaacaacatgtggggggaacaaaggactccgaggataactatggcgatagtgaggatctggatctacaggctacccagtgcttcctggaaaatcaggggcttgaagtgcagtccatggaagacgagccgacacaggcctttatgctcacccctcctcaggagctgggcccatctcactgtagcttccagactactggccttctgaactgcaagatgccgcctgcagagaaggcgtctcgtatcagagcggcagagaaggtgtctaggggcgatcaggaaagcccagacgcctgtcttccgcccaccgttcccgaggctcccgccccaccacagaaaccattgaatagccagtctcagaagcatctagccccccccccccttttgagtcccctccttcctagcatcaagcctaccgtgagaaagaccagacaggatggatctcaggaagcccctgaagcacccctgtcgagcgagcttgagcccttccaccccaaaccgaaaattcgaacacggaagagcagccggatgacccctttccccgcaaccagtgccgctccagaaccacacccaagcacttctacagcgcaaccagtcacacctaaacccacctcccaggccactagatcccgcacgaataggtcttccgtcaagacgccagaacccgttgtcccaactgctccagaactacagcctagtaccagtaccgaccagcccgtcacaagtgagcccacctcacaagtcaccaggggacgtaagagccgctcctctgttaaaactccagaaacagttgtaccaactgctcttgaactccaaccctctaccagcacagacaggcccgtcacgtctgaacccactagtcaggcaacacgcgggaggaaaaaccgatcgtcagtcaaaactcctgagccagtggttccgaccgctcctgaactgcaaccgagcacaagtactgaccagcctgtcacgtctgagcccacataccaagccactcgcggacggaagaatcggagctcggttaaaacccccgaacccgtggttccaactgctcctgaactacgcccgagcacctctactgaccgtcccgttacccctaaaccaacgtccaggactaccagatcgaggaccaacatgagctcggtgaagaatccagaatcgacggtccctatcgcgcccgagttgcccccctccacatctacagagcagcccgtcacccctgagccaaccagcagggcaacacgcggaaggaagaataggtcaagcggcaaaacaccggaaacattagtgcccactgcacctaagttggaacccagcacctctacagatcagccagtcacaccagaacccacgagtcaggccaccagaggaaggacaaacaggagctctgtcaagacaccagaaaccgtggtcccaaccgcccctgaactacagccttccacaagtaccgatcaacccgtgacccccgaacctactagtcaggctactaggggccgaacagaccggtcatctgttaaaaccccggaaactgtcgtgcccaccgccccggaactccaggcgagcgcttctaccgatcagcctgtgaccagcgagccaacaagtagaactacccgaggccggaagaaccgctccagcgttaaaactcccgagaccgtcgtcccagctgcccccgagctgcagccctccacctcgactgaccagcccgtgacacctgaaccaactagtcgggctaccaggggccggaccaaccgaagcagtgtgaagactccagaaagcatcgttccaattgcaccggaactgcagccttcaacgtctcgtaatcagttggttacacctgaacctacctctcgggctacgcggtgcagaacaaaccgaagcagcgtaaagaccccagagcccgtggtgcccacagcccctgaaccgcatccgactaccagcaccgaccagcccgtaactcctaagctcaccagccgtgccactcggaggaaaaccaaccggtcttctgtcaagacacctaagccagttgaaccagccgcgtctgatctggagccatttacacctacagatcagagcgtcacacctgaggccatcgcacaagggggacagagtaagactctgcgcagctccaccgtccgagccatgcccgtgccaacgaccccagaatttcaatcccctgtgacgacggatcaacccatctcaccggagcccatcacacagccaagttgcattaagagacagcgggctgccggcaatcctggatcgttggcagctccaattgaccacaaaccttgtagtgctccgctggaacctaaatctcaggcctcgcgcaaccagcggtggggggcagtgagggctgcggagtcccttacagccattcctgagcccgcatccccccagctactcgagaccccgatacatgcctctcagattcagaaagtggagcccgctggccggtcgcgcttcacgcccgaactgcaacccaaggcctctcagagccgcaaaagatctctagccacaatggactctcccccccatcagaaacaaccgcagagaggagaggtgagccagaaaacagtgatcatcaaggaggaggaagaggatactgcagaaaaacccggtaaggaagaggacgtcgtcactcccaagccgggaaagcggaaacgcgatcaagctgaggaagagcccaatagaattccttccagatcactcagaagaacgaagctcaatcaggaaagtacggccccaaaggtcctcttcaccggggttgttgatgcgcgcggcgagagagctgtcctggcgttgggtggttccctcgcaggatccgcagctgaagcctcccacctggtaacggaccggattaggaggaccgtgaagttcctctgcgcgttaggtcgcggcattcccatcctgagccttgactggcttcaccagtctaggaaggcaggttttttcctgccacctgacgagtatgtggtgactgaccccgaacaggagaaaaactttggtttctcattgcaggacgccctcagccgcgccagagagagaagactgctggaggggtacgagatatatgtcactccaggcgtgcaaccaccaccacctcagatgggagagataatcagctgctgcggaggtacctacctgccctcaatgcctcggagctataagccgcagcgggtagtgatcacctgtcctcaggattttccccactgcagcattccactacgggtgggcctcccactcctttccccggaattcctcctcaccggcgtactcaagcaagaggccaaacctgaggctttcgtcttatcgccgctggagatgtcatctacttag

SEQ ID NO: 24895 - DNA, 1941 bp, synthetic construct
  misc_feature 1..1941: note = Description of Artificial Sequence: Synthetic coding sequence
  source 1..1941: mol_type = other DNA
atgggcctgccccggctggtgtgcgccttcctgctggccgcctgctgctgttgtccaagggtggcaggcgtgccaggagaggcagagcagccagcacccgagctggtcgaagtcgaggtgggaagcacagcattactcaaatgcggcttgtctcagtcccagggaaatctgtctcacgtagattggtttagcgtccataaggaaaaacggaccctgatttttcgcgtgagacagggccaggggcagagtgaacccggcgagtacgagcagcgactgagtctgcaggacaggggagcgacactggccctgacacaagtcaccccccaagacgaacggatcttcttgtgccagggtaaaagacctcggtcacaggagtacagaattcagctgcgggtctacaaagctccagaggagccaaacatccaggtgaaccccctgggtatccccgttaactctaaggaacctgaggaggttgcgacctgcgtaggcagaaatggctatcccatcccgcaggttatatggtacaagaacgggcggcccctcaaagaggagaagaaccgggtgcacatccaaagttctcagacagtagagtcaagcggcctgtacaccctccaaagtatcctcaaggcgcaactggtaaaggaagataaggacgcgcaattttactgcgagctcaactacaggctgcctagcgggaaccacatgaaggagagtagagaggtcacagtgcccgtcttttaccccaccgagaaagtgtggctagaagttgagcctgtcgggatgttgaaggagggggacagggtagaaattcgatgtctcgctgatgggaatccgcccccccacttctcaatctccaagcaaaacccttctactagggaggccgaagaggagaccaccaacgacaatggggtgttggtgcttgagccagcccgaaaggagcactcaggcagatacgagtgtcaaggcctggatttagacaccatgatctcactgttatctgaaccgcaggagttgctcgtgaactacgtgtccgacgtccgagtctcacctgccgcaccagaacgacaggaggggagttcgcttaccttgacatgtgaagctgaatcctcccaggatttagagttccaatggctgcgggaagaaaccgggcaggtcctagaacggggtcctgtgctgcagctgcatgatttgaagagggaagcaggcggaggataccgttgtgtcgcttcagtgccttcgatcccgggattgaacagaacacaactcgtcaatgtagcaatttttggcccaccatggatggcttttaaggaacgcaaggtatgggtgaaggaaaacatggtcttaaacctgagttgcgaagctagtggccacccgcggcccaccatctcgtggaacgtcaatgggacagccagtgagcaggaccaggacccccagcgcgtgttatcaactcttaacgtgctggtcactcccgagctgctggagactggtgtagagtgcaccgccagtaacgaccttggcaaaaacacatccatcttgttcctcgaacttgtgaatcttaccactctgacccctgattccaatactaccaccggtctttctacatccaccgcatcccctcacacacgtgcaaatagcacgtcgacagaacggaaactgcctgagcccgagagccggggcgtcgtgattgtagcagtcattgtgtgcattctagttctcgcagttcttggggcggtcctctatttcctgtacaagaagggcaagctaccttgtcgacgatctgggaagcaagagattactctgcctcccagcaggaagagtgagcttgtggtggaggttaaatctgacaaactacccgaagagatgggcttgctgcagggcagctctggggacaaacgagcgcctggcgaccaaggcgagaagtacatcgatttgagacattag

SEQ ID NO: 24896 - DNA, 1584 bp, synthetic construct
  misc_feature 1..1584: note = Description of Artificial Sequence: Synthetic coding sequence
  source 1..1584: mol_type = other DNA
atggtgtacatcgtgcggcagttcctgctgtacaacgtgagcggcagcgtctatttggatcagctgatcgtgctgttgaccgctaagttttccatcctgcgcattgccgggagccgggtacaccacagtcccttctcagggcatctcgatgggtgtagtttcctgtccctgcaacactccctacatacaagtctggatatgagcagacatgaaaatgtgtttctgggcctgacgctcagctccaaatccgccggtcttaaagggtttcagctagccttcgtacccgggctattacagggaacaggcggatatctcgacgggcccctgcccacacctgtcgataacccccgtgttgggttggaggtcgggctgcgattgtcgctaccgccactgcctccctgcccgggcgtacatatccaatcaagccaaactgtggaaagctcaggcctgtacaccctgcaatctatcctgaaggcacagctggtgaaagaagacaaagacgcacaattctattgcgagctgaattaccgtctgccgtccggaaaccacatgaaagagtcccgtgaggtaacagtacctgtgttctacccaactgagaaggtttggctggaggttgaaccagtggggatgctgaaagagggagaccgggtggagattcgttgcctcgccgatggaaatccacccccccatttttcgatctccaaacagaaccccagcaccagggaggctgaggaagagacaaccaatgacaacggtgtgctggtgttggaacccgcacgtaaggagcattcgggccgatacgaatgccagggcctggatctcgataccatgatctcgctgctttcagagcctcaggagttgctggtgaactacgtgagcgatgtgagggtgagtcccgccgcccctgaacgtcaggaaggttcttccctgacactgacatgtgaagctgagagcagccaggacctggaattccagtggttgcgtgaagagactggccaggtcctcgaaagaggccccgttttacaactgcacgatcttaagcgagaggcgggaggaggttatcgctgtgttgccagcgtcccaagcattcctggactgaatcgcactcagctggtgaatgtcgccatcttcgggccgccctggatggcatttaaggaacgaaaggtttgggtgaaagaaaatatggtgttgaaccttagttgtgaggcgtctggtcacccacgcccgaccatctcctggaacgtcaacgggacagcatcggagcaagaccaagacccccaaagggtcctctccacactgaatgtgctggtgacaccagaactattggagactggtgtcgaatgtaccgcctctaacgatcttggcaaaaacacgagcatcctgtttttggagctcgtgaacctaaccacacttactcccgatagcaatacaaccacgggcttgtctacatcaaccgcctcaccccacactcgcgcaaacagcacgagcaccggcaagcctgggttagctagggaacagggttgcgcacgggcctccttcctcccgtgcccatctcccgaaagtcccgtccagaaaggggagtag

SEQ ID NO: 24897 - DNA, 141 bp, synthetic construct
  misc_feature 1..141: note = Description of Artificial Sequence: Synthetic coding sequence
  source 1..141: mol_type = other DNA
ggcgtggtgatcgtggccgtgatcgtgtgcatcctggtgctggccgtgctgggcgccgtgctctacttcctgtataaaaaaggcaaacttccctgcaggagatcaggtaagcaggagatggaaagaaacacatccatatag

SEQ ID NO: 24898 - DNA, 2253 bp, synthetic construct
  misc_feature 1..2253: note = Description of Artificial Sequence: Synthetic coding sequence
  source 1..2253: mol_type = other DNA
atgggcaagagcgagagccagatggacatcaccgacatcaacacccctaaacccaagaagaagcagcggtggacccccctagagattagcctctcagtcctcgtgctgctcctgacgattatcgcagtgactatgatcgcactgtatgctacgtacgacgatgggatctgcaagagtagcgactgcatcaagtctgcggcgagacttatacagaacatggacgccacgacggagccgtgcacagacttcttcaagtacgcctgcgggggctggctaaaacgcaacgtgatccccgaaacttccagtcgttatggcaatttcgacatactcagagatgagctggaggtcgtgctgaaggatgtgctacaggagccaaaaaccgaggatatagtcgctgtgcagaaggccaaagctttatacagatcttgcatcaacgagagcgcgatcgactcgcgcggcggcgaacccctccttaaattattgccagatatatatgggtggccagtcgcgacagaaaactgggagcaaaaatatggcgcatcatggactgccgagaaagctattgcacagctcaactccaaatacggcaagaaggtactcataaatctctttgtcggtaccgacgataagaattccgtgaaccacgttatccacatcgatcaaccccgcttgggcctcccctcaagagactactacgaatgtacaggcatctataaggaggcatgcacagcctacgttgattttatgatctccgtcgctaggctcattcgacaggaggagcggctgccaatcgatgagaatcaacttgcgcttgagatgaataaggtgatggaattagaaaaagaaatcgcgaatgctaccgcgaagcccgaagacaggaacgatcccatgctgctgtacaataaaatgaccctcgcccagatccagaataattttagcctggaaattaacgggaaaccatttagttggcttaactttacgaacgagataatgtccaccgttaacatctcaatcacaaatgaggaagacgttgtggtctatgcgcccgaatatctcactaaactgaagcctatccttacaaaatattctgcaagggacctgcagaacctgatgagctggcgattcatcatggacctcgtttcttcactaagcaggacgtataaagaatccagaaacgcatttcggaaagccctgtatgggaccacctctgagacagccacttggcgacgatgtgctaactatgttaacggcaatatggaaaacgcggtgggtaggctgtacgtggaagccgcctttgctggcgagtcaaagcatgtcgtggaggatcttatagcgcagatccgtgaggtgttcatccagaccttggacgacttgacctggatggatgctgaaactaagaagcgagcagaggagaaggccctggccatcaaagagcgaatcggctatccggacgatattgtttcaaatgacaacaaactcaacaatgaatacctggagcttaattacaaagaagatgagtattttgaaaatataattcagaacttgaaatttagccagagcaaacagttgaaaaaattgagagaaaaggttgacaaggatgagtggatttccggtgcggcagttgtgaacgccttttacagcagtggccggaaccaaatcgtttttcccgctggcattctgcagcctccatttttttctgcacagcagtcaaactcgctgaactatggcggtataggaatggtcatcggccatgaaattacacatggttttgacgacaacggccgcaatttcaataaagacggagatctcgtggattggtggacacagcagagcgcatctaactttaaagagcagtcccagtgcatggtttatcagtatggcaatttctcctgggacttggcaggcgggcagcatctgaatggaataaacaccctcggcgaaaatatcgctgacaatggcgggctcggccaagcctatcgtgcctaccagaattacatcaagaaaaacggagaggaaaagcttctgccaggactggatctgaatcacaagcaattgttcttccttaactttgctcaggtatggtgtggaacttatcgacctgagtatgccgttaatagcataaagactgacgtccattctcccgggaatttcaggatcattggcacgctccagaactcagccgagttctcagaggcttttcattgtagaaagaacagctacatgaacccagaaaagaaatgccgcgtctggtag

SEQ ID NO: 24899 - DNA, 2253 bp, synthetic construct
  misc_feature 1..2253: note = Description of Artificial Sequence: Synthetic coding sequence
  source 1..2253: mol_type = other DNA
atgggcaagagcgagagccagatggacatcaccgacatcaacacccctaaacctaaaaaaaaacagaggtggactcctttggagatcagcctctctgttctcgtgctgcttcttactatcatcgctgtaacaatgattgccctctatgcgacctacgatgacggtatctgcaagtccagtgactgtatcaaatcggccgcgcgcttgatccagaatatggacgcaactacagagccctgcactgattttttcaaatatgcttgcggagggtggttaaaaaggaatgtcattcccgagactagcagccgatatggcaatttcgacattttacgtgatgagttagaggtggttctgaaggacgtcctccaggaaccaaaaactgaggatatcgtagctgtgcagaaggccaaggcactgtacagatcctgtatcaatgagtcagcaatagactctcggggcggggagccgctgctgaaactcttacctgacatctacggctggcccgtcgcgacggagaactgggaacagaaatatggagcctcatggacggcagagaaggcaatcgcccagctgaacagcaaatacggcaagaaggtgctgatcaatctcttcgttggaactgatgacaagaattcagtgaaccatgtgatacacatagaccagcctcgactgggactaccttctcgtgattactacgagtgcaccggaatctataaagaggcctgcaccgcttatgttgacttcatgataagcgttgctcgcctgattcggcaggaagagcgattgcccatcgatgaaaatcagctggcactcgaaatgaacaaggtaatggaactggagaaggaaatcgctaacgccacagccaagcccgaggatagaaacgacccaatgcttctgtataacaaaatgaccctagcccagattcagaacaatttctcactggagattaatggcaaacctttttcttggctgaattttacgaatgagattatgtctaccgtaaacatttcaatcacaaatgaagaggacgtggtggtgtacgcaccggagtacttaaccaagctcaaacccatccttactaagtactccgcccgcgatctgcagaatttaatgagttggagatttataatggacctcgtgagctccttgtcccgcacatacaaggagtcaaggaatgcattccgtaaagcactgtatggaacaacttccgagacagctacttggcgtaggtgtgctaactatgtgaatggtaatatggaaaacgctgtcggccgcctttacgtggaggcagctttcgccggcgaaagcaagcatgtggtcgaggacctgattgcccaaattcgcgaagtctttatccagacgctggacgacctcacctggatggacgccgagacaaagaaacgagccgaggagaaggctctcgccatcaaggagcggattgggtacccagacgacattgtgagcaatgacaataagttaaacaatgagtatctagagcttaactataaggaagacgagtacttcgagaacataattcaaaacctgaaattctctcaatcgaaacagcttaaaaagctgcgggaaaaggtggataaggacgaatggatctcgggtgctgcggtcgtgaatgccttctactcttcaggccggaaccagatagttttccccgccggcatcctgcaacccccatttttctccgcccagcagtcgaacagtttaaactatggtggcataggcatggtcattggccacgagataacccacggcttcgacgacaatggacgaaattttaacaaggacggagacctggtcgactggtggacccagcagagcgcatctaacttcaaagagcagtcccaatgtatggtttatcaatacgggaatttttcttgggaccttgcaggcggtcagcatctgaacggtatcaatactcttggggaaaacatagccgacaacggcgggttgggccaggcctatcgcgcctaccagaattatattaaaaaaaatggtgaggagaagttgctgccaggactcgacctgaatcacaagcaactgttcttcttgaactttgctcaggtttggtgtggtacttaccgccctgagtacgccgtgaatagcattaagaccgacgtccattctccgggcaatttccgcataattggcacccttcaaaactctgctgagttcagcgaagcattccattgccggaaaaactcatatatgaaccctgagaagaaatgtcgagtgtggtag

SEQ ID NO: 24900 - DNA, 2253 bp, synthetic construct
  misc_feature 1..2253: note = Description of Artificial Sequence: Synthetic coding sequence
  source 1..2253: mol_type = other DNA
atgggcaagagcgagagccagatggacatcaccgacatcaacacccccaagcctaaaaagaaacagcggtggaccccactcgagatctccctctcggtcctggttctcctcctgaccatcatcgcagtgactatgattgctctctatgcaacctatgatgacggaatttgtaaaagtagcgattgcattaaaagcgccgcaagactcatccagaatatggacgcaactaccgagccctgtaccgacttctttaaatatgcctgcggcggttggctgaagcggaatgtcatccccgagacctcctctcgctacgggaactttgacattctgcgcgacgaactcgaggtggtgttgaaagatgtgctccaagagcctaagaccgaggatatcgttgctgtccagaaggcgaaggcactctacagatcctgcattaacgaatctgctatagattcccgcggtggagaaccattgctcaaattactgccagatatttatggctggcccgtggctactgagaattgggagcagaaatatggtgcaagttggaccgcggagaaggctatcgcacagctgaacagcaagtatggaaagaaggttctaatcaacctgtttgtcggaaccgacgataagaacagcgtaaatcacgtgatccacatcgatcagcccagactgggcttacccagtagagactactacgagtgcactggcatttacaaggaggcctgtaccgcatacgtcgattttatgatatccgtcgcaagactaattcgccaggaggagagactgcccattgatgaaaaccagctggccttggagatgaacaaagtaatggagctggagaaggagatcgcaaacgctactgcaaagcccgaggatagaaacgaccctatgctgttgtataacaagatgactctggctcaaattcagaacaatttctcactggaaattaatggcaagcctttttcatggctcaatttcacaaacgaaataatgtctaccgtgaacatcagcatcaccaacgaggaggacgtggtggtctacgcaccggagtacctaacaaagctgaaacccatcttgacaaagtatagtgcgagagatttgcaaaacctgatgagttggcgcttcatcatggaccttgtctcgtcactctctagaacttacaaagagtcacgcaacgcgtttcgaaaggccctctacggcaccactagcgaaacggcaacgtggaggcgctgcgcaaattacgttaacgggaatatggagaatgccgttggcagactgtacgtggaagcagcatttgctggggagtctaaacatgtggttgaagatctgattgctcagattcgggaggtgtttatccagactcttgatgatttgacgtggatggacgccgagacgaagaaacgagctgaggagaaagccttagcaataaaggaacgaatcgggtatcctgacgatatcgtgagcaacgataacaagttaaataatgagtacttagagctgaactacaaggaggatgagtacttcgagaacattatccagaatctgaagttctcccaaagtaagcagctaaaaaagctgagggaaaaggtggacaaagacgaatggatttccggcgctgccgtggttaatgcgttctactcttcaggaagaaaccagatagttttccccgccggtatactacagcccccattctttagcgctcaacaatccaattccctcaattatggggggatcgggatggtcatcggtcatgagataacccacggcttcgacgacaacggcaggaactttaataaagatggtgatctggttgactggtggacacaacagtctgcaagcaattttaaggaacaaagtcagtgcatggtttatcagtacgggaatttttcctgggaccttgccggcggacaacatcttaacggcattaataccctgggtgagaatatcgctgacaacggcggcctcgggcaggcctaccgcgcataccagaattatattaaaaaaaacggagaagaaaagttgctgccgggcctcgacctcaaccataagcagctgttctttctcaatttcgctcaggtgtggtgtgggacatataggcccgaatatgctgttaatagcattaagacagatgtccattcaccgggcaatttccgaatcatcggcacgctgcaaaacagcgcagagttctctgaggctttccattgccggaagaactcttacatgaacccagaaaaaaagtgtcgggtgtggtag

SEQ ID NO: 24901 - DNA, 486 bp, synthetic construct
  misc_feature 1..486: note = Description of Artificial Sequence: Synthetic coding sequence
  source 1..486: mol_type = other DNA
atgggcaagagcgagagccagatggacatcaccgacatcaacaccccaaaacccaagaagaagcagcggtggaccccccttgagatctcactctctgttcttgtcctgttgctcaccattattgccgtgactatgattgcgttatatgcgacctacgatgacggtatctgtaaatcttctgactgcattaagtcggccgcccggctgatccagaatatggacgcaacaactgagccttgcaccgattttttcaagtatgcttgtggcggttggttgaaacgcaatgtcatccccgaaacatcttccaggtacggcaatttcgacatactccgggatgagttagaagtcgtgctgaaagacgtgctacaagaacctaaaacagaggacattgtggcagtgcaaaaggccaaggcgctctatcggtcctgtatcaacgaatctgcaattgatagcaggggaggagagcctttgcttaaactcctctag

SEQ ID NO: 24902 - DNA, 282 bp, synthetic construct
  misc_feature 1..282: note = Description of Artificial Sequence: Synthetic coding sequence
  source 1..282: mol_type = other DNA
atgggcaagagcgagagccagatggacatcaccgacatcaacacccccaaaccaaaaaaaaaacagaggtggactcccctcgaaatttccctgagcgtccttgtcttactgcttacaattattgcagtcaccatgattgctctttacgccacatatgacgacggaatctgtaagtctagcgattgtatcaagagtgctgcccgactcattcagaacatggatgctaccaccgaaccctgcactgatttcttcaagtatgcatgtggtggttggttgaagtag

SEQ ID NO: 24903 - DNA, 702 bp, synthetic construct
  misc_feature 1..702: note = Description of Artificial Sequence: Synthetic coding sequence
  source 1..702: mol_type = other DNA
atgggcaagagcgagagccagatggacatcaccgacatcaacaccccgaaaccaaagaagaaacaacgatggacacccctggaaatttctctgtccgtgctggttctgctgctgaccattattgctgtcacaatgatcgctttgtatgctacttacgacgatggaatttgcaagtcctcggactgcatcaaatctgccgccaggctgatccagaatatggacgctacaactgagccctgcactgacttcttcaagtacgcgtgcggaggctggctaaagagaaatgtgatacccgaaacttcttcaaggtacgggaattttgatattctcagggatgagctcgaagtggtcttaaaggatgtcctccaggaacctaaaaccgaagatatcgtggctgttcagaaagccaaggctctgtaccgctcctgtattaatgaatctgctattgacagccgcggtggggagccgctgctgaaactgctgcccgacatctacggatggcctgtggccacagaaaattgggagcagaagtatggcgcctcctggactgcggagaaggccatagctcaattaaatagcaagtatggcaagaaggtgttgatcaatctgttcgtgggcaccgatgacaagaacagcgttaatcatgttatccacattgaccagccccgactggggttaccaagcagggactattatgaatag

SEQ ID NO: 24904 - DNA, 360 bp, synthetic construct
  misc_feature 1..360: note = Description of Artificial Sequence: Synthetic coding sequence
  source 1..360: mol_type = other DNA
atgggcaagagcgagagccagatggacatcaccgacatcaacacccccaagccaaaaaagaaacagcggtggactccactggaaataagcctgtccgtgctggtgctgctgctgacgataattgcagtgactatgattgcactatatgcaacgtatgacgacgggatatgtaaatcatccgactgtataaaatcggcagccagactgatacagaacatggacgccacaaccgagccctgtaccgatttctttaagtacgcttgcgggggttggctgaaacggaacgttatccctgagacttcttcccgatatggaaattttgatatcctgcgcgacgaattggaggttgttcttaaatag

SEQ ID NO: 24905 - DNA, 2253 bp, synthetic construct
  misc_feature 1..2253: note = Description of Artificial Sequence: Synthetic coding sequence
  source 1..2253: mol_type = other DNA
atgggcaagagcgagagccagatggacatcaccgacatcaacacccctaagcccaagaaaaagcaacggtggacaccgctcgagatcagtctgtccgtgttagtactgctgcttaccatcattgcagttactatgatagccctctacgcaacgtacgacgacggcatctgcaagagcagcgactgcatcaagtccgccgcccgcttgatacagaacatggatgcaaccacagaaccctgcacggattttttcaaatatgcctgcggtggatggctaaaacggaacgtaattcccgagaccagtagcaggtatggcaattttgatatcctgcgagatgagctcgaagtggttctaaaggatgtgcttcaggaaccaaaaaccgaggatatcgtggccgtgcaaaaagcaaaggccctgtaccgaagctgtataaacgaatctgccatcgattctcgggggggagagcccctcctgaaactccttcctgacatctatggttggccagtggcaacagagaactgggaacaaaaatatggggcctcctggacagccgaaaaagcaatcgcccaactgaattcaaagtatggcaagaaggtgctgatcaatctcttcgtgggtactgatgacaagaactctgtgaatcacgtgatccacatcgatcagccacgacttggactgccatcacgtgactactacgagtgcactgggatctacaaggaagcctgtaccgcctacgtcgacttcatgatttccgtggcgcgattgatccggcaagaggagcgactgcctatcgacgagaaccaattggcactggagatgaataaggtgatggagctggagaaagaaatcgccaatgctaccgctaagccggaggataggaacgacccaatgctcctctataataaaatgaccctcgcccagattcagaacaatttctcacttgaaatcaatggaaaacctttcagctggctgaatttcacaaatgagatcatgagcacagtgaacatcagcattacaaacgaagaggatgtggtcgtttatgctcctgaatatttaacaaaactgaagcccatcctgacaaaatattccgcccgagacctacaaaatttaatgtcttggcgctttatcatggatctcgtgtcatccctttctcgcacctataaggagtctaggaacgcttttaggaaggccctgtacggcactacttccgagaccgcaacttggcggagatgtgccaactacgtcaacggtaatatggagaacgccgtaggtcggctatatgtggaggcggcattcgcaggtgaatccaagcacgtcgttgaagatcttattgctcagattagagaggtctttattcagacactcgacgatcttacctggatggatgccgagacgaaaaagagagccgaggagaaagctcttgccatcaaagagaggatcggttacccagacgatatagtatcaaatgacaataaactgaacaatgaatacctggagctcaactataaggaggatgagtactttgaaaacatcatccagaacttgaagttctctcagtccaagcagctcaagaagctccgagaaaaagtggataaggatgagtggatctccggcgcagccgttgtgaacgcattctatagctctgggagaaaccagatcgtttttcctgcagggatacttcagccgcccttcttttctgctcagcagagcaactcactcaactatggtgggatcggcatggttatcggccacgagattactcacggttttgatgataatgggagaaacttcaacaaagacggggacctggtggattggtggacccagcagtcggccagcaactttaaagagcaaagccagtgcatggtttaccaatatggaaacttcagctgggacctggccgggggccaacacttaaatggaatcaataccctgggcgagaacatagcagataacggaggtctcggacaggcttacagagcatatcagaattacattaagaagaatggggaggaaaagttgcttcctggactggacctcaaccacaaacagctgtttttcttgaattttgctcaagtctggtgtggcacctaccggcctgagtacgccgtgaattcaatcaagaccgacgtccactcacctggtaatttcaggattattggcactctgcagaattctgccgaattttcagaagcattccactgtcgcaagaactcctatatgaaccccgagaagaagtgtcgcgtgtggtag

SEQ ID NO: 24906 - DNA, 2253 bp, synthetic construct
  misc_feature 1..2253: note = Description of Artificial Sequence: Synthetic coding sequence
  source 1..2253: mol_type = other DNA
atgggcaagagcgagagccagatggacatcaccgacatcaacacccccaagcccaaaaagaagcaaaggtggaccccacttgagatttctctctctgtgctggtgctgttgttaaccattattgctgtgacaatgatcgccctgtacgcaacctacgacgatggtatttgtaagtcttctgactgtatcaagtctgccgctcggctgattcaaaacatggacgctacaacagaaccatgtaccgacttttttaagtatgcctgtggtggctggctgaagcgcaacgtcatacctgagacctcttctagatatggcaacttcgatatcttaagggacgagcttgaagtggtacttaaggacgtgctgcaggaacctaaaactgaggacattgtggcagttcagaaagccaaggccctttataggagttgtataaacgagagtgctatagacagcaggggcggagagcccctcctgaagttgctccccgacatttacggctggcccgtggcaactgaaaattgggagcagaaatatggagcaagttggacagcagagaaggctattgcccagcttaactccaagtatggcaagaaagtgttgattaatttgtttgtgggaaccgacgataaaaattccgtgaatcatgtaatccacattgaccagccgcgcctgggactgcccagccgcgattactacgagtgcacgggaatctacaaggaggcttgcactgcctacgtcgatttcatgatatccgtcgcacggctcatacgtcaggaagagcgcctgcccatcgatgagaaccagctagctttggagatgaataaagtcatggaactggaaaaagagattgccaatgctactgcaaagccagaggaccgaaatgacccgatgcttctgtacaacaaaatgaccttagctcagatccagaacaactttagccttgagataaatggcaaaccattctcatggctgaacttcaccaatgagatcatgtctacagtaaatatcagtattacgaacgaggaagacgtggtggtctacgctcccgagtacttaactaaacttaaacctatcctcacgaagtacagcgcccgcgacttgcaaaatcttatgtcatggaggttcatcatggacttggtgtccagtctgtcccgtacatacaaggagagccgcaatgctttccggaaagccctttacggtacaacctcagagacagctacctggcgcaggtgtgccaattacgttaatggaaatatggagaacgctgtgggcaggctgtatgtagaggctgcttttgcaggagagtcaaaacatgtcgtggaggacctaatagcccagatccgggaagtttttatccaaacactggacgatctgacatggatggatgctgagaccaagaagagagccgaggagaaggcgctggctatcaaagagcgcattgggtatcctgatgatatcgtgagcaatgacaacaagttgaacaatgaatacctggagcttaattataaggaggacgaatactttgagaacatcattcagaatttgaagtttagccaaagcaagcagctgaagaaacttcgagagaaggtggataaggatgaatggatctcaggggccgcggtggtgaatgcattctactcctctgggcggaaccaaatcgtgttcccggccggcatattgcagcccccattcttcagtgcacagcagtctaacagcctaaactacggggggatcggcatggtgatcgggcacgaaatcacccacggtttcgacgacaatggaagaaactttaacaaggacggagacctggtagactggtggacccaacagtcagcctcgaatttcaaggaacagagccagtgcatggtgtaccagtatggcaacttctcctgggatttagctggtgggcagcaccttaatgggattaacacactgggcgaaaatatcgccgacaacgggggactgggacaggcctaccgagcttaccaaaattacattaaaaagaatggggaagaaaaactgcttccaggactcgacttgaaccataagcaactgttttttttaaattttgcccaggtgtggtgtggcacgtacagacccgagtacgcagtgaactccatcaagactgatgtgcattcccctggaaattttcgtattatcggcaccctgcagaatagcgctgaattcagcgaggctttccattgccggaaaaattcatatatgaatccggaaaagaagtgccgtgtatggtag

SEQ ID NO: 24907 - DNA, 48 bp, synthetic construct; identical to SEQ ID NO: 11443
  misc_feature 1..48: note = Description of Artificial Sequence: Synthetic coding sequence
  source 1..48: mol_type = other DNA

SEQ ID NO: 24908 - DNA, 894 bp, synthetic construct
  misc_feature 1..894: note = Description of Artificial Sequence: Synthetic coding sequence
  source 1..894: mol_type = other DNA
atgaccaccccccggaacagcgtgaacggcaccttccccgccgagcccatgaaaggtccaattgcaatgcagtcagggcccaagcctttatttcgtcgcatgtcctctctggttggccccacccagtcctttttcatgcgtgaaagcaagactttgggagcagtgcagatcatgaacggactgtttcacatagctcttggcggacttctgatgattcccgccggaatatatgcccccatctgcgtcacagtgtggtatcctctttgggggggtatcatgtacataatttccggcagtctgcttgccgccacagaaaagaattcccgaaagtgcctggtgaagggcaagatgatcatgaattccctgtccctgtttgcagccatcagtgggatgattctctctattatggatattcttaacattaagattagccacttcctcaaaatggaatcactcaactttatcagagctcacacaccatacattaatatctataactgcgagcctgctaaccccagcgaaaagaactccccttcaacacagtactgttactctattcagagtctgtttttgggcatcctctcagtcatgcttattttcgctttttttcaggaactggtcatcgccgggattgtcgaaaacgaatggaagcgcacttgttcgagacctaagagtaacatcgtcctgctcagcgcagaggagaagaaagagcagactatagaaatcaaggaggaggtggtgggtctgacggaaacgagttcccagcccaagaatgaagaggatatcgaaatcataccgattcaggaggaggaggaggaggaaactgaaaccaactttcctgaacccccgcaggatcaagagagctcgcccattgaaaatgacagctctccctag

SEQ ID NO: 24909 - DNA, 894 bp, synthetic construct
  misc_feature 1..894: note = Description of Artificial Sequence: Synthetic coding sequence
  source 1..894: mol_type = other DNA
atgaccaccccccggaacagcgtgaacggcaccttccccgccgagccgatgaagggccccattgcgatgcagtctggacccaagccactgtttcggcgcatgtcaagcttagttgggccaacccagtctttttttatgagagaatccaagaccctgggcgccgtacagatcatgaacggcctgttccatatcgcccttggcgggttgttgatgatccctgcggggatctatgcacctatctgtgtgaccgtgtggtacccgttgtggggtggcataatgtacatcatttctggcagtttacttgcagcaacagagaaaaattcacgaaaatgtctggtgaaggggaaaatgattatgaacagcttgagcctctttgccgcaatttccggcatgatcttgagcattatggacatcctaaacattaaaatttcacatttccttaaaatggagagccttaacttcatcagagcccatacgccatacatcaacatctacaactgcgagcctgccaatcctagcgaaaagaacagcccatccacccagtattgttattcaatccaatccttgtttctggggatcctgtccgtgatgcttattttcgcgttttttcaggagttggttatcgcgggaatcgtagagaatgaatggaagaggacatgttctaggccgaaatcaaatatcgtgcttttgtccgccgaggaaaagaaagagcagaccatcgagatcaaggaggaggtcgttggactcacggaaaccagctcacagccgaagaacgaggaagacattgaaataatcccaatccaggaagaggaagaggaggagacagagactaatttcccagaaccaccacaggatcaggagagtagccccattgaaaatgactcttcgccttag

SEQ ID NO: 24910 - DNA, 24 bp, synthetic construct
  misc_feature 1..24: note = Description of Artificial Sequence: Synthetic coding sequence
  source 1..24: mol_type = other DNA
atgaccaccccccggaacagctag

SEQ ID NO: 24911 - DNA, 855 bp, synthetic construct
  misc_feature 1..855: note = Description of Artificial Sequence: Synthetic coding sequence
  source 1..855: mol_type = other DNA
atgaccaccccccggaacagcgtgaacggcaccttccccgccgagccaatgaaaggtcccattgcgatgcagagcggaccaaagcccctgtttcgccgtatgtcctctctggtgggcccaactcagtctttcttcatgcgcgagagtaaaactctgggagctgtgcaaatcatgaatggcctcttccacatcgccttgggaggtctactaatgattcctgcaggtatctacgcaccaatctgtgtgaccgtttggtacccactctggggcggcattatgtatatcatctcaggctcgctgttggcagccacagagaagaacagccggaagtgccttgtgaagggcaaaatgatcatgaacagcttgtctctcttcgccgccatcagtggcatgattcttagcataatggacatcctcaatataaagatctctcacttcctgaaaatggagtccctcaattttatccgagcccatactccttatattaacatctataactgcgaacccgcaaatccttctgaaaagaattcaccaagtacccagtactgttactctatacagtcactcttcctggagctggtaatcgcaggcatagtggagaatgaatggaagagaacttgctcacgcccaaaaagtaatatcgtgttgctcagcgctgaggagaagaaagaacagactattgagatcaaagaagaggtcgtcgggctcaccgaaactagttctcagccaaagaacgaagaagacatcgagataattcctatccaagaggaggaagaagaagagacagaaactaactttcccgagcctccccaggaccaggaatcctctccaattgagaatgatagtagtccttag

SEQ ID NO: 24912 - DNA, 21 bp, synthetic construct
  misc_feature 1..21: note = Description of Artificial Sequence: Synthetic coding sequence
  source 1..21: mol_type = other DNA
atgaccaccccccggaactag

SEQ ID NO: 24913 - DNA, 894 bp, synthetic construct
  misc_feature 1..894: note = Description of Artificial Sequence: Synthetic coding sequence
  source 1..894: mol_type = other DNA
atgaccaccccccggaacagcgtgaacggcaccttccccgccgagcccatgaaagggcccattgcaatgcagtccggacctaagcccctgttcagacgcatgagcagcttggtcggaccgacccagtcattttttatgagggaaagtaaaaccttaggtgcggtgcagatcatgaacggtctgttccacatcgctctcggcggcctgctgatgatacccgcgggcatatatgcaccaatctgcgtgacagtgtggtacccactgtggggcggcatcatgtatattatttccggatcccttctcgccgctaccgagaaaaacagcagaaaatgcctggtgaaagggaagatgataatgaactctctgtcgcttttcgcagctatttccggaatgattcttagtatcatggacattttaaacatcaagatctcacacttcctgaagatggagtctttaaatttcattagagctcacacaccgtatattaacatctataattgtgagccggcaaaccctagtgagaaaaactccccctccacacagtactgttactctatacaatcattgttcctggggatattaagtgtgatgctcattttcgcgttctttcaggaacttgtgatagcagggatagtcgaaaacgagtggaagcgcacgtgtagcaggcctaaaagcaatatagttctcttgtccgcagaggaaaaaaaggaacagacgatcgaaattaaggaagaggtggttgggcttactgaaacgagttctcagccaaaaaatgaggaagatatcgaaataatccccattcaagaggaggaggaggaggaaactgaaactaatttccctgagcctccacaggaccaggaatctagccccatcgaaaatgactctagtccctag

SEQ ID NO: 24914 - DNA, 930 bp, synthetic construct
  misc_feature 1..930: note = Description of Artificial Sequence: Synthetic coding sequence
  source 1..930: mol_type = other DNA
atggacgaccagggctgcccccggtgcaagaccaccaagtaccggaatccctcacttaaacttatggtgaatgtctgcggccacaccctgtgtgaatcttgtgttgatttactcttcgttcgaggcgccgggaactgcccagagtgtggcacacctctgaggaagagtaacttccgggttcaattgtttgaggatcccaccgtggataaagaagttgagattcggaagaaagttttgaagatatacaacaagagggaggaggactttcctagcctaagagaatataatgacttcctggaagaggtggaggagattgtctttaacctcacaaataacgtggacctggataacaccaagaaaaagatggagatctatcagaaggaaaacaaagacgtgatccagaaaaataagctgaagttgacaagggagcaggaggaactcgaggaagccctggaggtcgaacgccaggagaacgaacagcgcagactgtttatccagaaggaagagcagctgcagcagatccttaaaaggaaaaataaacaggctttcttggatgaactggagagttcagatttaccagtggcattgctactggctcaacataaggatcgcagtacccagctggaaatgcaattggaaaagcctaagcccgtgaaacctgtcaccttttcaaccggcatcaaaatggggcagcatatcagtctggccccaattcataagctggaggaggcactttatgagtaccagcctctacagatagagacctacggcccgcacgtgcctgagctagagatgctgggtaggctgggctatttaaaccacgtgcgagcggcatctccccaggacctcgcaggcggatacacgtctagtttggcatgccatagagctttgcaggacgcctttagtggcttattttggcaaccgtcatag

SEQ ID NO: 24915 - DNA, 804 bp, synthetic construct
  misc_feature 1..804: note = Description of Artificial Sequence: Synthetic coding sequence
  source 1..804: mol_type = other DNA
atggacgaccagggctgcccccggtgcaagaccaccaagtaccggaacccatccctgaaactgatggttaacgtatgcggtcacactctgtgtgaaagttgtgtagaccttttattcgtgaggggggccgggaattgtccagaatgcgggacacctctgagaaagtctaatttccgcgtgcagctcttcgaagatcctacagtggataaggaagttgaaatacggaagaaggtgctgaaaatctataacaagcgcgaagaagattttccctctctgagagagtataacgacttcctggaggaagtggaagagatagtctttaacctcacaaataacgtagacctcgacaacactaagaagaaaatggagatataccagaaggagaataaagatgttatacaaaaaaataagctgaaactgacccgcgaacaggaggaactcgaagaagccttagaggtggaacgacaagagaatgaacagcgtagactcttcatccagaaagaggaacagttgcagcagatcctcaagagaaaaaacaaacaggcatttctcgatgaactcggacaacacatatccctggccccaattcataagttggaggaggcactttatgaatatcaaccacttcagattgaaacatacggcccgcacgtaccagagctggagatgctcggcaggcttggctatttaaaccatgtcagagccgcctccccacaggatctggccggcgggtatacaagctctctggcgtgtcaccgcgcgctccaggacgccttttcaggtctgttctggcaacctagctag

SEQ ID NO: 24916 - DNA, 510 bp, synthetic construct
  misc_feature 1..510: note = Description of Artificial Sequence: Synthetic coding sequence
  source 1..510: mol_type = other DNA
acccgggagcaggaggagctggaggaggccctggaggtggagcggcaggagaacgaacagcggcgcctgttcatacagaaggaggaacagttgcagcaaatactgaagaggaaaaataaacaggctttcctggatgagttggagtcgtctgatttgcccgtcgcccttctgcttgctcagcacaaggaccggagtacgcagctggaaatgcagcttgaaaaaccaaaaccagtaaagcctgttacgttctcaactggaatcaaaatggggcagcacatctctctcgccccaatccataagttggaggaggccctctatgaatatcagccactccagatagagacctatggaccacacgtacccgagcttgagatgctggggcgcctcgggtatttgaatcatgtacgggctgcatctcctcaggacctcgctggggggtatacatcctccctagcctgccatcgcgcactgcaagatgcgttcagcggtctgttctggcaaccctcctag

SEQ ID NO: 24917 - DNA, 3963 bp, synthetic construct
  misc_feature 1..3963: note = Description of Artificial Sequence: Synthetic coding sequence
  source 1..3963: mol_type = other DNA
atgttcggcctggaccagttcgagccccaggtgaacagccggaacgcgggacagggcgagcgcaacttcaacgagactggcttatcaatgaatacccacttcaaagccccagcctttcacacaggcgggcctcctggccccgttgatccagcaatgagcgcgcttggcgagcctccaattctgggtatgaatatggaaccctatgggttccacgctaggggccatagtgaactgcatgcaggcgggttgcaagctcagcctgttcacggcttctttggcggccaacagcctcaccacgggcaccccgggtcccatcacccgcatcagcatcacccccacttcgggggcaacttcggcggccccgaccccggggctagctgcctgcatggcggtaggctgctgggttacggtggcgccgccggaggactgggaagccagccaccctttgctgagggctacgagcacatggcggagtctcagggacccgaatcttttggtccacagcgaccgggtaatcttcccgactttcactctagcggggcgtcctctcacgctgttcctgctccatgtctcccacttgaccagtcccccaatcgtgctgccagcttccacggccttccttcttcatccggtagcgactctcacagtctcgagcccaggagagtcaccaatcaaggggccgtcgatagcctggagtacaactaccccggggaagcaccttccggacacttcgatatgtttagtcctagcgactccgaaggacagctaccgcactacgcagctggccgtcaggtccccgggggcgcattcccgggagcttcagccatgcccagagccgccggaatggtcgggttgtcaaagatgcacgcacaacccccccaacagcagcctcagcagcagcagcaaccgcagcagcagcagcagcagcatggagttttctttgagaggttttctggcgcgcggaagatgcccgtcggcttggagccaagcgtcggttcgagacatccgctcatgcaaccgcctcaacaggcgcctcctccacctcagcaacagccgccgcaacaacctccacagcaacaacctccgcccccccctggcctactggtgcgacagaattcatgtccaccggcccttccccgtcctcagcagggtgaagccggaactccatctgggggcctgcaggatggcggtccgatgctcccttctcaacacgctcagtttgagtatcccatccataggctggagaatagatccatgcatccatatagtgagcccgttttctccatgcagcacccgcccccccagcaagctccaaaccaaagacttcagcacttcgatgcaccgccatacatgaacgttgctaagaggccccgtttcgactttccaggcagcgccggcgtggaccggtgcgcctcctggaatggaagcatgcacaatggcgcgttggacaatcacctatcgcccagcgcttaccctggcctgcctggcgaattcaccccccctgtaccggatagttttccatctggcccccccttacagcatccggcccctgaccaccagtctctgcaacagcaacaacagcaacagcaacagcagcaacagcagcagcagcagcaacagcaacagcaacagcaacaacagcagcagcaacgccagaacgcagcgctgatgataaagcagatggctagtaggaatcagcagcagcgactgagacagcccaatctggcgcagcttgggcatcccggcgacgtgggtcaagggggcctggtccacggaggccccgtggggggcctggctcagcctaactttgagagagagggcgggtccacgggtgccggaaggcttggaaccttcgagcagcaagctccccacctggctcaggagtcagcgtggttcagcggtcctcaccctccgcccggagatctcctgcctaggaggatgggaggctctggactgcctgccgattgtggcccacatgatccttctctggctcctcctccacctccaggaggtagcggtgttctctttcgggggccccttcaggaacctatgcgcatgccgggcgagggtcatgtccctgcccttcctagccccggactgcagttcggtggaagcttaggaggccttggccaattgcaatctcctggagcaggcgttggtctgccgagcgccgcgagcgaaagacgccctccaccaccagacttcgcaaccagcgccctgggcggccaacctgggttccctttcggtgccgcaggtaggcagtcaacgccccatagcggtcccggtgttaattctcctccgtcggctggcggcggggggggttcttccgggggaggaggcgggggcggtgcctacccaccccagccagactttcagccgagtcagagaacttcggccagcaaacttggggcactgagtctcggcagcttcaacaagccttcaagcaaagataatctcttcgggcagagctgccttgccgcgctgagcacagcatgtcagaacatgattgcttcccttggcgcccccaatcttaatgtcaccttcaacaagaagaatccccccgagggcaagaggaagctttctcagaatgaaaccgacggagccgcagtagccggcaaccctgggtctgactatttcccaggcggcaccgctccaggcgccccagggcccggtggccccagcgggacgtcatccagcggcagtaaggcctcaggtccaccaaatccgccagcccagggggacggcacctctctctctcctaactataccctcgagagtactagcggaaacgatggtaagcccgtgtctggcggaggggggaggggcagaggacggcgaaagcgggacagtggccatgtttcaccagggacattctttgacaagtacagcgccgctcctgactccggtggagcccctggagtgtcacccggccagcagcaggcctctggtgccgcagtcggtgggtcctcagccggggagactcgcggcgcacctacccctcatgaaaaggctctcaccagtcctagctgggggaaaggggccgaactacttttgggcgaccaaccagatttgattggcagtctggacgggggggcaaagtccgattccagctcccccaacgtgggagagttcgcatcagatgaggttagtaccagttatgcgaacgaagacgaggtgagctcctctagcgacaatccccaggcccttgtcaaggcctctcggtctcccctggttaccggcagtcccaagctgccacccaggggtgtaggggcgggagaacacggtcccaaggcaccaccgcccgcgcttgggctcggcattatgtctaattctactagcactcccgattcctatgggggcggtggtggacccggccaccctggcactcccggactggaacaggtcagaacgccaacatcatcttctggcgcaccgcccccagatgagatccatccacttgaaattctgcaggcgcaaatccagctgcagaggcaacaattctccatatctgaggatcaaccactgggattgaaagggggcaagaaaggagagtgcgctgtgggcgcctctggtgctcagaatggagattctgagctcggttcctgctgcagcgaggctgtaaaatccgcaatgtccactattgatctcgacagcttgatggctgagcactccgctgcatggtatatgcctgctgacaaggccttggttgatagtgccgatgatgataagactctcgctccgtgggaaaaggccaaaccacagaatcctaatagcaaggaagcacacgatttgcccgccaacaaagcatcagcgagtcagcctgggagtcatctgcagtgtctgtccgtccactgtacagacgatgtcggggacgcaaaggctcgtgcaagcgtgccaacatggagaagtctgcacagcgatatctcgaacaggttcggcacttttgtggcggcattaacctag

SEQ ID NO: 24918 - DNA, 4227 bp, synthetic construct
  misc_feature 1..4227: note = Description of Artificial Sequence: Synthetic coding sequence
  source 1..4227: mol_type = other DNA
atgaaggcccccgccgtgctggcccccggcatcctggtgctgctgttcacacttgtgcagaggtcaaatggcgagtgcaaagaagcgctcgccaaatctgagatgaacgtcaatatgaaataccagctcccaaattttaccgctgagaccccgattcaaaacgtgattctccacgaacaccacatttttctgggggccacaaattacatttatgttcttaacgaggaagacctgcagaaagtcgcggaatacaaaaccggccccgtgctggaacacccggactgtttcccctgtcaggattgctcctctaaggcgaacctttctgggggtgtatggaaggacaatatcaacatggctctcgtggtcgatacctattatgacgaccagctcatctcctgcggcagcgtgaatagggggacctgccaaaggcatgtctttccacataatcacacagccgacatccagtcagaagttcactgcatattctcacctcaaatagaagaaccctcccaatgccctgactgcgttgtgtcggccctgggagccaaggtgctgtctagtgtgaaagatcggtttatcaatttcttcgtcggaaacacaatcaattcatcatattttccagatcatcccctgcactcaatttctgtgcggcgcctcaaagagacaaaggacggtttcatgtttttaacagaccagagctatatcgacgtcttgcccgagtttagggactcatatcctatcaagtacgtccatgccttcgaatctaataatttcatctatttcttgacagtacagcgcgagacactcgacgctcagacttttcatactcgaatcattcgtttttgctccataaattctggattgcactcctacatggagatgcctctcgaatgtatcctcactgagaaacgaaagaagcgtagtactaaaaaagaggtgtttaacatcctgcaggccgcttatgtgagtaaacccggcgctcagcttgcgcggcagataggagcctcgctcaacgacgatatcctgtttggcgttttcgcccagtcaaagcctgacagtgccgagcccatggataggtctgcaatgtgcgcctttcctataaagtatgtcaatgacttcttcaacaaaatagtcaacaaaaataatgtccggtgcctccagcatttttatggccctaaccatgagcattgcttcaaccggacgctgctgcggaattcttccggatgcgaagcccgcagagatgagtacaggacagagttcacaaccgcactgcagagggtggatctgttcatgggtcagttttcagaggtcctactgactagcatctccacctttatcaagggtgacctgactatcgcaaacctcggtacaagcgaggggcgatttatgcaagtggtggtcagtagaagcggtccttctacacctcatgttaattttctgctcgattctcacccagtgtctcccgaagtgatcgtcgagcacaccctgaaccaaaatggctacaccctcgtgattactggaaagaagatcacaaaaatacctctgaacgggctgggctgtcgccattttcagagctgctctcagtgtctgtccgcaccgccattcgtccagtgcgggtggtgccatgataagtgcgtacgatctgaagaatgccttagtgggacctggactcaacagatctgtctaccggccatatacaaagtctttccaaacagcgcccctctggaagggggtactcgcctgactatctgtggctgggattttggattccggcgcaacaataaatttgatctcaagaagacgcgcgtactgttaggcaatgaaagttgcacactcacgctctccgaaagtactatgaacacactgaagtgcactgtgggacctgcaatgaataagcactttaacatgtccattatcatctctaacggacacggaaccacccagtatagtacattctcctacgtggaccctgtgatcactagcattagccccaagtacggtcctatggccgggggtaccctcctaaccctaactggtaactatttgaactctgggaactctagacacatttccatcggaggaaagacatgtaccctgaaatccgtttcaaatagcatcctggaatgctacacccctgcccagacgatttccaccgagtttgccgttaaacttaagatcgatctggccaatagagagacttccattttttcctatcgtgaagaccccatcgtatacgaaattcaccctaccaaatctttcatttccacttggtggaaagagccactgaatatcgtgagcttcttgttttgtttcgccagcggcggaagcaccatcaccggcgtggggaaaaatcttaacagcgttagcgtgcccagaatggtcattaatgtgcacgaggctgggcgcaatttcacagtagcctgtcaacatagatctaatagcgagatcatttgctgtacaaccccaagcctgcagcaactgaacctgcaactgcccttaaagaccaaggccttcttcatgctggatggaattctgtcaaagtacttcgatctcatttacgttcataatcccgtattcaaaccttttgaaaaaccggtgatgattagcatggggaacgagaacgtgctggaaatcaaaggaaatgatattgatcctgaggccgtgaagggggaggtgctcaaggtgggcaacaagtcctgcgaaaacatccatttacacagcgaggcagtgctttgcacagtgcccaatgatctgctaaaacttaattcagagctgaatatcgagtggaaacaggctatctcctcgacagtgttggggaaagtcatcgtccaacccgaccagaatttcacagggctcatcgcaggggtcgtgtcgattagcaccgccctcttgctgctgctgggctttttcctctggctcaaaaaacgtaagcaaattaaggatctgggtagcgaacttgtacgctatgacgccagagttcacacccctcaccttgaccgtctggtgtctgccaggagcgtgtctccgaccacagagatggtgtctaacgagtctgtagactatcgcgcaacattccccgaagaccagttccctaattcaagccaaaacggctcttgcaggcaggtgcagtaccccctgactgacatgagccccatccttacttctggagactctgatatatccagcccactccttcaaaacacggttcacatcgaccttagcgctttgaacccagagttagtccaggccgtgcagcatgtagtgattggtccctctagcttaattgtgcacttcaatgaagtgattgggcgtggtcatttcggttgcgtttatcacggtactctgcttgacaacgatggaaaaaagattcattgcgcagtaaagtcactcaaccgaataacggacatcggtgaagtgtctcagttcctcacggaggggattattatgaaggacttttcacaccccaatgtgctgtcactgctcgggatctgtctccgatctgagggatctccactggtggttcttccttacatgaagcacggtgacttgcgcaacttcatacgtaatgagacccacaacccgaccgtaaaggacctcataggttttggcctccaggtggccaaggggatgaaatatctggcgagtaagaaatttgtccaccgagatctggccgctcggaactgcatgcttgatgagaagttcacagtgaaggtagctgacttcggccttgccagagatatgtatgataaagagtattacagcgtacacaataaaactggagctaaactgcctgttaaatggatggcccttgagtcattacagacccagaagttcacaactaagtcagatgtctggagcttcggcgtcctgctttgggaactcatgaccaggggagccccaccttaccccgacgttaatacctttgacatcactgtctacctgctgcagggacgccggctgctgcaaccggaatattgtcctgatccattgtatgaggtcatgttaaagtgttggcaccccaaggctgaaatgaggccatctttctcggaactagtcagccgtatcagcgctatattctccacattcattggggaacactatgtacatgtcaacgccacctatgtcaacgtgaaatgtgtggcaccgtacccatctttactgtcttccgaagacaatgcggacgacgaggtagatacgaggccagcctctttttgggaaacgagctag

SEQ ID NO: 24919 - DNA, 4173 bp, synthetic construct
  misc_feature 1..4173: note = Description of Artificial Sequence: Synthetic coding sequence
  source 1..4173: mol_type = other DNA
atgaaggcccccgccgtgctggcccccggcatcctggtgctgctgttcactctggttcagcgctcaaacggcgagtgcaaggaagcactagcaaagtctgagatgaatgtcaacatgaagtaccagttgcccaatttcacagccgagactcccatccagaatgtgatcttgcacgagcaccacatcttcctcggcgctacaaactatatttacgtgcttaacgaagaggacctgcagaaggtcgcggaatataagactggaccggttctcgaacaccccgattgctttccctgccaagattgctcatccaaagcaaatctgtctggcggagtttggaaagacaacatcaatatggctctcgtcgtggacacgtactatgatgaccagctgatctcttgtggcagcgtgaatcggggcacatgtcagcggcacgtgttccctcacaaccacactgctgacattcaatctgaagtgcattgcattttttcaccgcagatcgaggagccatcccagtgtcctgactgtgttgtgtctgcactgggggccaaggtcttgtcctctgttaaggatagattcatcaactttttcgtcggcaacactattaactcctcatactttcctgatcatcctctgcacagtatcagcgtgcgtcggcttaaggagacaaaggatggattcatgttcttgacagaccaatcttacattgatgtgctccctgagttccgtgactcttacccgataaagtacgtccacgcattcgaatcaaataacttcatatatttccttacagtccagagagagactctcgacgcccaaactttccacaccagaattataagattctgcagcattaattcaggtctgcatagctacatggaaatgcccctcgaatgcatcttgaccgagaagcgtaagaaaagatctacgaagaaagaggtgttcaacattctgcaggcagcatatgtgtctaagccaggcgcgcagttagctaggcagattggcgctagtctaaacgatgacatcctttttggcgtgtttgctcagtccaaacctgacagtgccgaacccatggacagatcagcgatgtgtgcatttcctattaaatacgtaaatgacttctttaataagattgttaataaaaacaacgtgaggtgcttgcagcacttttatggccctaatcacgaacattgtttcaaccgcactctcctccgtaactccagtgggtgcgaggcccgtagagatgagtatcggaccgagttcaccaccgctctccagcgggttgatctctttatgggccagttctcagaggtcctgcttacctctatctctacctttattaaaggagatttaaccattgccaacctcggaacctctgaggggagattcatgcaagttgtagtgtctcgctctggaccctctacgcctcatgtgaactttttactggattcccatcctgtttcaccagaagtgatcgttgaacacaccttgaatcagaacggctacaccctagtgataacaggcaagaaaatcacaaagatccctctcaatgggctgggttgtcgccactttcaatcctgctcgcaatgtctttctgccccccctttcgttcagtgcggttggtgccatgataagtgcgtgcgttccgaggaatgcctgtccggaacctggacacagcaaatatgtttgcctgccatctataaggtcttccccaactccgccccgttggagggtggaacgcgattaacaatttgtggctgggacttcggctttaggcgcaataataaattcgaccttaaaaagacccgggtgctgctcggcaacgaatcctgcacacttactctgtccgagagtaccatgaacacactgaagtgcacagttggacccgcgatgaataaacacttcaacatgagcataattatcagcaatgggcatggaaccacgcagtacagtacattcagctatgtggatcccgtgattacgagtatctcgccgaaatatgggcctatggccggcggaactctgctaactttaacaggcaactacttaaattcaggcaatagtcgccacataagcatcggaggaaagacctgcaccctgaagagtgtcagtaattcaatcctcgaatgttacacgcccgcgcagacaatatcgacagaatttgccgttaaactcaagattgatcttgccaatcgtgagactagcatctttagttatcgggaggatcccattgtttacgaaattcaccccactaaaagcttcatttctggcggaagcacaattacaggagtcggcaagaatttaaattccgtatctgtaccgcgtatggttatcaacgtgcacgaggccgggcgtaactttaccgtagcttgccagcatcggtctaactccgagataatctgctgcacaaccccatcactgcaacagctcaacctgcagctgccgcttaagaccaaggcattctttatgctggatggaattctgtctaaatattttgacctgatctatgtgcataaccctgtgttcaaaccattcgagaagcccgtgatgatctccatggggaatgagaacgtcctggagatcaagggcaatgacattgaccctgaagcggtcaagggcgaggtgctgaaagtgggaaataagagctgcgaaaacattcatctccactctgaagctgtgctctgcacagttcccaatgatctgttgaagcttaattcagaactgaacatcgagtggaagcaggcgatctcctctaccgtgctgggaaaagtcatcgttcagcccgatcagaactttaccgggttaatcgctggcgtggttagcattagcaccgcactactgctcttgctcgggttctttctctggctcaaaaaaagaaagcaaatcaaggatctgggctcagagctcgtgagatatgatgcgagagtccatacgccccatctggacaggctggttagtgcgcggtcagtgtcacccaccacagaaatggtttccaatgaaagcgttgactatagagcgacgtttccagaagatcagtttcccaattcgagccagaatggttcctgtcgacaagtgcagtaccccctcactgacatgtcacccattctgacctcgggagattcagacatttccagcccactgctccagaacactgtgcacatcgatctaagcgcactgaatccagagctggtgcaagccgtgcagcacgttgttatcgggcccagttctcttatcgtgcattttaacgaggttataggaaggggtcacttcggatgcgtgtaccatggaactttgttggataatgatgggaagaaaatccactgcgctgtgaaaagtctgaataggattaccgacatcggagaggtctctcaattcctgaccgaaggaatcattatgaaggactttagtcatcccaacgttctatcgttgctaggcatctgtttgcggtcagaagggtcccctctggtagtattgccttacatgaagcacggagacctcagaaactttatacgtaatgaaacccataacccaacagtgaaagaccttattggcttcgggttgcaagtagctaaaggcatgaagtatctggcatctaaaaagttcgtccacagggatctggccgctagaaattgcatgctggacgagaagtttacagtgaaggtagccgatttcggactagctcgggacatgtacgataaagagtactactctgtacacaacaaaactggggcaaaactgcccgtcaagtggatggccctcgagagcctccagacccagaagtttaccactaagagtgatgtgtggagtttcggcgtcctcctgtgggagctgatgacaaggggagcaccaccataccccgatgtaaatacgttcgatataactgtttacctgcttcaaggtaggcggctcttgcaacccgaatactgccctgacccactttacgaagtgatgcttaaatgctggcaccccaaggccgagatgcggcctagcttttctgaactggtgtcgaggatctccgccatttttagcacatttataggcgagcactacgtgcacgtgaacgctacttatgtgaacgtgaaatgcgtggcaccctatcctagcttgcttagtagcgaggacaacgccgacgacgaggtggacactcgcccagcaagcttttgggaaacttcgtag

SEQ ID NO: 24920 - DNA, 2295 bp, synthetic construct
  misc_feature 1..2295: note = Description of Artificial Sequence: Synthetic coding sequence
  source 1..2295: mol_type = other DNA
atgaaggcccccgccgtgctggcccccggcatcctggtgctgctgttcaccctggttcaacggtccaatggagagtgtaaagaggctctcgccaaatctgagatgaatgtgaatatgaagtaccagctgcccaacttcaccgcggaaactcctatccagaatgtgattttacacgagcatcatatattcctcggggccacaaactatatctacgtgctgaatgaagaagacctgcaaaaggtagcagaatataagaccggacccgtgctcgagcatcccgattgttttccctgccaagattgtagctctaaagcgaatctcagtgggggggtgtggaaggataacattaatatggccctggtggtcgacacgtattacgacgaccaactgatatcttgtgggtcagttaatcgtgggacatgccaaagacatgtttttcctcacaaccacaccgccgacattcagtcggaagtacactgtattttttcccctcaaatagaagaacctagccaatgccctgattgcgtggtgtcagcactcggagcgaaagttctgtcttcagtaaaggatcgatttatcaatttcttcgttgggaacaccatcaactccagttatttccctgaccatccgctgcactcaatttcagtgcggcggttaaaggaaactaaggacggctttatgttcctcaccgaccagtcttacatagacgtcctgcctgaattcagagactcctaccccattaaatatgtgcacgcttttgagagcaataatttcatttacttcctcaccgtgcagagagaaactctggatgcacaaacatttcatactagaatcatccggttctgttccatcaacagcggactacattcatacatggaaatgccgctggagtgcatccttacggagaagaggaagaagcgttctacaaagaaggaagtcttcaacatccttcaggctgcctatgtttccaaacccggggcacaactcgcacgccagatcggcgcgagtctgaacgacgatattcttttcggcgttttcgcccagtccaagccagattcagccgagccgatggaccgctcggcaatgtgtgcgttccctattaaatacgtcaatgacttcttcaacaaaattgtgaataaaaataacgtgaggtgtttacaacatttttacggaccgaatcatgagcactgctttaacagaacactcttgcgaaattcaagcggctgtgaagcacgcagggacgaatacagaacagaatttactactgccctgcaacgggtcgatttatttatggggcagttttcggaggtgttactgacttccattagcacgtttatcaagggggatctgactatcgccaatctgggtacttccgagggtcggtttatgcaggtggttgtttctaggagcgggccctcaacacctcacgtcaatttcctgctcgattcccacccagtgagtcctgaggtgattgtggagcacaccttgaaccagaacgggtataccttggttattacgggcaaaaagatcactaaaattccgcttaacggcctgggttgtaggcactttcagtcgtgcagccaatgtctttcagcgccaccttttgttcagtgcggttggtgccacgacaaatgcgtccgatcagaagagtgtctgagtggcacttggacccagcaaatctgtctccccgctatttacaaggtgttccccaattccgcccccctggaaggaggcacccgcttaacgatctgtggatgggactttggcttccggagaaacaacaagtttgacctgaagaagaccagagtcctgcttggcaatgaatcctgcactctgactctgtctgagagtaccatgaacactctgaaatgcaccgtcggcccagctatgaataaacatttcaacatgtcgatcattatctcaaacggtcacgggacaactcaatactctactttcagttacgtggaccctgtgattacctcgatatcccccaagtacggtccgatggctggaggcacactattaaccttgacaggtaattacctgaactcagggaactcccggcatatttctataggtggcaagacctgtaccctgaagtccgtgtccaattccatcctagagtgttacacgcctgcccagacaatttccactgagtttgcagtgaaactaaaaatcgacctggccaatagggaaacctccatcttttcctatagggaggatcccatagtatatgaaatacatccaacaaagagtttcatccggcatgtgaatattgcgctgatacagaggtag

SEQ ID NO: 24921 - DNA, 783 bp, synthetic construct
  misc_feature 1..783: note = Description of Artificial Sequence: Synthetic coding sequence
  source 1..783: mol_type = other DNA
atgaaggacttcagccaccccaacgtgctgagcctgctgggcatctgcctccgctcagaaggatcgccactggtggtgctcccatatatgaaacatggagatttgcggaatttcattaggaatgagacccataatcccaccgtaaaggacctgatcggctttggcctgcaggtagctaaagggatgaagtatctggccagtaaaaaattcgtgcacagagacctggccgcgaggaactgcatgcttgatgagaagtttacagtgaaagttgccgactttggccttgcccgggacatgtacgacaaagaatactatagcgtgcacaataagaccggagcgaaactgccagtcaaatggatggccttggaatcactacagacccaaaaattcaccacaaaaagtgatgtgtggtccttcggagtgcttctctgggagttaatgaccaggggcgctccaccctatcccgacgtgaataccttcgacatcactgtctatctgttgcaagggaggcgactactgcaacccgagtactgtcctgatccactttatgaagtcatgctcaagtgttggcaccctaaagcggagatgcgcccctccttttcagaacttgtgtctagaattagcgctattttttccaccttcatcggggaacactatgtgcatgtgaacgcaacatatgtcaacgtcaaatgtgtggccccgtatccgagcctcctgtcatccgaggacaatgccgacgacgaagtagatacacgcccagcctccttttgggagacctcctag

SEQ ID NO: 24922 - DNA, 1749 bp, synthetic construct
  misc_feature 1..1749: note = Description of Artificial Sequence: Synthetic coding sequence
  source 1..1749: mol_type = other DNA
atggccgcccggagctggcaggacgagctggcccagcaggccgaggaggggtctgcacgacttcgcgagatgctctctgtgggactgggattccttaggaccgagctcgggctggatctaggcctggaacccaaacgttacccagggtgggtcatactggtgggcactggggccctgggcctgctgctgctgtttcttttgggttatggatgggccgcggcctgtgctggcgccagaaagaagaggaggtcccctcccagaaaacgcgaggaagcagccgcagtgccagccgcagcccccgacgacctggcccttttgaaaaacctgagatcggaagagcaaaaaaaaaaaaacaggaaaaagctgtcagaaaaacccaagccaaacggccggactgtagaagtggctgagggcgaagccgtgcgaaccccacaatcagtgacagccaaacaaccccctgaaatcgacaagaagaacgagaaaagcaagaagaacaagaaaaagtctaaatcggacgctaaggcagtccagaattcctcacgccacgatggtaaggaggtggatgaaggtgcctgggaaacaaagatatctcacagggagaaaagacagcagagaaagcgggataaggtcctgactgattctggatctctggacagcacaatccccggcatcgagaatacaataaccgtgaccactgaacagttgactaccgccagttttcccgtgggttccaagaaaaacaaaggggactcccatctaaacgttcaagtgagcaacttcaagagtggaaaaggggattccaccttacaggtaagttcaggattgaatgagaatttaacagtgaacggcggagggtggaatgaaaagtccgttaagctcagttcccagatctcggccggagaggaaaagtggaatagcgtaagtcctgcctctgcaggtaagcggaagacagagccctctgcatggagccaggacactggggacgccaacactaacggcaaagactggggaagaagctggagtgaccgcagcatattttcaggcatcgggtcaacggcagaaccagtgagtcagtccaccaccagtgactatcagtgggacgtctctcgcaaccaaccttacatcgatgatgaatggagcggactgaatggtctatcatctgctgatccaaatagcgattggaatgcacctgccgaagaatgggggaactgggtggatgaggagagggctagcctacttaagtctcaagaacccattcccgatgaccaaaaagtgagcgatgatgacaaagaaaaaggcgagggcgctctcccaaccggcaaatccaaaaagaaaaaaaagaaaaagaagaagcagggggaggataatagcaccgcacaagacactgaggagctcgagaaagagatccgcgaagacctccccgtgaatacctccaagacgcgtcccaagcaggagaaagccttcagcctgaagactatctcaacgtctgatccggccgaggtgcttgtgaaaaactcacaaccaattaaaacactgccacccgcaacaagcaccgagccgagtgtgatcctgtccaagagtgatagtgataagtcctcatctcaggtgcccccaatcctgcaggagactgacaaatcgaaaagcaacacaaagcagaattcggtgccccctagtcagacaaaatcagagacctcctgggagtctcctaaacagattaaaaagaagaaaaaggcgcgacgggagacctag

SEQ ID NO: 24923 - DNA, 2148 bp, synthetic construct
  misc_feature 1..2148: note = Description of Artificial Sequence: Synthetic coding sequence
  source 1..2148: mol_type = other DNA
atggccgccaacatgtaccgggtgggcgactacgtgtacttcgagaattcatcaagtaatccctatttgatccggcgtatagaggagctgaacaagacggcaaacggcaatgtggaagcaaaggtggtgtgcttttatagacggagagatatcagttcaacattgatcgccttagctgataagcacgcgacactatccgtgtgctataaagccggaccgggtgctgacaatggggaggagggagagatcgaggaggaaatggagaatcctgagatggtcgatttacccgagaagctgaagcaccagctgcgacacagggagctgttcctgtcacgtcagcttgaaagcttgccagccacgcacattcgaggcaagtgcagtgtaaccttgttgaatgagacggaatcacttaagtcttacttggagcgagaggacttctttttctacagtctcgtatacgacccccagcagaagactctacttgcagataagggagaaattagggtggggaaccggtaccaggctgacattaccgacctgttgaaagagggggaagaggacggtagggaccagtcacggctggaaactcaggtgtgggaggcccacaatccccttacagataagcagattgaccagttccttgtggttgcaagaagcgttggtactttcgcccgggctctggattgcagcagcagcgtgcgacaaccctcactgcacatgtcagcagccgccgcttcgagggacattaccctatttcatgcaatggacaccctacataaaaacatttacgacatctctaaagcaatcagcgcactggtaccacaggggggtcccgtcctgtgtcgtgacgaaatggaggagtggtctgcctctgaggctaacctgttcgaagaggccctggagaaatacggcaaggacttcacagacattcagcaggactttctgccatggaagtccctgacttcaatcatcgaatactactatatgtggaagacgactgatagatatgtgcaacagaaaaggttgaaggctgctgaggccgaaagcaaattaaagcaagtctatatcccaaattacaataagccgaatcctaaccagatcagcgtcaacaatgtgaaggctggagtcgtgaatggcaccggcgcaccgggccagtcgccaggcgccggaagagcttgtgaatcatgctatactactcagagctaccagtggtactcctggggccctcctaatatgcagtgcaggctgtgtgcatcctgttggacttactggaaaaagtatgggggcctgaagatgcctactagactggacggcgagaggcccgggccgaaccgcagcaatatgtcaccacacggactccctgcacggtctagtggctcgcccaaatttgccatgaaaaccagacaagcattctatctgcatacgacaaagttgactcgcatcgcacgcagattatgtcgggagattttgcgtccatggcatgcggccagacacccctacctgccaattaatagtgccgctatcaaagctgagtgcaccgctcgtctgcccgaagcatctcagtctcccttggttttaaaacaggccgtcaggaagccccttgaagccgtgctaagatacctggagacccacccccggcctccgaagccagatccggtcaagtctgtaagttccgttttgtcttctctgacaccagctaaagtggctccggtgattaacaatggtagccctaccatattaggaaaacgcagctacgagcagcacaatggagtggatggaaatatgaaaaaaagactccttatgccatcccgcgggctggccaaccacggacaggcccgacacatgggcccttcacgcaatctcctgcttaatggcaagagctacccgacaaaagtcaggttaatacgcgggggctcgctgccacccgtcaagcggagacggatgaactggattgatgcccccgatgacgtgttctacatggctactgaggagacacggaagattcgaaaactcctatcaagctccgagacaaagcgagccgccagacgcccgtataagccaattgcactcaggcagagtcaggctctcccacccagacccccgccacccgcaccagtcaacgatgagcccatcgtcatcgaagactag

SEQ ID NO: 24924 - DNA, 1887 bp, synthetic construct
  misc_feature 1..1887: note = Description of Artificial Sequence: Synthetic coding sequence
  source 1..1887: mol_type = other DNA
atggtggacctgcccgagaagctgaagcaccagctgcggcaccgggagctgtttctatctcgccagctggaatccctccctgcaacccacatacgcggaaaatgctcagtgaccttgcttaatgagacagagagtctcaagtcctatctggaacgcgaggattttttcttttatagtctggtctacgaccctcagcaaaagacattgctggctgataaaggtgagattcgggtcggaaaccggtaccaggctgatataactgacctgctgaaagagggggaggaagatgggcgcgaccagagtagactcgaaacccaggtgtgggaggctcataacccgttgacagacaagcagattgatcaatttctagttgtggcaaggtctgtggggaccttcgctcgggctctcgattgtagttcttccgttagacagccctcgctgcatatgtccgcagctgcagcctctagagatattactctgtttcatgcaatggacaccttacataaaaatatttacgacatctctaaggctatctccgccctggtgccccagggagggccagtactttgtcgagacgagatggaggaatggtccgcctccgaggccaatctcttcgaagaggctttggagaagtatggcaaagacttcacagatattcagcaggatttcctaccctggaagagtctgacatcaattatcgaatattactacatgtggaaaacgacagaccgctatgtgcagcagaagcgactaaaagcagccgaagcagaatcgaagctgaaacaggtgtatatccctaactacaataaacctaatccaaaccagatatctgtgaacaatgtcaaggcaggcgtagtgaatgggactggagcccctggccagtccccgggggctggccgcgcatgtgagtcttgctacaccacacaatcctatcagtggtatagctggggtcctccgaatatgcagtgtcgcctttgtgccagttgctggacttactggaagaagtatggcggcttgaaaatgccgactcggcttgacggagagagacccggtcctaaccggtctaatatgagccctcacggcttgcctgcccgcagttctggttcccccaaatttgcgatgaagacccgtcaggccttctacctgcataccactaaactcacacgtattgcccgccgattatgtagggaaattctccggccatggcacgccgcccggcatccttacctccctataaattcggcggctattaaggccgaatgcacggctcgtctgcccgaagcgtcacagagccccctggtgcttaaacaggccgtgcggaagcctctggaggccgtactgaggtacctagagacgcatcctaggcccccaaaaccagaccctgtcaaatccgtctcctctgtgttgtcatctctcaccccagcaaaggtcgctccagtgatcaataacggttccccaaccattctgggcaaaaggtcctacgaacagcacaatggtgtagacgggaatatgaagaaacgcctgctgatgccatcgcgaggaacttcttccggtttggccaaccacggccaggcccggcacatgggaccctcccggaacctgctcctgaacgggaaaagctatcccacaaaggtcagactcatccgagggggctccctgccccccgttaaacgcagacgaatgaattggattgacgcacccgacgacgtattctacatggctactgaggaaactcgaaaaatcaggaaacttctttcaagctcagagacgaaaagggccgctagacgaccctacaaacccatagctttgcgacagtcacaggctttgccacctcgacctccacctcccgctcctgtgaacgacgagccaattgtgattgaagactag

SEQ ID NO: 24925 - DNA, 768 bp, synthetic construct
  misc_feature 1..768: note = Description of Artificial Sequence: Synthetic coding sequence
  source 1..768: mol_type = other DNA
atgaagacccggcaggccttctacctgcacaccaccaagctgacccgcatcgcccgacgactgtgcagggagattctcaggccctggcacgccgctcggcatccctacctcccaattaattctgctgccatcaaggcagagtgtaccgcccgactccccgaggcctcacaatctccactggttctgaaacaggctgtccgcaaacccttggaggccgttttgcggtacctggagacacatccaaggcctcccaagccagatcccgtaaaatccgtatctagcgtgttatcctcactgacccctgcaaaggtggccccagtcattaataacggcagccctaccatcctggggaagagatcctatgagcaacataacggcgttgatggaaacatgaagaaaagactccttatgccgagtagaggcacctacctgggcctggccaaccacggtcaggccagacatatgggaccctccagaaacctgttactgaatggtaagagttaccccaccaaggtaagacttattcgaggcggctccttgcccccggtgaagaggcgccgaatgaattggatagatgcaccagacgatgttttttacatggcaaccgaggagactagaaaaatcaggaagctgctcagttcctcagagaccaaacgggccgccaggcgcccttataaacccatcgccctccgacaaagtcaagctctacccccccgtccccccccccctgcaccggtaaatgacgagccaatcgtcattgaagattag

SEQ ID NO: 24926 - DNA, 1293 bp, synthetic construct
  misc_feature 1..1293: note = Description of Artificial Sequence: Synthetic coding sequence
  source 1..1293: mol_type = other DNA
atggccgccaacatgtaccgggtgggcgactacgtgtacttcgagaatagctcctctaacccctatctgataaggcggattgaggagttgaataagactgcaaacggtaatgtcgaggctaaagtcgtgtgtttctacaggcggcgcgatatctcaagtacactgattgcacttgccgataagcacgccacgcttagtgtttgctacaaggcaggcccgggggcagacaatggagaagaaggtgagattgaagaggaaatggagaaccctgagatggtcgatctgcccgagaagcttaaacatcagctcaggcacagggaactatttctgagtaggcaactggagtcccttcctgcaactcatatcagaggcaaatgttccgtcactttgctgaacgaaaccgagtcccttaagtcctacctcgaacgggaggacttctttttctactccctggtgtacgacccccagcaaaagactttactggccgataagggagaaattagggtgggaaatagataccaggcagacatcaccgatctgcttaaagagggtgaggaggatggtcgtgaccagtcccgcttagagacacaagtgtgggaggcacacaatccgctgaccgacaagcagattgatcaattcctggttgtggccaggagtgtcgggacattcgcacgcgctctcgactgcagctcttctgtcagacaaccatcattgcatatgagtgcagctgcagcgagtagagacatcactttgttccacgcaatggatacgctgcataaaaacatctatgatatcagcaaggctattagtgcactggtgcctcagggtggccccgttctgtgtcgcgacgagatggaggagtggtcagcctcagaagcaaatttgtttgaggaagcgctggagaaatatggaaaggacttcacggatatacaacaagacttcttgccctggaagagtctcacttccataatagaatattattacatgtggaaaaccactgacaggtacgtgcagcagaagcgtctgaaggccgcggaggctgagtcaaaactgaaacaggtctacatcccaaattacaataaacctaatcccaaccagatttcagtgaacaacgtgaaggccggcgtcgtgaatggaaccggcgcccctgggcagtcacccggtgccggccgcgcctgcgagagctgttatatgtcaagtctgcgcatactgctggacatactcgaagaaatctggtggctcgagaacgccaacccagtccggtggagggaggcccgtaccaagcctcaatag

SEQ ID NO: 24927 - DNA, 1422 bp, synthetic construct
  misc_feature 1..1422: note = Description of Artificial Sequence: Synthetic coding sequence
  source 1..1422: mol_type = other DNA
atgctgcggcccgtgatcgaggaggagatcagcatgctgggcgagattacacatttgcaaacaatatcagaggatctcaaatcattaacaatggacccacataaattaccatcaagctcagagcaggtgatactggatctgaaaggtagcgattattcctggtcttatcagaccccaccttccagcccgtcaactacaatgtcgagaaagtcttccgtgtgttccagtctgaactccgtgaatagcagtgattcccggtcctctggatcccactctcactcccctagctcccactatcggtatcgcagctccaatttggcacagcaggcaccagtcaggctctcaagcgtttcttcgcacgactctggtttcatcagtcaagacgcattccagtctaagagcccgagcccaatgcctcccgaggcgccaaatcagagacgtaaagaaaagagggaacctgatccaaatggtggcgggcccacaaccgcatctggccccccggccgccgccgaggaagctcagaggcctcgttcgatgactgtgtctgccgctactcggcctggggaggagatggaagcctgtgaagagctggctcttgctctcagtcggggcctccaactagacacccagaggagttcaagggacagccttcagtgctcctcagggtactcaacgcaaactaccaccccttgttgcagcgaagatacaattccttcacaggtgagcgattacgattattttagcgtgagtggagaccaggaagccgatcagcaggagttcgacaagtcaagcacaattcccagaaactctgacatctcgcagtcctaccgccgaatgttccaagccaagaggccggcttccaccgcggggctgcccactacactgggccctgcgatggttacacctggcgttgctaccatcaggagaacacccagcactaaaccaagcgttcggagaggtactattggcgcaggcccaatccccatcaaaacacctgtcattcctgtcaagaccccgacagtcccagacctaccaggcgtccttcccgcacctcccgatggtccagaagagcgtggagaacacagtcccgagtctccatctgtcggcgaaggaccacagggcgtgacctcaatgccctcaagtatgtggagtgggcaggcttccgtaaaccctcccttacccgggccaaagccatcaatccctgaagaacataggcaagccatacctgaatccgaggcagaggatcaggaacgggagcccccctctgcaaccgtatctccgggacagatcccggagagcgatcccgcagacctcagtccacgggacacccctcaaggagaggacatgctgaatgccattagaagaggcgtgaagctgaaaaagaccaccaccaacgaccgtagtgctcctaggttctcctag

SEQ ID NO: 24928 - DNA, 2193 bp, synthetic construct
  misc_feature 1..2193: note = Description of Artificial Sequence: Synthetic coding sequence
  source 1..2193: mol_type = other DNA
atggaggccgtgatcgagaaggagtgcagcgccctgggcggcctgttccaaaccattattagcgacatgaaggggtcttaccccgtttgggaagacttcatcaataaggctggcaaactgcaatcccaactccgcacaaccgtcgtcgcggccgccgcgtttttagatgccttccagaaagtggctgatatggccaccaacacccggggcgggacacgggagattggtagtgcactgacacgaatgtgtatgagacatagaagtattgaggccaaactgaggcagttctcgtccgctctaatagattgtctgattaacccactgcaggagcagatggaggagtggaaaaaagtggccaatcagcttgataaggaccacgctaaagagtacaagaaagctcgccaggagatcaaaaaaaaatcatctgacacccttaagttgcaaaagaaggccaagaaaggccgcggagatattcaaccacagctggattcagcccttcaggacgtgaacgataaatatctgctgctggaggagacagagaagcaggcggtccgaaaggcactcatagaggaacgcggacggttctgtacttttatttcaatgctgaggcccgtcattgaggaggagatcagcatgctgggcgagattacacacctgcagaccatcagtgaggatctgaaaagcctgactatggacccgcataaactcccatcctctagtgaacaggtcatcttagatcttaagggatcagattactcctggagctatcagacccctcccagcagcccctcaacaacaatgtcacgcaagtcttccgtgtgttctagcctcaatagtgtcaatagctctgactcacgctccagtggcagccactcgcactcaccatcctcacactatagatatcggtccagtaatctggcccagcaggccccagtcaggcttagctcagtgtcttcccatgactcaggattcatctcccaggatgcctttcagagcaagtctcctagtcctatgcccccagaagccccgaatcagaacagcagctcgagcgcttcctctgaggcgagtgagacctgccagagcgtgtctgagtgctcttcacccacttctgtatcaagtggaagtactatgggggcgtgggtttcaaccgaaaaagactgggccaagccaggtccctatgaccagcctctggtcaacaccctgcaacgacggaaggaaaaaagagaacctgaccctaacggtgggggccctacaacagcgagcggaccacctgctgccgccgaggaagctcagcggccccgctcgatgactgtcagtgccgcaaccaggccgggtgaagagatggaggcttgcgaagaactagccctggccttaagtcgcggactgcagctggatactcaacgctcctctagagatagcctgcagtgttcatctggttactcaactcagacaactactccctgctgtagtgaggacaccattcctagccaagtatctgattatgattactttagcgtctccggtgaccaggaagctgatcagcaagaatttgacaaaagctccaccatccccaggaactccgacatcagccaaagctaccgtcgcatgtttcaggcaaagcggccagcctccaccgctggcttgcctacaacactgggccccgccatggttacacctggggtggccacgattagacgtaccccttccacgaaaccctctgtgcgccgcgggactatcggtgccgggccaattccaattaagacaccggtgatcccagtgaaaactccaactgtaccagacttgccaggagtcctccctgcgccacctgacggcccagaagaaagaggtgagcattcgcccgaatctccatcagtgggtgagggaccacagggtgtcacttccatgccatcctcaatgtggtctggccaggcttcggtgaatcccccccttcccggacccaagccatcaatacccgaggaacatagacaggctattcctgagagcgaggctgaggaccaggaaagggagccccccagcgccacagtttcgcccggccagattccagagtcggacccagccgatctgagcccacgggacactccccagggtgaagacatgttgaatgcaattcgccgcggcgtaaaactcaagaaaaccaccactaacgatcgttctgccccccggttctcctag

SEQ ID NO: 24929 - DNA, 1590 bp, synthetic construct
  misc_feature 1..1590: note = Description of Artificial Sequence: Synthetic coding sequence
  source 1..1590: mol_type = other DNA
atgagccggaagagcagcgtgtgcagcagcctgaacagcgtgaacagctccgatagccgctcatctggctctcacagtcactcgcccagctcacattataggtatcggagttcaaacttggcacagcaggccccggttcgcctctccagcgtttccagccatgatagcggcttcatatctcaggacgcatttcaaagcaagtcaccttctcctatgcctcctgaggcccctaatcagaactcctctagttctgcatcttctgaggcatccgagacttgtcagtccgtgagtgaatgttctagccctactagtgtatctagcgggtcaaccatgggggcatgggttagcacagagaagctgagcaatggattttctcactattccctgtcttccgaatcacacgtgggtcccactggcgcgggattattccctcactgtcttcctgctagtcgccttctgccacgagtcactagtgtgcacctccccgactatgcacattactacaccatcggcccaggcatgttccctagttcccagatccctagctggaaagattgggcaaaacccggaccttatgaccagcccctggtgaatacgctccaacgccgtaaggagaagcgcgaacctgaccctaacggtggaggacccacaactgcctctgggccaccagccgcagccgaagaagctcaaaggccccgcagtatgacagtgtccgccgccacccgcccaggcgaggagatggaagcatgcgaagaactggcccttgcactctcccgagggctacagctggatacccagcgctcctctcgggatagcctgcagtgcagctcaggctacagcacgcaaactacaacaccatgctgctccgaagacactattcccagtcaggtgagtgattatgactactttagcgtctcaggagatcaggaagcggaccagcaggaatttgacaagtctagcaccatcccccggaattccgacatttctcagagctacaggaggatgtttcaagctaaacggccagctagtaccgccggtctacctaccacgctggggccagcaatggtgacacctggcgtcgccaccatccgcagaacccccagcacaaagccatcggtgagacgaggcacaatcggcgcaggccctatccccattaagacccctgtgatccctgtgaaaactcccaccgtgccagatctgccaggcgttctacccgccccccctgacggcccggaggagaggggcgaacacagtcctgagtcacccagtgtgggggagggaccacagggcgtgacttcaatgccatcctctatgtggagcgggcaagcctctgtcaatcctcctctgccaggtcctaagccttccataccagaggaacacagacaggccatccctgaatccgaggcggaggatcaagaacgcgagcctccatccgcgaccgtctctcccggacaaatcccagagagcgacccggcagacctgtcccctagggataccccccaaggcgaggacatgctcaatgcaattcggaggggcgtcaaactgaagaaaaccactacaaatgacaggagtgccccacgtttttcctag

SEQ ID NO: 24930 - DNA, 2268 bp, synthetic construct
  misc_feature 1..2268: note = Description of Artificial Sequence: Synthetic coding sequence
  source 1..2268: mol_type = other DNA
atggaggccgtgatcgagaaggagtgcagcgccctgggcggcctgtttcagaccattatctccgacatgaaaggtagttacccagtgtgggaagacttcattaacaaggccgggaagctgcaaagtcagctacggacaaccgtggtggcagccgctgcttttctcgacgcatttcaaaaggtggcagacatggctacaaacacgcgtggaggaacccgggagatcggctctgccctcacgagaatgtgtatgcgtcaccggtctatcgaagcgaagctgcgacaattctctagcgccctgatcgattgcctgatcaaccctctccaggaacaaatggaagagtggaaaaaggtcgcaaatcagctggataaggaccatgctaaagagtacaagaaggccagacaggaaatcaagaagaaatcttctgatacgcttaagttacagaagaaagcgaaaaagggtcggggtgatatacagccccaactggactccgccttacaggacgtgaatgacaagtacttgctgctcgaagagacggaaaagcaggcggttcgaaaagcattaatcgaggaacgtggccggttctgcacatttatttcaatgctgcggcccgtgatagaggaagaaattagcatgctgggtgaaatcacacacctccaaaccatttctgaagatcttaaatctctcaccatggacccacataagttgccatcctcctcggaacaagtaatcctagaccttaaaggaagtgattactcatggtcatatcaaacccctccaagcagcccctccactaccatgagccgaaagtcaagtgtgtgtagcagtctgaattctgtgaactctagtgactctcggagtagtgggtcacacagtcactcgccctcctctcattaccgctataggtcaagcaacctggcccagcaggctcccgttcgtctgagctctgtgtcaagtcatgattcaggctttattagccaagatgcctttcagagcaaaagtccctctcctatgccacccgaagctccaaaccaactctcgaacggcttctcacactactctctgtctagtgaatcccacgtgggtccgacaggggccggcctgttcccccactgcctgccagccagccgcctgttacccagggtgacttccgtccatctccccgattacgctcactactacactatcggtcctggaatgttccccagttcccaaatcccgtcatggaaggactgggccaagccgggcccctatgaccagccattagtcaatacactgcaaaggaggaaggagaagagagagccagatccgaatgggggtggacccaccaccgcttccgggccccccgcagcagccgaggaggcccagagaccaaggagtatgacggtgagcgccgctacccgccccggcgaagagatggaggcctgtgaggagctggcccttgcattaagccggggcttgcaactcgatacacagagatctagcagggactcactccagtgttctagtggctacagtacacagacaactactccttgttgttccgaagatactattccctcacaggtttccgattacgattacttctcagtgagcggggatcaagaggccgatcaacaggaatttgacaagtcttctaccatacctaggaattcagacatatctcagagttaccggcggatgttccaggcgaagcgtcctgcttccacggcaggcttgcccacaaccttggggccggcaatggtcacgccaggggtggcaaccattcgcaggaccccttccacaaagccttctgtgagaaggggcacaattggtgcgggacccatcccaataaagacaccggtaattcctgtgaagacaccaacagtgcctgacctacccggcgtgctccccgctcctcctgacggccccgaggaacggggagaacatagtcctgagagtccttctgttggggaaggaccgcagggcgtcacaagcatgccgtcatctatgtggtcaggccaagctagtgtgaatccccccttgcccggtccgaaaccgtccattccagaagaacaccggcaggccatcccagaatcagaagcagaagatcaggagagggaaccacccagcgccacagtttctcccggccagataccagagtcagaccctgccgacctttctcccagagacactccccagggggaggatatgctcaacgccataagacggggtgtgaaactcaagaaaaccacaactaacgaccgaagtgcgccgcgcttctcatag

SEQ ID NO: 24931 - DNA, 1437 bp, synthetic construct
  misc_feature 1..1437: note = Description of Artificial Sequence: Synthetic coding sequence
  source 1..1437: mol_type = other DNA
atggccggcgtggaggaggtggccgccagcggcagccacctgaacggcgatctggacccagatgaccgcgaggagggcgcggcctctacagcagaggaggctgcaaagaaaaaacggagaaaaaagaagaagtctaagggcccctcagctgctggtgaacaggagcctgataaagagtcgggtgcctccgtggacgaagtggcaaggcagctggagagatctgctttggaagacaaggagagagatgaagatgacgaggacggggacggggatggtgatggtgctacaggtaagaagaaaaagaagaagaagaaaaaaaggggcccaaaggttcagaccgatccacctagtgtccccatttgcgatctctatcctaatggtgtgtttccaaaaggccaggagtgtgaatacccaccaactcaggatggacgcacagccgcttggcgcaccacttccgaggaaaagaaggctctggaccaggcctcagaggagatttggaatgactttagagaagccgccgaggcccaccgacaggtcaggaagtatgtaatgtcctggatcaaacctggaatgaccatgatagaaatttgtgagaagctggaagattgctcccgtaaattgattaaagaaaacggattgaacgcaggactggctttccccacagggtgttcccttaataactgcgccgcccactacactcctaatgccggggacacaactgtcctccagtacgacgatatctgtaagatcgattttggtactcacatcagcggccggatcatcgattgtgctttcactgtgacgttcaatcccaagtatgacactctcttgaaagctgtgaaagatgcaactaatacggggatcaaatgtgccgggatcgatgtcaggctctgcgacgtcggtgaggctatccaggaggtgatggagtcctacgaagtggagatcgatgggaagacctaccaagtgaaaccgatacgcaacctgaatgggcacagcattgggcagtatagaatccacgccggtaagacagtgccaatcgtgaagggaggcgaggcaactcgtatggaagaaggagaggtgtacgctattgaaacattcggctccaccgggaagggcgttgtccacgatgacatggagtgttcacattatatgaaaaactttgatgtcggccatgtacccattcgactgccccgaacaaagcatctactgaacgtgatcaatgagaattttggtacgctggcgttctgcagacgatggctggaccggctgggagaaagtaaatacttgatggctctcaagaatctctgcgaccttggaatcgtcgacccatatcctccgctgtgcgatataaaggggtcatatacagcacagttcgagcatacgatcctcctgcgccccacctgtaaagaagttgtgagcagaggcgatgattattag

SEQ ID NO: 24932 - DNA, 1743 bp, synthetic construct
  misc_feature 1..1743: note = Description of Artificial Sequence: Synthetic coding sequence
  source 1..1743: mol_type = other DNA
atgggcaccaccggcctggagagcctgagcctgggcgaccggggcgccgcgcctacagtgacctcttccgagcgactggtgccagaccccccgaacgacttaaggaaggaggacgtggcgatggagctcgaaagagtgggggaagacgaagagcagatgatgatcaagagatccagcgaatgcaaccccctgctgcaagaacccatcgcctcggcccaatttggggctaccgctggcactgagtgtaggaagtctgtaccgtgcgggtgggagcgtgtagtaaagcagcggctattcgggaagactgccggacgctttgacgtctacttcatatctccacagggactcaagtttaggagcaagagtagtctggcaaactatttgcacaaaaatggcgagacgtccctgaagcctgaagactttgacttcaccgtcctcagcaagaggggaatcaagtcccgctataaagattgctcaatggccgcgctgacaagccatttgcagaatcagtccaataattctaactggaacctgcgaacccgctccaaatgtaaaaaagatgtctttatgcctccttcttcctcctccgagctgcaggaatccagaggactttcaaattttacgtcaacccacttgcttcttaaagaggacgagggcgtcgacgacgtgaatttccgaaaggtgaggaaaccaaaggggaaggtcactatcctgaaaggaatccccatcaagaagacaaaaaagggatgccgtaagtcgtgttctgggttcgtccagtcggattccaagagagagagcgtttgcaacaaggcagacgcagagtcggagcctgtggcccagaagtcccagctggataggacggtgtgtatttccgacgcgggtgcatgtggcgagaccctcagcgtgacttccgaggagaactcacttgtgaaaaaaaaagagcggtccctgtcttccggctctaacttttgcagtgaacagaaaacaagtggtatcattaataagttttgtagcgctaaagacagtgagcacaatgaaaaatatgaagataccttcttagagtccgaagagattgggactaaggtcgaggttgtggagaggaaagaacatctgcacaccgacattttaaagcgaggatctgagatggacaataactgttcacccacccgaaaagactttactggcgaaaaaatcttccaggaggacacaattccaaggactcagatcgaacgccgcaagacatctctgtatttctctagcaagtacaacaaggaggctctttcccctccccgtcggaaagcttttaagaaatggacacccccgagatcgccttttaacctagtacaggagacgctgtttcatgacccatggaaactgctcatcgcgaccattttcctcaatcggacctcaggcaagatggccatcccagttctttggaagtttttagagaaatatcctagcgctgaagtcgcgcgcaccgctgattggcgagacgtctctgagctgcttaagcccctcggcttgtatgacctccgcgcgaagactattgtcaagttttcagacgagtacctcactaagcagtggaaataccccatcgagctgcacggcatagggaagtacgggaacgatagttatagaatcttttgcgtaaatgagtggaaacaggtccacccggaagaccacaagctgaataaataccatgattggttgtgggagaatcacgagaagctctcgctctcctag

SEQ ID NO: 24933 - DNA, 789 bp, synthetic construct
  misc_feature 1..789: note = Description of Artificial Sequence: Synthetic coding sequence
  source 1..789: mol_type = other DNA
atgggcaccaccggcctggagagcctgagcctgggcgaccggggcgcagcacctactgtgacctcatctgagaggcttgtacccgacccacctaacgacctgaggaaagaggatgtagctatggagctggaacgggtgggtgaggacgaggagcaaatgatgattaagcgctctagcgagtgtaatcctcttcttcaagagccaattgccagcgcccaattcggcgccaccgccggcacggagtgtcaggatactatacctcggacacagatcgagcgccgcaaaacttcactctattttagcagcaaatataataaggaggcacttagccctcctagacggaaggctttcaaaaaatggacacccccgcgctccccatttaacctagtacaagagaccctcttccacgacccctggaagctgctaatcgcaacgatctttctcaaccgcacttcagggaaaatggccattcccgtgctgtggaagttcctcgagaaataccctagtgctgaggtcgcccggacagccgattggcgggacgttagtgagttgttaaagccactcggtctctacgacttacgggccaaaacaattgtcaaatttagtgacgaatatctgaccaagcaatggaagtatccaatcgaactccatggtatcggcaagtatggcaatgatagctatcgaattttttgcgtcaacgagtggaaacaagttcatcctgaggaccataagctgaacaaatatcacgactggctgtgggaaaatcacgaaaagctttcccttagttag

SEQ ID NO: 24934 - DNA, 1725 bp, synthetic construct
  misc_feature 1..1725: note = Description of Artificial Sequence: Synthetic coding sequence
  source 1..1725: mol_type = other DNA
atgggcaccaccggcctggagagcctgagcctgggcgaccggggcgctgcccctactgttacctccagtgagagacttgttcccgatccccccaacgacctaaggaaggaagacgtggcaatggagttggaacgtgttggagaggacgaggagcagatgatgatcaaaaggtcttcagagtgcaatccgttgttgcaggaacccattgcctctgcacagttcggcgctactgccggaacggagtgcaggaaatctgtgccttgcgggtgggagcgcgtcgtcaaacagcggctgttcgggaagaccgcggggaggtttgatgtatattttatatcccctcagggactgaaattccgaagcaagagctctttggctaattatttgcataaaaacggtgagacgtcgttgaagcccgaggatttcgactttactgtgttaagtaagcgggggatcaaatcaaggtacaaagactgctccatggccgctttgacctctcacctccaaaaccaaagcaacaactccaactggaatttgcgcacccggtcgaagtgtaaaaaagacgtgttcatgccaccttcctcaagcagcgagctccaggagagccgcggtttgtccaactttaccagtacgcacttgctactcaaagaagatgaaggcgtggacgatgttaactttcgcaaggtgcggaaacccaagggtaaagtcacaatcttgaagggtatccctattaagaagacaaaaaagggatgcaggaagagttgttcggggttcgtgcagtctgactcaaagagggagtctgtgtgtaacaaggccgatgccgaatcggaaccagtggcacagaagagccagttggataggacggtgtgtatatcagacgcaggagcatgtggagaaacactgtctgtaacttccgaggaaaatagtctggtgaagaaaaaagagcggagtctgtcttctggatctaacttctgtagtgagcaaaaaacctccggcatcatcaataaattttgcagtgccaaagatagcgagcacaacgagaaatatgaggacaccttcctcgaatcagaagagataggcacaaaagtggaggtcgtggagcgcaaggaacacctacacacagatatcctgaaacggggaagcgagatggacaacaactgcagcccaacgcgaaaagacttcaccgaagacacgattccaagaacccagattgagagacggaagacctccctgtatttctcatccaaatacaacaaggaagcactgtccccaccacgacgcaaagcattcaaaaaatggactcccccacggtcacctttcaatctggtacaggagactctatttcacgacccttggaagttgcttatcgccacaatttttctgaaccggacttcaggtaagatggctattccagttttgtggaagtttttggaaaagtacccttccgccgaggtagctaggactgccgactggcgcgatgtttcggagttattgaagccactgggtctatacgacctgcgggctaaaacaatcgtcaaatttagcgacgagtacctaacaaagcagtggaagtaccccatcgaattgcacggtataggcaaatacgggaacgactcctaccggatcttctgcgttaacgagtggaaacaagtacatccagaagatcataaactgaacaaataccacgactggctgtgggaaaaccacgaaaaactttcattgtcatag

SEQ ID NO: 24935 - DNA, 93 bp, synthetic construct
  misc_feature 1..93: note = Description of Artificial Sequence: Synthetic coding sequence
  source 1..93: mol_type = other DNA
atggtgaacgaggcccggggcaacagcagcctgaacccctgcctggaaggttccgcttcgagcggctctgagagttccaaagactcgagctag

SEQ ID NO: 24936 - DNA, 2094 bp, synthetic construct
  misc_feature 1..2094: note = Description of Artificial Sequence: Synthetic coding sequence
  source 1..2094: mol_type = other DNA
atggaccaccggaaggcccgggtgctgcccgccggccactactgcccctcactcggtatttgggccagccaggtgggaagcgtgcgatcaagcgttcccccatctatttctaggaatccagccatggtgaatgaagcccggggaaactcctctttgaacccgtgtttggaaggcagcgctagcagcggctccgagtcttccaaggattcttccaggtgtagcaccccagggttggatccggagcgccacgagagactgcgagaaaaaatgcggcgtcggctcgaatcaggtgataaatggttctctcttgaattttttcctccgagaacggccgaaggggctgtaaatttgatctcacgttttgatcggatggcggccggcggaccactgtacatagacgtaacatggcatcccgcaggcgatcctgggagcgataaggagacgtcatccatgatgatcgcctctaccgccgttaattactgcggattagaaacgatactgcatatgacttgctgccgccagaggttggaggaaatcaccggacacctgcataaggccaaacagctcgggctgaaaaacatcatggccttacggggtgacccaattggtgatcagtgggaggaggaggaaggcggctttaattacgcggtagacctggttaagcatataaggtctgagtttggcgattatttcgatatatgtgtcgcagggtaccctaaaggacaccccgaagctggctcctttgaggctgacctgaaacacttgaaagagaaagtctccgctggggccgacttcattataacgcagctgtttttcgaggccgacactttctttcgatttgtgaaagcctgcactgacatgggcatcacctgcccaatagttcctgggatttttcctattcagggctaccactcactcaggcagttagtgaaactgtcaaaactcgaggtgccgcaagaaatcaaggacgttatcgagccgattaaggacaacgatgccgctattcgcaattatgggattgagctggctgtttctctgtgccaggagctcttagcctctgggcttgtgcccggtctccacttctacactcttaatcgagagatggccaccactgaggtgctcaagcgcttaggtatgtggactgaggaccctcgaagacccttgccttgggcgctgtcagcccaccccaagcggcgggaggaagacgtgagacctatcttttgggccagtagacctaaatcctacatttacaggacccaggagtgggacgagtttcccaacggtaggtggggcaactccagtagccccgcctttggtgagctgaaggactattatcttttctacctcaaatcgaaatcaccgaaagaggagttgctcaagatgtggggtgaagagttgacaagtgaagagagcgtttttgaagtgtttgtgctatatttgagcggcgagccaaatagaaatggacacaaggtgacgtgtctgccgtggaacgatgagcccttggcagctgaaacctccctgttaaaagaggagttgctgcgggtcaatagacaggggatcctgaccatcaattcccaacctaacatcaatggcaaaccgtcttctgatcctatagttggctggggaccttccggcggttacgtgtttcagaaagcttaccttgaattcttcacgtcccgggagacagccgaggcactcctccaggtacttaagaagtatgaattaagagttaattatcacctggtgaacgtgaaaggagaaaatattactaatgctccggagctccaaccaaacgcagttacctggggcatcttcccaggacgggaaatcattcaacccacagttgtcgacccagtgagttttatgttctggaaagacgaggcattcgcactgtggatcgagaggtggggcaagttgtacgaggaggagagcccgtctcggaccataatccagtatatccacgacaattatttcctggtgaatctggtggataacgactttccgctcgacaattgtctctggcaggtggtggaggacactctcgagctgctcaatagacccacccagaacgcacgtgagactgaggcaccgtag

SEQ ID NO: 24937 - DNA, 2094 bp, synthetic construct
  misc_feature 1..2094: note = Description of Artificial Sequence: Synthetic coding sequence
  source 1..2094: mol_type = other DNA
atggaccaccggaaggcccgggtgctgcccgccggccactactgccccagcctgggcatctgggcatcccaggttggctccgtgcgcagcagtgttccccccagcatctctcggaatccggctatggtcaacgaagcacgcggcaattcttcattgaacccatgtttagaaggtagtgcatcgagtggctccgagagctcgaaagatagctctagatgctctacccctggactcgacccagaaagacacgagagactacgggaaaaaatgcgccggcgactggaatctggcgataagtggttctctctggagttcttccccccacgaactgcagaaggagctgtcaacctcatttcacggttcgatcgcatggctgccggagggccgttatatattgacgtgacctggcaccccgcaggcgatcctggcagcgataaggagacgtcctcaatgatgattgctagcacggctgtaaattactgtggcctcgaaacaatactgcatatgacctgttgtcgccagcggctcgaggagataactgggcatctgcataaggcaaagcagctcggccttaagaacatcatggcactgaggggtgaccctatcggggatcagtgggaggaggaggaggggggatttaattacgccgtggacctggttaaacatattcggtcagagttcggtgattattttgacatttgtgtcgccggctatcccaagggacacccagaggcagggtcttttgaggccgacctgaaacacctgaaggaaaaagtcagcgccggcgctgactttatcatcacccagttgttttttgaagcagataccttttttcgctttgtcaaagcgtgcacggacatggggattacttgtccaatcgtccctggtatctttccaatacagggctatcattcgctccgccagttggtcaaactgtcaaaactggaagtcccccaggagattaaggacgtgatcgagccaataaaagataacgacgcagccataaggaactacggaattgagctggccgtgagtctgtgtcaagaactgttggcctccgggctggtgcccggtttacacttctatactcttaaccgggagatggctaccactgaggtgctgaagaggttgggcatgtggacagaggatcctcggcggccactgccatgggctctgagcgcccacccaaagcggcgcgaagaagacgtcagaccaatcttctgggcaagcagacctaaaagttacatatatcgcacccaggagtgggacgaattccccaatggccgttggggcaattccagcagtcctgccttcggggaattgaaagactactacctattttatctgaaatctaaaagtcctaaggaggagttacttaagatgtggggggaggaattgacctcggaagagagcgtctttgaagtttttgtactgtatctttccggtgagcctaacagaaacggtcacaaagtgacctgcctgccttggaacgacgagcctctcgctgcggagacatccctgctcaaagaagagctgctcagggtgaatcggcagggcatcctgacgattaactctcagccaaatataaatggcaagccatcctcagacccaatcgttggctggggtccctcagggggctacgttttccagaaagcatacttggagtttttcacttctagagagactgccgaagccctccttcaagttctaaagaagtatgaactgagagtaaactaccacctcgtgaatgttaagggtgaaaatataacaaacgctccggagcttcagccaaacgctgtgacttggggcattttccccgggagagagattatccagccaactgtggtagaccctgtctcatttatgttctggaaagatgaggccttcgctctatggatcgagcgatggggtaaactttacgaggaggagagccccagtcgtaccatcatacaatacattcacgacaactacttcctggtcaacctggtggacaacgatttccctctcgataattgcctctggcaggtcgtggaagataccctggaacttttgaaccggcccacgcagaacgctcgggagacagaagccccatag

SEQ ID NO: 24938 - DNA, 1971 bp, synthetic construct
  misc_feature 1..1971: note = Description of Artificial Sequence: Synthetic coding sequence
  source 1..1971: mol_type = other DNA
atggtgaacgaggcccggggcaacagcagcctgaacccctgcctggaggggtcagccagctccggcagcgaatcaagtaaggattcctctcgttgcagcacgcccggactggacccggaaaggcatgagagactgcgggagaagatgcggagacggcttgagagtggagacaagtggtttagtcttgaattctttccgcctcggacagctgagggcgcagtgaacctcatttccaggtttgacagaatggccgctggcgggccgctgtatatagacgtaacctggcaccccgcgggcgaccccgggtccgacaaggagaccagctcgatgatgatcgcttctaccgccgtcaactactgtgggctggaaacaattctgcacatgacttgttgcagacagcggctcgaagagatcacagggcacctccataaagccaaacaattaggtctgaagaatattatggccctgaggggagacccaatcggtgaccaatgggaggaagaggagggcggatttaactatgccgtagatctggtgaaacatatccgaagtgagttcggagactattttgatatctgcgtcgctggctatccaaagggccacccagaggccggctcgttcgaagctgacttgaagcacctgaaagaaaaggtgtctgctggtgcggattttatcatcacgcagctgttctttgaggctgatacttttttcaggttcgtgaaggcctgcaccgacatgggcattacttgcccaatcgtgcctggcatctttcctatccaagggtatcattcgcttcgacaactcgtcaaactgtccaaactggaagttccccaagaaattaaggacgtcatcgagcccattaaggataacgatgccgccattaggaattacgggatcgaactggccgtgagtctgtgccaggagctgctggcaagtgggttggtcccaggtctgcatttctacaccctgaacagggagatggctacgaccgaagttttaaagcggctgggcatgtggactgaagaccctaggagaccactcccctgggccctgagcgcacatcctaagaggagagaggaggatgtgaggccaatcttctgggcctcccgccctaagtcttatatttaccgaacccaggagtgggacgagtttcctaacggcagatggggcaacagttcttccccagctttcggcgaattgaaagattactatctgttctacttaaaaagtaagtcacccaaagaggagctactgaagatgtggggagaagagcttacctccgaagagtcagtgttcgaggtttttgtgttgtacctttccggcgaaccaaaccgcaacggacacaaagtcacttgcctcccctggaatgacgaaccactggctgccgagactagtctgctgaaagaggaacttctgcgcgttaacaggcagggaattttgaccattaactcgcaaccaaatattaatgggaagccttcatccgaccccatcgttggctggggcccatctggcggttatgtgttccagaaggcatatctggagttttttacttccagggagactgctgaagccctgctgcaggtgttaaagaagtacgagctgcgagtcaattatcatctggtgaatgtaaaaggtgaaaatatcactaacgctcccgaattgcagcccaatgccgtcacttgggggattttccccggacgcgaaatcattcagcctaccgtggttgaccctgtgtccttcatgttctggaaggatgaggctttcgcattatggatagagagatggggaaaactttatgaggaggagtctccctcacggacgatcattcaatacattcatgataactatttccttgtgaacttagttgataatgactttcccttggataactgcctctggcaggtggttgaggatacgctggagctgctgaatagacctacacagaatgctcgggagaccgaagcaccatag

SEQ ID NO: 24939 - DNA, 1971 bp, synthetic construct
  misc_feature 1..1971: note = Description of Artificial Sequence: Synthetic coding sequence
  source 1..1971: mol_type = other DNA
atggtgaacgaggcccggggcaacagcagcctgaacccctgcctggagggatctgcgtcttcaggaagtgagagctcaaaagatagcagtagatgcagtacaccagggctggaccccgaaaggcacgagaggctgcgtgaaaagatgcgccgcagacttgaatcaggggacaaatggttcagtttggaattcttccctcctagaactgcagaaggagctgtgaacctgatctcaaggttcgataggatggcagctggcggtccactctatattgatgtgacatggcacccagcaggggacccaggcagtgataaagagacatccagtatgatgatagcttctactgctgtaaactactgcggtcttgagacgatcctccacatgacctgctgccgccagcgcctcgaagagatcaccgggcatctgcataaagcgaagcagctaggccttaaaaacataatggctttgagaggggacccaattggggaccagtgggaggaagaagaaggtgggtttaattatgcagtcgacctggtgaaacatattaggtctgaatttggcgattatttcgatatctgcgtggccggctatccaaagggccatccagaggcaggttcctttgaggctgacctgaaacatcttaaggagaaggtaagcgcaggcgcggactttataatcacacagctattcttcgaggcagacacctttttccgcttcgtgaaagcttgcaccgacatgggcatcacctgccctatcgtgcctggtatttttccaatccagggctatcactctttgcgccagcttgtgaaactgtctaaactcgaagtaccacaggaaatcaaggatgtcatcgagcctattaaggataatgatgccgccattcgcaactacggtattgaactggcagtcagtttatgccaggaactgttagccagcggcttggttccaggtctgcacttctacacacttaatcgagagatggcgaccactgaggtcctaaaacgcctaggtatgtggacagaagacccccggagacctcttccttgggccctctcagcccacccaaaacggcgagaggaggatgtcaggccgatcttttgggcatctcggcccaagagttacatataccggacccaagagtgggacgagttcccaaacgggcggtgggggaacagttcgagtccagcctttggagaactgaaggactactatctgttctatctgaagagcaaatcaccgaaagaagaattgcttaaaatgtggggagaagaactgaccagcgaggagtctgtgttcgaagtcttcgtgctgtacctcagcggggaacctaatcgcaacggtcacaaagtgacatgcctcccctggaatgatgagcccttagctgccgagacttctctgcttaaggaggaactgttgagggtgaaccggcagggtatcctcacaatcaactctcagcccaacatcaacggaaagccatccagtgatcccattgtaggctggggcccgtccggcgggtacgtttttcagaaagcgtaccttgagtttttcactagcagagagaccgccgaagccctgctccaggttttgaaaaagtacgaacttcgcgtcaattatcatcttgtcaacgttaagggagagaatattactaatgccccagagctgcaacccaacgctgttacttggggaatcttccctgggagagagatcatccaacctaccgtggtagaccccgtgagctttatgttttggaaagatgaggcttttgccttatggatcgaaagatggggaaaactgtatgaggaagaatcgccgtctcggactattatccagtacattcatgacaactattttcttgtcaatttagtggacaacgacttcccgctggacaattgcctgtggcaggtggtagaggacaccctggaactgctcaaccgccccacacagaatgcgcgggaaaccgaggcaccctag

SEQ ID NO: 24940 - DNA, 93 bp, synthetic construct
  misc_feature 1..93: note = Description of Artificial Sequence: Synthetic coding sequence
  source 1..93: mol_type = other DNA
atggtgaacgaggcccggggcaacagcagcctgaacccctgcctggaaggttcagcgagttccggatccgagtcctcgaaagatagcagctag

SEQ ID NO: 24941 - DNA, 432 bp, synthetic construct
  misc_feature 1..432: note = Description of Artificial Sequence: Synthetic coding sequence
  source 1..432: mol_type = other DNA
atggtgaacgaggcccggggcaacagcagcctgaacccctgcctggaagggtctgccagctctggcagtgaaagtagcaaagacagtagccggtgcagtaccccggggttagaccccgaacgccacgagagattgagagagaagatgagacgacgattggaatccggcgacaagtggttcagcctcgagttcttcccacccaggaccgccgagggcgcggttaaccttatttcaagattcgaccggatggcagcaggggggcccctctacattgatgtcacttggcacccggccggggatccgggatctgacaaggaaacctccagtatgatgatcgcgagcactgccgtgaattattgtggccttgaaactatactacacatgacttgttgccggcagaggctcgaagagatcaccggtcacctgcattag

SEQ ID NO: 24942 - DNA, 162 bp, synthetic construct
  misc_feature 1..162: note = Description of Artificial Sequence: Synthetic coding sequence
  source 1..162: mol_type = other DNA
atgtgccggggctgcggctgcctgccccccgacgccccctgccccactctgtgtagccggaaccctgcaatggtgaatgaggcaaggggcaacagttccctgaacccttgtctagaaggaagtgcctcctccggtagcgagtcttcaaaagatagttcttag

SEQ ID NO: 24943 - DNA, 93 bp, synthetic construct
  misc_feature 1..93: note = Description of Artificial Sequence: Synthetic coding sequence
  source 1..93: mol_type = other DNA
atggtgaacgaggcccggggcaacagcagcctgaacccctgcctggaaggttcggcttctagcggaagtgagtcaagtaaagactcctcttag

SEQ ID NO: 24944 - DNA, 2508 bp, synthetic construct
  misc_feature 1..2508: note = Description of Artificial Sequence: Synthetic coding sequence
  source 1..2508: mol_type = other DNA
atggccgcccccatcctgaaggacgtggtggcctacgtggaggtgtggagttctaacggcactgagaattactcaaaaacatttaccacacagttggtggatatgggagctaaggtaagcaagacctttaacaaacaggtcacccacgtgatcttcaaggatgggtaccagtccacatgggacaaggcccagaagcgcggggtgaaactcgtttctgtcctgtgggtggagaagtgtagaaccgccggcgctcacattgacgagtccctcttcccggccgcaaacatgaacgagcacctttcatccctgataaaaaagaagaggaaatgcatgcagcccaaggattttaattttaaaacaccggagaatgacaaaaggtttcagaaaaagttcgagaagatggccaaggaactgcagcggcagaaaaccaacctggatgacgacgttcctattctgctctttgagagcaatgggagcctgatttacacacccacaattgagattaattctaggcatcatagtgccatggagaagagactccaagagatgaaggagaagagggaaaatctgagcccgacctctagccagatgatccaacagagtcacgacaatcccagtaattcgctctgcgaggcccccctaaacataagccgggacactttgtgttctgacgagtatttcgctggtggccttcactccagctttgacgatctgtgcggaaatagtgggtgtgggaaccaagagcgtaaattagaaggatcgataaatgacataaaatctgatgtgtgtatatctagcttggtgctcaaagcaaataatattcacagtagcccctcctttacccacttagacaaatcttctccacagaaattcctttcaaaccttagtaaagaggagattaatctgcaacggaacattgccggcaaggtcgtgacccccgatcagaagcaagccgcagggatgagccaagaaaccttcgaggaaaaatatagactcagccctactctaagttccaccaaaggacatctattgattcattcacgcccccgctccagcagcgtgaagagaaagagggtgtcccatggaagtcacagtcctcccaaagagaagtgtaagagaaaacgatcaactaggcgctccatcatgccacgccttcagctctgtagatccgaggacaggctgcagcatgtagccgggcctgctctagaagccctgagctgtggggaaagttcctatgacgactacttttcgccagataatcttaaggaaagatacagcgagaacttgccgcccgagagtcagctgcctagctcgccagcccagttgtcttgtcgcagcctgtctaaaaaggaaagaacgtctattttcgagatgtctgacttcagttgcgtcggcaagaagaccagaacggttgacattactaattttactgccaagactatcagttcaccccgaaagacgggcaacggggaaggccgggccactagctcatgtgtaacgtccgcccccgaagaggccctccgttgttgtcgacaagcggggaaagaggacgcctgtccagagggcaatggtttctcatataccatcgaagatccggcactcccgaaaggccacgatgatgacctgactcccctcgaagggtctctggaggagatgaaggaagccgtcggcctgaagagtacgcaaaacaagggtaccacaagcaagatctccaactcctccgagggtgaggcccagagtgagcatgaaccatgttttatcgttgattgcaacatggagacctcaaccgaagagaaggagaacctaccagggggctactcaggaagcgttaagaaccgacccacacggcacgacgtgctagacgacagctgtgatgggttcaaagatctgatcaagccacacgaagagttaaagaaaagtggaagggggaagaaaccaaccaggacactggtaatgacctccatgcccagcgagaagcagaatgtggttatccaggttgttgacaagctcaaggggttctccatcgcccccgatgtctgtgagacaaccactcatgtccttagcgggaagcccttaaggacactgaacgtcctgctcggcatagctcgtggctgttgggtgctatcttatgactgggtcctatggagcttggagcttggccactggatcagcgaagagcctttcgagctttcccaccattttcctgctgcaccactgtgtaggagcgagtgccatctctccgccggtccttacaggggtactctctttgcagaccagcccgctatgttcgtaagcccagcttctagcccaccagtagcgaagctctgcgaactcgttcacctgtgtggtggaagggtgtcccaggtcccaagacaggcttctatcgttataggtccgtattcaggcaagaagaaggcgaccgtcaagtacctttccgagaagtgggtgctggactccattacacagcataaagtttgtgcacccgagaactacttgctctctcagtag

SEQ ID NO: 24945 - DNA, 1833 bp, synthetic construct
  misc_feature 1..1833: note = Description of Artificial Sequence: Synthetic coding sequence
  source 1..1833: mol_type = other DNA
atggccgcccccatcctgaaggacgtggtggcctacgtggaggtgtggagttcaaatggaacagagaactacagcaaaacattcaccactcagctggtggacatgggcgcaaaagtgtccaagaccttcaataagcaagtgactcacgtgatcttcaaggacggataccagtctacctgggataaggcccaaaaaagaggagtgaagcttgtgagcgttctgtgggtggaaaagtgtcggacagccggcgctcacatcgacgagtcattgttccccgcagcaaatatgaacgagcatctgagcagtttaattaaaaagaagagaaaatgcatgcagccgaaggattttaattttaaaacgcctgaaaatgacaagcgattccaaaaaaaattcgagaaaatggctaaggaacttcagcggcaaaaaactaacttagacgacgacgtcccgattctccttttcgagtccaacggatcactcatatatactccaactatcgaaatcaactcaagacaccacagcgctatggaaaagcgactgcaggagatgaaggagaagagggaaaacctttctcctacatcatcgcaaatgatccagcagagccacgataatccttcaaacagcctctgcgaggccccgctgaacatttcccgggacaccttatgttcagatgaatattttgccggcggtctgcatagtagctttgatgacctttgcgggaacagcggctgcggcaatcaagagagaaagcttgagggcagtatcaacgatattaagtctgatgtgtgtatctctagtcttgttcttaaggctaacaacatccactcttcaccttcattcacccacctggacaagagctcgccacagaagttccttagcaacctctccaaagaagagatcaacttacaacgcaacattgccggcaaggtggtaacccctgaccagaagcaagcagctgggatgtcacaggagacgttcgaggagaaatatcgcctttcacccactctctcatccacaaaaggccatttgctgatacacagtcgacctaggtcttcatcagtgaagagaaagagagtgtcgcatggctcccactccccgcctaaagaaaagtgcaagcggaaaagatccacaagacggtccataatgccgaggctccagttatgtagatccgaagatcgcctccaacacgttgcaggtccagccctggaagctctgagctgtggcgagtcttcttatgacgactacttttcaccagacaacctgaaagaacgctactctgaaaatctgccacctgaatctcagcttccaagcagcccagcccagctaagctgtagaagtcttagtaagaaggagaggacctctatctttgaaatgtcagacttttcgtgcgtaggaaagaaaaccagaacagtcgatataaccaatttcactgcaaaaaccattagctctcctcgcaagacgggcaatggcgaaggccgcgccactagctcatgtgtgacctctgctccagaagaggcccttaggtgctgccgtcaggcagggaaagaggacgcctgtccagagggaaatggcttttcttataccatcgaagaccctgccctgcctaagggacatgacgatgacctgactccattggaaggaagtcttgaagaaatgaaagaggcagtaggattgaagagcacgcagaacaaggggacaacgtcaaagattagcaattccagtgagggagaagcacagagcgagcatgagccctgcttcattgtagattgcaatatggaaacctcaacagaggaaaaggagaatcttcccgggggttattcaggatctatgtag

SEQ ID NO: 24946 - DNA, 1689 bp, synthetic construct
  misc_feature 1..1689: note = Description of Artificial Sequence: Synthetic coding sequence
  source 1..1689: mol_type = other DNA
atggccgcccccatcctgaaggacgtggtggcctacgtggaggtgtggagctctaatggcacagaaaactactccaaaacattcaccacgcagctcgtcgatatgggagccaaggtttctaaaacattcaacaagcaggtgacccatgtgatctttaaggacggctaccaatctacttgggacaaggcacagaaaagaggggtgaagctggtgagtgtattgtgggttgagaagtgtcggacagccggggcccatatagacgaaagtctgtttcccgctgctaacatgaatgaacacctgtcctcgctgatcaagaagaagcgaaaatgtatgcagcccaaagatttcaacttcaagacgccagagaatgacaagcggttccagaagaagtttgagaaaatggcaaaagaactgcagcggcagaagaccaatctagcatcccagatgatccagcagagtcacgacaacccatctaactccctgtgtgaagcccctctcaacatctcaagggacactctgtgttccgacgaatacttcgccgggggactgcactcttcctttgacgacctctgtggcaattcaggctgtgggaaccaggaacggaaactggaggggagtattaacgacatcaagtccgatgtctgcatttcatctctggtacttaaagccaataacatacatagctcaccctctttcacgcatctggataaatcctcgccccagaagtttctctctaacctgtctaaggaagaaattaacttgcagcgaaacatcgccggcaaggtggtgacgcccgatcagaagcaggcggccggtatgagccaagagacattcgaagaaaagtacaggctcagtcctaccctttcaagtaccaaaggccacctattgatacatagccgccccaggtcttccagtgtgaaacgcaaacgagtttcacatggcagccactcaccacctaaggagaagtgcaagcgaaaacgttcaaccagacgttccattatgccccgactgcaactatgcagaagcgaagacaggttgcagcacgtcgctggtcctgcccttgaagcgcttagctgcggagagtcctcctacgacgattatttctcacccgataacctgaaagaaagatattcggagaatcttccccccgaaagtcagcttccatcatctcctgcccagctctcttgtcggagtctgagcaaaaaggagcgcacaagtatctttgagatgtctgacttctcatgtgtcggcaagaaaacccggaccgtagatataaccaacttcactgcaaaaaccataagcagcccccggaagaccggaaacggagaaggaagggcaacatcctcatgcgttacctccgcacctgaagaagcactgcggtgttgtcggcaagccggaaaggaggacgcttgtcctgaagggaacggattctcatacaccatcgaggatcccgcactacctaagggtcatgacgatgacctgacacctttagagggaagtctggaagaaatgaaagaggcagtgggcttaaaatcgacccaaaataagggaacaacgtccaagatttcaaattctagcgagggtgaggctcagtcggaacacgaaccatgcttcattgtggactgtaacatggagacctcgaccgaggaaaaagaaaatctgccaggcgggtacagcggaagcatgtag

SEQ ID NO: 24947 - DNA, 234 bp, synthetic construct
  misc_feature 1..234: note = Description of Artificial Sequence: Synthetic coding sequence
  source 1..234: mol_type = other DNA
atgaacgtgctgctgggcagcgtggtgatcttcgccaccttcgtgacgctttgcaatgcatcctgttattttatcccgaatgaaggagtaccgggtgattcgactagaatgtttctgcacctgtgggtaatgacgaagactaccgccaaagagtccagtcgcaggaggaccgctagcattagttggtggcgaaggagaacacagaaaaggcctgtgctaagtgtgaacggttag

SEQ ID NO: 24948 - DNA, 345 bp, synthetic construct
  misc_feature 1..345: note = Description of Artificial Sequence: Synthetic coding sequence
  source 1..345: mol_type = other DNA
atgaacgtgctgctgggcagcgtggtgatcttcgccaccttcgtgactctgtgcaatgcatcatgttatttcatccccaacgaaggggtgcctggcgatagcacgcgcaaatgtatggatctcaagggaaataaacaccccatcaactccgagtggcagaccgataattgcgaaacatgcacgtgctacgagacagaaatctcttgctgcacactcgttagcactccagtcggatacgacaaggacaattgtcagcggatctttaaaaaggaggactgcaaatacatagtcgtggagaagaaggacccgaagaagacgtgctccgtgagcgaatggattatctag

SEQ ID NO: 24949 - DNA, 3813 bp, synthetic construct
  misc_feature 1..3813: note = Description of Artificial Sequence: Synthetic coding sequence
  source 1..3813: mol_type = other DNA
atgaccgacgacaacagcgacgacaagatcgaggacgagctgcagacattttttacatccgacaaagacggcaatacgcacgcctataatcccaaatcgccccccacacagaattcctcagccagcagtgtaaactggaattcagccaatccggacgacatggtcgtggattatgagacggatcctgccgtggtgaccggtgaaaacatcagcctgagcctccagggagttgaagtatttggacacgagaagtcttcatccgacttcatcagcaaacaagtgctggatatgcataaggacagcatctgccagtgtcccgccctcgtcggcaccgaaaagcctaagtatctgcagcactcttgccactcactcgaagccgtggagggacaatctgtggagccttctctgccatttgtctggaagcctaatgataatctgaactgcgccggttattgtgatgccctcgaattgaatcagacatttgacatgactgtcgataaggtgaactgtacgttcatttctcaccatgcaattggaaaaagccaaagctttcacacagccgggtccctccccccaacaggtagaaggagtggctcgactagcagccttagctattcaacctggacttcatctcactccgacaaaacacacgccagggagaccacctacgatcgtgagtcctttgaaaacccgcaagtcaccccctctgaggcacaagacatgacatataccgccttctccgacgtggtgatgcaatcagaggtgtttgtgtccgatataggaaatcaatgcgcctgtagttccggcaaggtgaccagtgaatacactgacggctctcagcagagactggttggcgaaaaggagacccaagcacttacccccgtgagtgacggcatggaagttcctaatgactcggccctgcaggagtttttctgcctctcacatgatgagtccaattcggaaccccattcgcagtccagctatcggcataaagagatgggacagaatctgagggaaaccgtgtcttactgcctgatcgacgatgagtgccccctgatggtgcccgcatttgataaatctgaggcacaggtgttaaacccagagcacaaagtgactgagactgaggacacccaaatggtgtctaagggcaaagacttgggtacacagaatcacacttccgagcttatactttcatcaccgccaggacagaaagtgggctcctcattcggactcacctgggacgctaacgacatggtgataagcactgacaaaacaatgtgcatgagcactcccgtgctcgaaccgactaaagtaacatttagtgtttctcctatagaggccacagagaagtgcaaaaaggtagagaagggtaaccgcggcctgaaaaacattcccgatagcaaggaggcgccagtcaatctgtgcaagccctcacttgggaaatctacaataaaaacaaacacacccatcggctgtaaagttagaaaaaccgagatcatcagctacccacgtcccaacttcaagaacgtcaaagcaaaggtaatgtcccgtgcggtattgcagcctaaagatgccgcactctccaaagtaacaccaaggcctcaacagacaagcgctagctctcccagctctgtaaactcacgccaacagaccgttctgtcacgcactccaaggtcagacctaaatgcagacaagaaggctgagatcctcataaataagacgcataaacagcagttcaataaactgataacctcccaggcagttcacgtgacaactcattcaaagaatgcctcccacagagtcccacgtaccacatctgccgtgaaatcaaaccaggaagacgtggacaaggcatcttcaagcaattcggcgtgtgagacaggctcagtgtcagccctgttccagaagataaaaggcatactcccagtaaaaatggagtccgccgagtgtctggagatgacatacgttccaaacatcgatagaatcagtcctgaaaagaagggagagaaggaaaacggcacatccatggaaaagcaagaacttaaacaggagatcatgaacgagacattcgaatatggcagcctcttcctaggatccgcttctaagacaactacaacgtctggaagaaatatctcaaagcctgacagttgtggtctgcgacagatagcagcccccaaagcaaaggtaggaccccccgttagttgcctccgtaggaatagtgacaaccgaaatccttctgctgatagagctgtctcacctcaaaggattcggcgggtgagttcttccggaaaacctactagcctgaaaacagcccagtcttcttgggttaatctcccccgccccctgccaaaaagcaaagcctccttaaagtctcccgccctgcggagaacaggttctaccccctctatcgcttcaacacattccgagctctctacatacagtaataattccggcaacgcggctgtgatcaagtacgaagagaagcctcccaaacctgcttttcagaatggctcatccgggtcattttatttaaagccactagtcagtagggcacacgttcacttgatgaaaacaccaccaaaaggtccttctcggaagaacctgtttacggctctgaatgctgtcgagaaaagtcggcagaaaaacccccggtcattatgtatccagccccagaccgcgcccgacgccctgccccccgagaagaccttggaacttacccagtataaaaccaaatgcgaaaatcaatctggtttcattcttcagttaaagcagctgctggcctgcggaaacacaaaattcgaggccctgactgtggtcattcagcatcttctaagtgagagggaggaggccctgaagcagcataagaccctttctcaggaacttgtgaatcttaggggcgagctggttacagctagtaccacatgcgagaagctggaaaaagccagaaatgagctgcagacagtgtacgaggctttcgtgcagcagcatcaggcggagaagaccgagcgcgaaaatagactcaaggaattctacacccgggagtacgagaaattacgggatacatacatcgaggaggcggaaaaatataagatgcaactccaagaacagttcgacaatttgaacgctgcccacgagacatccaaactggagatcgaggcttcgcattcagagaaactggagctgctaaaaaaggcctatgaagcatcattgtcagaaatcaaaaaaggccacgagatcgagaagaagtcacttgaggacctgctgtcagagaagcaggaaagtctggagaaacagattaatgacctcaaaagcgaaaacgacgccctcaatgaaaagctgaaatctgaggaacaaaaacgccgtgcgcgcgagaaagccaatctcaaaaatcctcaaatcatgtatttggaacaagagttggagtcacttaaggccgtgcttgaaatcaaaaatgaaaaactccaccagcaggacattaagctgatgaagatggagaagctagtggacaacaacactgccctcgtggacaagctgaagagatttcagcaggagaatgaggagcttaaagctcgcatggacaaacatatggcaatatcacggcagctttctaccgagcaggccgtgttgcaggagtctctggagaaggaatctaaagtgaataagcggttgagcatggagaacgaggaactgctgtggaagctgcacaacggggacctctgttcccctaaacgctccccaacatctagcgctattcccctgcagagtccaaggaacagtgggagctttccaagccccagcatctctcctaggtag

SEQ ID NO: 24950 - DNA, 1311 bp, synthetic construct
  misc_feature 1..1311: note = Description of Artificial Sequence: Synthetic coding sequence
  source 1..1311: mol_type = other DNA
atgctgctgagccccaagttcagcctgagcaccatccacatccggcttaccgccaaggggcttctgcgtaatttgcgcttgccctccgggtttcgccgctcgaccgtcgtgtttcacaccgtggagaagtcacgccagaaaaacccccgatccctgtgtattcagcctcagacagctcctgatgccctacctcctgagaaaaccctggaactgacccagtacaaaacaaaatgtgagaatcagtcagggttcatactccagctgaaacagctcctggcctgcggaaatacaaagtttgaggctcttaccgtcgtcatccagcaccttttgtcggagcgtgaggaggctctcaagcagcataaaacactatctcaggagctagttaacctgagaggcgagctggtgacagcatccacgacatgtgagaagctggaaaaggcccgaaacgagctgcagacagtctatgaggccttcgtacagcagcaccaggcagagaaaaccgagagagagaatcggctgaaggagttctacactagagaatacgagaaactgcgggacacctacattgaggaagccgagaagtataagatgcagctacaagagcagtttgacaaccttaatgcagctcatgagacttctaagcttgagattgaagcaagccactcagagaagctggaacttcttaagaaggcatacgaggcatcgctcagcgagatcaaaaaggggcatgagatcgaaaaaaagtctttggaggacttgctctcagaaaaacaggaatctctggaaaagcaaattaatgatctgaaatcggagaatgatgcattgaatgaaaagctcaagagtgaggaacagaaacgccgagcgcgtgagaaggccaatctcaagaacccccagattatgtatctggaacaagaactcgagagcctaaaagccgtcctggaaataaaaaacgagaagcttcaccaacaggacatcaagttgatgaagatggagaaattagtagataacaacactgccctcgtggataagctgaagaggttccaacaggagaatgaagagctgaaggctcgtatggacaagcacatggctatcagcagacagctgtccactgagcaagctgtgctacaggagagcctggaaaaggaaagtaaggtgaataaacgcctctcaatggagaacgaggaattattatggaagctgcacaatggcgatttgtgttcgccgaaacgctctcccacttcctccgctattcccctgcagtcccccaggaacagcggttcgtttccctcaccatcaatctcgccaagatag

SEQ ID NO: 24951 - DNA, 1554 bp, synthetic construct
  misc_feature 1..1554: note = Description of Artificial Sequence: Synthetic coding sequence
  source 1..1554: mol_type = other DNA
atgaccgtgcccggcggcttccggagctgcaccgagaccgacatctcttctaagattttcattaacagcactctgacgccacccgctggaagcgaaagacactacgacgcaacactcctgacactgttggttgtgggaagttacagcctatgcatcatacctcttttggcgaccttcaccggcaagaaaaccgggaacgccgcggtcattaagtacgaggaaaagccaccaaagcccgcttttcaaaacggcagttccggatcattctatctcaagcccctggtgtcgagagctcacgtgcatctcatgaagacacccccgaaggggccatcccgcaaaaatctattcacggctctcaacgccgtggagaaatcccgccagaagaacccccgttctctgtgcattcagcctcaaaccgcgccagatgccctgccccccgagaaaacccttgagctgactcagtataaaaccaaatgcgaaaaccagtctggctttattctgcagctgaagcagctgctggcgtgtgggaacaccaaattcgaagccctgactgtcgtgatccaacatctcctgtctgagagggaagaggcgctgaaacagcataaaacgctaagtcaggagcttgtcaatctcagaggggaactggtgactgcgtccactacctgcgaaaagctggagaaggctcggaatgagctgcagaccgtttacgaagcatttgtgcagcaacaccaagctgagaagaccgaacgggagaaccggctgaaggagttctatacacgcgaatacgaaaaactgcgagacacatatattgaggaagctgagaagtacaaaatgcagctccaggaacagtttgataatctaaacgcggcccacgagaccagtaagcttgaaattgaggcaagccatagcgaaaaactggagcttctcaagaaggcctatgaagcctcattgtcagagatcaaaaagggtcacgagattgagaagaagagcttggaggatctgttgagcgaaaagcaagagtccctggagaagcagataaatgacctgaaaagtgaaaacgatgcactgaatgagaagctgaaatctgaggaacagaaacgacgggcccgggaaaaagcaaatttgaagaacccccagataatgtatctcgaacaggagcttgagagcctcaaagcggtcctcgaaattaaaaacgaaaagctccatcagcaggacatcaaattgatgaagatggaaaagctggtagataacaacacagccttggtggacaagctcaagaggttccagcaagagaacgaggaactcaaggcccggatggacaagcacatggcaatctctcgccagctgtctaccgaacaggcagtgcttcaagagtctctggagaaggagagcaaagtgaacaaacgactttccatggaaaacgaggagttgctctggaagctgcataatggggatctgtgcagccctaaacggagtcccacaagcagcgcaatccctctgcagtctccccgaaactcaggcagcttcccatcgccttctatttcaccgaggtag

SEQ ID NO: 24952 - DNA, 2313 bp, synthetic construct
  misc_feature 1..2313: note = Description of Artificial Sequence: Synthetic coding sequence
  source 1..2313: mol_type = other DNA
atgaccgacgacaacagcgacgacaagatcgaggacgagctgcagacatttttcacgagtgacaaggacgggaacactcatgcctataatccaaagtcgcctcctacccaaaattcgtcagcctcatctgtcaactggaactcagccaatcccgatgatatggtggtcgactacgagactgatccagccgtagtcaccggcgaaaatatatctctgtctttgcagggagtcgaggtgttcggacatgaaaaatcatcgagtgatttcatctctaaacaggtccttgacatgcataaggactctatttgccaatgtcccgctctagtggggacggagaagcccaaatatttgcagcattcctgccattcattggaagcagtggagggccaatctgtcgagccatccttaccctttgtctggaagccgaacgataatctgaattgcgccgggtattgtgatgcattggagctgaatcagacatttgacatgaccgtagataaggttaactgtacctttatcagccaccatgccatcggtaagtcacaatcttttcatacagcagggtctcttccccccactgggagacgttcgggttcaacgtccagcttgtcctattcaacctggacgtcttctcactccgataaaactcacgcccgcgagacaacttacgatcgggagtcattcgagaatcctcaagtcacccccagtgaagcccaggatatgacgtacacagccttcagcgacgtggtgatgcagtccgaagtctttgtttcagatataggaaatcagtgtgcttgctcgtccgggaaggtcacaagcgagtatactgacggaagtcagcagcgcctggtgggggagaaagagactcaggcattaactcccgtatcggatggcatggaagttcctaatgattctgcattgcaagaattcttttgtctgtctcacgacgagagtaactccgagcctcactcccaatccagttataggcacaaggaaatgggccagaatctgcgcgagaccgtgagttactgcttgattgacgacgagtgccctcttatggtgccagcgtttgataagtcagaggctcaagtcttgaatccagagcacaaagtgacggagactgaggacactcagatggtttcaaaaggtaaagatctcggcacacaaaaccacacaagtgagcttatcctgagctctccccctggtcagaaggtagggagcagcttcggtcttacctgggatgccaacgatatggtgatcagcacagataagaccatgtgcatgtctacaccagttctggagcctaccaaggtgacattttcagtctcacccatcgaggctacagagaaatgtaagaaggtagagaagggaaatcgggggttgaagaatatccccgattctaaggaagctcccgttaacctctgcaaacctagtctaggcaagtcgaccattaagactaatacaccgatcgggtgcaaggttaggaaaaccgaaataatcagctacccgcgcccgaacttcaagaacgttaaagctaaggtgatgtcccgcgctgtgctgcagccaaaggatgccgccctgtcaaaggtcacaccccgcccccagcaaacctcagcctcatctccgagctctgtgaattcgaggcagcagaccgtgctttcaaggacccctcggtcagacctgaacgctgataagaaagctgagatcttgatcaataaaacgcacaaacagcagtttaacaagttgatcacatcgcaggccgtccacgtgactactcacagtaagaatgcatctcatagggtgcccagaacaacgtcggccgtgaagtcgaaccaggaagacgttgacaaggcatcgagctcaaatagcgcatgtgagactggtagtgtctcggcgctgttccaaaaaataaagggcattctcccggtgaagatggaaagcgcagagtgtctggaaatgacttacgtcccaaatatcgaccggatttcgcccgaaaaaaagggagagaaggagaacggcacaagcatggaaaagcaggagctgaagcaagagattatgaatgaaaccttcgagtatgggagcctgttcttggggagtgcatccaaaacgacaactacctccgggcgcaacatttcaaaacccgacagctgtggactgcggcagatcgctgcccctaaagcaaaagtcgggccaccagtgtcttgtctcaggagaaatagtgataacagaaacccaagcgcggaccgcgcagtgagcccccagagaattcgaagggtgtcttcctccgtactgcccaaagcggctttctcttag

SEQ ID NO: 24953 - DNA, 3651 bp, synthetic construct
  misc_feature 1..3651: note = Description of Artificial Sequence: Synthetic coding sequence
  source 1..3651: mol_type = other DNA
atgaccgacgacaacagcgacgacaagatcgaggacgagctgcagactttctttacaagcgacaaagatggcaatacccatgcctacaacccaaaaagccctccaactcagaacagcagcgccagctcagtgaattggaacagcgctaatccagacgacatggtagtcgactatgaaaccgatcctgccgtggtgaccggggagaatatttcacttagcctgcaaggagtggaggttttcgggcatgagaaatcctccagtgattttattagtaaacaggtgctggatatgcataaagactccatctgccagtgtcccgctcttgtggggacggagaaaccaaagtatttacagcactcttgtcactcacttgaggcggtggaagggcagtcagtggaacccagcctgccatttgtgtggaaacctaatgacaatttgaattgtgccgggtactgcgatgcattggaactgaatcagacatttgacatgacagtcgacaaggtgaactgcaccttcatcagccaccatgcaattggtaagagtcagtcctttcatacagccgggtccctgccaccaacggggcggcgctccggatctacttcaagcctgtcatacagcacgtggacttcatcgcactctgacaagactcacgcacgagaaacgacttacgacagggaaagcttcgagaaccctcaggtaacccccagtgaagcacaggacatgacttatactgccttttccgacgtcgtaatgcagagcgaggtcttcgtgagtgacattggaaaccagtgtgcatgctcaagcggtaaggtgacatctgagtatacggatggttctcagcaacgcctggtcggcgagaaagagacccaggctttaacacctgtcagcgatggaatggaggtgccaaacgattctgcccttcaggagtttttctgtctgtctcacgacgagagcaactctgagcctcacagccagagtagctaccgtcacaaggaaatgggccagaatctgagagagactgtaagttactgtcttatagatgatgagtgcccacttatggtcccagcattcgataaatctgaagcacaggtcctgaatcctgaacacaaggtgaccgagacagaagacacccaaatggtgtcaaaagggaaagacctcggtacgcagaatcacaccagcgaactaatcctgtccagtcctcctgggcagaaggtgggcagctcgtttgggctgacgtgggatgcgaacgatatggtcatctccacagataagactatgtgcatgtcgacacctgtgctggaacccacgaaggtgaccttctctgtttcgcctatcgaggctactgagaaatgtaagaaggtggagaaaggaaaccgcggcttgaaaaatattcctgacagtaaggaagctccagttaacctatgtaagccttctctggggaagtcgactatcaaaactaacacacctatcggttgcaaagtgaggaaaaccgagattatctcgtatcccagaccaaacttcaaaaatgtgaaagccaaggtgatgagcagggctgtcctgcagcctaaggatgctgctctgagtaaagtcactccacgcccgcagcagacatcagcatccagtccgagctcggtcaatagtcggcaacaaactgtattatcccggacaccccgctccgacttaaatgccgataaaaaagcggaaattctgatcaataagacccacaagcagcaatttaataagttgatcacctcacaggcagtgcatgtgacgacccatagtaagaatgcatcacacagagtacccaggaccaccagtgcggtgaagagcaatcaggaagacgtggacaaggccagctccagtaatagtgcttgcgaaaccggatccgtctccgccctgttccagaagatcaaaggcatactaccagtgaagatggaatccgctgaatgtttagagatgacctacgtccctaatattgaccgaatttctcctgagaagaaaggcgagaaggagaatggcacgtccatggaaaaacaagaacttaagcaggagattatgaatgaaaccttcgagtacggcagtctttttctgggatccgcatcgaagaccaccaccacttcagggagaaatataagcaagcccgacagttgcggcttacggcaaatagctgcaccaaaggcgaaagtcgggccccccgtctcttgtctgcgcaggaattcagacaaccgtaatccaagcgccgatcgcgctgtgtccccgcaaaggatcagaagggtttcttcctccgccggcaacgcagccgtgatcaaatatgaggagaagccgcctaagccagcatttcagaacgggagttctgggagtttctaccttaaacccctggtatccagggctcatgtgcatcttatgaagactccccctaaaggcccctctagaaagaatctcttcaccgcactcaacgcggtggagaagtcacggcagaagaacccacggagtctgtgcattcagccccagactgcccccgacgccttgccccccgaaaaaacattagagctgactcaatacaagacaaaatgcgagaatcagagtgggttcatattgcagttgaaacagctccttgcttgtggtaacacaaaattcgaagccctcaccgttgtaatccagcatctgctctccgagcgagaggaggcgttgaaacaacataaaactctgagtcaggaattggtcaatctgaggggagaactggtgaccgcctctactacctgtgaaaagctggaaaaagcaaggaacgagctgcagactgtatacgaagcttttgtacagcagcaccaggccgaaaaaacagagcgtgaaaaccggctgaaggaattttacacacgggagtatgaaaagctgcgggatacatatatagaagaagctgagaagtacaaaatgcagctccaggagcagttcgacaacctgaacgccgcccacgaaactagtaaactggagatagaagcatctcactctgagaaactggagctcctgaaaaaagcatacgaggctagcctctccgagataaagaaaggacacgagattgagaagaaatctctggaggacctgctatcagagaaacaagaatctctggagaaacagatcaatgacctgaaatccgagaacgatgcgctgaacgagaaactgaagtccgaggaacagaagcgtcgagctagagagaaagccaacctaaaaaatcctcagattatgtatttagaacaggaactggagagtttgaaggcggttttggagatcaaaaacgagaagctgcaccagcaggacattaagttgatgaagatggaaaagctcgtggataataatactgccctggtcgacaaattaaaacggtttcagcaggagaacgaggaactcaaggcacgcatggataagcacatggccatttccagacagcttagcaccgaacaagcagtactccaggaaagtctcgagaaggaatcaaaggttaataaaaggctcagtatggaaaacgaggaactgctctggaagctccacaacggcgatttgtgctcccccaaaagaagtcctacctcatcagccattcccctccagagcccccgcaatagtggctcatttccatcaccaagtatatccccacgctag

SEQ ID NO: 24954 - DNA, 1029 bp, synthetic construct
  misc_feature 1..1029: note = Description of Artificial Sequence: Synthetic coding sequence
  source 1..1029: mol_type = other DNA
atgggctgccccagcagcaagctgtgcctgtacagcccctgcgccgctactcggcgcgaggaggcactgaaacaacacaagactctcagtcaggagctggttaatttgcggggagaattggtgaccgcttcaaccacttgcgaaaagctggagaaagcacgcaatgagttgcagacagtgtacgaagccttcgtgcagcaacatcaggcagaaaagactgagagggagaatcgcctgaaggagttttatacacgtgagtacgaaaaacttagggacacatacatcgaggaggccgagaagtataaaatgcagctgcaggaacagttcgacaacctcaatgctgcgcacgaaacttctaagctcgagatcgaggcttctcatagcgagaaactggagctccttaagaaggcctatgaggctagcttgtccgagattaaaaaggggcacgagattgaaaaaaaatctctggaagatttgctcagcgagaagcaggaaagtttagagaagcaaatcaacgatttaaaatctgaaaatgatgcactaaatgaaaaactgaaatccgaggaacagaagaggagggcccgagagaaggctaatttaaagaaccctcagatcatgtatctggagcaggaactggagagccttaaggctgttttagaaattaagaacgagaagctgcaccagcaggatattaagctcatgaagatggaaaagttagtggacaacaacactgctttagtggataaactgaagcgctttcagcaggaaaatgaagagctgaaggcccgtatggataagcacatggccatttcccgccagctctccaccgagcaggcagtgctccaagaatctcttgagaaggagtcaaaggtgaataagcgcctttcaatggagaacgaagaactactgtggaaacttcataacggggacctgtgtagtccaaaacgcagcccaacctcatccgctattccactccaatcgcccaggaactctggcagtttcccctctccctccatatcacctaggtag

SEQ ID NO: 24955 - DNA, 3651 bp, synthetic construct
  misc_feature 1..3651: note = Description of Artificial Sequence: Synthetic coding sequence
  source 1..3651: mol_type = other DNA
atgaccgacgacaacagcgacgacaagatcgaggacgagctgcagacattttttacctccgataaggatgggaatactcacgcctataaccctaaatctccccctacacaaaattcatccgccagctccgttaactggaattcggccaaccccgacgatatggtggtggactatgaaacagaccccgctgtcgttacaggcgagaacatcagcctgtccctacagggggtcgaggtgtttgggcacgaaaaatcatccagtgactttatatccaagcaggttctggacatgcacaaggatagtatttgtcagtgtcctgccctcgtgggcacagagaagcctaaatacctccagcactcttgccattctctggaggcagtggagggtcagagtgtggaaccaagcctgccgttcgtgtggaagcccaatgacaatctaaattgcgcgggctactgcgatgcccttgaactcaaccagacttttgatatgactgtcgacaaggtaaattgcacattcatttcccaccatgctattggcaagagccagtcattccacactgcaggctctttgccacctacgggcaggaggtccgggtccacatcaagcctgtcgtacagtacatggacttctagccacagtgacaagactcacgccagagagaccacatacgaccgtgagtcttttgagaacccacaagtcacaccaagcgaggctcaggatatgacctacaccgccttcagcgatgtggtgatgcagtctgaagtgttcgtcagcgacataggaaaccagtgtgcgtgcagctctggcaaagtgacatctgagtatacagatggttctcagcagcggcttgtgggagagaaagagacccaagcgctaactcctgtttctgatggcatggaagtcccaaatgactcagctctgcaggagttcttttgcttgtcacatgacgagagcaactcagaaccacactcccagtcttcgtatcgccacaaagaaatgggacaaaacctgagggagaccgtgtcttactgcctcattgatgacgagtgcccactgatggtccccgccttcgataaatctgaggcacaagtgctgaaccccgagcacaaagtgactgagacagaagatacccagatggtgtcaaagggtaaggacctgggaacgcagaatcataccagcgaacttatactgagttcccctcccggccagaaagtcggatctagcttcggcctgacctgggatgcaaacgatatggtcatctccacagacaagacaatgtgcatgagcactcccgtcctggagcctacgaaggtcacattcagcgtgagccccatcgaagctactgaaaagtgcaagaaagtcgaaaaagggaaccgggggttaaagaatattcctgacagtaaagaagcaccggtcaacctctgcaaaccgtccctgggcaaatctaccatcaagacaaatacccctattgggtgcaaagtcagaaagactgagatcatctcctaccccaggccaaatttcaagaacgtgaaggccaaggttatgagtcgggcagttttacagcccaaggacgcagccctgagcaaagtaactcctcggccacaacagacctctgccagttctccgtctagtgtaaatagccggcagcaaacagtgttgtctcgaactccaaggtccgatctaaacgccgataagaaagctgagattctgattaacaaaactcataagcagcagttcaacaagttgattacatcccaagcagtgcacgtcactactcacagtaagaatgcctcacaccgggtccctagaaccaccagtgccgtgaagtctaatcaagaagacgtggataaggcctcaagctcgaattccgcttgcgaaaccgggtcggtgtcagcattgtttcagaagatcaaaggcatcctccctgtcaaaatggagagcgctgaatgtttagagatgacgtatgttcccaatattgaccgaataagtcctgagaaaaagggagagaaagaaaacggcacaagcatggagaagcaggaactgaaacaggagatcatgaacgagactttcgagtatgggtcactgtttctgggaagtgcatcaaaaaccacaacaacctcagggaggaatatatcaaagccagacagctgtgggctgcggcagatcgctgctcctaaggcaaaggttgggccacctgtgtcatgtctgcgccggaactccgacaatcggaacccatccgctgacagagccgtgagtcctcagcggataagacgggtcagtagttctgcaggcaatgctgctgttattaagtacgaagagaaacctcctaaacctgcatttcagaatggatcatccggcagcttctatttgaaacctctcgtcagccgggctcacgtgcatttgatgaagacccccccaaaaggcccgtctagaaaaaacctctttacagctctgaatgcggtagaaaaatcacgacagaaaaatccacggtcactgtgcatccagccgcagactgccccagacgcactgcccccggaaaagacccttgagttaacccagtacaaaaccaaatgtgagaaccagagcggttttattctccaacttaaacaactccttgcctgcgggaacacaaagtttgaggcactgaccgttgtaattcaacatctgctgagcgagcgcgaagaggccctaaaacagcataagacactctcccaggagctggtgaaccttcgaggcgaactggtaactgcttcgaccacgtgcgaaaaactcgagaaagcccgaaatgaattgcagaccgtgtatgaggcattcgtacagcagcaccaggcggagaaaacagagcgagaaaaccgtttgaaggagttctacaccagagaatatgaaaagctacgcgacacttacatcgaggaagccgaaaagtacaagatgcaactgcaggaacagtttgataacctcaatgctgcacatgagaccagcaaactggaaattgaggctagccattctgaaaagcttgagctcctgaagaaagcctatgaagcctcactgagcgaaatcaagaaggggcatgaaattgagaagaagtccttagaggaccttttgtccgaaaagcaggaaagcttagagaaacagatcaacgacttgaagtccgagaatgacgccctcaacgagaagctgaaatctgaggaacagaagcgcagggcccgtgaaaaggccaatttgaaaaaccctcaaattatgtacctcgagcaggagctggaaagtctgaaggctgtgttagagataaagaacgagaaactccaccagcaggatatcaaactgatgaagatggagaagctagtggacaataatacggcgttagtcgataagctgaagaggttccagcaggaaaacgaggagcttaaagcaagaatggacaagcacatggctattagccgccaactgagtacggaacaggcagtgctgcaggaatctcttgagaaagagtcaaaagtgaacaagcgtctgagtatggaaaatgaggagctcctgtggaagctacataatggggatctgtgctcccctaaacgttcccctaccagctcagctatccccttacagagtccccggaactctggttcgtttcccagcccatcaatctccccacgctag

SEQ ID NO: 24956 - DNA, 1248 bp, synthetic construct
  misc_feature 1..1248: note = Description of Artificial Sequence: Synthetic coding sequence
  source 1..1248: mol_type = other DNA
atgaagaccccccccaagggccccagccggaagaacctgttcaccgccttaaacgccgtcgaaaagagccggcaaaagaaccctaggagtctgtgcatacagccacagaccgcccctgatgctctgcccccggagaagacactcgagttgacccagtacaaaactaaatgcgagaaccaaagcggtttcatcttgcagctgaagcagttactggcctgcgggaacacaaaattcgaggctctcactgtggtcatccagcacttgctgtccgagcgggaggaggccttaaaacagcacaagacccttagtcaggagctggtcaaccttaggggggagctggtcactgctagcactacttgcgaaaagctcgagaaggccagaaacgaactgcagaccgtctatgaggcatttgtgcaacagcaccaagccgagaaaacagaaagggagaatcgcctgaaggagttctatacacgagagtatgagaagttaagagacacgtacattgaagaagctgagaagtacaagatgcagttgcaagagcagtttgacaatttgaatgccgcccacgaaacttctaaactggaaatcgaagccagtcactccgaaaaactggaactgctgaagaaggcctatgaagctagtctctctgaaattaaaaaaggacatgagatagagaagaagtccctcgaagacctgctgtcagagaagcaagaatccctggaaaaacagatcaatgatctgaaaagtgagaatgatgcccttaatgaaaaactgaagagcgaggaacagaaacgccgggccagggaaaaggcgaatctgaagaacccccagattatgtacctggaacaagaactggaaagtctcaaagccgtgctggagataaaaaatgagaagctgcatcagcaggacataaaactcatgaaaatggaaaagttggtggataacaacacggcactggtagacaagcttaaaagattccagcaggagaacgaagaactgaaggcccgtatggataagcatatggcaatctctaggcagctgagcaccgaacaggccgtgctgcaggagtccttggagaaagaaagcaaggtgaacaagagactctcgatggagaacgaggagttactgtggaagctgcataacggcgacctgtgttcacccaagcggtctccaacatcatcagccattcccctgcagagtccacggaatagtggtagctttccctccccctcgatatcccctcggtag

SEQ ID NO: 24957 - DNA, 7407 bp, synthetic construct
  misc_feature 1..7407: note = Description of Artificial Sequence: Synthetic coding sequence
  source 1..7407: mol_type = other DNA
atggccaccgtggtggtggaggccaccgagcccgagcccagcggcagtatagccaatccagctgccagtacaagccccagcctaagtcataggttcctggattctaagttctacctgctggtggtggtgggagaaatcgtcacagaggagcacctacgaagagctattggcaacatcgaactcggaatacgtagttgggatactaatctcatcgagtgtaacctggatcaggagttgaagttattcgtttcgaggcatagtgcaagattctccccagaggtcccaggacagaagatcctgcaccataggtcggacgtacttgagaccgtggtgctgattaatccgtcagacgaggcagtttccaccgaagtgcgcctgatgattaccgacgcagctaggcataaacttttggttctcacagggcaatgcttcgaaaataccggcgagctaattctgcagtctgggagcttcagctttcagaacttcattgagatattcacagatcaggagatcggcgagctgctgagcaccacgcatcccgctaataaagcgtctctcacattattctgtcctgaggagggggattggaaaaactcaaacttggacagacacaatcttcaggattttattaatatcaagctcaactccgccagcatcctccctgaaatggaaggcttgagtgaattcactgaatatttaagcgagtctgtggaggttccatcgcccttcgacattctggagcccccaaccagcggaggcttcttaaagctctcgaagccatgttgttacatttttcccggtggacggggcgattccgccctgttcgccgttaatggatttaacatgctgataaacggaggttctgagcggaaatcatgcttctggaaactgatccgacatctcgaccgggtggactcaattctgctcacccatatcggggatgataatttgcccgggattaactcaatgttgcagcggaaaatcgccgagctggaggaggaacaatctcagggctccaccaccaattcagactggatgaaaaatctgatctcacccgacctgggcgtggtatttttaaatgttcctgaaaatctgaagaacccggagcctaacattaaaatgaaaagaagcattgaagaagcctgcttcaccctccagtacctgaacaaactttccatgaagcccgagccgctgttccgctctgtaggaaatactatcgaccccgtcattctttttcaaaagatgggggtcggcaaactggaaatgtacgtcctcaatccagttaagtcctcgaaggaaatgcaatactttatgcagcagtggacagggacgaacaaggataaagcggaatttattctccctaatgggcaggaggtggatttacccatcagttacttaacaagcgtttcttctctgatcgtgtggcacccagctaaccctgcagaaaaaattatcagagtcctttttccgggcaattcaacccagtacaacatcctggaaggcttggaaaagttgaaacacctagattttctgaagcagcccttggccacccagaaagatctgactggacaggtgcccactccagtggttaagcagactaaactcaaacagagggccgattcccgcgaaagcctgaagccagctgctaagccccttccgtcgaaaagcgtgcggaaagagtctaaggaggagacacctgaagtgacgaaggtgaatcacgtagagaaacctccaaaagtcgaaagtaaggagaaggtaatggtgaagaaggataaacctatcaagaccgaaacgaaacccagtgtgacagagaaggaggtccccagtaaggaagagccttcaccagtgaaggcagaggtggccgaaaagcaggctaccgacgtaaagccaaaagcagccaaggagaaaaccgtgaaaaaagagaccaaggtgaaacccgaagacaaaaaagaagagaaagaaaagccaaagaaagaagttgcgaagaaagaggacaagacccccataaagaaggaagaaaaaccaaagaaggaggaagtcaaaaaagaagtcaaaaaggagatcaaaaaggaggagaagaaggagcccaagaaggaggtcaaaaaggagaccccccctaaagaggttaagaaggaagtgaaaaaggaggaaaaaaaggaagttaagaaagaagaaaaagaacctaagaaggagatcaaaaaactcccgaaagatgcaaagaagtcttctacacccctgtcagaggcaaagaagccggccgcattgaagcctaaagtccctaaaaaggaagagagtgttaaaaaggactccgttgcagctggtaaacccaaggagaaaggcaagatcaaagtgatcaagaaagagggcaaagccgctgaggccgtggccgccgctgtggggaccggcgccacaaccgccgcagttatggcagctgcagggattgccgccatcggccccgcaaaagaactggaggctgagcggtcccttatgagctcacccgaagacctgactaaagatttcgaagagcttaaagccgaagaagtggatgtgaccaaagatatcaaacctcagcttgagctgattgaggacgaagaaaaactcaaagagaccgagccagttgaggcctacgttattcagaaagagcgcgaagtgacaaagggtccagccgagagtcctgacgaagggatcacaactaccgagggggaaggtgaatgcgaacagaccccagaggaactcgagccagttgagaagcagggcgtcgatgatattgagaaattcgaggacgaaggcgccgggttcgaggagtcctcagagacgggggactacgaggaaaaagcggagactgaggaagccgaggaacccgaagaggatggcgaagagcacgtgtgcgtaagtgcctccaaacacagtcccactgaggatgaggaaagcgcgaaagcagaagccgatgcttatattagagaaaaacgcgaatcggtcgcttccggcgacgatcgcgcggaggaagacatggatgaagcaatcgaaaagggcgaagcagagcaatctgaagaagaagcggatgaggaggacaaggcggaggatgcccgtgaagaagagtatgagcctgagaaaatggaagctgaggactacgtcatggcggtagtagataaggccgctgaggccgggggggcagaagaacaatacggattcctaactactccaaccaagcagctcggcgcgcaatctcccggcagagagccggcaagctctattcatgatgaaacccttcctgggggatcagaatcagaagctacagcgagcgatgaggaaaaccgcgaggaccagccggaagaattcacagccaccagcggttatactcagtccacgattgaaatctcctcagagcctactccaatggatgagatgagtacaccacgggatgtgatgtccgatgagacaaataacgaagagactgagagtcctagtcaggaattcgtaaatataactaaatacgagtcctcattgtactcacaagaatattctaagcccgccgacgtcacaccactgaacggcttctcagaaggaagtaagacagatgcaaccgacgggaaggactataatgcttccgcctctaccatcagcccaccatctagcatggaggaggacaagttttcacggtctgccctccgggatgcgtactgcagcgaagttaaggcctccactactctcgacataaaggactctatctcagcggtcagctctgagaaagtgtccccgagcaaaagtccctctctatccccttcgccgcccagcccactagaaaagaccccattgggggaacgtagcgttaacttttctttgaccccgaatgaaataaaggtctccgccgaagctgaagtcgctcccgtgtctcccgaggtgactcaagaggtagtggaggagcattgtgcctcgcccgaagataaaaccctggaagtggtctcgcccagtcaaagtgtcaccggctcagctggccacaccccttattatcagagccctacggatgagaagagctctcacttgcccactgaggtcatcgagaagcctcctgcagtgcctgtgtcctttgagttttcagacgctaaggacgaaaatgaacgggccagcgtatctcccatggacgaaccagttcccgactcagaatccccaatcgagaaggtcctctctcccctacgctctccacccctcatcggtagtgagtccgcatacgagagttttctatcggccgatgacaaagcgagcgggaggggagcagagagtcctttcgaagagaagtctggcaagcaagggagcccagatcaggtgagtcctgtgtctgaaatgacttccacttctttataccaggataaacaggaaggaaagtcaaccgacttcgcccctatcaaagaagacttcggacaggaaaagaagaccgatgacgttgaggctatgtcgtcgcagccagcactagcattggatgagagaaagctgggtgacgtgtcacccacccaaatagacgtcagtcagtttggaagtttcaaggaagatacaaagatgagcatctctgaagggacagttagcgacaagagcgcaactcctgtggatgagggcgtagctgaagacacatactcccacatggaaggggtcgcgtccgtctcgacagcctccgtggcaactagtagctttcctgagcccaccactgacgatgtcagcccaagtctccacgcagaagtcggcagcccccattcgacagaggtggacgactctctttctgtaagcgtggtgcagacacccacaacattccaggagactgagatgtccccatctaaagaggaatgtccccggcccatgtccatcagtcctcccgatttttctcccaaaaccgccaagagtagaacacctgtacaggatcaccgtagtgagcaatctagcatgtcaatcgaatttggccaagaatctcctgagcaaagcctcgccatggatttcagtcgccagagcccggaccaccctacagtgggagctggcgtgttgcacatcacggagaacgggccgacagaggtggactacagcccttctgacatgcaggatagcagcctgagtcacaaaattccgcctatggaggaaccttcctatacccaggataacgacctgtccgagctcatttccgtttctcaagtggaggctagcccctctacctccagcgctcacacaccctctcaaatcgcctcgcccctccaggaagacaccttatcggacgtggccccaccacgggacatgtccctctatgcctccttgacaagcgagaaggttcaatctcttgagggcgagaaactctctcccaaatctgacatctccccgctgactccaagggagtcaagccctctgtattctccaactttctccgactctacttctgccgtgaaagagaaaacggcaacctgtcactctagctctagcccccccatcgatgccgcttcagcagaaccctacgggtttagagctagcgtgctgttcgatactatgcagcaccacctcgcgttaaaccgagatttatccacgcccggcctggagaaggactcaggaggtaagaccccaggagacttttcctatgcctaccagaaacccgaggagaccacacgctcacctgacgaagaggactacgattacgagtcttacgagaagaccacacgcacatcagacgtaggcggctattattacgaaaagatcgaaagaacaacaaagagcccatcagattcaggctattcatatgaaactatcggaaagaccaccaagacgcctgaagatggagactactcatacgagattatcgagaagaccactagaactccagaggagggtgggtactcctacgacatctccgaaaagacaacttccccacccgaggttagcgggtattcatatgagaagacggagcgatctaggaggctgctagatgacatctctaatggatacgacgattcagaggatggcggtcataccctgggcgacccatcatatagttacgagaccaccgaaaagatcaccagctttcccgaatcagaaggatactcctacgaaacatccaccaagaccactaggaccccggataccagcacctactgttatgagactgcagagaagatcactcgcacaccgcaagccagcacatatagttacgagacctctgacctctgctataccgccgagaagaagagcccatccgaggcccgtcaggacgtggatctgtgcctcgtgtcatcctgcgaatacaagcaccccaagacagaacttagccccagttttataaaccctaatcccctggagtggtttgctagtgaagaacccacagaggaaagcgagaaaccattaacccagtctgggggggcgcccccgcctcctgggggaaaacagcagggacgacagtgcgacgagactcctccgacttcagtctctgagtccgcaccatcacagaccgattcagatgtgccgcctgagacagaagagtgtccttccattacagccgatgcaaatattgacagcgaggacgagagcgagacgatccccactgataagactgtgacttataaacatatggaccccccaccagcccccgtgcaggatcgttccccttctcccagacaccccgacgtgagtatggtggatccggaggcattagccatcgaacagaacctgggcaaggccctcaaaaaggatctgaaggagaagaccaaaactaagaagccaggaacaaagacaaagtccagcagccctgttaagaaatctgacggcaagtcgaagcccttagcagcttccccgaaaccagcagggctgaaagagtcttcagacaaagtcagtagggtggcttccccgaagaagaaggaaagcgttgaaaaagccgctaaaccaacgaccaccccagaagtgaaggcagcacgtggtgaggagaaggataaggagacgaagaatgccgccaatgcttctgcttccaaatctgctaaaactgcgacggccgggcctggtacgacaaaaaccacaaagagcagtgctgttcccccaggactgcccgtgtaccttgatctgtgttatatccctaaccattcgaactctaagaacgttgacgtcgaattctttaagagggtccgcagctcctactacgtggtcagcggtaacgacccagccgcagaggaaccaagcagggccgtgctggatgcgctgctcgaaggcaaggcgcagtgggggtcgaatatgcaggtaactcttattcccactcacgatagcgaggtcatgcgagagtggtaccaggagacacatgagaagcagcaggatctgaacataatggtccttgcgagtagctctacagttgtgatgcaggacgagtcttttccagcttgtaaaatcgagttgtag

SEQ ID NO: 24958 - DNA, 432 bp, synthetic construct
  misc_feature 1..432: note = Description of Artificial Sequence: Synthetic coding sequence
  source 1..432: mol_type = other DNA
atgcagcaccggggcttcctgctgctgaccctgctggccctgctggcccttacctcggcggtcgccaaaaagaaggacaaggtgaagaaaggagggccagggtcagagtgcgctgaatgggcttggggcccctgtaccccctctagcaaggactgcggtgtcgggttcagggaaggcacctgcggcgcccagactcagcgaatcaggtgccgggtcccttgcaattggaagaaagaattcggagccgattgcaaatataagtttgaaaactggggagcctgcgacggtggaacaggcactaaggttagacagggcaccctgaagaaagctcgttataacgcgcaatgtcaagagactatcagagtgacaaaaccatgtactccgaagactaaggccaaggccaaagccaagaaaggaaagggaaaagactag

SEQ ID NO: 24959 - DNA, 432 bp, synthetic construct
  misc_feature 1..432: note = Description of Artificial Sequence: Synthetic coding sequence
  source 1..432: mol_type = other DNA
atgcagcaccggggcttcctgctgctgaccctgctggccctgctggctcttaccagtgccgtggctaagaaaaaggacaaagtgaaaaagggcggaccaggctcagagtgtgcggaatgggcttggggcccctgtaccccaagttcaaaggactgcggagtcggctttcgcgaaggcacgtgtggggcccagactcagcggatcagatgcagggtaccctgcaattggaaaaaggagtttggcgctgattgcaagtataaattcgagaactggggagcatgcgatggggggaccgggaccaaagtgagacaggggactttgaagaaagcccgatataacgctcagtgtcaagagacaattcgggtcaccaaaccatgtacccctaaaacgaaagctaaggcgaaggctaagaaggggaagggtaaagactag

SEQ ID NO: 24960 - DNA, 432 bp, synthetic construct
  misc_feature 1..432: note = Description of Artificial Sequence: Synthetic coding sequence
  source 1..432: mol_type = other DNA
atgcagcaccggggcttcctgctgctgaccctgctggccctgctggctctgacatctgccgtggcaaaaaagaaagataaagtaaagaaagggggtcccggcagtgagtgtgccgagtgggcctgggggccgtgcacacctagcagtaaggactgcggcgttgggtttagagaagggacctgtggagctcagactcagagaatccgatgccgtgtgccttgtaactggaaaaaggagttcggcgcagactgtaagtataagtttgagaactggggcgcctgcgatggcggaaccggcacaaaggtgcgccagggtacactcaagaaggccagatataacgctcagtgtcaggagaccatccgagtcaccaaaccttgtacgcccaagacaaaagccaaagccaaggcaaaaaaaggcaagggaaaggattag

SEQ ID NO: 24961 - DNA, 459 bp, synthetic construct
  misc_feature 1..459: note = Description of Artificial Sequence: Synthetic coding sequence
  source 1..459: mol_type = other DNA
atgcagcaccggggcttcctgctgctgaccctgctggccctgctggccttaacatctgccgtggctaagaaaaaggaggagggcgccctgcagtgttcagtgccaggggaccaccctaggcatcaagccttgcacccgcaggatcagtctaaaggccagtcgcaggaaagagagggtaaagggttagacgcaaagcctggatgccagggggcacctggggtgacgtggggcctggcccatgccctccccttaccgggcccaagatgcgaccctcctgtgccttccgtgtgctctctcgcattaattaatcatgctctcccgtgtcccagccactctcctgcacctcccctctcagctcagtcaggtgaaggccaaggaatcctcggctcactttccctgccgcaatctaacgtgagtcctcgtgcccgattctgtagtagccctcagtttcattattag

SEQ ID NO: 24962 - DNA, 432 bp, synthetic construct
  misc_feature 1..432: note = Description of Artificial Sequence: Synthetic coding sequence
  source 1..432: mol_type = other DNA
atgcagcaccggggcttcctgctgctgaccctgctggccctgctggctctgacttctgccgtcgctaagaagaaggacaaagtaaaaaaaggaggcccgggtagcgaatgcgccgagtgggcctggggcccctgtacaccttccagtaaggactgcggagtagggttccgcgaagggacttgcggggctcaaacccaacgcatacgctgtcgggtgccatgtaactggaagaaagagttcggagccgactgcaagtacaagtttgagaactggggggcgtgcgacggagggacaggcacaaaggtcagacaaggtaccttgaagaaagcccggtataatgcacagtgtcaggaaactattcgggtgacgaagccctgcaccccaaagaccaaggccaaggccaaggccaagaagggcaaaggaaaagactag

SEQ ID NO: 24963 - DNA, 432 bp, synthetic construct
  misc_feature 1..432: note = Description of Artificial Sequence: Synthetic coding sequence
  source 1..432: mol_type = other DNA
atgcagcaccggggcttcctgctgctgaccctgctggccctgctggccttgacaagcgccgtggccaagaagaaggacaaagttaaaaaaggtgggccaggctcagagtgcgccgagtgggcttggggcccttgcaccccatcttcaaaggactgtggggtgggatttagggagggcacttgcggcgcccagacccaacgtattagatgtcgtgtgccatgtaactggaagaaggagtttggagccgactgcaagtacaaattcgagaactggggcgcatgcgatggcggcaccggaaccaaggtgcgacaggggacccttaagaaggcacgttacaacgcccagtgtcaagaaacaatccgggtgacaaaaccgtgtacccctaaaacaaaagcgaaggccaaagccaaaaagggaaaaggtaaggactag

SEQ ID NO: 24964 - DNA, 432 bp, synthetic construct
  misc_feature 1..432: note = Description of Artificial Sequence: Synthetic coding sequence
  source 1..432: mol_type = other DNA
atgcagcaccggggcttcctgctgctgaccctgctggccctgctggccctcacttccgctgtggccaaaaaaaaagacaaggtgaaaaaagggggtcccggatctgagtgtgccgagtgggcctggggcccgtgcacaccatccagtaaagactgcggcgtcgggttccgggagggaacatgcggagcacaaacccagcgcattaggtgcagagtgccttgcaattggaaaaaggagttcggtgctgattgcaagtataagtttgaaaattggggcgcctgcgatggggggactggtacaaaagtgcggcagggaaccctgaagaaggcacgttacaacgcccagtgccaggagaccattcgcgtgactaagccctgtacacccaaaacaaaagccaaggccaaggccaaaaaggggaagggaaaggactag

SEQ ID NO: 24965 - DNA, 150 bp, synthetic construct
  misc_feature 1..150: note = Description of Artificial Sequence: Synthetic coding sequence
  source 1..150: mol_type = other DNA
atgcagcaccggggcttcctgctgctgaccctgctggccctgctggcgttgacctcagctgtagccaaaaaaaaagacaaagttaagaagggcggccctggatcagagtgcgccgagtgggcgtggggcccatgcactccgtcctcatag

SEQ ID NO: 24966 - DNA, 396 bp, synthetic construct
  misc_feature 1..396: note = Description of Artificial Sequence: Synthetic coding sequence
  source 1..396: mol_type = other DNA
atgcagcaccggggcttcctgctgctgaccctgctggccctgctggcactcacctctgcggttgctaaaaagaaggacaaggttaaaaaaggcggtcccggatcggaatgtgcggaatgggcgtggggcccttgcacacctagctcaaaggattgcggagttggattccgtgaagggacctgtggtgcccagacccaacgcattcggtgcagggtgccatgtaattggaaaaaagagtttggtgctgactgtaagtacaaatttgagaattggggcgcttgtgatgggggaacgggaaccaaagtccgacaggggactttaaagaaagccagatacaatgcacagtgccaggagacaatccgcgtgacaaaaccttgtactcccaagaccaagtag

SEQ ID NO: 24967 - DNA, 264 bp, synthetic construct
  misc_feature 1..264: note = Description of Artificial Sequence: Synthetic coding sequence
  source 1..264: mol_type = other DNA
atgcagcaccggggcttcctgctgctgaccctgctggccctgctggctctaacaagcgctgttgccaagaagaaggccgattgcaagtataaatttgaaaattggggcgcatgcgatggcggaaccgggacaaaagtgaggcagggcaccctaaaaaaagcgagatataatgcacagtgccaggaaactattcgcgttacaaaaccctgtacccctaagacgaaggcgaaggctaaggctaaaaagggtaagggaaaggattag

SEQ ID NO: 24968 - DNA, 2715 bp, synthetic construct
  misc_feature 1..2715: note = Description of Artificial Sequence: Synthetic coding sequence
  source 1..2715: mol_type = other DNA
atggccgagagcagcgagagcttcaccatggccagcagccccgcccaacgccgtcgcggcaatgaccctctgaccagtagccctggccggtcaagtaggcggactgatgctctgacttcctcaccgggccgggaccttcccccattcgaagatgaaagtgagggcttgctcggcactgagggtcccctcgaagaggaggaggatggggaagagctgattggggatggcatggaacgcgattacagggctatacccgagctggacgcctatgaggccgaaggattggcattagacgatgaagacgtcgaagaattaacagcttcccaacgcgaagccgccgagcgcgccatgcggcagagggatcgagaagctgggcgaggcctaggccgcatgagaagaggccttctttacgacagcgatgaggaagatgaggagcgccccgctcgtaaacgtcgccaggtcgaacgggctacagaggacggtgaggaggacgaggaaatgatcgagtctatagagaacttggaggacctgaaaggtcactcagtacgggaatgggtgtctatggccggcccgcgactggaaatccaccatcgtttcaagaacttcctgcgaacacacgtggattcacatgggcacaacgtattcaaggaacggatatccgacatgtgtaaggagaacagagagtctctcgtggtaaactacgaagatttggccgctcgcgagcacgttttggcttatttcttgccagaggctcctgccgaattactccagattttcgatgaggcagctctcgaggtggtgctggcaatgtatccaaaatatgacaggattactaaccatatacacgtcaggatttctcacctgcccctagtggaggagctcaggagcttgcgccagctccacctgaatcaactgatccggactagcggcgtggtgacaagctgtaccggagtgttacctcagctctcgatggtcaagtataactgtaacaaatgcaacttcgtgctggggcccttttgtcaaagccagaaccaagaggttaagccagggagctgccccgaatgccagagtgccgggccctttgaagtgaatatggaagagaccatctatcagaattatcaacgaattagaatccaggagtcgcccggcaaggttgctgccgggcgattgcctagatctaaggatgccatccttctggctgatttggtggactcttgcaagccaggggatgaaatcgagctgaccggaatctatcataacaactacgacggttctctgaatacagctaatgggttcccggtgttcgcgaccgtcatcctggccaaccacgtggcaaagaaggataacaaggttgctgtcggtgagctgaccgacgaagacgtgaaaatgatcacatctttgtctaaggaccagcagattggcgagaaaatcttcgccagtatcgctccaagcatttacggccacgaggacatcaaaagagggctcgccctggctttattcgggggagaaccgaagaaccctggtgggaagcataaagtcagaggggacatcaatgtgctgctgtgcggagaccccggcacggctaaatcccagtttctgaaatatatcgagaaggtgtctagtagagctattttcacgaccgggcagggggcctctgctgtgggactaaccgcatatgtccagcgacaccctgtgagcagagagtggactctagaggcaggagccttagtgctggccgatcgcggcgtatgcctcatcgatgagtttgacaaaatgaatgatcaggacaggacatcaattcacgaggccatggaacaacagagtatcagcatatctaaggcaggtatcgtgacctcactgcaggctaggtgcactgtgattgctgcagccaatcctattgggggaagatacgacccctcgctcacctttagtgaaaacgtggatctgactgaacccatcatttctcgttttgacatcttatgtgtggtacgcgacaccgtggaccccgtccaggatgaaatgctcgccaggtttgtcgtcggttcacacgtgcgacaccaccctagtaacaaggaggaggaaggtctggccaacggctccgcagctgagcccgctatgccgaacacctacggagtcgagccactccctcaagaggtcctcaagaaatacattatctatgctaaagagcgggtccatccaaagctaaatcagatggaccaggataaagtggctaaaatgtattccgatctacgcaaggagtccatggctacaggctcaatcccaattacggtacgccatattgaatcgatgatccgcatggctgaagcacacgcaaggatccacctgcgggactatgtgatagaagacgacgtcaatatggcaatccgcgtgatgcttgagtcgttcatagacacacaaaaattctcggttatgagatcgatgcggaagacttttgcacgatacctctcattcagaagggataacaacgaattgctgctgtttatcctcaagcagctggtagcggaacaggtgacatatcaacgtaaccgtttcggcgcacagcaggatactatcgaggtgccagaaaaggacctggtggataaagcacgccagattaatatccataatttgtccgccttttatgactcagaactgtttaggatgaacaagttttcccatgacctcaagcggaaaatgatcctccagcagttctag

SEQ ID NO: 24969 - DNA, 2427 bp, synthetic construct
  misc_feature 1..2427: note = Description of Artificial Sequence: Synthetic coding sequence
  source 1..2427: mol_type = other DNA
atggccgagagcagcgagagcttcaccatggccagcagccccgcccagagacgcagaggcaatgaccccctgaccagcagccccgggtggggtctcggcaggatgagaagagggctgctctacgacagtgacgaggaagatgaggaaagaccggcacgtaagcgaaggcaggtagagagagccactgaggatggggaggaagacgaggagatgattgaatccatagagaacctggaagacctgaaaggccattcagtgagagaatgggttagcatggccggcccgcggcttgagatccaccatagatttaagaactttttaaggacacacgtcgactcccacggacataacgtttttaaggaaaggatctcagacatgtgtaaggagaaccgggagtctctcgtcgttaactacgaagatctggctgccagggagcacgtactcgcatacttcctacctgaggcgccagccgagcttctgcagatcttcgacgaagccgctctggaggtggtgttggccatgtatccaaaatatgataggataactaatcacatccatgtgaggataagccatctcccactggtggaggagctgaggtcactgcggcagctgcatctgaatcagttaatccgaacctcaggcgtggttaccagttgtacaggagtgcttccccagctgtcaatggtgaagtacaactgtaataagtgtaattttgtgctcggccctttttgtcaatcccagaaccaagaggtgaagcccgggtcgtgcccagaatgccagagtgcagggcctttcgaagtgaacatggaagaaaccatctaccagaattatcagcggatacggatccaggagtctccggggaaggtcgccgccggccgcctcccgagaagcaaagacgctatcctgttagccgatctcgtggattcgtgcaaaccaggcgacgagatagagctgacaggtatatatcacaacaactacgacggctctctaaatactgccaacggattccccgttttcgctacagtgatacttgctaatcacgtggcaaagaaagataataaggttgccgtgggtgagctcacagacgaagacgtcaaaatgatcacaagcctaagtaaagaccagcagataggtgagaaaattttcgcaagcatcgcaccaagtatatacggtcatgaggatatcaagcgaggcctcgcccttgccttgtttggaggggagcccaagaaccccggcggcaagcataaggtcagaggagatatcaatgtccttttatgcggagaccctggaacagccaagtcccagttcctgaagtatattgagaaggtgtcaagcagggcgattttcactaccggtcagggtgcctcagctgtcgggctcacggcatacgtgcaaagacaccctgtctctagggagtggacactggaagccggggccctggttctggcggaccgcggcgtgtgcctgatcgacgagtttgacaaaatgaatgaccaggatagaacatcaatccatgaggcgatggagcagcagagcatttcgataagcaaagcaggaatcgtcacctcccttcaggcacggtgtactgtgatcgcagctgctaatcctatcggtgggcgatacgatccatccctgacctttagcgagaacgtggacctgaccgagcctataatctctagattcgacatactctgtgtggtgagagataccgtggacccggtccaggatgagatgttggcgaggttcgtagtgggtagccacgtccggcaccacccgtccaacaaagaagaggaaggcttggccaacgggtcagccgccgagccagccatgccaaatacctacggagtggaacccttgccgcaggaggttctcaagaagtatatcatctacgcaaaggaaagggtgcatcccaaactgaatcagatggatcaggataaggtcgccaaaatgtactctgatctcagaaaagaatccatggcaacaggcagtatacccatcaccgttaggcatattgagagcatgatacggatggctgaagcgcacgcacgaatccacctccgagactacgtgatcgaagatgatgtgaacatggcaatccgggtgatgttggaaagtttcatcgatacccagaagtttagtgtaatgagatccatgcgcaagacttttgcacggtatctctccttccgccgagacaacaacgagctcctgctgttcattcttaagcaactggttgcagagcaggtgacctaccagagaaatcgctttggcgcccagcaagacacgattgaggtccccgagaaggacttggtagataaggctaggcaaattaatatacataatttgagcgcgttttacgattcagaactgtttcggatgaataaattttctcacgacctcaagcgcaagatgattcttcagcagttctag

SEQ ID NO: 24970 - DNA, 2865 bp, synthetic construct
  misc_feature 1..2865: note = Description of Artificial Sequence: Synthetic coding sequence
  source 1..2865: mol_type = other DNA
atggccgagagcagcgagagcttcaccatggccagcagccccgcccaaaggaggagggggaatgaccctctaacctcgtcccctgggcgtagttctagacgcacagacgccctaacgtcctcgcccggacgtgacctgcccccatttgaagacgaatctgagggattgttggggaccgaggggcctctcgaggaggaagaagatggcgaggagctgataggagacgggatggagcgagactaccgtgcaatccctgagctcgatgcatacgaagccgaaggactggcgctggatgatgaagacgtggaagagttaactgcgtcccaaagggaggcgggacgggggctcctgtacgattccgacgaagaagacgaggagaggcccgctcgtaagagacgccaagtcgagcgagctaccgaggatggggaggaagacgaagagatgattgaatcgattgaaaacctagaagatctgaagggacacagtgttagagaatgggtgagcatggccgggcctagactggaaatccatcataggtttaagaacttcctccgcacccacgttgactcccatggacataacgtgttcaaggagcggatcagcgacatgtgtaaagagaatagggagtccctcgtggttaattacgaggatctggctgctagagaacacgtactggcctatttcttgcctgaggctccagctgaactgctgcagatctttgacgaagccgccctagaagttgtcctcgccatgtatccaaagtatgatcgtattactaaccacattcacgttcgaataagccacttacccttggttgaggaactccggtcactcaggcagctacacttgaatcaattgatacgcacaagtggagtcgtgaccagctgcactggggtactgccccagctgagcatggtaaagtacaactgcaacaaatgcaacttcgtgctgggacctttctgccaatcccagaaccaggaggttaaacctgggtcttgtccggagtgccaatctgctgggccattcgaggtgaacatggaagagacaatctaccaaaactaccaacgcatcagaatccaggagtctcccggaaaggtggctgctggccgtctccccaggagcaaagatgcaatattattggcagatctggtcgacagctgcaagccgggcgatgagatcgaactcactgggatttaccataacaactatgacggttcactgaacactgccaacggcttccctgtatttgcaaccgttatattggcgaaccacgtcgccaagaaagacaacaaggtagccgtgggagagctcacagatgaggatgtgaagatgataactagtctatcaaaggaccagcagatcggcgagaaggaatcatctaggaatgcatccctggcggaggccggcataggcgcaatcccctcccagctgctggcgattgagccgagcctgagacggagcggcgttccgataggagaggtgggagtcagtcagaggcaggaagcgcgatcattcagcagcgctaatacccactggttcctagaagacctccttggccccagctgtagggacaccatgatctttgccagcattgctcccagtatctatggccatgaagatatcaaaaggggactcgccttggccctgtttggcggcgaacctaagaacccaggcggaaagcacaaggtcaggggagatatcaatgttttgctgtgcggagatcccggaacagccaaatcacaattcctgaagtacattgaaaaggtcagcagccgtgcaatctttactactggccaaggagcctccgccgtcgggctaactgcttacgtgcagcgtcacccagtgtctcgggaatggacattggaagcgggggcactggtgctggcggatcgtggcgtttgtctaatcgatgagttcgataaaatgaacgatcaggacagaacatcaattcacgaggcgatggaacaacagtctatttccatcagcaaagctggtatcgtgacctcccttcaggcccgttgtacagtgatcgctgccgccaaccccatcggcggcagatatgaccctagcctgacgtttagcgagaatgtggacttgaccgaaccgattatcagccggtttgacatactctgcgtggtccgggacacggtggaccctgtccaagatgaaatgctggccaggttcgtggtgggttcccatgtgcggcatcacccaagcaacaaggaggaggaaggcctcgccaacgggagcgctgccgagcccgctatgcctaacacctatggtgtcgaaccactcccacaggaggttctgaaaaagtacattatttatgccaaagagagagtgcaccctaagttaaatcagatggatcaggataaggttgcaaagatgtactcagacctacggaaggagtctatggcaaccggttccatcccaatcaccgtgcgacacatcgagagcatgatcaggatggctgaggctcatgcacgaatccatttgcgggattacgtgatagaggatgatgttaatatggcaatcagagtgatgttggaatcttttatcgacacacagaaattttcagtcatgaggtccatgaggaaaacctttgctcgctacctgtcctttcgcagggacaataatgagctgctccttttcatcttgaagcagctggtcgccgagcaggtgacctaccagcgtaaccgttttggagcccagcaggacaccattgaagttccggagaaggaccttgttgacaaggctcggcaaatcaatatccataatctatctgcattctatgactcagaactgtttcgcatgaacaaattctcccatgacctcaagcgtaagatgattctgcagcaattttag

SEQ ID NO: 24971 - DNA, 753 bp, synthetic construct
  misc_feature 1..753: note = Description of Artificial Sequence: Synthetic coding sequence
  source 1..753: mol_type = other DNA
atggccctgcgggccggcctggtgctgggcttccacaccctgatgactttactgtctccacaggaggccggtgcaaccaaagctgatcatatgggatcctacggccccgctttttatcaatcctacggcgcctcaggacagttcactcacgagttcgatgaggaacagctgttcagtgtggatctaaagaagagcgaggcagtgtggcgattgccggaatttggcgacttcgctcggtttgatccacaaggcgggctggctggcatcgctgctatcaaagcccatcttgacattctcgtagaacgatctaacagaagccgtgcgataaacgttcctcccagagtcacagtgctgcctaagagtcgggtggagctgggccagcccaacatcctcatttgcattgttgataatatcttcccaccagtgattaacataacctggctccggaatggccagaccgtgacggagggcgttgcccaaactagcttctattcgcagccagatcacctgtttaggaagtttcactatctgccttttgtgccctcggctgaggatgtgtatgactgccaggtggagcattggggtctagatgcaccccttctccggcactgggagctgcaagtgcccattcccccaccagacgctatggaaaccttggtgtgtgccctcggcctagctattggcctggtgggatttctcgtgggcaccgtgctcatcatcatgggaacatacgtcagctccgtaccacgctag

SEQ ID NO: 24972 - DNA, 993 bp, synthetic construct
  misc_feature 1..993: note = Description of Artificial Sequence: Synthetic coding sequence
  source 1..993: mol_type = other DNA
atgcaccggtaccgggcccccggcgagcaggacggcgacgccatgccactaggcagcgcagttgatatcttggctactgacgatcctaatttttcccaggaagatcaacaggacacccagatatatgaaaaacacgataaccttctgcacggcacaaagaagaaaaaagaaaagatggtgtctgctgctttcatgaagaaatacattcatgtggctaagattatcaaacccgtgctaacccaagagagtgcaacatatatcgcagaggaatattcccgcctcagaagccaggacagcatgtcttctgatacagcacgaactagcccagtgaccgcccgaactctcgaaacactaatcagactggctacggcccatgctaaagctcgcatgtccaaaacagtcgatttacaggacgccgaggaagccgtggaactagtgcaatacgcttactttaaaaaagttctggaaaaagaaaagaagcggaaaaagcggtcagaagacgagtccgagactgaagacgaggaggaaaagagccaggaggatcaggaacagaagcgcaagcgaaggaaaactaggcagcctgacgccaaggatggggactcctacgacccttacgacttctctgacactgaggaggagatgcctcaggttcacacccctaagaccgcagactctcaagagactaaggaatcacaaaaggtggaactcagcgagagtcgggacggcatcagtccatgttgccccggatggtcctggactcctggcctgaaacagtcgttctacctgtctctcccaaagggatgggactataggcataaaccactgtgccttttcgatctgatattgttcaacgactgtagggtgtcaatggttgagggaatacaggggggacccctggggtgcgtcccaggatcttcctgcgcagtgaacagacatgaaagccctcatcgcatccatcagcccggacagagacgcgccctgctcttctcctag

SEQ ID NO: 24973 - DNA, 2289 bp, synthetic construct
  misc_feature 1..2289: note = Description of Artificial Sequence: Synthetic coding sequence
  source 1..2289: mol_type = other DNA
atgtggagctgcggccggctgcgggagatcacctggaccagctggaccacacgcctgcttaacaacgccttcgaggaactggtagcctttcagcgcgcactaaaagatttcgttgcatctattgacgcgacatatgcaaagcagtacgaagaattttacgttggcctggaagggtcatttggaagcaagcacgtcagcccgcggacgctcacctcctgctttctaagctgcgttgtgtgcgttgaggggatcgtgaccaagtgcagcctggtacgccccaaggtggtccggtctgtgcattactgtcctgcaacaaagaaaacaattgagcgaagatactccgacctgacaaccctcgttgcttttccttccagcagtgtgtaccccaccaaggatgaggaaaacaacccgctagagaccgagtacggactcagcgtgtataaggatcatcagaccattacaatacaggaaatgccagagaaagctcccgcaggccaactgccacggtcagtggatgtcatcctcgatgacgacttagttgacaaagccaagccgggagaccgtgtgcaggtggttgggacttatagatgtctgccgggcaagaagggtggctataccagcggaactttcagaactgtgctcattgcttgtaatgtgaaacaaatgtccaaagacgctcagccttctttctccgccgaggatatcgccaagattaaaaagttctccaaaacgcggtcaaaggatatcttcgaccaactggctaaatccctcgccccctccatccacgggcatgactacgtcaagaaggctattctctgtttgctcctggggggagtggaacgcgacctagaaaacggtagccacattcggggggacattaacattctcctgatcggcgatcctagcgtggccaagagccagctcttgagatacgtgctgtgtacagccccccgtgccatccccactactgggcggggtagtagcggggtcggattgaccgccgcagtgactactgaccaggaaaccggcgaacgccggttagaggctggagccatggtgctcgccgaccggggagtagtgtgcatcgacgagtttgataaaatgagcgatatggatagaaccgctatccatgaagttatggagcaggggcgggtgactattgccaaagccgggatccacgcacggctcaacgcccgttgttcggtgctggctgccgctaacccggtctacgggcgttacgaccaatataaaacaccaatggaaaatatcggcctgcaggattccctgctcagcagattcgacctgctgttcattatgctggatcagatggacccagagcaggatcgcgaaatctctgaccacgtccttcgcatgcaccgctacagagcaccaggcgagcaggacggcgatgccatgcctttaggatctgccgttgatatccttgcgaccgacgaccccaatttcagccaggaggatcagcaggacactcagatctatgaaaaacatgataatcttcttcatgggacaaaaaagaagaaggaaaagatggtcagcgccgcttttatgaagaagtacatacatgtcgccaaaattatcaaacctgtcctgacccaagagagtgcaacctatattgccgaggagtacagtcgacttcgttctcaagacagcatgagctctgacaccgccagaacaagtccggtgacagccagaaccttagaaacactgatcaggctagcgaccgcccacgctaaagctcggatgtccaaaaccgtggacctccaagacgcggaggaagccgtggagctcgtgcagtatgcctatttcaaaaaggtgctcgagaaggaaaagaaaagaaagaagcggagcgaagatgaatcagagactgaggatgaagaggagaagtcccaggaagatcaggagcagaaacgaaaacgaagaaagacacgccaaccggacgccaaagatggagatagctatgacccgtacgatttttcagatacagaagaagagatgcctcaggtgcatactcctaagaccgcagactctcaggaaaccaaggaatcacagaaggtcgagctttctgaatctaggctgaaagcctttaaagtggcacttcttgatgtatttcgagaggcccacgcccagtcaattgggatgaataggttaaccgagagcattaaccgggatagcgaggaacccttcagctccgttgagatccaggccgccctgagcaaaatgcaggacgataaccaggttatggtctccgagggaatcatatttctgatttag

SEQ ID NO: 24974 - DNA, 987 bp, synthetic construct
  misc_feature 1..987: note = Description of Artificial Sequence: Synthetic coding sequence
  source 1..987: mol_type = other DNA
cggtaccgggcccccggcgagcaggacggcgacgccatgcccctgggttccgctgtcgatattctcgctactgacgatcccaacttctcccaggaggatcagcaggatacccagatatatgagaagcatgacaacctccttcacggtacaaaaaaaaagaaagaaaagatggtgagcgccgcatttatgaagaaatacatccatgtagccaagatcataaaacccgttctgacacaagagagcgcaacatacattgcagaggagtatagcagactccgcagccaggacagcatgtcctcggacaccgcgcgaacctcacccgtcactgcacgtacacttgagaccctaatacggttggccacagctcacgccaaggctagaatgtcaaaaactgtggacctgcaggacgccgaggaggcggtggaactagtccaatacgcctatttcaaaaaggttttggaaaaggaaaagaaaagaaaaaaacgcagcgaggatgagtcggaaacggaggacgaagaggagaagtcacaggaggatcaggagcaaaagagaaagcgccgaaagacacgccaaccagatgccaaggatggcgactcttacgacccctacgatttcagcgacacagaggaggagatgcctcaggtacatacacccaagaccgcggactcgcaagaaaccaaggaatcacagaaggttgaattgtcagagtctcgcgatggcatctctccttgctgccccggttggagttggactcctgggctgaagcagtctttttacctgtcactgcctaaggggtgggactacagacacaaaccgctttgcttatttgatctgattctctttaacgactgtcgcgtgtcgatggttgagggaatccagggagggcctcttggctgcgttcccgggagttcttgcgccgtcaaccggcacgaaagtccacaccggattcatcagcccggacagcgaagagcactgctattctcctag

SEQ ID NO: 24975 - DNA, 2562 bp, synthetic construct
  misc_feature 1..2562: note = Description of Artificial Sequence: Synthetic coding sequence
  source 1..2562: mol_type = other DNA
atgctgccccggagcccccccctgccccggggcaacctgtggtggagggaggagtttggaagtttcagagctggcgtcgagtcaagttgggagcctcccagagacttcggcggagggagcagcctggctgcggggatggccggaactgtggttttggacgacgttgagttaagagaggcacagagagactatctggatttccttgatgacgaagaagatcaggggatctaccagtccaaagtaagggagttgatttcagataaccagtacaggctcatcgttaacgttaacgacttaagacgcaagaacgaaaagagggcaaacaggctcctaaacaacgccttcgaagagctggtggcttttcaaagagccctgaaagacttcgttgcttccatcgacgcaacatatgcaaagcagtatgaggaattctacgtgggcttggaagggagttttgggtctaaacatgtgtctcccagaactctgacctcgtgcttcttgtcctgtgtggtctgcgtggaggggatcgtcacaaagtgttcccttgtccgtcctaaggtagttcgctctgttcactattgccccgctacaaagaagactattgaaaggcgttattccgatctgacaacccttgtggcatttcccagttcctccgtgtaccctacgaaggacgaagagaacaatccgctcgagacagagtatggattaagcgtgtacaaggaccaccaaactatcacaattcaggagatgcccgagaaagcaccagccgggcagctcccgaggagtgtcgacgtcatcctcgacgacgatcttgtcgataaggcaaaacccggggatagggttcaggtagtgggaacttataggtgtttgcccggtaagaagggaggctacacctccggcacattcaggacggtgttgatagcatgcaacgtcaagcagatgagtaaggacgcccaaccctcctttagcgcggaggatatcgccaaaattaaaaagttctctaaaacacgttctaaggatatctttgaccaactggctaaatccctggctcctagcatacatggacacgactacgtgaagaaagccattctttgcctgctcctgggcggcgtggaacgcgatctggagaatggctcccatatacgtggtgacattaacatcctgctgattggtgatcccagtgtggctaaatctcaacttctgcgctatgtgctgtgcactgccccaagagctatacctaccacaggacgcggtagtagcggggtgggcttaacagctgccgtgactacggatcaggaaaccggtgagagacgcctcgaagccggagcaatggtgttggctgatagaggagtggtttgtatcgatgagtttgataagatgagcgacatggaccggaccgccatacacgaggtgatggagcagggaagagttacaatagccaaagcaggcatccatgcgcgcttaaacgctagatgcagtgtgctggcggccgcaaatcctgtgtatggccgatacgaccagtacaagaccccaatggaaaatatcggcctccaagattcactcctaagtcgttttgatctgctgttcataatgctggaccaaatggatcccgagcaggatcgtgaaatatcggaccatgtgctaaggatgcaccggtacagggcgccaggggaacaggatggggacgcaatgcctcttggatcagccgtggacattctagctaccgatgaccccaacttttctcaagaggaccagcaggacactcagatctacgagaaacacgataacctcctgcacggcacaaagaagaaaaaagagaagatggtgtcggccgcgttcatgaagaagtatattcatgtggctaaaataataaagccggtgttaacacaggaaagcgccacgtacattgcggaggagtactccaggctccggtcccaggattcaatgagtagtgatactgccaggactagtcccgtcactgcacgcaccctggaaactcttatccggctggccactgcacacgcaaaggccaggatgtcaaaaactgtggatctgcaggatgctgaggaggctgtcgagctggtgcagtatgcatacttcaaaaaagttctggagaaagagaagaagcgaaaaaaacgaagcgaggatgaaagcgagaccgaggatgaagaagagaaatctcaggaggaccaagaacaaaaacgaaagcgacgcaagacccggcaaccagatgccaaagatggtgacagctacgacccttatgatttctccgacacagaagaggagatgcctcaggtgcacacacctaaaaccgcagattcccaggagaccaaggagagtcagaaggtggagctgagcgagagccgactgaaagctttcaaagtggccctcctggacgttttccgtgaggctcatgcccagtcaataggcatgaatcgcctcacagaaagtattaatcgcgactctgaggagccattcagcagcgttgaaattcaagctgccctatctaaaatgcaggatgataaccaggtgatggtatcagagggcattatatttctgatttag

SEQ ID NO: 24976 - DNA, 2592 bp, synthetic construct
  misc_feature 1..2592: note = Description of Artificial Sequence: Synthetic coding sequence
  source 1..2592: mol_type = other DNA
atgagcagccccgccagcacccccagccggcggggcagccggcggggcagggcgacccccgcgcagacaccccggagcgaggacgcacggagtagtcctagccagcgtcgcagaggtgaagattctacctcaactggggagctgcagcctatgccaacctcgccgggagtcgacttgcagagcccagccgcgcaggacgtcttattcagcagtcctccccaaatgcacagttccgccattcccttggattttgacgtcagtagccctctaacgtatgggacaccctctagtcgggtggagggaaccccccggtccggggtgcgcggaacacctgtcagacagcggcctgatcttggaagcgcccagaaaggactgcaagtggatctgcagtcagatggtgcagccgccgaagatatcgtcgcttcagagcagtcactaggccagaagttggtcatctggggaaccgacgtgaatgtggcagcttgcaaggagaacttccagaggttcctgcaaagatttatcgatccactggccaaggaggaggaaaatgtgggcatagatatcacagaacctctttatatgcagcgacttggggagatcaatgtaattggcgagccgtttttgaacgtgaactgtgagcatattaagtcatttgataaaaatctgtatcgccaattgatcagttatcctcaagaggtgatcccgacattcgatatggctgtaaacgagattttttttgatagatatcctgacagcatcctggagcatcagatccaggtgagaccgttcaacgctttaaagactaaaaatatgagaaacctgaatcctgaggacattgaccagctaatcaccatcagcggaatggtgatcaggacaagccagttgattcctgagatgcaggaggccttcttccagtgccaggtgtgtgctcatacaacccgagtggagatggaccgaggcaggattgcagaaccaagtgtttgcggacgttgtcatactacacactcaatggcactgatccacaaccgttctctgttttccgacaagcagatgatcaaacttcaggagtcacccgaagacatgcccgctgggcagactccccatactgtcatacttttcgcccataatgatcttgtagacaaggtgcaaccaggagaccgggtgaatgtgactggcatttacagagccgtgcccatcagggtgaacccccgggtcagcaacgtgaaatcggtctacaagacacacatcgatgtgattcattaccggaagaccgatgcaaagagactgcacggcctggatgaagaggctgaacagaaactgtttagtgagaaaagagtggagctcctgaaagagctgtctaggaaaccagacatatacgaacggctggcttccgccttggctcccagtatctatgagcatgaggacattaagaagggcatactgctgcaattgtttggaggtactaggaaggacttcagtcacacaggacggggaaagttccgcgccgaaattaacattctgctgtgtggggatccaggaactagtaagtcccagctcctgcagtatgtgtataacttagttcccagaggtcagtacacaagtggcaaggggtctagtgcagtgggactcactgcatatgtgatgaaagacccagaaacgagacaactagtgctgcaaaccggagctttggtgctgagcgataacggtatatgctgcattgatgagtttgacaaaatgaacgagtccacccgcagcgtactgcacgaggtaatggagcagcaaacactgagcatcgcaaaagcaggcatcatctgccagttgaatgcccgcacctccgtcttagccgctgccaatcctatcgaatcccaatggaatcctaaaaagacaactattgaaaacatccaacttccacatacactgctaagcaggtttgatctgatttttttacttttggatccacaagacgaagcgtatgatcgccggctcgctcaccatcttgtggctttgtattaccagtccgaggaacaagctgaagaggagttgttggacatggctgtgctgaaagattatatagcatatgcccactctacgatcatgccccggctgtctgaggaggcctcccaggcgctaatcgaggcctatgttgacatgcgaaagatcggctctagccgaggcatggtttcagcatacccaaggcagctggagtcgctgatacgcctggccgaggctcacgccaaagtcaggcttagcaataaagtggaggctattgacgttgaagaggccaagcgattgcaccgtgaagcacttaaacagtcagccactgacccccgcacaggcatagttgatatcagcatccttacgactggcatgtcagctacaagccgaaaacgtaaggaagagttggccgaggcacttaaaaaactgatactgtctaaggggaaaaccccagcccttaaatatcagcagctgttcgaagacatccgtgggcagagtgatatcgccattacaaaggacatgttcgaagaagccctgcgcgctctcgctgacgacgatttcctcacagtgacgggaaaaactgttcgactcctgtag

SEQ ID NO: 24977 - DNA, 2472 bp, synthetic construct
  misc_feature 1..2472: note = Description of Artificial Sequence: Synthetic coding sequence
  source 1..2472: mol_type = other DNA
atgcccggccacctgcccctgcgggacgtggaggcccggatccccccacctaggggcagttgtagccgatgtcagccccgattggagtggacttgtcgagcgctacttagaagaacctgttgtttccccgccctacccaaatgcattttgcagctgtctttgcttacactgatgctcgagggcacccctcgcagcggcgtccgtggtacccctgtgaggcaaaggcccgatttgggctccgcacagaaaggcttacaggtggacttacaaagtgatggggccgccgcagaagacattgttgctagtgagcagagtctagggcagaagctcgtaatttgggggaccgatgtaaatgtggctgcctgcaaagaaaatttccagcgctttctgcagaggtttatcgacccactggccaaggaggaggaaaatgttggaattgacattacagagcctctttatatgcagagactcggcgaaatcaacgtgattggagaaccgttcctaaacgttaactgtgagcacatcaagtcctttgacaaaaacctgtataggcagctgataagttacccccaagaggtgattcctacgttcgacatggctgtgaacgagatcttctttgatcgctacccagactctattctggagcatcagatccaagtccggccctttaatgccctgaaaacgaagaatatgcggaacctgaatcctgaggatatcgaccagctgatcacgatctcaggaatggtcattcggaccagccaactgataccagagatgcaagaagccttttttcaatgccaagtgtgtgcacataccaccagagtggagatggaccggggtaggatcgcggaacccagcgtgtgtgggcggtgccacacgacacactctatggctctgatacacaatcgaagccttttctccgataaacagatgatcaagcttcaggagtctcctgaggatatgcccgctggccagaccccacacaccgtcatcttatttgctcataatgatctggtagataaagtccagcccggggatcgagtgaacgtgactggtatctatcgtgccgtgcctatccgcgttaatcccagagtgtcaaacgtgaagagcgtatacaagactcatatagatgtcatacactacagaaagaccgacgccaaacgcctgcatggtctcgacgaggaagcagagcagaaactgttcagcgaaaaaagggtcgaactgttgaaagagctgtctcgcaaaccagatatatatgagaggctcgcgtctgccttggccccatctatttacgagcacgaagacattaagaaaggaatcttgctacagctgtttgggggaactagaaaagatttcagccatacaggacgtggaaaattcagagcggagattaacatactgctgtgcggagatcctggtactagtaagagccagctcctccagtacgtctataacctggtgcccagggggcaatacacatcggggaaaggctcatccgccgtcggtttaacagcctacgtgatgaaggatccagagacccgacagcttgtactccagacaggggccttagtgctctctgacaatgggatctgttgcattgacgagttcgacaagatgaacgaaagtacaagatccgtcctgcatgaggtgatggaacaacagactctaagtattgccaaggccggcattatttgccagctcaacgctcgcacgagtgtcttggccgccgcaaaccctatagaatctcagtggaatccgaagaaaaccaccattgagaacattcagctcccccataccctgttgtctcgatttgacctcatattccttctcctggatcctcaagacgaagcgtacgatagaaggttggcccatcacttggtggccctgtattatcagagcgaggagcaggccgaagaagaattactcgatatggcggttttaaaagattacatcgcatacgcccacagtacaattatgcctagactgagcgaggaggcctcgcaggctttgatcgaagcttatgtggacatgaggaagatcggcagctcacgggggatggtctccgcctatccccggcaactcgagtcattgatacgtctggctgaagctcatgccaaggttagactgagcaacaaagttgaagccatcgatgttgaagaagccaaacgcctccatcgagaggccctcaagcaaagtgcaactgatccacgaacaggtatcgtggatatcagcatcctcacgaccggcatgtctgcaacctctcgcaaacgtaaagaggagctagctgaagcacttaagaagttaatcttgtcaaagggaaaaaccccagccctcaagtatcagcagctgtttgaagacatcaggggccagtccgatatcgcgattactaaggacatgttcgaagaagccctaagagccctagccgatgacgatttcctcaccgtgacaggcaaaactgtcaggcttctgtag

SEQ ID NO: 24978 - DNA, 2592 bp, synthetic construct
  misc_feature 1..2592: note = Description of Artificial Sequence: Synthetic coding sequence
  source 1..2592: mol_type = other DNA
atgagcagccccgccagcacccccagccggcggggcagccggcgggggcgggctacacccgcacagacacctcgctctgaggatgcccgctccagtccttcacagcggaggagaggagaagactcgacctctacaggggaactacagcctatgcccacttctcccggagttgacctgcagagtcctgctgcacaggatgtcctcttttccagccctccgcagatgcactcaagcgccatccctctcgactttgacgtgagctcgccactcacctacggaaccccctcgtcccgagtggaaggcacacctaggtcaggtgtgcggggcacacctgtgcggcagcgtccggatctgggctctgctcaaaaaggcctgcaggtcgatctccagtccgacggggctgccgccgaagacattgttgcctcagagcagtccctgggccagaagctcgtgatctggggcaccgacgtgaatgttgctgcatgcaaggagaacttccaacgttttttgcaacgcttcatcgatcctttggcaaaagaggaggaaaatgtgggaatcgatatcacagaacccctgtacatgcagaggttaggtgaaataaacgtcatcggcgaacctttcctgaatgtcaactgcgagcacattaagtcttttgataaaaatctttaccgccagctgatatcctacccccaagaggttattccaacattcgatatggccgtcaacgagatttttttcgacaggtatcccgattcaattctggagcatcagatacaggtccgccccttcaacgccctgaaaacgaagaatatgcgcaacttgaatccagaagacatagaccaattaattactatcagcggaatggtgatccgtacctcccagttgattcccgagatgcaggaggcgttctttcagtgccaggtttgtgcgcacactacacgggtcgagatggaccgcggccgaattgccgagcccagcgtatgcggcaggtgccatacaacacactcgatggcccttatccataaccgctccttgttttctgacaagcagatgattaaactacaagaatcccccgaagacatgccagctggtcaaactcctcacaccgtgatcctcttcgctcacaatgacttggtagataaagtacagccgggcgatagggttaacgtcaccgggatttatagagcagtccctattcgtgtgaacccccgcgtcagcaacgtcaagtcagtgtacaaaacacacattgatgttattcattacagaaagactgacgcaaagagactccatggactcgacgaagaagctgaacagaaactgttctccgagaaaagagtggagctgcttaaagaactgtcccgcaagcctgacatttacgagaggctggccagcgccctcgcgcccagcatttacgaacacgaagatatcaaaaaggggatccttctgcagctcttcggcggtacaaggaaagactttagtcataccggacgcggaaagttcagagcagagattaatatactcctttgcggtgaccccggcacctctaaaagtcaactgttgcagtatgtctacaatttggtaccacggggccagtacacttcaggtaaggggtctagtgcggttggcctaacagcgtacgttatgaaggatcctgagactcgccagctcgtgctccagactggcgcactcgtgctgtccgacaatggtatctgctgtatcgatgaattcgacaaaatgaacgagtcgacacggtccgttctgcatgaggttatggaacagcaaactctatctattgctaaggcaggaatcatctgccagctgaatgcccgaacgtctgtcctcgcagcggccaatcctatcgagtcccagtggaatcccaagaaaacaacaatcgaaaacattcaactgccccacactttactgtctcgctttgacctgattttcttactgcttgaccctcaggacgaagcatacgatagacgtctggctcaccatctcgttgctctgtactaccaaagtgaggagcaagccgaggaggagctcctggatatggcagtgctgaaagactacatcgcatatgcgcacagcacgatcatgcctagactgtccgaagaggccagtcaggcccttattgaggcctacgtagatatgcgcaagatcgggagcagtagaggcatggttagtgcctatcctagacagctggaatcccttattagactggccgaggcgcacgctaaggtgagattgagcaacaaagttgaggccattgatgtcgaggaagccaagaggctgcaccgggaggcactgaaacagtcagccaccgacccgcgaactgggattgtcgacatcagcattcttactaccggcatgtcagccacctccagaaagaggaaagaggaactcgcagaggcactgaaaaagttaattctgtcaaagggaaagacacctgccctcaaataccagcagttgttcgaagacattagaggacagagtgacattgccatcacaaaagacatgttcgaggaagccttgagggcccttgccgacgacgactttcttaccgtcactggaaagaccgttcgcttgctttag

SEQ ID NO: 24979 - DNA, 855 bp, synthetic construct
  misc_feature 1..855: note = Description of Artificial Sequence: Synthetic coding sequence
  source 1..855: mol_type = other DNA
atggccccccggctgtgcagcatcagcgtgaccgcccggcggctgctggggggacccggaccaagggccggcgatgtcgcctccgccgctgcagcccgattttacagcaaagacaacgaaggctcgtggttcaggagcctcttcgtgcacaaagttgacccaagaaaggatgctcattccacccttctctcgaagaaagagacctccaatttatataaaattcagttccataatgtaaaaccagagtatctggatgcttataattccctgactgaagccgttctgcctaagctgcacctggatgaggattatccttgtagcctcgtggggaattggaatacctggtacggagaacaggaccaggccgtccacctctggcgcttctccggcggctaccccgctctgatggactgtatgaacaagctcaagaataacaaagagtatctagagttccgccgagagaggtcacagatgttactttcacgccggaaccagctgctcctggaattctccttctggaacgagccccaacctcgaatgggccctaatatttacgaacttagaacctataaactcaagcctggaactatgatcgaatggggaaacaattgggccagagccatcaagtaccgccaggaaaaccaggaggccgtcggaggctttttctcacagatcggggagctgtacgttgtccaccacctgtgggcctataaagatctccaatctcgcgaggagacaaggaacgcggcttggagaaaacgcgggtgggatgagaatgtgtactacacagtgcctctggtacgacacatggagtccagaattatgataccactgaaaatctcgccactgcagtag

SEQ ID NO: 24980 - DNA, 2076 bp, synthetic construct
  misc_feature 1..2076: note = Description of Artificial Sequence: Synthetic coding sequence
  source 1..2076: mol_type = other DNA
atgagcggcttcgacgaccccggcatcttctacagcgacagcttcggcggtgacgcccaggccgatgagggccaagcccgcaaaagccagcttcagagacgatttaaggaatttctgagacaatacagagtgggcactgatcggaccggctttacattcaaataccgagacgagcttaaaagacattataaccttggggagtattggatagaggtggagatggaagatctggctagctttgacgaagacctggctgactatctatataaacaacccgccgaacatctccagctgtccgatatgatgagccatctggtgaaaatacccgggattattatagccgcctctgccgtgcgcgctaaagccaccagaatctcaatccagtgcagatcatgtagaaacaccctgacaaacatcgcgatgcggcccggtcttgaaggatacgcactcccacgtaaatgtaacactgaccaggctgggaggcccaagtgtcctttagacccatacttcatcatgcccgataagtgcaaatgcgtcgattttcagactctgaaattgcaggagctgccagacgcggtgcctcatggcgagatgccccgtcatatgcagttgtactgcgaccggtatctgtgtgacaaggtcgtgccagggaacagggtgacaattatggggatctattctattaaaaaattcggactgacaacctcaaggggcagggaccgcgtcggcgtcggaattaggagctcttacataagggtgctggggattcaggtcgacacagatggatcggggcggtcatttgctggtgctgtgtccccacaggaggaagaagaattccggcggctcgccgcactgccgaacgtctacgaagtaatctcaaagtccatagccccctctatctttggaggaaccgacatgaagaaggccatcgcatgcctgcttttcggcggcagtaggaagagactccccgacggcctaacgagacgcggcgacatcaacctgctgatgctcggtgacccaggtacagcaaaatcacaattactgaaattcgttgaaaagtgtagtcctatcggagtgtataccagtgggaaggggagttcagctgcaggcctgaccgcaagtgtgatgagggatcctagttctaggaattttattatggagggtggagcaatggttcttgctgacggcggagtagtgtgcattgacgaattcgacaagatgcgcgaagacgaccgcgttgcgatacacgaggccatggagcagcagactatttccatcgctaaagcaggcatcacaacgactttgaattcaaggtgctcggttctcgccgcagctaatagcgtgttcggtcgttgggatgagaccaaaggtgaggataacattgattttatgcccaccattctgtcacggttcgacatgattttcattgtgaaggacgaacacaatgaggagagagatgtgatgctcgcaaaacatgtaatcacacttcacgtgagcgcattgactcagacgcaggcagtcgagggtgagatcgatctggcaaagcttaagaagttcattgcttattgccgcgtgaaatgcggccccagactgtctgcggaagctgcagaaaaactgaaaaacagatatattatcatgcggagcggagctaggcaacatgagcgagatagcgaccggaggagctctatcccaatcaccgtgcgacagctggaagcaattgtccggatcgcagaagctctgagtaaaatgaaactccagcccttcgccacagaggctgatgtggaagaggccctgcgcctgtttcaggtgagcaccctcgacgccgccctgtcggggacactctctggggtggagggtttcacatcccaggaggaccaagagatgttgtcgagaatcgagaaacagctgaagagaagattcgccatcggatcccaggttagtgaacacagcatcattaaggacttcacaaagcagaaatatcctgaacatgccatccataaggttctccagcttatgctgagacgcggggaaattcagcacaggatgcagaggaaggtgctgtatcgcctgaaatag

SEQ ID NO: 24981 - DNA, 696 bp, synthetic construct
  misc_feature 1..696: note = Description of Artificial Sequence: Synthetic coding sequence
  source 1..696: mol_type = other DNA
atgagcggcttcgacgaccccggcatcttctacagcgacagcttcgggggcgacgcacaggcagacgaggggcaagctagaaagtcacagcttcaaaggcggttcaaggaattcctgcgccaatatcgcgtaggaacggataggaccgggtttacttttaagtacagcctggcgccctccctgatcgaacacttgctgcctgccaggtactgcagcggctgttgggctgctgcgctgaagctggatctcgcccctgccagtagagacgaactaaaaaggcattacaatcttggtgaatattggatagaggtcgaaatggaggacctggcaagcttcgacgaagatctggctgattacctgtataagcagcctgccgagcacctgcagttactagaggaagcagcgaaagaggtggccgacgaggttacaagaccgcgcccttcaggcgaggaggtgcttcaggacattcaagtgatgctcaaatctgatgctagtccttcctcaattagatccttgaagtcggacatgatgagccacctcgtgaaaatcccaggaattattattgccgcctccgcagttagagcaaaagcaactagaatcagtattcaatgtcgatcatgccggaacactctgactaacatagcaatgcgccccgggctggaaggctatgctcttccccgcaaatgcaacacgtag

SEQ ID NO: 24982 - DNA, 1125 bp, synthetic construct
  misc_feature 1..1125: note = Description of Artificial Sequence: Synthetic coding sequence
  source 1..1125: mol_type = other DNA
atgaacagcagcggcatcaccacctggggcagcaccggcctgcggtggcgttggagaacaaggccacggccctctggtgaggaagtgttgcaggacatccaggtcatgctcaagtctgatgcatcgccctctagcatacgaagtttaaagagtgacatgatgtcccacctggtcaagattcctgggattatcatcgccgcatctgccgtacgcgccaaagcaacacggataagtattcagtgccgatcctgtcggaatacactcaccaacatcgccatgcgccccggcttagaaggctatgcgctacctcgcaaatgtaacactgaccaagcgggccgcccaaagtgccccctggatccatatttcattatgccagataagtgtaagtgcgttgattttcagactttaaaattgcaagaactgccagacgccgtgccacacggcgaaatgccgaggcacatgcagctgtattgcgataggtacttatgcgacaaagtagtacccggtaaccgtgtgaccattatgggcatttactctattaaaaaatttggtctgacaacctctcgcggccgggatagggtaggtgtagggattcggtcatcatacataagagtgctcggcatacaggtggataccgatggctccggacgcagctttgccggcgccgtgagtccacaagaggaggaggagttccgaaggctggcagcgctgcccaacgtgtatgaggttatcagcaagtcaattgcaccttccattttcggcgggaccgacatgaagaaggccatagcttgcctgctctttggcggctctcgcaagcgcttgcctgatgggctcacaagaagaggggacataaacctgcttatgctgggcgacccaggcacagcaaagagtcaactgctgaagtttgtggagaagtgttcaccaatcggagtgtatacatcggggaaaggctcctcagccgccggcctgacagctagcgtgatgagagatcctagcagccggaacttcattatggagggaggggccatggtccttgccgatgggggagttgtgtgcattgatgaatttgacaagcatagggaggctgctcaagcccctctctgtcactggcttcccggagtttag

SEQ ID NO: 24983 - DNA, 1788 bp, synthetic construct
  misc_feature 1..1788: note = Description of Artificial Sequence: Synthetic coding sequence
  source 1..1788: mol_type = other DNA
atgttctacttccggggctgcggccggtgggtggccgtgagcttcactaagcagcagttcccactggccaggctgtcctctgacagcgccgctccacgcaccccgcactttgatgtcatcgtgattgggggcgggcacgctggcactgaggccgctactgccgcggccaggtgtgggagcaggacccttctgctgactcaccgggtcgatacaatcggccaaatgagctgcaacccatcctttggcgggattggtaagggccatctgatgagggaggtcgatgcactggacggcctgtgcagtcgaatttgtgatcaaagtggagttcactataaggtgctaaatagaagaaaaggacccgccgtgtgggggcttcgggctcagatagatcgcaagctgtataagcagaatatgcaaaaagaaattctgaatacgccattgctcactgtgcaagagggagcagtggaagatctgatcctcaccgagccagaacccgaacataccgggaaatgtcgtgtgtctggggttgtgctacctgaagatcagctgccatgctatttgacccacactaacccacgcgtcgatgaaattgtgctgaagaatctgcacctcaacagtcacgtgaaagagactaccaggggacctcgctactgtccatccattgaatccaaggtattgcggttcccaaatagacttcaccaggtctggctcgagcccgaaggtatggattcagatttaatttacccacagggactgagtatgacactacccgcggagctccaagagaaaatgatcacatgtatccgcgggttggaaaaggccaaagtgatccagccagggtatggtgtccagtatgattacttagacccacgccagattaccccctcacttgaaacccatctcgtgcagagactgttttttgcagggcagatcaacggaacaaccggatatgaagaggccgcggctcaaggagttattgctggaatcaacgcctctttgcgagtgagcagaaagccaccgttcgtcgtttcacggactgagggctacattggtgtgctgattgacgatctgacaactctgggcacttctgaaccctaccgcatgtttactagcagggtggagtttcgcctgtcattacgtccagataatgccgacagccgcttaacacttcgtggctataaagatgctgggtgtgtgtcgcaacagaggtatgaaagggcctgctggatgaagtcatcattagaagagggtatatcggtcctgaagtctattgaattcttgagcagtaagtggaagaaactcatccctgaggcctccatttcaacttctagaagcctgccagttcgggccctggacgtcctgaaatacgaagaagtagatatggatagtttggccaaggccgtccctgagcccctgaagaaatacactaagtgtagagagctcgctgagaggctgaaaatcgaagcgacctacgaatccgtgctgttccaccaactgcaagaaataaagggggtgcagcaagatgaagcacttcagctgcctaaggatcttgactatttaaccattcgcgacgtatcattgtcacatgaagtccgggagaagctgcatttttcaagaccccagacgattggcgcagcctcccgcatcccaggcgttactcccgctgccattatcaacctgttgcgatttgtgaagacgacacagcggagacaatcagccatgaacgaaagctctaagactgatcagtatctatgtgatgccgatcgtctccaggagagggagctctag

SEQ ID NO: 24984 - DNA, 2154 bp, synthetic construct
  misc_feature 1..2154: note = Description of Artificial Sequence: Synthetic coding sequence
  source 1..2154: mol_type = other DNA
atgttctacttccggggctgcggccggtgggtggccgtgagcttcacgaaacagcagtttccccttgctcggttaagctctgattctgctgctcccagaacccctcatttcgacgtgatagtgattgggggcgggcacgcaggaaccgaggccgctacagctgccgctaggtgcggatcaagaaccctgctgctgacgcacagagtcgatacaattgggcagatgagctgtaatccgagtttcggggggatcggaaaaggacacctgatgcgggaagtcgacgccttggatggcctttgctcaagaatttgcgaccaaagcggggtgcattataaggttctgaataggagaaaagggcctgctgtatggggtctgcgtgctcagattgaccggaagctctataagcagaatatgcagaaggagattctgaatacgccgctgcttactgtgcaggagggtgcagtggaggacttgattttgacagagccagaacccgagcacactggaaagtgtagggtgtcaggagtggtcctggtggatggatctactgtttatgctgaatcggtgatactcacaaccgggacgtttctcaggggaatgatagtcattgggcttgaaacccaccccgcgggccggctaggggatcagccatctattggtctggcccagactctcgagaagctggggttcgtggttggacgcttaaagactggtactccgccccgaattgcaaaagagtcgatcaactttagtattctgaacaaacacattcccgataatccttcaatccccttttcattcaccaacgagactgtgtggatcaaaccagaagatcagttaccatgttatctgacacatactaaccctcgagtggacgagattgtgttgaagaatctccacctgaacagccatgtcaaggagactacccgaggtccccggtactgccctagcatcgagtcgaaggtcctgcgatttccgaatcgcctccatcaggtgtggctcgagccagagggaatggactcggatctaatatacccacaaggactctcaatgacactgccagccgagcttcaggaaaagatgatcacctgcatcagaggcctggagaaggccaaggtcattcagcctgatggtgtcctactactgctcccccggatggaatgtaacggtgcgatatcggcccaccataacctgcctttacccggttacggggtccaatatgattacctggaccctcgtcagatcaccccttctcttgagactcacttggtgcagagattgttctttgctggacaaatcaacggcacaacaggctatgaagaggctgcggctcagggggtgattgcaggcattaatgcttctctcagggtctcaaggaaacctccctttgtggtgtcccgaactgaagggtatattggcgtgcttatcgacgatctaaccacactgggcacttcagaaccttatagaatgttcacctccagagtcgagttccgccttagcctgcggccagataatgccgacagtaggcttacactgaggggctacaaggatgcgggatgtgtcagtcagcaacgttacgaacgggcctgctggatgaagtcctcgcttgaagagggaattagtgttcttaaaagcattgagtttctctcatctaaatggaagaagctgatccctgaggcatccatctccacctctcgctcgctgccggtacgcgccctcgatgtcctgaaatatgaagaggttgatatggattcgcttgcaaaggctgtgcctgagcccctgaagaagtacaccaagtgtagagagctcgcagaacggttaaagattgaggccacgtatgagtccgtgttatttcatcaactgcaggagatcaagggtgtgcagcaggacgaagccctccaactccctaaggatctggactacctgacaattcgggacgtctccctaagccacgaggttcgggagaagcttcatttctcacgccctcaaaccatcggtgctgcatcccgcatccccggcgtgacgcctgctgcaattattaatctcctccgcttcgtcaagaccacccagcggcgtcagtctgccatgaacgagtcatcaaaaacagaccagtatctatgcgacgcggatcgactgcaagagcgagagctatag

SEQ ID NO: 24985 - DNA, 1932 bp, synthetic construct
  misc_feature 1..1932: note = Description of Artificial Sequence: Synthetic coding sequence
  source 1..1932: mol_type = other DNA
atgagctgcaaccccagcttcggcggcatcggcaagggccacctgatgcgtgaggtcgacgcactagatggcctatgctccaggatttgtgaccagagcggagtgcattacaaagtccttaataggcggaagggacctgccgtgtggggcctcagggcacagatcgatcgcaaattatacaagcagaatatgcaaaaggagatcctcaacacccctcttctgactgtacaagagggggccgtagaggacctgatcctaacagagccagaacccgagcacaccgggaagtgccgcgtgtccggagtggtcctggtcgacggcagcaccgtctacgccgaatccgtgatcttgactacagggacattcttaagagggatgatcgtgatcggtctggagacacaccctgccggtagattgggagaccagccttccataggtctggctcagaccctcgagaaactgggttttgtcgtggggcgactgaagacgggaacccccccgcgcattgcgaaagagagcataaacttttcaatcttaaacaagcacattcctgacaatccgagcatcccttttagctttaccaatgagacagtgtggatcaagcctgaagaccagttaccttgctatctcacccatacgaatccacgggttgacgagattgttcttaaaaatctccatttgaactctcatgttaaagagacgactcgcggaccacgctattgtccatccattgaatccaaagttctgcgttttccaaaccgattacaccaagtctggttagaacccgagggcatggactccgatctgatctaccctcagggcctctcgatgacattaccggcggaattgcaggagaagatgattacatgcattcggggcctagaaaaagctaaggttattcaaccagacggtgtattgttgttgctgcccaggatggagtgtaatggtgccattagcgcccaccataacttacctttgcccggatatggtgtccagtacgattatctggaccccagacaaatcactccaagtctggagacccatcttgtgcaaaggctcttctttgctggtcaaatcaacggaacgacggggtatgaagaggcagcggctcaaggggtgattgccggaattaatgcctctctccgggtcagcagaaagcccccattcgttgttagcagaaccgaaggatacatcggagtgctgatcgacgatctgaccacactcgggacttctgaaccctatcggatgtttactagccgagtcgagttccggctgtccttgagacccgataacgccgattcacgtttgaccctgcgggggtacaaagatgccgggtgtgtctcccagcaaaggtacgagagagcttgctggatgaaatcatccctcgaggagggtatttccgttttaaaaagcatcgaattcttgagttcaaagtggaagaaactgattcccgaggcatcgatctctacaagccggtctcttccagtgcgagcccttgacgtactgaagtatgaagaggtggacatggatagcctcgccaaggctgtacccgagccactgaagaagtacactaaatgtcgggagctggctgaaaggctcaaaatagaggccacatatgaatcagtactgttccatcaactgcaggagattaagggcgtccagcaggacgaggcactacagctccccaaggacctcgactatctcaccattcgggatgtgtctcttagtcatgaggtgcgggaaaagctgcatttttcaaggcctcaaacaataggggctgcttcccgcattccaggagtaacaccagcagcgattattaatctgctcaggtttgttaaaacaacacaacggagacaatctgcgatgaatgagtccagcaagaccgatcagtatctgtgcgacgccgacaggttgcaggaacgggaactctag

SEQ ID NO: 24986 - DNA, 2199 bp, synthetic construct
  misc_feature 1..2199: note = Description of Artificial Sequence: Synthetic coding sequence
  source 1..2199: mol_type = other DNA
atgttctacttccggggctgcggccggtgggtggccgtgagcttcactaagcagcaattccccctggcgcgcctttcgagcgactcagcagcccccagaaccccacacttcgacgtcatcgtcattggcgggggccatgccggaacagaagccgccacagccgccgctcgctgtggctctcgtactttgctgctaacacaccgtgtagatacaataggacagatgtcctgtaacccgagctttggtggaattgggaaggggcatcttatgagggaggtagacgcgttagacggcttgtgttctagaatctgcgaccagtcaggtgtgcattataaggtccttaaccgacgcaaagggcctgctgtctgggggctgcgggcccaaattgacaggaagctctataaacagaatatgcagaaggagattcttaatacccctttgttgaccgttcaggagggagccgtcgaggacctaatcttgactgaaccagaaccagagcacaccggaaagtgtcgcgtttccggggtagtgctggtggatggatccaccgtgtacgccgagtccgtcatactgaccacagggactttcctgcgaggcatgatcgtgatcgggttggaaacccaccctgccgggcggttaggagaccagcctagcattggactggcccagacactggagaagctggggttcgtggtcgggcgcctcaagaccggcacccccccacggatcgcgaaggagagcattaacttctccatcctgaacaagcacattccagataatccttcaattccattctccttcactaacgagacagtgtggatcaagcccgaagaccagctcccttgctacctcacccacacgaatccccgagtggatgagatcgtactgaagaatctgcacctgaattctcatgtgaaggaaaccacgagagggccgcgctactgtccatccatcgaatctaaagtgctgaggtttcccaatcgcctccaccaggtatggctggaaccagagggaatggactctgatcttatttaccctcagggattgtcgatgacccttccagccgaacttcaagagaagatgatcacatgcattcgggggctggagaaggccaaggtgattcagcctggatatggggtgcagtacgattatctagatccccgccagatcaccccgtccctcgagacgcacctcgtccagcggctcttcttcgcaggacagattaatggcaccaccggctatgaagaggcagccgctcagaccgagtgctgttcagtggccagactagagtgtagtgacatgatcagtcagttgcaggcaattctgctcccacagccaagcctggtggccggcaccgcggggatgcatcacaacacccagggcgtaatcgccggtatcaacgcctctctgcgtgtgagccggaaaccgccatttgtggtgtcacgcaccgagggatatattggggtgttgattgatgacctaaccacgctcggcacttcagagccctaccggatgtttacttccagagtagagtttagactgtcactccgtccagataatgccgactcacggctcaccctgcgcggttacaaggatgccggctgcgtgtcacagcagcgctacgaacgggcttgctggatgaagagtagcctcgaggagggaataagcgtgctgaaatccatcgagttcctctctagtaagtggaagaagctgattccagaagcgtccattagtacttcaaggtccctgcccgtgcgggcacttgacgtgttgaagtatgaagaggtggatatggattctctagcaaaagcagtccctgagccgctgaagaagtacacaaaatgtagggagttggctgaaagactcaagattgaggcaacctacgaatccgttttgtttcatcagctgcaggagatcaagggtgttcagcaggatgaggccttgcagctccccaaggatctcgattacctgaccatccgggacgtgagcctgagtcacgaggtccgcgagaaactccacttctcgcgcccacagaccataggcgctgcctcccgcattcctggggttacgccagccgcaattattaaccttttgcgcttcgtgaagacgactcaacgccgccagagtgccatgaacgagagcagtaagaccgaccagtacctttgcgacgccgatagattgcaagaaagggaattatag

SEQ ID NO: 24987 - DNA, 2079 bp, synthetic construct
  misc_feature 1..2079: note = Description of Artificial Sequence: Synthetic coding sequence
  source 1..2079: mol_type = other DNA
atgttctacttccggggctgcggccggtgggtggccgtgagcttcaccaaacaacagtttcccctggcgagattgtcgtcagatagtgccgcgccaaggaccccccacttcgatgtgatcgtcatcggcggaggccatgctgggacagaggccgcgactgcggcagcccggtgtggatccaggacactcctcttaactcatagggttgacacaataggacagatgagctgcaatccttctttcggtggtatcggaaaaggtcacctgatgagagaggtggacgctctggacggtctgtgtagccgcatctgcgaccagagcggtgtgcactataaggtgctgaaccgccggaaaggtccagcagtgtggggcctgagagcccagatcgacaggaaactctataagcagaacatgcagaaggagatcctgaacacccccctcctgactgtgcaggagggcgcggtggaagaccttatactgacggagcctgagcctgagcacaccggaaagtgccgtgttagtggcgttgttctggtggacggctccactgtctacgctgagtcagtcatcctaaccacaggtaccttcttgaggggcatgatcgtgatcgggctggagacacatcctgcaggaagacttggcgatcaacccagcattggcttggctcagacacttgaaaagcttggcttcgtcgtgggacgcttgaaaactgggactcccccaaggattgccaaggagtcgatcaattttagcatcctgaacaaacacatccccgacaatccatccatcccgttctctttcaccaatgaaaccgtttggatcaaacccgaagaccaactgccatgttatctgacgcatacaaatccccgtgtcgacgagatagtgctcaaaaatttacacctgaattcccacgtaaaagagacaacaagagggcccagatactgcccatccatcgaaagcaaggtcctgagatttccaaatcgactgcaccaggtgtggttggagcctgagggcatggattcagacctgatctatccacagggcttgtcgatgactctgccagctgagctgcaggagaagatgatcacgtgtattcgcggcttggaaaaggccaaggtaatccagcccggatacggcgtgcaatatgattacctcgatccacgacagatcacccccagcttagagacgcaccttgtgcaacgcctcttttttgcaggccagattaatggtacgacagggtacgaagaagctgccgctcagggagttattgccggtattaatgcttctctccgcgtctctaggaagccgccttttgtagtgtctagaactgaggggtacatcggggtattaattgatgatctgaccaccttggggacgagcgaaccgtacaggatgtttaccagtagagtagagtttcgcctgagcttgcggcccgacaacgctgacagccgattaaccctgcggggatataaagacgccggctgcgtttcgcagcagcggtacgagcgcgcttgttggatgaagagttctcttgaggaggggattagtgtgttgaaatctatagagttcctctcttcaaagtggaaaaaactgatccctgaggccagtataagtacatcaaggtccctgcctgttcgggcactggacgttctcaagtacgaagaggtggatatggattctttggcaaaagccgtgcctgagcccctcaagaaatataccaagtgtagagaactcgcggagcgcctcaaaatcgaggccacctacgaatcggttctctttcatcagcttcaggaaatcaagggggtgcagcaggatgaagcattgcaactgccaaaagacctcgactatctgacaatccgagatgtgagcctgtcgcacgaggttagagaaaagcttcacttcagtagaccccagacaataggcgcagcttctagaatccccggggtgacccccgccgccatcataaacctgctacgcttcgtcaaaaccacgcaacggagacagagtgcaatgaatgaaagctctaagaccgaccaatacctgtgcgacgcggatcggcttcaggagcgcgaattgtag

SEQ ID NO: 24988 - DNA, 381 bp, synthetic construct
  misc_feature 1..381: note = Description of Artificial Sequence: Synthetic coding sequence
  source 1..381: mol_type = other DNA
atgagcatcggcgtgcccatcaaggtgctgcacgaggccgagggccacatcgtaacgtgcgagaccaatacaggagaggtttatcgggggaaactaatcgaagccgaagataatatgaactgtcagatgagcaatataacagtcacttatagggacggacgcgttgcccagctggaacaggtgtacataagaggtagcaagattcggttcttgattcttccagatatgctgaaaaatgctcctatgctgaagtctatgaagaacaaaaatcagggatccggggcagggcgcgggaaagccgccatcctcaaggcccaggtggctgctagaggccgcggtcggggaatgggtaggggtaacatttttcagaagagacgctag

SEQ ID NO: 24989 - DNA, 1083 bp, synthetic construct
  misc_feature 1..1083: note = Description of Artificial Sequence: Synthetic coding sequence
  source 1..1083: mol_type = other DNA
atggccgccgccgccgccgccggcgccggccccgagatggtgcggggacaggtgtttgacgtcgggcccagatacacaaatttatcttacatcggggaaggtgcgtacggtatggtctgctcagcatacgataacgtgaacaaggtgagagttgccatcaagaaaatttcccccttcgagcaccagacttattgccaacgcactctcagggaaatcaaaatcctgctcaggttcaggcacgaaaatatcatcggaattaatgatatcatcagggcgccaaccattgagcaaatgaaggatgtgtatattgtacaggatctcatggagacggacctttacaagctgctgaaaacacaacacctctcaaatgatcacatctgctactttctgtatcagatcttacgcggtctcaaatacatccactctgcgaatgtgctgcaccgggatctgaagccctctaatctgctgctaaacacaacttgcgacctaaagatctgtgactttgggcttgcgcgtgtcgccgaccctgatcatgaccacaccggtttcctgaccgaatacgtcgctacaagatggtatcgtgctcctgaaattatgttgaactctaaaggatacacaaagagtatcgatatctggtctgtgggttgcatcttggcggaaatgctctccaacaggccaatatttccgggaaaacattaccttgatcagctcaatcatatcctcgggatcttgggctctccgagccaggaggatctcaactgcatcattaatcttaaggctagaaactacttgctgagccttccacacaaaaacaaggtaccctggaaccgactcttccccaacgctgattccaaggcattggatctgttggacaagatgctgacatttaatcctcacaagcgcatcgaggttgagcaagccttggcccatccatatctggagcagtactacgacccgtcagacgagcccatcgcagaagctcccttcaagtttgatatggagctcgacgatttaccaaaagaaaaactgaaggagctgatttttgaagagaccgcgcgttttcagcccggataccggagctag

SEQ ID NO: 24990 - DNA, 1047 bp, synthetic construct
  misc_feature 1..1047: note = Description of Artificial Sequence: Synthetic coding sequence
  source 1..1047: mol_type = other DNA
atggtgcggggccaggtgttcgacgtgggcccccggtacaccaacctgtcttacattggggagggggcatacggtatggtatgcagtgcgtacgataacgtaaataaagtaagagtggccattaagaagatatccccctttgagcaccagacgtactgccagcgaaccctacgtgaaataaagattctgctgcgctttcgccacgagaacatcatcggaatcaacgatattatacgggcccccactatcgagcagatgaaagacgtgtatatagtgcaagacctcatggagaccgatctctataagctgttaaaaacacagcacctctctaacgaccacatttgctactttctgtaccaaattcttagggggctgaaatatattcactctgcaaacgtgcttcacagagacctcaaaccgtccaatctgctgctgaatacgacctgtgacctaaagatttgtgacttcggcctggcacgtgtggccgacccggaccatgatcatacagggtttctgacagagtacgttgccacgagatggtaccgtgctcccgagatcatgcttaacagtaaaggctacaccaaatcaatcgatatctggtccgtcgggtgcatcctggccgagatgctgtctaaccgccccatcttcccggggaaacattacctcgaccagcttaatcacatcctcggaatcctgggatcaccttcccaggaagacctcaattgtatcatcaaccttaaagccagaaactacttgctcagtctgccccacaagaataaggtaccttggaatagactatttcctaacgccgattccaaggccctggatttactcgacaagatgctcacttttaatccgcataagaggatcgaggtggagcaggccctagctcacccatatttagagcagtactatgatcccagtgatgaacccattgctgaagccccctttaaattcgatatggaattagatgacctgcccaaggaaaagctaaaggagttgatttttgaagagacagctcgcttccagccaggctacaggagctag

SEQ ID NO: 24991 - DNA, 951 bp, synthetic construct
  misc_feature 1..951: note = Description of Artificial Sequence: Synthetic coding sequence
  source 1..951: mol_type = other DNA
atggccgccgccgccgccgccggcgccggccccgagatggtgcggggacaagtattcgatgtgggccctcgctataccaatctgagttatattggagagggcgcctacggcatggtgtgctccgcttatgacaatgtcaacaaagtacgggtcgccataaagaaaataagtcccttcgagcatcagacctactgccaacgcacactgcgggaaatcaaaattttgcttaggttccggcacgagaacattatcgggatcaatgatattataagagctccaaccatagagcagatgaaagacgtttatatcgtgcaggacttaatggaaacagatctgtataagctcctgaaaactcagcatctctccaacgaccacatttgctactttctgtatcagatcctgagaggcctcaagtatattcactccgcaaatgtcttacatcgagatctgaagccatcaaacctcttgctgaacaccacgtgtgacctcaagatctgcgacttcggcctggcacgcgtggcggaccctgatcatgaccatactgggtttctgaccgaatacgtggccacccgttggtaccgggctccagagattatgcttaacagtaaggggtataccaaatccatagacatctggagcgttggctgtatcctggcagagatgctgtccaacaggccaatctttccgggtaaacattatttggaccagctgaatcatatcttggcactagatctcctggataaaatgctcacttttaacccccacaaaagaatcgaagtcgagcaggccctggcccacccctacctggagcagtactacgatccttccgacgagccaattgccgaggcgccatttaagtttgatatggagctcgacgacctgccaaaagagaaactgaaggaactgatcttcgaggagaccgcccgctttcaacctggatatcggagttag

SEQ ID NO: 24992 - DNA, 1095 bp, synthetic construct
  misc_feature 1..1095: note = Description of Artificial Sequence: Synthetic coding sequence
  source 1..1095: mol_type = other DNA
atgagcggcccccgggccggcttctaccggcaggagctgaacaagaccgtgtgggaggtgccccaaaggttgcaaggacttaggcccgtagggtctggggcctatgggtccgtctgctcagcctacgatgctcgtctgagacagaaggtggccgtcaagaagttgagcagacctttccagtcccttattcacgcccgaaggacttatcgtgagttaagactccttaagcacttgaagcacgagaatgttatcggcctgctggatgtgtttactcctgctacatctatcgaggatttcagtgaggtctacttagtgactactctcatgggcgccgatctgaacaacattgtgaagtgccaagctctgagtgacgagcacgttcagtttctcgtctaccagctgttgcggggactgaagtacatccactcagctggaataattcacagagacttgaagccctctaatgtggcggtgaacgaggattgtgaacttcggattttggattttggcctggctaggcaggccgatgaggagatgactggatatgtcgccactcgctggtaccgagctccggaaattatgctgaattggatgcactacaatcaaaccgtcgatatctggtccgtgggttgcattatggcagagctgctgcagggcaaggctctgttccccgggagcgattacatcgatcagttaaagcggattatggaagtggtgggaaccccttcccccgaggtactggcaaaaatctcttcagagcacgcacgaacatacatacagtctctgcctcctatgccacagaaggacctttcctctatcttccggggggcaaatccactggcaatagatttgctggggagaatgctcgttctcgactcagatcagagggtgagcgccgcagaggccctcgctcacgcttatttctcccaataccacgacccagaagacgagccagaagcggagccctatgacgagtctgtggaagctaaggagcggacactggaagagtggaaagagttaacctatcaggaagtgctgagctttaaaccccccgagccgccaaaaccccccggaagtctcgaaattgagcagtag

SEQ ID NO: 24993 - DNA, 1095 bp, synthetic construct
  misc_feature 1..1095: note = Description of Artificial Sequence: Synthetic coding sequence
  source 1..1095: mol_type = other DNA
atgagcggcccccgggccggcttctaccggcaggagctgaacaagacagtgtgggaggtaccccagagactccaggggcttaggccagtgggctccggcgcttacgggtctgtctgttctgcctacgatgcaaggctcaggcagaaggttgcagttaagaaactgtcacggcctttccagtcgctgatccacgcgcgaagaacgtaccgggagctgaggttgctgaagcatctgaaacacgagaatgttattggacttctggatgtgtttacccccgccacttccattgaagacttttcagaggtgtacctggttactacacttatgggtgccgacctcaacaacatagtgaaatgccaggcccttagcgatgagcatgttcagtttctggtataccagttgctcaggggtctgaagtacattcattcagccggcattatccatcgtgacctaaaaccctctaacgtggccgtcaacgaggattgtgagcttcgaatactggacttcggcttggcaagacaagcagacgaggaaatgactggatacgtggccactcggtggtaccgtgcccccgaaattatgcttaattggatgcattataaccaaacagtggacatttggtcagtcgggtgcatcatggccgaactgctccagggcaaggctctatttccagggtctgattacatagatcagttgaagcgcataatggaggtcgtgggtacgccctctccagaagtccttgccaagatttcgagtgagcatgctcgaacttacatccaaagcttgccccccatgccacagaaagatctttccagcatcttccgtggcgctaacccacttgccattgacctcctgggcaggatgctggtgctggactctgatcagagagtgagtgccgcagaagcacttgcccacgcttattttagccagtatcatgatcccgaggatgagccagaggctgaaccctacgatgaatcagtggaagccaaggagagaaccctcgaagaatggaaagagttgacgtaccaggaagtgctgtcttttaagccacccgaacccccaaagccaccaggctcactcgagatcgaacagtag

SEQ ID NO: 24994 - DNA, 642 bp, synthetic construct
  misc_feature 1..642: note = Description of Artificial Sequence: Synthetic coding sequence
  source 1..642: mol_type = other DNA
atgggcgccgacctgaacaacatcgtgaagtgccaggccctgagcgatgagcacgttcagttcctcgtatatcaattactcaggggactgaagtacatccattctgctggcattattcatcgcgacttaaaaccttcaaatgtagcggtcaacgaggattgtgagctcaggatcctggatttcggcctcgctcggcaggccgatgaagaaatgaccggctacgttgccacccggtggtatcgagcccccgagattatgctcaattggatgcactacaaccagaccggcgctgggggccggccatggggtgatgagggacaggggcccagactggctcttgattggctttgtatgccgggcctgcggggccaggcgcggagcccccgcatgtgggatcctcacagcaaagtagccctgcagcgtcctctggagcatgacggctgctggccacctttggcagtgcagctctggactagcccctgtcttggcgggcttgggatggcagaagagggagtctgtccatcatggggcctcgatgtgaccgtcggcctgctggaggagggccgcggagttggaacactcatggaggtgcccagtccctcacactctggataccttgtcagaggactgcatcatggctag

SEQ ID NO: 24995 - DNA, 1149 bp, synthetic construct
  misc_feature 1..1149: note = Description of Artificial Sequence: Synthetic coding sequence
  source 1..1149: mol_type = other DNA
atggacttcggcctggccctgctgctggccggcctgctgggcctgctgctgggacagagtctacaggtgaaacctttacaagtggagcctcccgaacccgtcgttgccgttgccctgggggcatcacggcaactaacctgtcggttggcctgcgccgatcggggggctagtgttcaatggcgcgggttggatacctcattgggcgccgtgcaaagcgacactgggcgctcagtgttgaccgtcaggaatgcctccctgagcgcagccgggacacgtgtgtgcgtgggcagctgtggcggccgcacgtttcagcacaccgtgcaactcttggtctacgcctttccagatcagcttaccgtctcacctgctgccctggtgcctggtgacccagaagttgcctgtaccgctcacaaggtgacccccgtagaccccaatgcactttcattctcgctgctggtaggcggccaagagctcgagggagcccaagcattagggcctgaagtccaggaggaggaggaggaacctcagggcgatgaagacgtgttgtttagggtcacagagcgctggaggctgccacctctgggaacacccgtgccgccagcattgtactgccaggccactatgcgactgcccggactggaacttagccatcgccaagctatcccggtcctgcacagtccaactagccctgagccgcccgacaccacttcccccgaatcccccgataccacttcgccagaatctccggatacgacaagccaggagcctcccgacacaacttcccctgagcctcctgataagacaagccccgaacccgccccacagcagggctccactcatacccctcgatccccaggcagcacccgcactcgtaggccagaaatttcacaagcaggaccgactcaaggggaggtaatccctacaggatctagcaagccagccggagatcagttgcccgctgccctgtggacctccagtgccgtgctgggtctgttgctgttggctctacccacgtaccatttgtggaagagatgccgccatcttgctgaggatgacacccaccctccagcttccttgcgactactcccccaggtctctgcctgggcgggacttagaggtactggacaggtgggaatctccccatcttag

SEQ ID NO: 24996 - DNA, 1074 bp, synthetic construct
  misc_feature 1..1074: note = Description of Artificial Sequence: Synthetic coding sequence
  source 1..1074: mol_type = other DNA
atgagcagccccccccccgcccggagcggcttctaccggcaggaggtgactaagacggcctgggaggtgcgggctgtgtacagagatttacaacctgtgggaagtggcgcctatggtgcagtgtgcagcgctgtcgatggcagaacgggagcaaaggtggctataaagaagctgtaccggccgttccagagcgaattgtttgcgaagcgcgcttatcgggaacttcgcttgttaaaacatatgcggcacgagaacgtcatcggactccttgacgtgttcacccccgacgaaaccctcgacgactttaccgacttctaccttgtcatgccattcatgggtacggacctgggcaagctaatgaaacatgaaaagctgggcgaggataggatccagtttctggtataccagatgctgaaaggtttgcgggatctaaagcccggaaaccttgccgtcaatgaggattgcgagctgaaaattcttgatttcggcctcgctcggcaggccgacagtgagatgaccggatatgtcgtgacacggtggtatagggcacctgaagtgatcctgaattggatgagatacacccagaccgtagacatttggtctgttgggtgtatcatggccgaaatgatcacaggcaaaactctgttcaagggcagcgaccacctggaccagctgaaagaaataatgaaagtcacaggaacaccgccggcagagttcgtgcaacgtctgcagtctgatgaggccaaaaactacatgaaaggtctccctgaactggagaaaaaagatttcgcttctatcttaacaaacgcgtctcctttggctgtgaacctgctggagaagatgctagtcctggatgctgaacagagagtgacagctggtgaggccctagcacacccctactttgagtccttgcatgataccgaggacgagccgcaggtgcaaaaatacgacgactcattcgacgatgttgaccgaactttggacgagtggaaaagagtgacctacaaggaagtactgtcctttaaaccaccccgccagctaggcgcccgtgtctctaaggagacgcccctgtag

SEQ ID NO: 24997 - DNA, 837 bp, synthetic construct
  misc_feature 1..837: note = Description of Artificial Sequence: Synthetic coding sequence
  source 1..837: mol_type = other DNA
atggccctgctgcccgtgctgttcctggtgaccgtgctgctgcccagcctcccagctgagggcaaggatcctgcctttaccgcgctgctgaccacacagctccaagttcagagagaaattgttaataagcacaacgaactcagaaaagccgtgtcgccacctgcctcaaatatgttgaaaatggaatggtcgcgggaagtcaccaccaacgcacagaggtgggctaacaagtgtacattgcagcactccgatccagaggacaggaaaacgtctactagatgcggagagaacctctatatgtcatctgaccccacttcttggagctctgccattcaatcatggtacgacgaaatcctcgatttcgtctatggtgtgggacctaaaagccctaatgcagttgttggacattacacacaacttgtgtggtattccacgtatcaggtcggctgcggcatcgcctactgcccaaatcaagatagccttaaatactactacgtgtgccagtactgccccgccatgaaaacctacctgaataagcgcgaagggatcaatgtctggaagtgttttttaagactgaggcacttccagcttctgcgaggagagcagcttcttaccttttccggaaacaatatgaaccggaaaaacacgccctaccagcagggaacgccatgtgccggttgcccggacgattgcgacaaggggctctgtacaaacagctgccaatatcaggacttgctgagtaactgtgacagtctgaagaatacagccggctgtgaacatgagctccttaaggaaaagtgcaaagccacctgtttgtgtgagaacaaaatctactag

SEQ ID NO: 24998 - DNA, 459 bp, synthetic construct
  misc_feature 1..459: note = Description of Artificial Sequence: Synthetic coding sequence
  source 1..459: mol_type = other DNA
atgcagcacgagaacgtgatcggcctgctggacgtgttcacccccgcctctagtttaaggaatttctatgatttctatcttgtcatgcccttcatgcagaccgatctccagaagatcatgggaatggagttttcagaggaaaaaattcaatacctggtctaccagatgcttaaagggttgaagtatattcacagtgctggcgttgtgcatagagacctaaagcccggcaatcttgcggtgaatgaagactgtgagctcaagatactcgatttcgggctggctaggcacgctgatgctgagatgaccggttatgttgtgacacggtggtaccgcgctcctgaagtgatcctgagttggatgcattacaaccagacaggacagatcctgcatccggtacctgccaccgatccacaagaaggttttcactcagctgtgccaaccggacagccccctggctag

SEQ ID NO: 24999 - DNA, 1068 bp, synthetic construct
  misc_feature 1..1068: note = Description of Artificial Sequence: Synthetic coding sequence
  source 1..1068: mol_type = other DNA
atgagcctgatccggaagaagggcttctacaagcaggacgtgaacaaaaccgcgtgggagttgccgaagacttatgtgagtcctacacacgtgggatccggtgcgtacgggagcgtctgcagcgctatagataagaggtcaggagagaaagtcgccatcaagaagctgtcccggccttttcagtctgaaatcttcgccaagagagcatatcgggagttgctcctgctaaagcatatgcagcacgagaacgtaatcggacttctggacgtctttacacctgcaagcagcctcaggaacttttatgatttttatctagtcatgcccttcatgcaaacggacttgcagaagattatgggaatggaattcagtgaagagaagattcagtatctggtgtaccaaatgctgaagggcctcaaggatctgaaacctggcaacctcgcggtgaacgaggactgtgagctcaagatacttgacttcgggctggcacgtcatgcagatgctgaaatgactggatatgtggttacccgctggtatcgggcccctgaagttattctatcatggatgcactataaccagacggttgatatatggagcgtgggttgcattatggccgagatgttgacaggtaagaccctgttcaaaggcaaagactacttggatcagctcacccagatcctgaaagtaacaggagtgcctgggactgagttcgtacagaaacttaacgataaggccgcaaagagttacatccagagcctgccgcagaccccacggaaagattttacgcagctctttccgagggcttctccccaggccgcagacttgcttgagaaaatgcttgagctggacgtagacaaaaggttaaccgccgcccaggctctcacccatcccttctttgagccctttagggatcctgaggaagagacagaggcgcagcaaccgtttgatgatagcttggaacacgaaaaacttaccgtcgacgagtggaagcagcacatctacaaagaaattgtgaatttttcccctatcgccagaaaggactcacgacgcagatccgggatgaagctgtag

SEQ ID NO: 25000 - DNA, 774 bp, synthetic construct
  misc_feature 1..774: note = Description of Artificial Sequence: Synthetic coding sequence
  source 1..774: mol_type = other DNA
atgagcctgatccggaagaagggcttctacaagcaggacgtgaacaagaccgcatgggagctcccaaaaacatacgtgtcacccactcatgtcgggtctggagcttatgggtccgtgtgcagcgcaatcgacaagaggagcggggaaaaggtcgccatcaagaaactctccaggccctttcaatctgagatctttgccaaaagagcttacagggagctcctgttattaaaacacatgcaacacgaaaatgtcattgggctactggatgtgtttactcctgcaagctctcttcgaaacttttacgacttttatctggtcatgccgttcatgcagaccgacctgcagaagattatgggcatggagttttctgaagagaagatacaatacttggtatatcagatgctcaaaggattgaagtacatccatagtgcaggagtggtccacagagacctgaaacctggcaatttggccgtcaacgaagattgcgaattgaagatactggacttcggcctggcacggcatgctgacgccgagatgaccgggtatgtggtgactcggtggtacagggctcctgaggtaattctgtcgtggatgcactacaaccaaacggggcagatcctgcacccggtgccagcaactgatccccaagaagggtttcacagcgcggtcccaaccggtcagccccccgggtgcggccccgcaggcgaggacgcgggcgctaggaggggacaggcccccgacgggagagccggccctcatccgagtctgttgtag

SEQ ID NO: 25001 - DNA, 933 bp, synthetic construct
  misc_feature 1..933: note = Description of Artificial Sequence: Synthetic coding sequence
  source 1..933: mol_type = other DNA
atgagcctgatccggaagaagggcttctacaagcaggacgtgaacaaaaccgcttgggagctccctaaaacgtatgtgagcccaacccacgtggggtccggcgcttatggaagcgtctgctccgcgattgataagcgttcaggggagaaagtggccattaaaaaactgtcccgcccttttcagtctgaaatctttgcaaaaagggcctaccgcgaacttctgctgctgaagcacatgcagcatgagaatgtgatcggactgctggatgtgttcacaccagcttcttctctgagaaacttttatgatttttaccttgtcatgcccttcatgcagaccgaccttcagaaaataatgggaatggagtttagcgaagagaagatccagtacctggtttaccagatgctgaagggtctgaagtacatccacagtgccggcgtcgtgcaccgcgatctcaaaccaggtaatttagccgttaacgaggactgcgagttgaaaattctcgactttggccttgccagacacgccgacgcagaaatgacagggtacgtcgtgactagatggtacagggccccagaggtaattctgtcgtggatgcactataaccagaccgtggacatttggagtgtaggctgtatcatggccgaaatgctgaccgggaaaacactctttaagggaaaagactacctactagagaagatgctcgagcttgatgttgataagcgcctgaccgccgctcaggctctgacacatcctttttttgaaccctttagggatccagaagaggagaccgaggcccagcagcctttcgacgactctctggagcacgagaaactgacggtagacgaatggaagcagcacatctacaaggaaatcgtgaatttttcccccatcgcccggaaagattcgcggagacgttccggcatgaagctgtag

SEQ ID NO: 25002 - DNA, 1629 bp, synthetic construct
  misc_feature 1..1629: note = Description of Artificial Sequence: Synthetic coding sequence
  source 1..1629: mol_type = other DNA
atgcccctgcgggacgagaccctgcgggaggtgtgggccagcgactccggccacgaagaagaaagcctatctcctgaggccccccggcggcccaaacagcggcccgcccccgcacagaggctgcgaaagaagagaacagaagccccagagtcaccgtgtccaactggcagcaagccaaggaagccgggtgctggtcggactggaaggccccgcgaagaaccttcaccagatccggctcaggcacgggcgccccagacggtgtatgctcggtttctgcgggaccctgaggccaagaagcgtgaccccagagaaacctttcttgtggccagggccccggatgctgaggacgaagaggaggaagaggaagaagacgaagaagatgaggaggaggaagccgaggaaaaaaaagagaagattttattaccccccaaaaagcctctgcgcgagaagagttccgccgatctaaaagaacggagagccaaggcccaaggaccccgcggcgacctcggtagtcccgacccacctccaaagcctctccgggttcggaacaaggaagccccagctggagagggaactaagatgagaaaaacgaaaaaaaaaggatcgggtgaggctgacaaagatccatctggcagccccgcctctgctcggaaatcacctgccgcaatgtttctggttggggagggctcacccgacaagaaggccctaaaaaagaagggcacgcctaagggggcccggaaagaagaggaggaagaggaggaggccgctacggtgattaaaaagtccaatcagaaaggcaaggccaaaggtaaaggcaaaaagaaggctaaggaagagagggcaccctctccgcctgtcgaagtagacgagcctagagagttcgtcctacggcctgcaccccaggggagaaccgtaaggtgcagattgacccgcgataagaaaggcatggatcgcggaatgtatccatcctacttcctacatttggacactgaaaaaaaagtgtttcttttggcaggccggaaacgtaagaggagcaagaccgccaactatctgatctctatcgaccccacaaatctcagcagaggaggggagaacttcataggaaaactacgatctaatctgctcggcaacaggtttactgtgttcgacaatggccagaacccacagagaggctattctaccaatgtggctagcctccgccaggaactcgcagctgtcatctacgaaaccaatgttctagggtttcgtgggccccggcgtatgaccgtgattatccctggaatgtcagcagagaacgagcgtgtaccaattcgacccagaaacgcctccgatgggctccttgtgcgctggcagaacaagaccctggagtccctcatcgaactacataacaaaccccccgtatggaatgatgacagcggtagttatacccttaatttccaggggcgggtcacacaagcaagtgtcaaaaactttcagattgtgcatgccgatgaccctgactatatcgtgttgcaatttgggcgcgtcgccgaggatgcgtttacgctcgattatcggtatccactgtgtgcgcttcaggccttcgccatcgcattgagttcctttgacggcaaactcgcttgcgaatag

SEQ ID NO: 25003 - DNA, 1083 bp, synthetic construct
  misc_feature 1..1083: note = Description of Artificial Sequence: Synthetic coding sequence
  source 1..1083: mol_type = other DNA
atgagccaggagcggcccaccttctaccggcaggagctgaacaagaccatatgggaagttccagaacggtaccagaacctttcccctgtcggttctggcgcttacggcagcgtttgtgcagcgttcgacactaagacgggcctgagagttgcagtgaaaaagctgtcccgcccttttcagtccataatccacgccaagaggacttatagagaactgagactattgaaacacatgaagcacgaaaacgttatcgggctgctggacgtgtttaccccagccagatctctggaagagttcaatgatgtgtacctggtgacacacctgatgggcgcagatctcaacaatattgtgaagtgtcagaagctgaccgacgaccatgtacagtttctcatctaccagatcttacgagggttgaagtatatccactccgcagatatcattcacagagatctcaagccttcaaatctggccgtgaatgaagattgcgagctcaaaatcctggattttggcctcgccaggcatacggacgacgaaatgactgggtacgtagccaccaggtggtaccgcgcaccagagatcatgctgaattggatgcactataaccagaccgtggacatctggtctgtaggctgcattatggccgaattactgacggggagaactttattcccaggaaccgaccatattgaccagctcaaactgatcttgagactggtaggtacacccggcgcggaattactgaaaaaaatttcaagcgaaagtgcccggaattacatccagagcctcactcagatgcctaagatgaactttgcaaacgtcttcatcggtgctaatccactagctgtggacctgttggagaaaatgcttgttctagactccgataaacgcatcaccgccgcacaggccctcgcgcatgcttactttgctcaatatcacgacccagatgacgaaccagtggctgacccatatgatcagtccttcgagagccgagatctgctcattgatgagtggaagagcctcacttatgatgaagtcatctcattcgtccctcctccactggatcaggaggagatggagtcgtag

SEQ ID NO: 25004 - DNA, 924 bp, synthetic construct
  misc_feature 1..924: note = Description of Artificial Sequence: Synthetic coding sequence
  source 1..924: mol_type = other DNA
atgagccaggagcggcccaccttctaccggcaggagctgaacaagacgatctgggaggtgcctgagagatatcagaacctttcgccagttggcagcggggcttacgggtcagtctgcgccgcttttgacacaaagaccggcctccgggtggctgtgaaaaagctgagtaggccatttcaatccatcatacacgcgaagcggacctaccgcgaactgcggctgttaaaacacatgaaacacgaaaacgtgattggtctgcttgatgtgtttactcctgcccgaagcctggaagaattcaacgatgtatatctagtcactcatttgatgggggcggacctcaacaatattgtaaaatgccagaagctgactgacgatcatgtacaatttttgatttaccaaatcctgcgggggctcaagtatattcattctgccgatataatccatcgcgatctgaagccctctaatttagccgtgaatgaggactgcgagctaaaaattctagattttggcctcgcccgccacaccgacgacgaaatgactggctacgttgctacacggtggtaccgggctcccgagattatgctgaattggatgcactacaatcagacggttgatatctggtcggttggctgcatcatggctgaattactgacagggagaactctgttccccggtactgatcatattgaccagcttaagctaattctgaggctggttggcaccccaggcgccgaactattgaagaaaatttcttccgagtcactgagtacttgctggcgcaggtgcctgtactggacccagatacgggagctgcagagaccgaagcctttgcacatgccaaccttactgagtacaacgatcctgatgatgaatcagtggcccattcttatgataagccctctgaaggcaggtacaagcctgtag

SEQ ID NO: 25005 - DNA, 852 bp, synthetic construct
  misc_feature 1..852: note = Description of Artificial Sequence: Synthetic coding sequence
  source 1..852: mol_type = other DNA
atgaagcacgagaacgtgatcggcctgctggacgtgttcacccccgctcggtcgctcgaggaatttaacgacgtctacctggtcactcacctcatgggggcagacctgaacaacatcgtgaagtgtcaaaagctgacggacgatcacgttcagttcctgatctaccagattttgagagggctgaagtatatccactctgccgacataatccacagagatttaaaaccttctaatctagcagtaaacgaggactgtgagcttaagatactcgacttcgggttggcccgtcatactgacgatgaaatgactggatacgtggccacacggtggtatagagcgcccgaaatcatgctgaattggatgcactacaatcagactgtcgacatttggtccgtcgggtgtattatggctgagctcctgaccggtcggacactttttcctggaaccgaccatattgatcagctgaagctgattctgcgactcgtcggaacccccggagctgagctcctgaagaagattagctcagaaagcgcacggaattatattcagtcgctcacacagatgcccaaaatgaactttgcaaatgtgtttattggcgccaatccgctagcagtcgacctccttgaaaagatgctggttttggactcagacaaacggattacggctgcacaggccttagcccatgcctacttcgcccagtaccacgaccccgacgatgagcctgtggcagatccttacgaccagagctttgagtctcgggacctgctgatcgatgaatggaagagtctgacttatgatgaagtgatctccttcgtgcctcccccgctcgaccaggaagaaatggagtcctag

SEQ ID NO: 25006 - DNA, 1140 bp, synthetic construct
  misc_feature 1..1140: note = Description of Artificial Sequence: Synthetic coding sequence
  source 1..1140: mol_type = other DNA
atggccgccgccgccgcccagggcggcggcggcggcgagccccggcggacagagggagtaggtcctggggtgccaggagaagtcgaaatggtgaagggccagccgttcgacgtaggtccgagatacacacagctgcagtacataggagaaggcgcatacggtatggttagttccgcctatgatcacgtgcggaagacccgcgtcgccatcaagaagattagccctttcgagcaccaaacatactgtcagcgcactcttcgggagattcaaatcctcctgaggttcagacacgagaatgtgatcggtatcagggacattctgcgagcgtccacactcgaagccatgagagatgtctatattgtgcaggatttgatggaaactgacctctacaagctgttgaagagccagcagctcagcaacgatcacatctgttatttcctctatcagatccttaggggcttgaaatatatccactccgcaaatgtcctccacagggacctcaagcctagtaacctgctgattaacactacatgtgatctcaagatctgcgacttcggcctggctagaattgccgatcccgaacacgaccacacagggttcctcacagaatacgtggctaccaggtggtatcgagcgcctgagatcatgcttaattcaaagggttataccaagagtattgatatctggagcgtcgggtgcatcctcgccgagatgctgtcaaatcggcctatctttccgggaaaacattatctggatcaacttaaccacatcctggggattcttgggtcccctagccaggaggacctcaactgtatcataaatatgaaggcccgaaattacctgcagtccctgcccagcaaaaccaaggttgcctgggcaaagttattcccaaagtcagattcaaaagcactcgatttactagatagaatgcttactttcaatccaaataagagaataactgttgaggaggccctcgcacacccttatttggagcaatattacgatcctaccgatgagccggtcgccgaagagccctttacctttgcgatggagctcgacgacttgcctaaagaacgcttaaaggagcttatttttcaagagaccgcacggttccaacccggcgttctggaagctccatag

SEQ ID NO: 25007 - DNA, 1008 bp, synthetic construct
  misc_feature 1..1008: note = Description of Artificial Sequence: Synthetic coding sequence
  source 1..1008: mol_type = other DNA
atggccgccgccgccgcccagggcggcggcggcggcgagccccggaggacggagggagtcgggccaggggtgcctggggaggtggaaatggttaaaggacagccgttcgacgtgggacccagatacacacagttgcagtacattggggagggtgcgtatggcatggtatcctccgcctacgaccacgtgaggaagacacgggttgccatcaaaaagatatctccattcgagcatcagacatactgccagagaactctacgtgagattcagatcttgctgcgattcagacacgagaacgtgatagggatcagggatattttaagggcttctactctagaagctatgagagatgtgtacattgttcaggacctaatggagaccgacctgtataaactgctcaaaagccagcagctttctaatgaccacatatgttatttcctttatcagatcctgcgtggtctcaaatatatacactccgctaacgtgctccaccgagacttaaagccctctaatcttctgattaataccacttgcgacctgaaaatctgtgactttggtctcgctcggattgcagatcccgagcatgaccacaccggatttctcacagagtatgtggcaaccaggtggtacagagcgcctgaaattatgcttaacagcaaaggctacacgaagagcatagatatctggtcagtcggctgtatcctagctgagatgttgtccaaccgaccgattttcccgggtaagcattatttggaccagttgaatcacatccttgccttggacctgctggatcgcatgctaaccttcaatccaaataaacgtattacagtggaggaagcactggctcacccttatctcgagcaatactacgacccaaccgatgagcccgtggccgaagagcccttcactttcgctatggagctggacgatctacccaaagagaggctaaaggaattgatttttcaagagaccgctagattccagcctggggtcctcgaagctccatag

SEQ ID NO: 25008 - DNA, 936 bp, synthetic construct
  misc_feature 1..936: note = Description of Artificial Sequence: Synthetic coding sequence
  source 1..936: mol_type = other DNA
atggtgaagggccagcccttcgacgtgggcccccggtacacccagctgcagtatatcggggaaggggcttatggcatggtgtcttctgcgtatgatcatgtgcgcaaaaccagggtggccattaagaaaataagtccttttgagcaccagacgtattgccagcgcacactgcgagaaattcagatactgcttaggttcagacacgaaaacgtgatcggcatcagggacatcctgcgagcctcaaccttagaagccatgcgagacgtgtatattgtgcaggacctgatggaaacagacctgtacaagctactaaaatcccaacagctctcaaacgaccatatttgctattttttataccagatcctccgcgggctgaagtatatacactctgctaacgttctacacagagacctgaaaccttcaaacctgctgatcaacacgacctgtgacctaaaggggtacaccaaatcgatcgatatctggagcgtcggttgtatcctggccgaaatgctgtctaatcgtcccatcttccctggaaagcactacctggatcagctcaaccatattctgggcattttgggctcacctagtcaagaggatctcaattgtataatcaatatgaaggctaggaattaccttcagagtttgcctagcaaaactaaggtcgcgtgggccaaactcttcccaaagagcgattccaaggcactggaccttctggacaggatgttgacctttaatcccaacaagcggattactgtggaagaggccttagcgcacccgtaccttgagcagtattacgatcccaccgacgaaccagtagccgaagaacctttcactttcgccatggaactggacgacctcccaaaggagcgactgaaagagctcatattccaggagaccgctaggtttcagccgggcgttctcgaagctccttag

SEQ ID NO: 25009 - DNA, 1008 bp, synthetic construct
  misc_feature 1..1008: note = Description of Artificial Sequence: Synthetic coding sequence
  source 1..1008: mol_type = other DNA
atggccgccgccgccgcccagggcggcggcggcggcgagccccggcgcacagagggcgtgggcccaggcgtcccaggggaagtagaaatggtgaaaggccagcccttcgatgtgggcccaaggtacacacagctgcagtacatcggggagggtgcctatggaatggtgtctagtgcatacgatcatgtgcgcaagactagagtcgctattaagaagatcagtccatttgagcatcagacctactgccaacggacactgcgggagattcagatcttactgcgcttcaggcatgagaacgttataggtatcagggatatcttacgtgcgtccacgttagaagctatgagggatgtgtacatcgtgcaggatctcatggaaacagatctgtacaaactgctgaagagccagcaattgtccaatgaccatatctgttactttctataccagatactgcgaggcctgaagtatattcattctgccaatgtgctgcacagggacttaaaaccttccaacttgctcatcaacacaacttgcgacctgaagatctgcgatttcggcctggctaggattgccgatcccgaacatgaccacactggatttttgactgagtatgtcgccacccggtggtatcgcgccccggaaattatgctgaactccaagggctataccaaatctatcgacatatggtcggttggctgtatcctggctgagatgctgtcaaataggcccatctttcccgggaaacactacctggaccagctaaaccacatcttggccctggatctccttgacagaatgctgacgtttaaccccaataaaagaataactgtggaagaggcactcgctcacccctacctcgagcagtattacgatcccacggacgagcccgtggcagaggaacctttcacattcgccatggaactggatgatctgcctaaggaacgcctgaaagagctgatcttccaggagacagccaggttccagcctggcgtgttagaggccccctag

SEQ ID NO: 25010 - DNA, 1074 bp, synthetic construct
  misc_feature 1..1074: note = Description of Artificial Sequence: Synthetic coding sequence
  source 1..1074: mol_type = other DNA
atggccgccgccgccgcccagggcggcggcggcggcgagccccggcgtacagagggcgtgggccctggggtgccgggggaggtcgaaatggttaagggccagccgttcgacgtgggacctcgatacacccaacttcagtatattggcgagggagcatacgggatggttagttctgcttacgatcacgtcaggaaaacacgagtcgccattaagaagatctctccctttgagcaccagacctattgtcaacgaacactgcgggaaatccagatcctcctgcggttccgccacgagaacgtcatagggattcgggatattctccgagcaagcaccttggaagccatgagggatgtttatattgtgcaagatctcatggagacagatctctataaactgctgaaaagtcaacagctgtccaatgatcatatatgctatttcttatatcaaattcttaggggactgaaatacatccattcagctaacgtgctacaccgggacttaaagccgtcaaatctgctgattaacactacctgcgacctcaaaatttgtgatttcggcctcgcccgtatcgctgatcccgagcatgatcacacaggattccttaccgagtacgtcgctaccaggtggtaccgggcccccgagataatgctgaacagcaagggttacacaaagagtatagacatatggagcgtaggatgcattctagccgagatgctcagtaatcgacctatctttccggggaaacactatctggatcagcttaatcacatccttggcatcctcggaagcccgtcacaggaggacttaaattgcatcataaacatgaaggctaggaattatctgcaatcactcccctcaaaaactaaagtggcctgggccaagctgttccccaaatcggacagcaaggcgctcgacctgctcgatcgcatgctcacctttaatccaaacaaaagaatcacagttgaggaggcccttgcccacccatacctagagcaatactacgaccccaccgacgaagttggacagtctcccgccgccgtcggcctgggagcgggcgaacaggggggaacctag

SEQ ID NO: 25011 - DNA, 798 bp, synthetic construct
  misc_feature 1..798: note = Description of Artificial Sequence: Synthetic coding sequence
  source 1..798: mol_type = other DNA
atgcgggacgtgtacatcgtgcaggacctgatggagaccgacctgtacaaactgttgaagtcccagcagctgtccaatgaccacatttgctatttcctgtaccagatcctgaggggactaaagtacattcattcggccaatgtgcttcatagggatttgaagccatcgaatctgttgatcaataccacctgtgatctgaaaatctgtgatttcgggctggcgcgtatcgcagaccctgagcacgatcacacaggtttcttgactgaatacgtggccacaaggtggtacagagccccggaaatcatgctgaacagcaaaggttacaccaaatccatcgacatttggtcagtgggctgcatattagcagaaatgctttcaaatcggccgatttttcctggcaaacattacctggaccaacttaaccatattctaggcatcctgggctcacccagccaggaggatttaaactgcattattaatatgaaagcacgcaactatctccaaagtctgccaagcaagaccaaggttgcctgggccaagctttttccaaagtcggatagcaaggccctcgacctgctagaccgaatgctcactttcaaccctaataagaggattactgtggaggaggctcttgcacacccttacctggaacagtactacgatccgactgacgaaccagtggcagaggaaccttttactttcgctatggaactggacgacttgcccaaggaacgtctgaaagaactgatatttcaggagaccgcaagattccagccgggagttcttgaagccccttag

SEQ ID NO: 25012 - DNA, 1284 bp, synthetic construct
  misc_feature 1..1284: note = Description of Artificial Sequence: Synthetic coding sequence
  source 1..1284: mol_type = other DNA
atgagccggagcaagcgggacaacaacttctacagcgtggagatcggtgactcaacctttaccgttctcaaacgctatcaaaacctgaagcccatcggttccggcgcccaaggcattgtttgtgctgcatacgacgccatcctggaacgcaacgtggccatcaaaaaactgtctcgacccttccaaaatcagacccatgccaaaagggcatacagagaacttgttttaatgaagtgcgtgaatcacaaaaacattatcggcttgctcaatgtgttcacccctcagaagtccctggaagagtttcaggacgtgtacattgttatggagctcatggatgctaatctgtgtcaggtaattcaaatggaactcgatcacgagcgaatgtcgtatctcctgtaccagatgctttgcgggatcaaacatctccacagcgcgggaatcatccacagagacctgaagcctagcaatattgtcgtaaaatctgattgcacccttaagatacttgattttgggctggctcgcacagcaggaacttccttcatgatgactccttatgttgtaacccggtactatagagcaccagaagtcattcttgggatggggtataaagagaacgttgatctctggtcagtcgggtgcattatgggagagatggtgtgtcacaaaatcctgttccccggcagagattacatagaccaatggaacaaagtgatcgagcagctcgggacgccgtgtcccgaatttatgaagaagcttcagccgactgtccggacatatgtggagaaccgacccaagtatgccggctactcatttgaaaaactgtttcccgatgtgctcttccctgcagacagcgaacataataagttgaaggcgtctcaggccagagacctattatcaaagatgctggtgatcgacgctagtaagcggatatccgttgatgaagccctacagcatccatacattaacgtgtggtatgacccttctgaagcagaagctcccccacccaagatccccgataagcagctggacgaaagggaacacactattgaggagtggaaagagctgatctataaagaagttatggatctggaggaaaggactaaaaacggcgtgattcgcggacagccgtcacccttgggggctgccgtcatcaatggaagtcagcatccttcgagctcctcgtcagtcaacgacgtgtctagcatgtctaccgaccccaccttagcttcagataccgattcctcgctggaggcagcggccggccctttaggatgctgtcgatag

SEQ ID NO: 25013 - DNA, 657 bp, synthetic construct
  misc_feature 1..657: note = Description of Artificial Sequence: Synthetic coding sequence
  source 1..657: mol_type = other DNA
atgagccggagcaagcgggacaacaacttctacagcgtggagatcggggattccacatttaccgtgctcaaacggtatcagaatctcaagcctataggtagcggcgcccagggtattgtatgtgcagcatacgatgccattcttgaacggaacgtcgcaattaaaaaattaagccgacccttccagaatcagacgcatgcaaagcgtgcttatagagaattggtcctgatgaaatgcgttaaccacaagaatattatcgggttgcttaacgtgttcacacctcagaaatcactagaagaattccaagatgtgtatattgtcatggaactcatggacgccaacctgtgtcaggtaatacagatggagctggatcatgaaagaatgtcatacctattgtaccaaatgttgtgtggcattaagcacctgcattccgcaggtatcatccacagggatctcaaaccatctaatattgtagtgaagtccgattgtactctgaaaattctggacttcgggctggcccggacagcgggcactagttttatgatgaccccttacgtagtcacacgctactatagagcacccgaagtgattctcggcatgggatataaggagaacggcgggcgcatgggaaaaggaatctttacccgattacagtag

SEQ ID NO: 25014 - DNA, 1284 bp, synthetic construct
  misc_feature 1..1284: note = Description of Artificial Sequence: Synthetic coding sequence
  source 1..1284: mol_type = other DNA
atgagccggagcaagcgggacaacaacttctacagcgtggagatcggagatagcacattcacggtactgaagcggtatcagaacctgaagccaatcggcagcggcgcccaggggattgtgtgcgctgcttatgacgccatcctggagagaaacgtcgctatcaagaagttgtcacgaccattccaaaatcagactcacgcaaaacgggcctaccgagaactggtgttgatgaaatgcgttaaccacaaaaacataattggccttctgaacgtgtttaccccgcaaaaaagtttagaagaattccaggatgtgtatattgtgatggagttgatggacgcgaacctgtgccaagtgatccagatggagcttgatcatgaaagaatgagctatctgctttaccagatgctgtgcggaataaaacatctgcacagtgcaggaattatccatcgcgacctgaaacccagtaatatcgtagtcaaatctgactgcaccctgaaaatcttggactttgggctggcacggactgctggaacaagtttcatgatgacgccttacgtggtgactcgttactaccgtgcccccgaggtcatcttaggaatgggctataaggagaacgtggatatctggtcagttggatgcatcatgggtgagatgataaagggtggggtgctgtttcctggaactgatcatatagaccagtggaacaaggtaatcgaacagttgggaacgccgtgtccggaatttatgaaaaaactacaaccaacggttcgcacttatgtcgaaaatagacccaagtacgctggatacagtttcgaaaagctgttcccagatgttctatttcccgcagacagtgaacacaataaactgaaggcatcccaggcacgcgatctgctctctaaaatgctggtgattgatgctagtaagcgtatttctgtggacgaagcgctgcaacacccctatatcaatgtgtggtacgaccccagcgaggctgaggctcctcctcctaaaatcccagataagcagctcgatgaaagagagcacactattgaggagtggaaagagttgatctacaaggaagtgatggatctcgaagaacgtaccaagaatggcgttatcaggggccagccttctccactcggggcagccgttattaacggctcccagcacccatcaagcagctcctccgtcaatgacgtgagcagtatgtctaccgatcccaccctggcaagcgatactgactcatctcttgaggccgccgctggtcccctgggatgttgtcggtag

SEQ ID NO: 25015 - DNA, 1155 bp, synthetic construct
  misc_feature 1..1155: note = Description of Artificial Sequence: Synthetic coding sequence
  source 1..1155: mol_type = other DNA
atgagccggagcaagcgggacaacaacttctacagcgtggagatcggcgacagtaccttcacagtcctgaaacgttaccagaatcttaagcctatcggtagcggcgcccagggaatcgtttgtgccgcgtatgacgccatcctggagcgtaacgtggctatcaagaagctttctcgcccattccagaatcagacacacgccaagagagcctatcgtgaactcgtcctgatgaagtgtgttaaccataagaacattatcggacttctgaacgtgtttacgccccagaagagcctggaagagttccaggacgtatacatagtgatggagctcatggacgctaacctgtgccaggtcattcagatggaattggaccatgaacggatgtcatacctcctgtatcagatgctatgcggcatcaagcacttacacagcgctgggatcatccacagagacctgaaacctagtaatattgtcgttaaatccgattgtaccttgaaaatactggattttgggctggcgaggaccgccggcacctctttcatgatgaccccttacgtggtgactcgctactaccgagcacccgaagtaattctaggcatgggatataaagagaacgtggatatctggtctgttggatgcatcatgggagaaatgattaaagggggcgtgctgttccctggtactgatcatatcgaccagtggaataaggtcatagagcaactcggaaccccatgccctgagtttatgaagaaactgcagcccactgtccgtacatacgtggaaaatcggcctaaatacgctggctactcctttgagaaactctttccggacgtcttattccctgcagactctgaacacaacaaacttaaggcgtctcaggctagggatctgctgtcgaaaatgttagtaatcgatgcatcgaaaagaatttcagtcgacgaagccctgcagcacccttacattaacgtttggtacgatcctagcgaggccgaagcaccgcccccaaagatccccgacaaacagctggacgagcgtgaacacactattgaagaatggaaggagctcatctacaaagaagtgatggatcttgaagagaggactaagaacggcgttattaggggtcagccctcacctttagctcaagtgcaacagtag

SEQ ID NO: 25016 - DNA, 1155 bp, synthetic construct
  misc_feature 1..1155: note = Description of Artificial Sequence: Synthetic coding sequence
  source 1..1155: mol_type = other DNA
atgagccggagcaagcgggacaacaacttctacagcgtggagatcggagatagtacatttaccgtgctgaagcgatatcagaatctgaaacccatcggctcaggggcccaggggatcgtgtgcgcagcctacgacgctattctggaacggaatgtggccatcaaaaagctctcccgcccatttcagaatcagactcatgcaaagcgcgcctacagggagctagttctgatgaaatgcgtcaaccacaagaatataatcggtctgttaaacgtgtttacaccccagaagtctcttgaagagttccaggacgtgtatatcgttatggagctgatggatgccaatctctgccaggttatccagatggagctcgaccacgagagaatgtcgtacctgttataccaaatgttatgcggtattaaacacctgcacagcgccggtatcatccatagagaccttaaaccatcaaacatcgttgtgaagagtgactgcacactgaagatactggacttcgggctggcccgtacggccggcacgtcgttcatgatgactccgtatgtcgtcacccggtattatcgtgcacccgaggtcattctagggatgggttataaggaaaacgttgatctgtggtcagtgggctgcatcatgggggagatggtttgccacaagattctgttcccgggtagagattatattgaccagtggaacaaagtgattgaacagttaggcaccccttgtcctgaatttatgaagaagctacagcctactgtgcgcacatacgtggagaaccgtccaaaatatgcaggttattcgtttgagaaactctttccagacgtactgttccctgccgactctgaacataacaagctgaaagcatctcaggcccgagatctgttatccaagatgttagtgatcgacgcatcaaagcgaatatctgtggatgaagctttgcagcatccttatatcaatgtgtggtatgatccttctgaagcggaagctccccctccaaagataccggataagcagctggatgagagggaacatacaatcgaagaatggaaagaactcatctacaaggaggtcatggatctggaagaaaggacgaagaacggggtgattcgcggccaaccaagtcccctggcccaggtacagcagtag

SEQ ID NO: 25017 - DNA, 1284 bp, synthetic construct
  misc_feature 1..1284: note = Description of Artificial Sequence: Synthetic coding sequence
  source 1..1284: mol_type = other DNA
atgagccggagcaagcgggacaacaacttctacagcgtggagatcggagattccacattcaccgtgctgaaacggtatcagaacctgaagcccatcggatcgggcgctcagggtatagtctgtgctgcttacgatgctattctagaacgaaatgttgcaataaaaaagctgtcccggccatttcaaaatcagacacacgcaaagcgcgcataccgcgagctggtgttgatgaaatgtgtaaaccacaagaatataattgggttactgaatgtgtttacaccccagaagtccctggaggagttccaagacgtttatatagtcatggaactcatggacgccaatttatgccaggtgatccagatggagttagatcacgaacggatgtcgtatctgctttaccagatgctgtgcgggatcaagcacctgcactcggccggcatcatccacagagatctcaaaccgtccaacattgtggtgaaaagtgattgtacgctcaaaattctcgacttcggtctcgcaaggactgccggcacttcttttatgatgactccctacgtggtgacgcgttattatagagctcctgaggtgattcttggaatgggatacaaagagaatgtcgacctgtggtccgtggggtgtattatgggcgaaatggtgtgccacaagattctatttccaggacgggactacatcgatcagtggaataaggtcattgaacaacttggtaccccctgccccgagttcatgaaaaaacttcagcctacggtgaggacatatgtggaaaatagacccaaatacgcggggtatagctttgagaaactctttccggacgtactgtttcccgctgacagtgagcacaataagctaaaagctagccaggcccgcgaccttctatccaagatgctcgtgatcgatgcctccaagcgcatctcagtcgatgaagcactacaacacccctatatcaacgtgtggtacgatccatctgaggccgaggcccctccccctaaaatccctgataaacagcttgacgaaagggaacacactatcgaagagtggaaagaactcatttataaggaggttatggacctagaggagcgaacgaagaacggagtgatacggggacagccttctccactgggggctgctgtcatcaacggatcccagcaccctagtagcagctcctctgtgaacgacgtatcctccatgtctaccgaccctaccctcgcctccgataccgacagctcccttgaagcagcggccggcccattgggatgctgcagatag

SEQ ID NO: 25018 - DNA, 927 bp, synthetic construct
  misc_feature 1..927: note = Description of Artificial Sequence: Synthetic coding sequence
  source 1..927: mol_type = other DNA
atgagccggagcaagcgggacaacaacttctacagcgtggagatcggtgattctacgttcacagtgctgaaaagataccagaatctgaagcctataggaagcggcgcccaagggatcgtgtgtgccgcttatgacgccatcctggaaagaaatgtcgccatcaagaagctttcacggccatttcagaaccagacgcacgctaagcgagcctatagggagctcgtcctgatgaagtgtgttaatcacaagaatatcattggcttattgaacgtcttcaccccccagaaaagcctggaagagttccaggacgtctacattgtcatggagctgatggacgccaacctctgtcaggtgatccagatggagctagatcacgagcgtatgagttatctgctgtatcagatgttgtgtggcataaagcacctacactccgctggcatcattcaccgggacctgaagccaagcaatattgtcgtcaaaagcgattgtacactgaaaattctggacttcggcctcgctagaaccgctggtacaagcttcatgatgacaccatacgtggtcacacgctactaccgggcacctgaggtgatcctgggtatgggatacaaggagaatgccgattctgagcacaacaagctgaaggctagtcaggctcgcgacctgttgtccaagatgctggtcatcgacgctagcaaacgaatatccgtcgatgaagcgctgcagcatccttacatcaatgtgtggtatgacccatctgaggctgaagccccacctcctaaaatacccgataagcaattggacgagcgggaacacacaatagaggaatggaaggaattaatttataaagaggtgatggatttagaggagcgcaccaagaatggcgtcatccgggggcaaccttctcctttggcacaagtacagcagtag

SEQ ID NO: 25019 - DNA, 429 bp, synthetic construct
  misc_feature 1..429: note = Description of Artificial Sequence: Synthetic coding sequence
  source 1..429: mol_type = other DNA
atgagccggagcaagcgggacaacaacttctacagcgtggagatcggtgactccacttttactgtattaaagcggtatcagaatctcaaaccgatcggcagcggcgctcaagggatcgtatgcgcagcctatgatgccatacttgagcggaacgtcgccattaagaagctgtctagaccctttcagaatcagacacacgcaaagagggcttaccgagagctcgtcctgatgaaatgtgtcaatcacaaaaatattatagggctcctcaatgtgttcactccccagaagtccctggaggaattccaggatgtctacatcgtcatggagctgatggacgctaacctctgccaggtgatccaaatggagttggaccatgagcggatgagttatctactgtaccagatgctgtgtgggataaagcatctctag

SEQ ID NO: 25020 - DNA, 294 bp, synthetic construct
  misc_feature 1..294: note = Description of Artificial Sequence: Synthetic coding sequence
  source 1..294: mol_type = other DNA
atgatcatcggcctgctgaacgtgttcaccccccagaagagcctggaagagtttcaggacgtctacattgtcatggagcttatggacgccaacttgtgccaggtaattcaaatggaactggaccacgaacgtatgtcatacctcctctatcaaatgctctgcggaataaagcacctacactcagccggcatcatacatcgagatctaaaacctagcaacatcgtggtcaagtccgattgcactctgaaaatcctggattttggactggccaggacagcggggacctctttttag

SEQ ID NO: 25021 - DNA, 429 bp, synthetic construct
  misc_feature 1..429: note = Description of Artificial Sequence: Synthetic coding sequence
  source 1..429: mol_type = other DNA
atgagccggagcaagcgggacaacaacttctacagcgtggagatcggagactcaacttttacagtgctgaaacgataccagaacctgaagccaatcggaagtggtgcccagggaatcgtgtgtgcagcctatgatgccatccttgagcgtaacgtcgccattaagaagctctctcgtccgttccaaaatcagactcatgccaagagagcatacagggagctggtcctgatgaagtgtgtgaatcacaaaaatattattggcctgctaaatgtgttcacccctcaaaagtctttggaggagttccaagacgtttacatagtaatggagctgatggacgccaacctttgtcaggtcattcagatggagctggatcatgagcggatgagctatctgctttatcagatgctgtgtggcatcaagcacctctag

SEQ ID NO: 25022 - DNA, 1182 bp, synthetic construct
  misc_feature 1..1182: note = Description of Artificial Sequence: Synthetic coding sequence
  source 1..1182: mol_type = other DNA
atgcccaagaagaagcccacccccatccagctgaaccccgcccccgatgggtccgcagttaacggtaccagcagtgcggagacaaacctcgaagcgctccagaaaaagttagaggagttagagctggatgagcagcagaggaaaaggctggaggcattccttactcagaagcagaaagtcggcgagttaaaagatgacgacttcgagaaaatttctgaactcggtgctggaaatggcggggtggttttcaaagtaagccataagccgagtggtctcgtgatggctcgtaaactgatacatttggagatcaaacctgcaattcgaaatcaaatcatccgggaactccaggttctgcacgagtgcaatagcccgtatatcgtgggattctatggggcgttctactcagatggagagatctcaatctgcatggaacatatggacggcggaagtttagatcaggtattgaaaaaagcagggcgtatccctgagcagatcttaggaaaggtgtctattgcagtcattaagggtcttacatatttgcgcgagaagcacaaaattatgcatcgcgacgtaaagccctctaacatcttagtgaattccaggggagaaataaaactctgcgattttggtgtgtcagggcagttgattgacagcatggctaacagttttgtgggcaccagatcttacatgtcccccgaaagactgcagggaacacactattcggtccagtcggacatatggagcatgggtctctccctagtcgaaatggccgtggggagatacccaataccgccccccgatgcgaaggaactcgagctgatgtttggttgccaggttgaaggagacgccgctgaaactcccccacgaccgcgaactcccggaagaccattgagctcctatggcatggattcccggccacctatggccatattcgagctcctggattacatcgtgaatgagcccccaccgaaactaccatccggcgtcttttctcttgaatttcaagatttcgtgaataaatgtctgatcaaaaaccccgccgagagggcagatttgaaacagctgatggtccacgccttcatcaaaaggtccgacgcagaggaagtcgacttcgccgggtggctctgtagcaccattggacttaaccagccctccacccctactcacgctgccggagtttag

SEQ ID NO: 25023 - DNA, 1203 bp, synthetic construct
  misc_feature 1..1203: note = Description of Artificial Sequence: Synthetic coding sequence
  source 1..1203: mol_type = other DNA
atgctggcccggcggaagcccgtgctgcccgccctgaccatcaaccctacaatcgctgagggcccctctcctacctcggaaggggccagtgaggccaatttggttgatctgcagaaaaaactggaggagcttgagctcgatgagcagcaaaagaaaagattagaagcattcttgactcagaaagcaaaggttggcgaacttaaggacgatgactttgaacgcattagtgagctaggtgcaggaaacggaggggtggtaaccaaggtccagcacaggccttcgggcctcatcatggcccggaagcttatccacctcgaaattaagcccgctatacgtaatcaaattattcgggagctgcaggttctacacgaatgcaattcaccctacatcgtgggtttttacggtgctttctattcggacggagagattagtatctgtatggagcacatggacggtggaagtctggatcaagtgcttaaagaggcaaaaagaattcctgaagaaatcttagggaaagtcagtattgctgtcctgaggggcctcgcttacttgcgcgaaaagcaccaaatcatgcaccgagacgtcaaacccagtaatatcctggtgaactccagaggtgaaatcaaactatgtgattttggtgtctcgggacagctgatcgactctatggctaactctttcgtcgggacacggagttacatggctcctgagcgactgcagggcacccattacagtgtccagagcgatatttggagcatgggtctatccctggtggaactagccgtggggcgctaccccatccctcccccagacgccaaagagctcgaagcgatctttgggcgccctgtggtggatggtgaggagggagaaccccatagcatcagtcctcgcccgagacctcctggaagacctgtgtctggacatgggatggattccaggcctgcaatggcgatcttcgaacttctggactacatcgttaatgaaccaccgcctaagctgccaaacggagtatttacccccgattttcaagagtttgtgaacaagtgcctcattaagaatccagccgaacgtgccgacctgaagatgctgacgaaccatacgtttatcaagcgctctgaagtcgaagaggtggacttcgcaggttggctgtgcaaaacactgcgtctgaaccagcccggcacccctacccgtactgccgtctag

SEQ ID NO: 25024 - DNA, 1056 bp, synthetic construct
  misc_feature 1..1056: note = Description of Artificial Sequence: Synthetic coding sequence
  source 1..1056: mol_type = other DNA
atgggcgtgcagggcaccctgatgagccgggaccagaccccccacctcctgagtattctcggcaagagcaagagaaagaaggacctgcgcataagctgcatgtccaaaccccccgctccaaacccaacaccaccacgaaatttagactcaagaactttcatcacaattggggatcgtaatttcgaagtcgaggcggacgacctggtgacgattagtgagttgggccgaggtgcctacggcgtagtcgaaaaggttaggcacgcccagtcaggcactatcatggcagtcaaaaggatccgggccactgtgaactcgcaggaacagaaaagactgttgatggacctggatatcaacatgaggaccgtcgattgtttttataccgtgacattttatggggccttatttcgagagggggacgtgtggatatgcatggagctgatggacacctccctcgacaagttctatagaaaagtgctcgacaagaacatgactattccagaagatatactgggtgagatcgccgtttctatcgtccgcgcactcgagcatttacactcaaagctgtcagtgatccaccgagatgtcaagccatccaacgtgctgattaacaaagaaggtcacgtgaaaatgtgtgactttggcattagcggctacttagtggactcagttgccaagacaatggacgctggctgtaagccttatatggccccggaacggatcaatcccgaactgaaccaaaaaggctataacgtcaagtcagatgtgtggtctttgggtattaccatgattgagatggcaattcttcgattcccctacgagtcttggggtacccccttccagcaactcaagcaagttgtggaggagcccagcccccagctgcccgcggacagattcagtcccgagttcgttgacttcaccgcgcagtgtctgcgtaagaacccagccgaaagaatgagctatcttgagctaatggagcacccatttttcaccctgcataagaccaaaaagacagacatagccgcttttgtaaaagaaatccttggcgaagattcttag

SEQ ID NO: 25025 - DNA, 1044 bp, synthetic construct
  misc_feature 1..1044: note = Description of Artificial Sequence: Synthetic coding sequence
  source 1..1044: mol_type = other DNA
atggagagccccgccagcagccagcccgccagcatgccccagagcaagggtaagtccaagcgcaagaaagacctgagaataagttgcatgtctaagccccccgccccaaaccccaccccaccacgtaatctagacagtaggacatttattactataggagataggaacttcgaggttgaggccgatgacttggtgacaatctctgagctgggcagaggggcctacggcgtggtcgaaaaggtcagacacgcgcaaagcggcactataatggccgttaagaggattagagcaacagtaaactcccaggagcagaagcggctgctgatggacctcgatattaatatgcggacagtcgattgcttttacaccgtgactttctatggggccctcttcagagagggagacgtgtggatatgcatggagctgatggacacatccctggataagttctatcggaaggtattagacaaaaacatgactattcctgaggacattctgggagaaatagcggtgtcaatcgttcgcgccctggaacacctgcatagtaagctgagtgttatccacagagacgtgaagccctccaacgtccttattaacaaggagggacatgttaagatgtgtgacttcggaatcagcggatatctcgtggattctgttgccaagacaatggatgcaggctgtaagccttacatggcccctgagcgaatcaatccagagctgaaccaaaagggatacaacgtgaaatccgacgtgtggtccctaggaatcaccatgatcgagatggccatcctgcggtttccatacgagtcgtggggaaccccattccagcagctgaaacaggttgtagaggagccctctcctcagctgccagccgaccgcttttctccagagttcgtcgactttacagcgcagtgccttcgtaaaaatcctgcggaaagaatgtcatacttggagttaatggaacatcctttcttcaccttgcacaaaactaagaagactgatattgccgccttcgtgaaggaaatcctaggggaagattcttag

SEQ ID NO: 25026 - DNA, 957 bp, synthetic construct
  misc_feature 1..957: note = Description of Artificial Sequence: Synthetic coding sequence
  source 1..957: mol_type = other DNA
atgagcaagccccccgcccccaaccccacccccccccggaacctggacagccggactttcatcacaataggcgaccggaattttgaggtggaggccgatgacttggtgaccataagcgagctgggccgcggtgcttacggggtggtcgagaaagtgaggcatgctcagagtggtacaattatggcagtaaagaggatacgggccaccgtgaacagccaagaacagaagagactactcatggatctggatatcaacatgcgcaccgtggattgtttctatacagtaaccttctacggtgctctgttcagggagggggacgtttggatttgcatggaattgatggacactagcctggacaagttctaccgcaaggtgttggataaaaacatgaccatccctgaagatattttgggagagattgctgtaagtattgttagggccctggagcatttgcactccaagctgagcgtcattcaccgtgatgtaaagccaagcaatgtcctgattaataaggaaggacacgttaagatgtgcgacttcggaatttcaggctatctagtggacagcgtggccaaaaccatggacgccggatgcaagccttacatggccccagagaggataaatcccgaactcaatcaaaaggggtacaacgtaaagtccgacgtctggtctctggggatcacaatgatagagatggctatcctgcggtttccatacgaaagctggggaaccccctttcagcagctgaaacaggtggttgaggaaccatccccccagttgcccgcagacaggttttctcctgaattcgtggacttcacggcacagtgtctgagaaaaaatcccgccgaacgcatgagctacctggaactgatggagcatcccttctttactctgcataagaccaaaaagaccgacattgccgcgtttgtcaaggaaatccttggtgaggatagctag

SEQ ID NO: 25027 - DNA, 1113 bp, synthetic construct
  misc_feature 1..1113: note = Description of Artificial Sequence: Synthetic coding sequence
  source 1..1113: mol_type = other DNA
atgctgagcaacagccagggccagagcccccccgtgcccttccccgcgccggccccaccgcctcagccccccacaccagcactgccacacccacctgctcagccccctcctccaccaccccagcagttcccccagttccacgtgaaaagtggcctccagatcaagaaaaatgctatcatcgatgattacaaagtcacatcacaggtgctcggactaggaatcaatggtaaggtgttgcagattttcaataagaggacgcaggagaagttcgcactgaagatgttacaagactgtcctaaggcccgcagagaggtggagttacactggcgcgcttctcaatgccctcacatcgttcggatcgttgacgtttatgaaaacttatacgcagggcgcaagtgcctgctgatagtgatggagtgcctcgacggaggtgaattattctcaagaatacaagatcgcggcgatcaggcattcaccgaaagggaggccagtgagatcatgaagtcaattggtgaggccatccagtatctccactcaattaacatcgctcaccgggacgtgaaaccagagaacttgttgtatacatcgaagcggccaaacgcaatactgaagctcaccgatttcggttttgccaaagagaccacaagtcataacagtttaacaacaccatgctacacgccttattacgtcgcgccggaagtattaggacccgagaagtatgacaagtcttgtgatatgtggagtctcggcgttatcatgtacatccttctgtgcggctatccacccttttacagtaaccatggcctcgcaatttcacccgggatgaagacacggattcgcatgggccagtacgaatttccaaatcccgaatggtctgaagtcagtgaggaggtcaaaatgctaatcagaaatctccttaaaacggagccaactcagagaatgacaatcacggagttcatgaatcacccctggataatgcagagtactaaggttccccagactccacttcacacatcccgcgttttgaaagaggataaggaacgatgggaggatgtgaaaggctgcctacatgacaagaattcagatcaggccacctggctgacaaggctgtag

SEQ ID NO: 25028 - DNA, 1203 bp, synthetic construct
  misc_feature 1..1203: note = Description of Artificial Sequence: Synthetic coding sequence
  source 1..1203: mol_type = other DNA
atgctgagcaacagccagggccagagcccccccgtgcccttccccgccccagcaccccccccacagccgcccaccccagccctgccccacccccctgcccagcctcctccgcctccaccgcagcaatttccacagttccacgttaagtccggattacaaattaagaaaaacgcaatcatagacgattacaaagtgacatcccaggtactggggttgggaataaatggaaaggtgttgcagattttcaacaagcgcacacaagagaaatttgcactcaagatgctgcaagactgcccaaaggccagacgtgaggttgaactgcactggcgtgcgagtcaatgcccacatatcgtgcggattgtcgatgtctatgaaaacctctacgctggaagaaagtgtcttctgatagtcatggagtgtctggacgggggcgagcttttttcacgaatacaagatagaggcgaccaggctttcacagaacgcgaagcttcagaaattatgaagagcattggtgaggctatccaatacctgcactccatcaatatcgctcatagagacgtgaagccagagaacctgctgtacacttctaagcggccaaatgcaattctgaaactaaccgatttcggctttgctaaggagacgacctcccataactccctgaccactccatgttacacaccctactacgtggcccccgaagtcctggggcccgagaaatatgacaaaagctgcgacatgtggtcattgggggtgatcatgtatatccttttatgcgggtacccccctttctacagtaatcatggactggccatatccccggggatgaagacaagaattcgcatgggacaatatgagtttccaaacccagagtggagcgaagtgtctgaagaggtaaagatgctgataagaaacctcctaaaaacagagcctactcagaggatgacaatcactgagtttatgaaccacccatggattatgcaaagtacgaaggttccccaaaccccccttcatactagcagggtgctcaaagaagataaggagcgttgggaagacgtcaaggaagagatgacaagcgccttagccaccatgcgcgtggactatgaacaaatcaaaatcaagaagatcgaggacgcctcaaatccacttctgctcaagcgaaggaaaaaggccagggccctggaggctgctgcccttgctcactag

SEQ ID NO: 25029 - DNA, 1149 bp, synthetic construct
  misc_feature 1..1149: note = Description of Artificial Sequence: Synthetic coding sequence
  source 1..1149: mol_type = other DNA
atggacggcgagaccgccgaggagcagggcggccccgtgcccccccccgtggccccaggtggtcctggactaggaggggccccaggcggccggagagagccaaagaaatacgcggtcactgacgactatcagctgagtaagcaggtgctggggctcggcgtaaacggcaaggttctcgaatgtttccaccgaaggacagggcagaaatgtgccctgaagttactgtacgattctcccaaggctcgacaggaagtggatcatcactggcaggcttcgggtggacctcacatcgtgtgtattctagatgtgtatgaaaacatgcatcatgggaagcgctgtctgctgatcataatggagtgtatggaaggtggggagcttttctctcgcattcaggagcggggagatcaggccttcaccgagagggaggcggcagagatcatgcgcgatatcgggaccgctatccaattcctgcactcacacaacatcgcacatcgggatgtcaagcctgagaacctcctgtataccagcaaggagaaggacgcagtactgaaactaacggacttcgggtttgccaaggagactacccaaaacgccctgcagactccctgttataccccttattatgtcgcccccgaggttcttggacctgaaaaatacgataaaagctgcgatatgtggagcctgggtgtgatcatgtacattctactatgcggttttccaccgttctattccaataccgggcaggccatcagcccagggatgaaaaggcgcatccgcttggggcagtacggtttcccgaacccagagtggagtgaggtgagcgaagacgctaagcagctgattcgactcctgctgaaaacagacccaactgagcgtctgactattacccaattcatgaaccacccgtggataaaccagtccatggtagttccccagactccgctgcacaccgcccgcgtcctgcaggaggataaagatcattgggatgaagtcaaagaggagatgaccagtgctctggccaccatgcgcgttgactacgaccaggtcaaaataaaagacctcaagacatctaacaacaggctgctcaacaagcgcagaaagaaacaggcgggctcctcaagcgcctcacagggatgcaataaccagtag

SEQ ID NO: 25030 - DNA, 999 bp, synthetic construct
  misc_feature 1..999: note = Description of Artificial Sequence: Synthetic coding sequence
  source 1..999: mol_type = other DNA
atggacggcgagaccgccgaggagcagggcggccccgtgccccccccagtggctcccggggggccaggtcttggcggcgcaccgggtggccgccgggagccaaagaagtacgctgtaaccgacgattaccagctgtccaagcaggtgctggggctcggagttaatggaaaagtgctagagtgcttccaccgccggactggtcaaaagtgcgccttgaagttgctgtacgactctccaaaagccagacaggaggttgaccaccactggcaggcctctggggggccacacatagtgtgtattctggatgtgtacgagaacatgcatcatggcaaacgctgcctgctgatcattatggagtgcatggagggaggcgagctgttcagcagaatacaggaacgaggcgatcaagcttttactgaaagagaggctgcggagattatgagggacatcggcaccgcaatccagttcttacactctcacaatatcgctcacagggatgtgaagcctgagaacctgctgtatacttctaaagagaaggacgctgtactgaagctgaccgactttgggttcgctaaagaaaccacacagaacgccctgcagaccccctgttataccccctactacgtcgcccccgaagtgcttgggccagagaagtatgataaaagctgcgatatgtggtcccttggtgtgattatgtatatcctcctgtgcgggtttcccccattctactctaacacgggccaagcaatcagccctggcatgaaaagaagaatccggctcgggcagtacgggttcccaaatccagaatggtccgaggtaagcgaggacgcaaaacagctcattagactactgctgaagactgatccaactgaacgcctgaccatcacacagttcatgaatcacccttggatcaaccaatctatggtagtgccacagactccgctgcatactgcccgagttctccaggaagacaaagatcattgggatgaagtaaagtag

SEQ ID NO: 25031 - DNA, 1149 bp, synthetic construct
  misc_feature 1..1149: note = Description of Artificial Sequence: Synthetic coding sequence
  source 1..1149: mol_type = other DNA
atggacggcgagaccgccgaggagcagggcggccccgtgcccccccctgtggctccaggtgggccaggcctgggcggggctcccgggggtaggcgcgagccgaaaaagtacgccgttaccgacgactaccagttgagtaaacaagttcttggccttggagtcaacggaaaggtactggagtgctttcaccggaggacaggccagaaatgtgctttgaagctactgtacgactctcctaaagccagacaggaggtggaccaccactggcaagcgagcggcggcccccatattgtgtgcatcctggacgtatatgagaatatgcatcacgggaaaaggtgtctcttaatcattatggaatgcatggagggaggtgagctcttttctcgcatccaagagcgtggtgaccaggccttcactgagagggaagcagcagagatcatgagggacattggaaccgctattcagttcctccattctcataatatcgctcaccgtgacgtaaagcctgaaaacttactctacacctccaaagagaaggacgccgtcctgaaattaaccgatttcggattcgcaaaagaaacgacccagaacgcactccagactccatgctacactccatattacgtggcccccgaggtgttgggccctgaaaagtatgacaagtcctgcgatatgtggagcttaggagttatcatgtacatcctcctgtgcggattccctcccttctactctaacacaggccaggccatttctccaggtatgaagaggcggattcgtctgggccagtatgggttccccaaccccgagtggtccgaggtcagcgaagatgcaaaacaactgattcgactcctgcttaaaacagatccaactgagcggctgaccattacccagtttatgaatcacccatggataaaccagtccatggttgtgccacaaacaccactccacacggctcgcgtcctacaggaggataaagaccattgggacgaagtcaaagaggaaatgacgagcgccctcgccacaatgcgagttgactacgaccaggttaagataaaggatttgaagacaagcaataatagattgctgaataaaaggcgcaagaagcaggccggttctagttccgcttcacaaggatgtaacaatcagtag

SEQ ID NO: 25032 - DNA, 360 bp, synthetic construct
  misc_feature 1..360: note = Description of Artificial Sequence: Synthetic coding sequence
  source 1..360: mol_type = other DNA
atggacggcgagaccgccgaggagcagggcggccccgtgccccccccagtagcaccagggggtcctggcctcgggggcgcccccggagggaggcgagagccaaaaaagtatgcagtcaccgacgactatcagctgtcaaagcaggtcttgggactaggagtgaacggcaaagtcctagagtgctttcataggcgaacagggcagaagtgcgccctaaaactcctgtatgacagcccaaaggccagacaagaagtcgatcaccactggcaagcgagcggcgggcctcacatcgtatgcatcctcgacgtgtatgagaatatgcatcatggaaaaagatgtttgttgatcatcatggaatag

SEQ ID NO: 25033 - DNA, 1422 bp, synthetic construct
  misc_feature 1..1422: note = Description of Artificial Sequence: Synthetic coding sequence
  source 1..1422: mol_type = other DNA
atgagcgaggagagcgacatggacaaggccatcaaggagaccagcattctggaagagtatagtatcaattggacacagaaacttggtgcaggcatctccggcccagtgagagtttgcgttaagaaatccacacaggagcgcttcgccctgaagatattgttggataggccaaaagcccgaaacgaggttcgcctacatatgatgtgtgctactcacccaaatatcgtccagattatcgaggtgtttgctaattcggtgcagtttccccacgaaagcagccctagagcccgcctgctcattgtcatggagatgatggagggaggggagttgttccacagaatttctcaacatagacactttaccgaaaaacaggcttctcaggttaccaagcagatcgctctcgcactccggcactgtcacctgctgaatatcgcccatagagacttgaaaccagaaaacctcctttttaaagataatagcctggacgcccccgtgaagttgtgcgacttcggatttgcgaagattgaccaaggtgacttgatgacacctcagttcacaccatactacgtggcgccacaggtactggaagcccagcgaaggcaccagaaagagaaatcaggaataattccaacctctcccactccatatacatacaataaatcttgcgatctctggtccctgggggtcataatctatgtcatgctttgcgggtacccgcccttttacagtaaacatcattctagaacaattcctaaagacatgcgccggaagattatgaccgggtcattcgaatttcccgaggaagaatggtcccaaatctcagaaatggctaaggacgtggtgaggaagctgttaaaggttaagcccgaggaaagactaactatcgaaggagtgctggatcatccatggcttaactctaccgaggcccttgacaatgttctaccaagcgcacagctgatgatggacaaagctgtcgtggctggcatccagcaggctcacgcggagcagttggctaatatgcggatccaggacctcaaagtaagcttgaagccgctccactccgtgaacaaccccatcttacggaagaggaagctgctggggacgaagcctaaagattcagtctatatccacgaccatgagaatggagccgaggattcaaacgtggccttagaaaagttaagggacgttattgcacaatgcattctcccacaggctggcaaaggggagaacgaagacgagaagttgaacgaggttatgcaggaggcttggaagtataatcgcgaatgtaaattactccgagacacattgcaatctttctcatggaatggaagggggttcaccgacaaagtagatcgcttgaagctggcggagattgtgaagcaggtgatcgaagaacaaaccacttcccacgagtcgcaatag

SEQ ID NO: 25034 - DNA, 1416 bp, synthetic construct
  misc_feature 1..1416: note = Description of Artificial Sequence: Synthetic coding sequence
  source 1..1416: mol_type = other DNA
atgagcgaggagagcgacatggacaaggccatcaaggagaccagcatactggaggagtactctatcaattggactcagaaactcggcgccggaattagtgggcccgtccgggtgtgtgtgaagaagtctacccaagaaaggttcgcgttgaaaatcttgctggatcgccctaaagctagaaacgaggtacgcctgcacatgatgtgcgccacacaccccaatattgtgcagatcatcgaagtgtttgctaatagtgtgcagttcccgcacgagtccagcccacgcgctcggttactgattgtcatggaaatgatggagggaggtgaactgttccaccggatcagtcaacaccgccattttacggagaagcaagcatctcaggttaccaaacagatagctctggcactcaggcactgtcacctcctaaacatcgcgcaccgtgacttgaaaccagaaaacctactgttcaaagacaactcattggatgcacctgtgaagctctgcgacttcgggttcgccaagatcgaccagggagatctcatgacaccgcagttcactccttactacgtagcaccgcaggttctggaagcgcaacggagacaccagaaagaaaaaagcgggataattcctacatcgccaacgccttacacatataataagtcatgcgacctctggagccttggagtgatcatctacgtgatgctatgcgggtacccgccattttacagtaagcaccactctcggacaattccaaaagatatgcgccggaaaatcatgactggatcgtttgaattccctgaggaggagtggagccaaataagcgagatggcaaaggatgtcgtccgtaaactgctgaaggttaagcctgaggaacgactaaccattgagggagtcctcgaccatccgtggttaaatagcaccgaggccctggacaatgtgttacccagcgcccagcttatgatggataaagccgtggtcgcaggcatccagcaggcacacgcggagcagctggccaatatgcgaatccaggacctgaaggtgagcttaaagcctctgcatagtgtaaacaaccccattttacgaaaaagaaaactacttggcacgaagccaaaagacagcgtgtatattcatgatcacgaaaatggcgccgaggactcaaatgttgccctcgagaagctgcgtgatgtcattgcccaatgtatcctcccccaggccggtgaaaatgaagacgagaaactcaatgaggtcatgcaggaagcatggaaatataatcgggagtgtaagctactccgggacacattgcaatcctttagctggaacgggagaggattcaccgacaaagtagacaggctcaaactcgcagaaattgtcaaacaggtgatagaggagcagaccacatcccacgaaagtcagtag

SEQ ID NO: 25035 - DNA, 1416 bp, synthetic construct
  misc_feature 1..1416: note = Description of Artificial Sequence: Synthetic coding sequence
  source 1..1416: mol_type = other DNA
atgagcgaggagagcgacatggacaaggccatcaaggagaccagcatcctagaggaatacagtattaattggacccagaagctgggcgccggaataagcgggcctgttcgagtttgtgtgaagaaaagtacccaggagagattcgctctaaagatactgcttgacaggcctaaggcaaggaacgaagtcagactgcatatgatgtgtgcaactcaccccaacattgtgcagatcatagaagtgtttgccaattcagtgcagtttcctcatgagagttcccctcgggcgagactgttaattgtcatggagatgatggaggggggcgagctcttccaccggatttcacaacacagacatttcactgaaaaacaggcaagtcaggtgaccaagcaggcgacactcgcattgaggcattgccatctcctcaacatcgcccaccgagaccttaaaccagaaaatttgctatttaaagacaacagcttagacgctcctgtcaaattatgcgattttggctttgctaagattgatcagggtgacctgatgactccccagttcactccatactatgtggctccccaagtgctggaagcccaacgtaggcaccagaaagagaaatccggcatcattcccacatcccccacaccgtacacatataataaatcctgtgatctatggtccctcggcgtcatcatctacgtgatgctttgcgggtaccctcccttttattctaaacaccattcaagaaccatacctaaggacatgcgcagaaaaataatgacgggatcatttgaatttccggaagaagaatggagtcaaatttcagagatggctaaggatgtggttaggaaactcctcaaggtaaaacccgaagaacggctgacaatagagggggtgctagaccacccatggctgaattcgacagaagccttggacaacgtactgccttccgcgcagttgatgatggacaaagctgtagtcgctggcattcagcaagcccatgccgaacagctggctaacatgagaattcaagatctgaaggtcagtctgaaacccctgcatagcgttaataatcctatacttaggaagcgcaaactcctggggacaaagcccaaggactcagtgtacattcacgaccacgagaatggggcagaagactccaatgttgccttagagaaactgcgggatgtaattgcccagtgtatcctgccgcaagcgggggaaaatgaggacgaaaaattaaacgaggtgatgcaagaggcatggaagtataatagggagtgcaagctgctgagagacactttgcagagtttttcttggaatgggcgcggtttcaccgacaaagtggataggttgaagctggcggaaatcgtgaaacaagtcattgaggagcagaccacttcccacgagagccagtag

SEQ ID NO: 25036 - DNA, 1422 bp, synthetic construct
  misc_feature 1..1422: note = Description of Artificial Sequence: Synthetic coding sequence
  source 1..1422: mol_type = other DNA
atgagcgaggagagcgacatggacaaggccatcaaggagaccagcatcttggaggaatattctataaattggactcagaaactcggtgccgggatctctggcccagtgcgagtgtgcgtgaaaaaatctacgcaggagagatttgcacttaaaattttgcttgatagaccaaaggctcgaaacgaagtcagactgcacatgatgtgtgccacccaccctaacattgtgcaaatcattgaagttttcgccaattccgtacagtttcctcacgagtccagccctcgggcccggcttttgatcgtgatggagatgatggagggcggtgagctcttccaccggattagtcagcaccgccattttacggagaagcaggcaagccaggtcactaagcaggcaactctggctctgaggcactgccacctgctcaatattgcacacagagacctcaaacctgagaacttactctttaaggataactcactcgacgccccggttaagctgtgcgacttcggatttgccaagattgaccaaggcgacctgatgacaccacagtttacaccctattacgtggccccacaagtgctcgaagcacagcgcagacatcagaaagaaaagagcggcattatcccgacgagccctaccccttatacctataacaagtcttgtgacctgtggtctttaggggtcatcatctatgtgatgctttgcgggtaccctccattttactccaaacaccactcacggaccatcccaaaggacatgaggagaaaaattatgacagggagctttgaattccccgaagaagagtggagccagataagcgaaatggccaaggacgtggtgcgcaagttactcaaggtcaagccagaagagaggcttaccatcgaaggagtgctggatcatccttggctgaactccaccgaggctctagacaatgtcttacccagtgcccaactcatgatggataaagcggtagtcgcgggcattcaacaggcacacgcagagcagcttgctaatatgcgtattcaggacctgaaggtatctttaaaacctctgcactccgtgaacaaccccattttgcggaaacgaaaacttcttggtactaaacctaaagattctgtatacatacatgatcacgagaatggggctgaagacagcaacgtcgctctcgagaaacttcgcgatgtcattgcccagtgtatcttaccgcaggccggcaaaggcgagaacgaggacgaaaagctgaatgaagtaatgcaagaagcctggaagtataatcgggagtgtaaactcctgagggacactctacaatccttcagttggaacggccgggggttcactgataaggtggaccgactgaaacttgcagagattgtaaagcaggtgatcgaagaacagaccacgtctcacgagtctcagtag

SEQ ID NO: 25037 - DNA, 2799 bp, synthetic construct
  misc_feature 1..2799: note = Description of Artificial Sequence: Synthetic coding sequence
  source 1..2799: mol_type = other DNA
atggccgccgccgccgccgtggaggccgccgcccccatgggcgccctgtggggactcgttcacgatttcgtcgtggggcagcaggaagggcccgcagaccaggtcgctgccgatgtgaagtcaggaaattacacagtactgcaggtggtggaagcactaggcagctcgctggagaaccctgagcctcgtacccgggcaagagccatccaacttctgtcccaggtgctcctgcattgccacactctgttgctcgagaaggaagtagtccacttaatcctgttctacgagaacagactcaaggaccatcatcttgttattccgagtgtgctccagggactgaaagccctgtccctgtgcgtggccttaccaccgggattagcagtatctgtgctgaaagccatctttcaagaagtgcatgtacagtctctgcctcaggtggacaggcacacagtgtataacatcatcactaactttatgcgcacacgggaggaagagctaaagagcctgggtgccgactttacattcggctttattcaggtaatggacggcgagaaggatccccgtaatctgcttgtcgccttccgaatcgtgcacgacctgatcagtagggactactctctgggccccttcgtggaagagctttttgaagttaccagctgctactttccgatcgacttcacccctcccccgaatgacccccacggcatccaaagagaagatttgatcctctcgcttcgcgctgtcttggcttctacaccaagattcgccgaatttctgttgccactgctcattgagaaggtggatagtgaagtgctgagtgcaaagctggactctctgcagacactcaatgcctgttgcgccgtctatggtcagaaggagctgaaggacttcctgccgtctctgtgggccagtatacgccgggagagcagccagcgaaggaccatcctggaaatgttattagggttcctcaagcttcagcaaaaatggtcttatgaagacaaggatcagagacctctgaacgggttcaaagatcaactgtgcagcctagtcttcatggcactcaccgacccttcgactcagctgcaactggttggaattagaacactgacagtcctcggagcccaacccgatttgcttagttacgaagacctcgagcttgcagtgggtcacctctatagactgtcttttctgaaggaagattcacagtcatgtcgggtagcagcattggaagctagcggcactctggccgccctgtacccagtggctttttcaagccacctggtccccaaactagcagaagaactgagggtgggggagtccaatttgacaaacggtgatgagcccacccagtgttctaggcacttgtgttgcctgcaggccctctccgccgtgtccacacatccctccatagtgaaagaaacacttccgctgctactgcagcacttgtggcaggtgaacagaggcaacatggttgctcaatcttcagacgttatagcagtgtgtcaatccttgagacagatggccgagaagtgccagcaggatccagagtcgtgttggtattttcatcagactgcaatcccatgcctgctagcgttggccgtgcaggcttcaatgccagagaaggagccatctgtcttgcgtaaggtactacttgaagatgaagtcctggcagctatggtaagtgtcatcggtactgcaaccactcacttatctcccgagctggccgcccagtcagtcacacacattgtgccattatttttggatggaaacgtcagcttcctgccagaaaatagcttcccctccagattccagcctttccaggatggcagtagtgggcagcggagacttatcgctctgctgatggcatttgtttgtagcctgccacggaacgtcgagatcccgcagcttaaccagcttatgagggagttactcgagctctcttgctgtcactcttgccctttttcctccactgccgccgcgaaatgttttgccggtttgttgaataagcaccctgctggtcaacagctggatgaattcttgcaactggctgtggacaaggtggaggcaggcttgggcagtgggccctgtcgtagccaggccttcactctcctactgtgggtaactaaggccctagtcctgcgatatcaccccctaagttcctgtctcacagctcgactgatgggcttgctctctgaccccgaactgggccctgcagccgcagacggattctcccttttgatgagcgattgcaccgacgtgttgacaagggccggccatgccgaggtacgcattatgtttagacagaggttctttaccgacaacgtccctgcgctcgtacagggatttcacgcagccccacaggacgtaaaaccaaattacctaaaaggactgagtcatgttctgaaccggctgcccaagccggtgctcctgcctgagctccctacattgctatctcttctgctggaggcgctgagctgccccgattgcgttgtccagttatctacactgtcatgcctgcagcccctccttctagaggcaccccaggtgatgtctcttcacgtcgacactctcgtgaccaaattcctaaatctgtcatctagtccttccatggctgtacgcatcgccgctcttcagtgtatgcacgccttgaccagactgcccaccccagtgctgcttccctataaaccccaggtcatccgcgcactagctaagcctctggatgataagaagcgactcgtgaggaaggaggccgtcagcgctaggggagagtggttcctgttgggctcaccaggttcctag

SEQ ID NO: 25038 - DNA, 1092 bp, synthetic construct
  misc_feature 1..1092: note = Description of Artificial Sequence: Synthetic coding sequence
  source 1..1092: mol_type = other DNA
atgctgctgggcttcctgaagctgcagcagaagtggagctacgaggacaaggatcagcgccctctcaatgggtttaaggaccagttgtgttctctcgtgtttatggcactgactgacccaagcacccagttgcagctcgtaggcattcggacccttacagtcctcggcgcgcagcctgacctgctatcatacgaggacctggaactggctgtgggccatctgtatcggctctcatttttgaaggaagatagccagagctgtagggtggccgccttagaggcttctggcactctggctgccctttatcctgtggcattctcgagccatctggtgcccaagctcgcggaggagctgcgtgtgggtgaatctaacctgactaatggcgatgaaccaacgcagtgtagtaggcatctgtgttgtctgcaggcactatcagcagttagcactcacccaagcattgtgaaagaaacactgcctctactgctgcaacacttatggcaggttaatcggggaaatatggtcgcacaaagtagcgatgtgatcgcggtgtgtcagtccctgagacagatggcggagaaatgtcagcaggaccctgagtcctgctggtatttccaccagaccgctatcccttgcctgctcgctctcgccgttcaagcttcaatgccagagaaagagccctctgtgctaaggaaggtcttgttagaggacgaggtactggcagcaatggtttcagtaattggcacagccactacacacctctcaccagagctggccgctcagtctgtgacacacattgtccctttgtttctggacgggaacgtgagctttttgccagaaaacagttttccttcaaggtttcagccttttcaagatggatcctccggacagagacgtttgattgcactcttaatggcctttgtctgctccctacccagaaatgtggaaattccccagttaaatcagctgatgagggagctcctggaactgtcttgcaccgccgcgccttttttaccacctctcctcccctccgccttgcaggactcttctacttccacactgcagggaagctcctggatgaatagctattcctag

SEQ ID NO: 25039 - DNA, 1128 bp, synthetic construct
  misc_feature 1..1128: note = Description of Artificial Sequence: Synthetic coding sequence
  source 1..1128: mol_type = other DNA
atgaagctggtgtggcccagcgccaagctgctgcaggccgccgccggggcgagcgctagggcgtgtgattcagtgaccagcaatgtgctacccttgctgctggaacagttccataagcattcccagtccagccaacgcagaaccatcctagagatgctgttggggtttttgaaactacagcagaaatggagctacgaagataaagaccagcgcccgctcaatgggttcaaggaccagttatgcagtctcgtcttcatggcactgacagatccctcaacacagctgcagctggtggggatcaggacattgaccgtgctcggagctcagccagatctgttgtcctatgaggaccttgagctggcagtgggccacctctacagactgtcttttttaaaagaagactcccaatcgtgcagagttgccgctttggaggcttcggggactcttgcagctctttatcctgtggccttctcttctcatttggtgcctaaactggcagaagagttacgggtgggtgaatctaacttgactaacggcgacgagccaactcagtgctccagacacctgtgctgcctccaggctctatccgctgtttccacgcaccccagcattgttaaagaaactctcccgctactgctccagcatctgtggcaggtgaaccgcggcaatatggtggctcaatcctccgacgtcatcgccgtatgtcagagtctgaggcagatggccgagaagtgccagcaggaccccgagtcttgctggtattttcaccagactgccatcccatgcctccttgcactcgcagtacaggcttcgatgcccgaaaaggaaccatctgtgcttagaaaggtgctgcttgaagacgaggttttagctgccatggtatccgtgatagggaccgctaccacacacctctctcccgagctggccgcccagtctgtcacacacattgtgcccttattcttggatggtaatgtgtccttcctccctgagaattccttcccttctcgctttcaacctttccaggtgacagacggctctagtggtcagaggaggttgattgctcttctcatggctttcgtatgcagccttcccagaaacggctcgagttggatgaactcgtacagctag

SEQ ID NO: 25040 - DNA, 1128 bp, synthetic construct
  misc_feature 1..1128: note = Description of Artificial Sequence: Synthetic coding sequence
  source 1..1128: mol_type = other DNA
atgaagctggtgtggcccagcgccaagctgctgcaggccgccgccggcgccagtgccagagcctgtgatagcgtgacgtctaacgtgctgcccttactcctggaacagttccacaagcactcccagtcctctcagagaagaaccatcttagaaatgctgctgggctttttgaagctgcagcagaagtggtcctacgaagataaagatcagcggcccctcaacggattcaaggaccaactgtgctccctggtgttcatggccttgacggacccttccacacagttgcagcttgtgggtattcgaacgttaaccgtactgggggctcagccagacttgctttcctatgaagatttggagctggcagttggacacctgtatcgactgagctttctgaaagaagactctcagagctgtagggttgcagccttagaagcaagcggaacactggcagccctgtatccagtggcattctcaagccatctggttccaaaactagccgaagagcttcgggtcggcgaaagtaacctgacaaatggggacgaaccgacacaatgttccaggcatctgtgctgcctacaagccctatccgcagtctctactcacccttcgatcgtcaaggaaaccctgccattactgctgcagcacttatggcaggttaacagggggaacatggtggcacagtcatccgacgtcatcgccgtttgtcagtcgttgcgccaaatggccgagaaatgtcagcaggatcctgaatcgtgctggtattttcatcaaactgccatcccctgcctccttgctttagccgtgcaggcatcaatgccagagaaagaacccagtgtccttcgcaaggtactgttagaggacgaagtgctcgctgcaatggtgagcgtcatcggcaccgccaccacacacctttcacccgaattggccgcgcagtccgtgacccacattgtcccattattcttggacggcaacgtcagttttttacctgaaaactccttccccagtcgattccaaccatttcaagtgacggatggtagcagtgggcaacggaggctcatagcattgctcatggctttcgtctgttcactgcccaggaacgggagctcctggatgaattcttactcctag

SEQ ID NO: 25041 - DNA, 2964 bp, synthetic construct
  misc_feature 1..2964: note = Description of Artificial Sequence: Synthetic coding sequence
  source 1..2964: mol_type = other DNA
atggccgccgccgccgccgtggaggccgccgcccccatgggcgccttatggggactcgttcacgatttcgtcgttggacagcaggaaggcccagccgaccaggtagcggctgacgtgaaatctgggaactataccgtgcttcaggttgtggaggccctggggagttccctcgaaaatcctgagcctcgcacacgagctcgcgccatccaattgttaagccaagtccttctccactgccacacacttctccttgaaaaagaggttgtccacctgatcctgttttatgaaaatcgtctaaaagatcatcatctggtaatccccagcgttctacagggacttaaggcgctgagcctgtgcgttgccctgcctcccggcctagcagtgagcgtcctcaaggccatctttcaggaagtgcacgtgcaaagtctcccacaagtcgatcgccatactgtctacaatatcatcaccaatttcatgagaaccagggaggagggcccattcgtcgaggaactgttcgaagttactagctgttattttccaatcgacttcactccgccacctaatgaccctcacggcattcagagggaggatctgattctttcactgcgggccgtgttggctagtacaccaagattcgcagaattcctgctgccccttctgattgagaaggtggacagtgaagtactgagcgccaaacttgactccttgcagactctgaatgcctgctgtgccgtttacggtcaaaaggagctgaaggactttcttccctccctctgggcttccatacgtagagaggttttccagactgcttccgaacgggtcgaagccgaaggcctagccgctctccatagcctgaccgcatgtctgtcaagaagtgttcttagggctgacgcggaggacttgttggactcattccttagcaatatactccaggactgcaggcatcacttgtgtgaaccagatatgaagcttgtctggccttctgccaaactgttgcaggctgctgccggggcctccgccagggcctgcgacagcgtgacctcaaatgttcttccactcctgctcgagcagttccacaaacactcacagtcttcccagagacggacaattctggagatgcttctgggttttctcaaacttcagcagaagtggagctacgaggataaagatcagcggccgcttaatggatttaaagatcagttatgtagcctggtctttatggccttgactgaccccagcacccagttgcaactggtcgggattagaaccctgaccgtgttgggggcgcagcctgatctgctgtcgtatgaggacttggagctggccgttggtcatctctaccgcctctcctttctgaaggaagacagccagtcgtgcagggttgcagcgctcgaggcttccggtactctggctgcactttatccagtggcttttagctcgcatcttgtaccgaaactggcagaggaactgcgtgttggcgaatctaacttgacgaacggcgacgagcctacacaatgtagtaggcatttgtgctgcctgcaagcactcagtgccgtgtctacccacccctcaattgtgaaagagactctgccactccttctacagcacctatggcaggtaaacagaggaaatatggtagcacaatctagtgatgtgattgcagtgtgccagagtctacggcagatggctgaaaagtgccagcaagacccagagagctgttggtattttcatcaaaccgcgattccctgcctcctggcactagcggttcaggcgtccatgccagagaaggagccctcggtcctacggaaagtgctgctcgaggacgaagtgctggctgcaatggtgtccgtaatcggaacggccacgacccatctgtcccctgagctcgcggcccagagcgtcacccacatcgttccattgttcctcgacggaaatgtgagcttcctcccggagaactcctttccttcaaggttccagccttttcaggacggatccagcgggcagagacgattgattgctttactgatggcctttgtttgcagtctcccacggaatgtggaaatcccacagctgaaccagttgatgagagagctgttagaactatcttgttgtcacagctgtccctttagctctactgctgccgccaagtgctttgccgggctcctgaataagcatccagccgggcagcagttggacgagttcctgcaactggccgtcgataaagtcgaggcggggttggggagtgggccctgtcgtagtcaggcttttaccttactcctttgggtaacgaaggcactggttctgagatatcaccccttgagctcatgcctaaccgctagactgatggggcttcttagcgacccagagttggggcccgctgctgctgacggtttctcactgctgatgagcgactgtactgacgtcctcacgcgggctgggcatgccgaggtgcgaatcatgtttagacagcggttcttcacggacaatgtcccggctttggtgcaggggttccatgcagccccacaggatgtcaaaccaaactatctcaagggtctcagtcacgtgctcaacagactccccaaacccgtgcttctacccgagttgccaacgctgctgtctctgctcctggaagctctctcgtgcccagactgtgtggttcaactgtccaccctgtcctgcctgcagccgttgttgctggaggctccccaggtgatgtcactccatgttgacactttagttactaaatttctcaatctgtcatcctcccctagcatggcagtgagaattgccgcactgcagtgcatgcacgctcttacacgcctgccaacgccagtcctcttaccttacaaaccacaggtgatcagagctctcgccaagcctctcgacgataaaaagcgcttggtgcgcaaagaggctgtgagcgcccgtggggagtggtttctcctgggcagccccggaagctag

SEQ ID NO: 25042 - DNA, 3093 bp, synthetic construct
  misc_feature 1..3093: note = Description of Artificial Sequence: Synthetic coding sequence
  source 1..3093: mol_type = other DNA
atggccgccgccgccgccgtggaggccgccgcccccatgggcgccctgtgggggctggtccatgattttgttgtcgggcaacaagaggggcccgcggatcaggtggccgcggatgtcaagagcggaaattatactgttctacaggttgtggaagctcttggctcttctctcgagaatccagagccaagaacgagagctcgcgccattcagcttttgagccaggtgctgctccactgccacactctgctgttagagaaagaggtggtgcatctgatcttgttctacgagaaccggctcaaggaccaccatctcgtgataccttcagttcttcaggggcttaaggcccttagtttatgcgtggctcttccacctggcttggccgttagcgtgctcaaggctatcttccaggaagtgcacgttcagtctctgcctcaagtggatcggcacactgtctataatattattacaaactttatgcgcactagagaggaagaactcaaatctctgggcgccgattttacctttgggtttattcaggtaatggacggtgagaaggaccccagaaatttgctggttgcctttcgaatcgtacacgatcttatctctagagactatagtcttggcccattcgtggaggaactgtttgaggtgacatcatgttacttccccattgactttactcctcctccaaacgatccccacggtattcaacgcgaagatttgatcctgtccttgcgggccgtactcgccagcacccctcggttcgctgagttcctactgccactgttgatcgagaaagtagatagtgaagtcctgtcagcgaagcttgactcgctgcaaaccctgaacgcgtgctgcgctgtctatggacagaaggaacttaaggatttcctccccagtctatgggctagcataaggcgggaggtgtttcagacggcatcggagcgcgtcgaggctgaaggcctggccgccctacattctctgaccgcctgtctttctcggagcgtgctgagggcggacgcagaagatttattggacagcttcctgtcgaatattctacaagactgtaggcaccatctgtgcgagcccgatatgaaacttgtctggcccagcgcaaaattgctgcaggctgcagccggcgcaagtgcccgtgcctgtgactccgttacctccaatgtgctgcccctgcttttagagcagttccacaagcatagtcaatccagtcaaagaagaacaattctcgaaatgctgctcggttttcttaaactgcagcagaagtggagctacgaggataaagaccagcggccgttaaatgggttcaaagatcagctctgtagccttgtctttatggctctcactgatcccagcacccaacttcagctggtggggattagaaccctcacagtgctgggcgctcagcccgatctcttatcatatgaggacctggagctggcagttggacacttgtaccgtctgtccttcttaaaggaggatagccagtcctgtcgcgtggccgcgctagaagccagcggaaccctcgctgccttatatcctgtggctttcagctcgcatttggtcccaaagctggccgaagagctgagagtcggtgaatccaatcttactaacggggacgaaccaacgcagtgctcacggcacctatgttgcctgcaggccctgagtgccgtgtctacacatccttcaattgtgaaagaaaccttgcctttgctcttacagcacctgtggcaggtcaaccgcggcaacatggtggctcagtccagtgacgttatcgcagtatgccagagcttaaggcagatggccgagaagtgccaacaggatcctgagtcctgctggtactttcatcaaactgcgatcccttgtcttctggcgcttgctgtccaggcatctatgcctgagaaagaacccagtgtacttaggaaggttctcctggaggatgaggtactggcagccatggtttcggtgatagggacagctacaacacatctgagtccagagctagctgcccagagcgtgacacatatcgtccctctctttctggacggaaacgtgagttttttacccgaaaatagcttccccagtagatttcagccgtttcaggacgggtcaagcgggcagcgtcggctaattgccttactcatggctttcgtgtgttctttgcctagaaatgtcgaaatcccacagttaaatcaactcatgcgggagctccttgagttgagctgctgccattcctgtcccttctcatccactgccgccgccaagtgtttcgccggtctcctgaataagcatccagctgggcagcagcttgacgagtttttgcagctggctgtggataaggtggaggcaggacttgggtcgggaccctgccggtctcaggctttcacgcttctcttgtgggtgacaaaagcgctggtcctacggtaccacccgctgagcagctgtctgaccgcccggctgatgggcttactgtccgacccggagctgggccctgctgcggcagacggcttctcgcttctgatgagtgattgtacagacgtgttaacacgggccggacacgccgaggttcggatcatgttcaggcagaggtttttcacagacaatgttcccgctctggtccagggctttcacgctgctccccaggacgttaagcccaattatttaaaaggccttagccacgtcctcaacaggctccctaagcccgtgttgttgcccgagcttccaactctgctgtccctgctactggaggccctgagctgccccgattgcgtcgtacagttgtccacgctatcgtgcctccaacctttactgctggaagctccacaagtgatgagcctgcacgtcgataccctagttactaaatttctcaatctcagttcttctcctagtatggcggtgcgtatcgctgctctccaatgcatgcatgctctcacgaggctgcccacccccgttcttttaccctataagccccaggtgataagggcactggcgaaaccactggatgataaaaaacgcctggtcagaaaagaagctgtgtccgccaggggcgaatggttccttctgggctcccctgggagctag

SEQ ID NO: 25043 - DNA, 3030 bp, synthetic construct
  misc_feature 1..3030: note = Description of Artificial Sequence: Synthetic coding sequence
  source 1..3030: mol_type = other DNA
atggccgccgccgccgccgtggaggccgccgcccccatgggcgccctgtgggggttagtgcacgactttgttgtgggccagcaggagggccctgccgaccaggttgctgccagttccctcgagaatccggagcctcgaaccagggctagagccatccagctgctgtcccaggtgctgctgcactgtcacactctgctcctcgagaaagaggtggtgcaccttatccttttctatgaaaaccgcttgaaggatcaccacctcgtaatcccaagtgtgctgcaaggcctcaaagcattatcactctgtgttgcgctgccccctggtctcgccgtcagcgttctgaaggccatcttccaggaagtccacgttcaagtggatcgccacacggtgtataatatcatcactaactttatgcgcacaagagaagaagagttgaagagcctgggggcggactttacattcggcttcattcaagttatggatggggaaaaggatcctaggaaccttcttgtggcatttaggatcgtgcatgacctgatctcacgcgattactccctgggtcctttcgttgaggaactgttcgaagtaacctcatgttactttcccatcgattttacaccccctcccaatgaccctcacggtattcaacgagaagacctgatccttagccttcgtgcggtgctcgccagcacccctcgttttgcagaatttttgctgcccctgctaatcgaaaaagtggattctgaggtcctatctgcaaagctggactcactgcagaccttgaatgcctgctgcgcggtgtatggccagaaagagcttaaagattttttgccttctctctgggcatcaataaggagagaggtgtttcaaactgccagtgaaagggtcgaagcagaaggtctggcagctctgcacagtttaaccgcatgtctcagccggagcgtccttcgggcggatgctgaggacctgctggattcatttctttcaaacattcttcaggactgccggcatcacctgtgcgagcctgatatgaagttggtgtggccttccgcgaagctgctgcaggctgcagctggcgccagcgccagggcttgcgattctgttacctcaaacgttttgcctttacttctcgaacagtttcacaagcattctcagtcaagccagcggagaacgattctagagatgcttttggggttcctgaaactccagcagaaatggtcctacgaggataaggatcagcggcctctgaacgggtttaaggatcaattatgtagcttagtcttcatggccttgacagaccccagtacgcagctccagctagtaggaattaggacattaactgtgctcggcgctcagcccgatttgctcagctacgaggacttagagctggccgtcggacacctgtatcggctgtcttttctcaaagaagactctcagtcctgccgggttgccgccctggaggcatcaggcacccttgccgcactctatcccgtggctttctcctctcacctcgtcccgaagctggccgaggaacttcgcgtcggggagtccaacttgacaaacggggatgaacccactcagtgttctagacacctctgttgtctgcaggcgctgtctgctgtatctacacatcccagtatcgttaaggagactctcccactgttgttacaacatctttggcaggtaaataggggcaacatggtcgcacagagctccgacgtcatcgccgtttgtcagagcttgcgccagatggcagaaaaatgtcagcaggaccccgaatcttgctggtactttcaccagactgctataccctgcctgctagcgctagcagtccaggctagcatgcccgagaaagaaccatctgtgctgaggaaggttcttcttgaggatgaggttctggctgctatggtcagcgtgattggcactgcgaccacccacctctctcccgagcttgccgcccagtcagttacccacattgtgcccttgtttttagatggaaacgtgtctttccttcccgaaaatagctttcccagccgtttccaacctttccaggacgggtcctctggccagaggagactgatcgccctgctaatggcttttgtgtgctcgctgcctagaaacgtggagatcccacaactgaaccagttgatgagggaactcttggaactctcttgttgtcacagctgccctttcagcagtaccgctgccgctaaatgttttgccggtctgcttaacaagcaccccgctggacaacagctggacgaatttctgcaactggcggtggataaggtagaggccggtttaggctcaggcccctgcaggtcccaagctttcaccctgctgttgtgggtgaccaaggcactggtgctgagataccatccactcagctcatgcctcaccgctcggttgatggggctgttgtcagacccggaactgggacccgctgccgccgacgggttcagcctgctgatgtccgattgcactgacgtcctcacgagagccggtcacgccgaggtgcgtataatgttcagacagcggttctttacagacaatgtgccagccttggtgcagggcttccacgccgctccacaggacgttaagcctaattacctgaaggggcttagtcacgttctcaacaggctgcccaaacctgttcttctgccagagctgccaaccctgctttccctgttgctcgaggctctaagctgtcccgattgtgtagtccaattgtcgactctttcctgcctccagcctttgctcctcgaggccccacaggtcatgtcactgcacgtggacactctcgtgaccaaattccttaatctgagctcttcaccaagtatggcagtcagaatagccgctctgcagtgcatgcacgcccttactaggttgcctactccagttctgctgccttacaaaccccaggtcattcgggctttggccaagcctctggatgacaagaagcgcctggtaagaaaagaggcagtatccgcaaggggagagtggttcttgttagggagccctggcagctag

SEQ ID NO: 25044 - DNA, 3093 bp, synthetic construct
  misc_feature 1..3093: note = Description of Artificial Sequence: Synthetic coding sequence
  source 1..3093: mol_type = other DNA
atggccgccgccgccgccgtggaggccgccgcccccatgggcgccctgtggggcttggttcacgattttgtggtcggccaacaggagggacctgcggatcaggtggctgccgacgtcaaaagcggtaactacactgtgctgcaggtggtggaagcgctcggctcttccctggagaaccctgaacctcgaaccagggccagggccatccagttgctgtcccaggtgttactgcactgtcacaccctgctattagagaaagaggttgtacacctcatactcttctacgagaaccggctgaaagatcatcaccttgtcattccctctgttttgcaagggctcaaagcactgtccctctgtgtcgctctgccccccggtctggctgtatcagtactcaaggcaatattccaggaagtacacgttcagagtcttcctcaggttgacagacacacggtgtacaacattattacaaactttatgagaacacgcgaagaggagctcaagtctctaggcgcagattttaccttcggcttcattcaagtcatggacggcgagaaggacccacgcaatctgctggtagctttccgaatagtgcacgatctaatcagcagagactactcactggggccgttcgtggaggaacttttcgaggtaacctcgtgctatttccccatcgatttcacccctccgccaaacgatccccatgggatacagcgggaagacctgatcctaagcttgagggctgtactggcctctacccctaggttcgcagagtttctgctgccattactgatcgaaaaggtggactctgaggtgctgtccgccaaactcgactctttgcagaccctaaacgcctgttgcgctgtgtatggccagaaagagttgaaggacttcctgcctagcctgtgggcatctattcgtagggaagtcttccaaacagcaagcgaacgcgtcgaggccgagggcctcgctgccttgcatagcctcactgcctgtttgtcaaggtcagttctgagggccgacgccgaggacttgctggactcttttctgagcaacattctgcaagactgccggcaccacctgtgcgagcctgatatgaagctggtgtggccaagcgccaagctgctgcaggccgccgccggtgcgtccgctagggcttgcgattctgttacctccaacgtgcttccactgctcttagagcaatttcataagcattctcaatctagccaacgacgcaccatactagagatgttactgggtttcctcaaactgcagcagaaatggtcttacgaagacaaggaccagagacccctgaacggattcaaggatcagttatgctcccttgtgtttatggccctcaccgacccatcaacccaactgcagctcgtgggaataagaaccctgaccgtgctcggcgctcagcctgatctgctcagctatgaggatttggaattggccgtgggccacttgtacagacttagtttcttaaaggaagattcacagtcgtgtagagtggcagcccttgaagccagcgggaccctggctgccctgtatcccgtcgcgttctcctctcacctggtccccaaattagcagaggagctacgggtgggtgagagcaatctgaccaatggcgacgagcccacacagtgttcgagacacctgtgctgcttacaggcgctgtcggccgtcagcacacacccttcaattgtcaaagaaacactgccgcttctcctgcagcatttgtggcaggttaaccggggaaatatggttgcgcagtcgtccgacgtcatcgctgtgtgtcagagcctgcggcagatggccgaaaaatgccagcaggaccctgagagttgctggtattttcatcagaccgctatcccatgccttctcgctctcgcagtccaggctagcatgcccgagaaggaaccatccgtgctgcgtaaggtcttgctcgaagacgaggtcttggcggccatggtttccgtgatcggcacagcaaccacccacctgagtcctgaattggcagcgcagagcgtgactcatatcgttcccctatttctcgatgggaacgtaagttttctgccagagaattctttcccaagtagatttcagccttttcaggacggttcaagtggacagcgccgcctcattgccttgctgatggccttcgtgtgcagtctgcctcgcaacgtcgagatccctcagctgaaccagctgatgagggagctcctcgaactcagctgctgtcattcatgtccattttcttccaccgctgccgcgaagtgtttcgctggacttctgaacaaacatcccgctggacagcagttggacgaattcctgcagctcgccgtggataaagtcgaagccggtctcgggagcggcccgtgtcgaagtcaagctttcactcttctgctgtgggtcacaaaagccctggtgctccggtaccatcctctttcctcctgtttgaccgctaggttaatgggcttacttagtgaccccgagctcggcccagccgccgcagacgggttctcactgcttatgtccgattgcacagacgtgctcactagggcaggacatgcagaagtgcgcattatgtttcgtcagcggtttttcaccgataatgtgcctgccctcgtgcagggcttccacgcagctccccaggacgttaaaccgaactacctaaaaggactgagccatgtcttgaacaggctccccaagcctgtcctgctccctgaactgccaacactgctgagtttactcctggaggcactcagctgtcccgattgcgtggtccagctgtcgacactgtcctgtctccaaccacttctgctggaggctccacaagttatgtcactgcacgtggacacactggttactaagtttctaaacctgtcgagcagcccgtcaatggccgttcgtatagccgccctgcagtgcatgcatgccctcacaagactccccacccccgtgctgcttccctacaagcctcaggtgattcgtgcgttggcaaagcctctagacgataagaagcgccttgttcggaaagaggccgtctcggctcgcggcgagtggttcctgctgggaagtccaggaagctag

SEQ ID NO: 25045 - DNA, 1734 bp, synthetic construct
  misc_feature 1..1734: note = Description of Artificial Sequence: Synthetic coding sequence
  source 1..1734: mol_type = other DNA
atgcccaagaccatcagcgtgcgggtgaccaccatggacgccgagctggagtttgccattcaacctaatacaactggcaagcagctatttgaccaggtggtgaaaacaattgggttacgagaagtatggttcttcggccttcagtaccaggacaccaaggggttcagtacatggcttaagctaaacaagaaagttaccgctcaggacgtgaggaaggagtcaccactgttgttcaagttccgcgctaaattctatcccgaagatgtgagcgaagagttgatccaagacattactcagcgtctgttcttcctccaggtcaaggagggtattctcaacgatgatatatactgtccgccggagactgccgtgttgctagcttcctacgctgttcagagcaagtatggcgattttaataaagaagtccataaaagtgggtatcttgctggggataaactattacctcagagagttctggagcagcacaaactgaataaagatcaatgggaggaacggatccaagtgtggcatgaggagcacaggggaatgctgagagaagacgccgtgctggaataccttaaaatcgcccaggatttggaaatgtacggagtgaattacttctcaattaaaaacaaaaaaggctctgaattatggctgggcgtggatgccttgggactgaacatctacgagcaaaatgatagactcaccccaaaaatcggcttcccctggtctgagatccgcaatatctcattcaatgacaaaaaattcgtcataaagcccattgataaaaaagctccagatttcgttttctacgcaccccgtctgcggatcaacaagcggatcctcgccctgtgtatgggaaatcatgagctgtacatgcgcaggagaaagcccgacacgatagaagtgcagcaaatgaaggcccaagctagagaggaaaaacaccagaaacagatggaacgcgccatgctggagaatgagaagaagaaacgcgagatggcagaaaaagagaaagagaaaattgaacgagagaaagaggaactaatggaaagactgaaacaaatcgaggagcaaacaaaaaaagcacagcaggaattagaggaacagaccaggcgggccctggaattggagcaggagcgcaagcgggctcagtccgaggccgaaaagctggcaaaggaacgacaagaagccgaagaagccaaagaggccctgctccaggcaagccgggatcagaagaagacgcaggaacaattggcccttgaaatggcagaactgaccgcgaggatttcacagctggagatggcaagacagaaaaaggagagcgaagccgtcgaatggcagcaaaaggcccagatggtccaagaagatctggaaaagacacgggcagagctgaaaacggcgatgtccacaccccatgtcgctgaacctgccgagaatgaacaggacgaacaggacgagaatggggctgaggctagcgcagatctcagagccgacgccatggccaaggaccggagcgaagaagagcgaacgacggaggccgagaagaatgaacgtgtccaaaagcatttaaaggctctaacctccgagctggcaaacgcacgagatgagtctaagaaaactgccaacgacatgatacacgccgagaacatgcggcttggccgggataagtacaaaacactgcggcaaatcagacagggcaacaccaagcagaggattgacgagttcgagtctatgtag

SEQ ID NO: 25046 - DNA, 717 bp, synthetic construct
  misc_feature 1..717: note = Description of Artificial Sequence: Synthetic coding sequence
  source 1..717: mol_type = other DNA
atgcggttcaagaaccggttccagcggttcatgaaccaccgggcccccgcaaatggtcgatacaaaccaacttgctacgagcacgctgctaactgctatactcatgcctttctcatagtgcccgccattgtgggtagtgcattgttgcaccgcctaagcgatgattgttgggaaaagatcactgcctggatctacgggatgggactctgcgccttgtttatcgtttccacagtgtttcatattgtaagttggaaaaaaagccacctgcgtaccgtggagcattgcttccatatgtgtgatcgcatggtgatctatttttttatagcagccagttatgccccatggctcaacctgagggaactcggacccctggcatctcacatgagatggttcatctggttgatggctgcgggcggtacaatatacgttttcttgtatcacgaaaagtacaaggttgttgagctgttcttttaccttactatgggattctctcccgctctcgtggttacatcaatgaacaatacagatgggctccaagagctggcatgtggggggctcatctattgtttgggcgtggtctttttcaagagcgacggcattattccttttgcgcacgccatttggcacctgttcgttgcaaccgcagcggccgtgcattattacgccatttggaagtacttgtaccgatcacctaccgatttcatgcggcatttgtag

SEQ ID NO: 25047 - DNA, 2127 bp, synthetic construct
  misc_feature 1..2127: note = Description of Artificial Sequence: Synthetic coding sequence
  source 1..2127: mol_type = other DNA
atgagcaccgccgacgccctggacgacgagaacaccttcaagatcctggtggctactgatattcacctcggctttatggagaaggatgcagtgaggggcaacgacaccttcgtcacattggacgagattctccgactggcccaggaaaacgaggtggattttatacttctgggtggggatttgttccacgaaaataaaccctcccggaaaacactgcacacctgcctggaacttcttcgcaaatattgcatgggggacaggcccgtacagtttgaaatcctgtctgatcaatcagtaaattttgggttctccaagtttccgtgggtcaactaccaagatggcaatctgaacatcagtattcctgtgttttctatccatgggaaccacgatgaccccacaggcgccgatgcactttgtgctctcgatatcttgagctgtgcaggtttcgtgaaccatttcgggagatcaatgagcgtggagaaaatagacatcagtccagtcctgctacaaaaggggtctacaaaaatagccctctatggcctcgggtcaatcccagatgaacgactataccggatgttcgtgaacaagaaagtcaccatgttacggccaaaagaagacgaaaactcctggtttaatctgtttgtgatccatcaaaatcgctcaaagcacgggtccaccaatttcattccagaacagtttcttgatgactttatagacctcgtgatttggggtcatgaacacgagtgtaaaatagccccgaccaagaatgaacagcaacttttctatatctcccaaccaggaagcagcgtcgtgacatctttatcaccaggggaggcggtgaagaagcacgttgggctgttgagaattaaaggccgcaaaatgaacatgcacaagattcctctgcatacagtccggcaattttttatggaggatatcgtcctggctaatcaccccgatatatttaatcctgacaacccaaaggtaacacaagcaatccaaagtttctgtctggagaaaatcgaggagatgctggagaatgccgagagggagaggctgggaaacagccaccagcccgagaaaccgcttgtccggttgagggtggactactccgggggattcgaacccttcagcgtgctgcgattctcacaaaaattcgtggatcgtgtcgcgaatcccaaagatattattcacttcttcaggcacagggagcaaaaggagaagacaggcgaggagatcaacttcggtaaactaatcacaaaaccctccgaaggcaccactctgagagtggaagacttggtaaagcagtattttcagacggccgagaaaaatgtgcagctgtcacttctcactgagagagggatgggggaggcagtgcaggagtttgtagacaaagaagaaaaggatgccatcgaggaactggttaagtaccagctggaaaaaactcagaggttcctcaaagagcgccacattgacgcactggaggataaaattgatgaagaagttaggaggttccgggaaactaggcagaaaaataccaatgaagaagacgatgaggtaagagaagcaatgacacgagccagagccctccgatcccagtcagaggagtctgcctccgccttctctgccgacgacctgatgagcatcgacctggctgagcagatggcaaacgactccgatgatagtatttcagcagcgacaaacaagggtcggggcagaggaagaggccggcggggcggcagagggcagaacagcgcctcaagaggaggtagccagcgaggtcgcgctgatacgggactggaaacatcaacccgcagccggaactccaagaccgcggtcagtgcttcaaggaatatgtccatcatcgatgcatttaagtcgactcgccagcaacccagccggaacgtgactacaaaaaactattcggaagtcatcgaggtagatgaaagtgatgtggaagaagatatattcccgacgacatccaagaccgaccaaaggtggagttccacaagtagtagtaagatcatgagccagtcccaggtttcaaaaggtgtagacttcgaatcctccgaggacgatgatgacgacccatttatgaatacttccagcctccgtagaaataggagatag

SEQ ID NO: 25048 - DNA, 2043 bp, synthetic construct
  misc_feature 1..2043: note = Description of Artificial Sequence: Synthetic coding sequence
  source 1..2043: mol_type = other DNA
atgagcaccgccgacgccctggacgacgagaacaccttcaagatcctggtggccaccgacatccatctgggtttcatggaaaaggacgccgtgcgggggaatgacacctttgtcaccctggacgagatcctcagactcgcccaggagaatgaagtggactttatattgttgggcggggacctgtttcatgagaataagccaagtcgcaagaccttacacacatgcctggagctgttgcggaaatattgcatgggcgacagaccggtgcagttcgagatcctgtccgatcagtctgtcaatttcggcttcagcaagtttccatgggtcaattatcaagacggcaacctgaatattagtatcccggtatttagtattcacggaaaccacgacgatccaacaggggccgacgctctttgtgcactggatattctttcttgcgcaggcttcgttaaccacttcggtagaagcatgtcagtagagaaaattgacatttccccggtgctgctgcagaaaggcagtactaaaattgcactctacggcctgggaagcatcccagatgagcggttatatcgcatgttcgtcaataagaaggttaccatgcttagacccaaggaagatgaaaactcttggtttaacctgttcgtgatccatcaaaataggagcaagcacgggagcaccaactttatccctgagcagttcctggatgactttatcgatctggttatttggggacacgaacatgaatgtaaaatcgctcctaccaaaaatgagcaacaactgttttacatttcacagccagggagtagcgtagttactagtctgagtccaggcgaagccgtgaagaaacacgtcggcttgttgcggatcaaagggcggaaaatgaatatgcataaaatccctcttcacacagtgcggcagttcttcatggaggacattgtgctggctaaccacccagacatctttaacccagacaatccaaaggtcactcaggcgatccagtcgttttgtttagagaagatcgaggaaatgctggaaaacgctgaaagggagcgactgggaaacagtcaccaacccgaaaaacccctggtgcgcttgagagtggactatagtggaggattcgaaccattctcagtactgcggttcagccaaaagtttgtcgatcgggtggcaaaccccaaggacatcatccattttttccgccaccgtgagcagaaagagaagacaggagaagagatcaattttgggaagctaatcacaaaaccatcggaaggcaccaccctgcgcgttgaggacctggtcaaacagtatttccaaaccgcagaaaaaaatgtgcagctgtccctcttaaccgagcgcggcatgggggaggccgtccaggaatttgtcgataaagaagaaaaggatgcaattgaggagctggtgaagtaccagttagagaagactcagcgcttcctgaaagaacgacacattgatgcactggaagataagatcgatgaggaggttcgaaggtttcgggagacgagacagaagaatacgaacgaggaagatgatgaagtccgcgaggccatgaccagagcacgtgccctcaggtctcagtccgaagagagcgcaagcgctttcagcgctgacgatcttatgagtatcgacctggccgagcagatggccaatgactccgatgactcgatcagtgccgctactaacaaggggcgaggcaggggaagagggagacgaggaggccgcgggcagaactctgcatccaggggaggttctcagagaggccgcgcattcaaaagcaccagacaacaaccttcccgaaacgtgaccactaaaaactactccgaggtgatcgaagtggacgagagcgacgtcgaggaagacattttccctacgacttccaaaacagaccagcgttggagctccacctctagttccaaaatcatgtctcagtctcaggtgtctaaaggcgtggactttgaatcatccgaagacgacgacgacgatccttttatgaatacgtcctctctgaggcgtaatcgacgctag

SEQ ID NO: 25049 - DNA, 2124 bp, synthetic construct
  misc_feature 1..2124: note = Description of Artificial Sequence: Synthetic coding sequence
  source 1..2124: mol_type = other DNA
atgagcaccgccgacgccctggacgacgagaacaccttcaagatcctggtcgctaccgatatccacctcggtttcatggagaaggacgccgtccgggggaacgatacgtttgtcaccttagacgagatcctgagactggcgcaggagaatgaggttgattttattctactgggcggtgacctgttccatgagaacaagcccagcagaaagacacttcacacgtgcctggaactgttaagaaaatattgcatgggagaccgccctgtgcaattcgagatcttaagtgaccaatcggtgaattttggattctctaagtttccttgggtaaattaccaggacggcaatctgaacatttcaatacctgttttctcaatacatggaaatcacgatgacccaacaggagcagatgcactgtgcgcactcgatatcttgagctgcgctggcttcgtcaaccattttggcagatccatgtctgttgaaaagatcgatattagccccgtattgctgcaaaagggttcaacaaagatcgctctgtatggcctcggctccattccagacgagcgcctgtacaggatgttcgtgaataaaaaagtgaccatgctgcggccaaaggaagatgagaattcctggtttaatctcttcgtaatccaccagaacagatcaaaacacggcagtaccaactttattcccgaacaattcctggatgatttcatcgacctcgttatttggggacacgagcacgaatgtaaaatcgcccctactaaaaacgaacagcagctgttttacatttcccagccaggctcttccgtggtcacctctctatcacctggcgaggccgtcaagaaacacgtgggtctgttgaggattaaggggcgaaagatgaatatgcacaaaattcccctgcatactgtgcgccagtttttcatggaagatatcgtgctcgccaaccacccggatatttttaatcccgataaccctaaggtgacccaggccattcagagcttctgcttggagaagattgaggagatgctcgaaaatgcagaaagggagagactcggaaacagccaccagccagagaaaccgctcgtgaggcttcgcgtggactattcaggagggtttgagccattttctgtgttacgcttttcacagaagttcgtggaccgcgtggctaatcctaaggatatcattcatttctttcggcaccgagaacaaaaagagaagacaggtgaagagattaatttcgggaagctcattactaaaccaagcgagggcaccactctcagggtggaggacttggttaaacaatacttccagaccgccgagaagaatgttcagctgagcctgcttaccgaacggggcatgggcgaggccgtccaggaattcgtcgataaagaagagaaggacgctatcgaagagctcgttaagtatcagttggaaaaaacacaacggtttctgaaggagcgacacatagatgctcttgaagacaaaattgatgaagaagtgcgccggttccgggagaccaggcagaaaaacactaatgaagaagatgatgaggtcagagaagccatgactcgagccagggccttaagatctcagtccgaggaatccgccagtgcattctctgcggatgaccttatgtctatagatctcgctgagcaaatggctaacgattccgatgatagtatcagcgctgccactaacaaggggcgtggacgaggccgcggacgccgcgggggcaggggacaaaattcggcctccagggggggctcccagagagggcgcgacaccggactagagacatccactagatctcgcaattctaaaactgctgttagcgcctcccggaatatgtctatcatagatgcatttaagagtactcggcaacagccctccagaaatgtgactaccaagaactactccgaggttattgaagtggatgaatccgatgtggaagaggacattttccccaccacatcaaaaaccgatcagagatggtctagcactagttcctcaaagattatgagtcagtctcaggtgtcaaagggcgtagatttcgagagcagtgaagatgatgacgacgatcccttcatgaatacatccagcttgagaagaaatcggcgttag

SEQ ID NO: 25050 - DNA, 2136 bp, synthetic construct
  misc_feature 1..2136: note = Description of Artificial Sequence: Synthetic coding sequence
  source 1..2136: mol_type = other DNA
atgaaccggaacatcagccaccagaagggcgacgacgagaacaccttcaaaatactagtggctaccgatatccacctcgggttcatggagaaggatgccgtcaggggcaacgatacattcgtgacactagatgaaattctgcgcctggctcaggagaatgaggtggactttatcctgctgggaggggatctctttcatgagaacaagcctagtagaaagaccttgcacacttgtctcgagctgctgcgcaaatactgcatgggagatcggccagtacagtttgagattctgtccgaccagagcgttaattttggattctctaaatttccttgggtcaactaccaggatgggaacctgaatatttctatacctgttttttcaatccacggaaaccacgatgaccccaccggcgcggatgctttgtgtgcactggacattctctcttgtgccggatttgtgaaccacttcggccgcagcatgtctgtggagaagatcgatatctcccctgtgcttttacagaagggcagcacaaagattgccctgtacggtctgggaagcatacctgacgaacgtctctatcgcatgttcgtgaataagaaagtcacaatgctgcgccctaaggaggacgaaaatagctggttcaatctttttgtgatccaccaaaatcgctcaaagcatggatcaaccaactttatccccgagcagttcctggatgatttcatcgatctggttatatggggccatgagcatgagtgcaaaattgctcccactaaaaacgagcagcagctgttttatatcagccagcctggctcatccgtggtgactagcttaagccccggcgaagccgtgaagaaacacgtcggtctgctcagaatcaaaggccggaaaatgaacatgcataaaatccccttgcatacggtcaggcagtttttcatggaggatattgtattggcaaaccacccagacatattcaacccagacaatccaaaagtcacccaggcaatccagtctttttgcctagagaagatcgaggagatgctcgagaacgccgaacgcgagagactgggaaactcacaccagcctgaaaagcctctcgtgagactgcgggtggattatagcggcggatttgagcctttttcagttttaaggttttcacagaagtttgtggatcgggtagctaatccaaaagatatcattcacttttttaggcatagggaacaaaaagaaaagactggagaggagatcaacttcggaaagctgattacaaaaccgagcgaaggcacgactctacgggtagaagatctggtgaaacagtatttccagactgccgaaaaaaatgtacagctctctctgctgacagagcgcggcatgggagaggctgtgcaagagttcgtcgacaaggaggaaaaagatgccatagaggaattggtgaagtaccagttggaaaagacccagaggttcctgaaagaacgccatatcgacgctctggaagacaagattgacgaggaagtccgaaggtttagagagaccagacagaaaaatacaaatgaggaggacgatgaagtgcgagaggccatgacacgcgcacgggctttacgcagtcagtccgaagagtcagcatcagcctttagcgccgacgacttaatgtcaatcgatctggcagagcagatggctaacgattccgatgactcgatttccgccgcgacgaacaagggtcgcggtagaggccgaggccggaggggcggcaggggccagaactcggccagccggggtggaagccagcgtggacgcgcagatactggcctggagacgagcactaggtctcgcaacagcaagactgcagtttctgcaagccgaaacatgtccatcatcgacgcctttaaatctacccgacagcagcctagccgtaacgtcacaaccaagaactactccgaggtaatagaagtcgatgaatctgacgtggaggaggacatcttccctacaacatccaaaacagaccaaagatggagctccacgtcttcctccaaaattatgtcccaatctcaggtgtctaaaggcgtcgacttcgagagttccgaagacgacgacgatgatccgtttatgaacacctcaagtctccggcgcaacaggcggtag

SEQ ID NO: 25051 - DNA, 384 bp, synthetic construct
  misc_feature 1..384: note = Description of Artificial Sequence: Synthetic coding sequence
  source 1..384: mol_type = other DNA
atgagcaccgccgacgccctggacgacgagaacaccttcaagatccttgtcgcgactgacatccaccttggattcatggagaaggatgccgtgcgcggcaacgatactttcgttactctcgacgaaattctccgactggcacaggaaaatgaggtcgattttatacttttgggaggagacctcttccacgaaaataaacctagccgcaaaaccctccacacatgcttggaactgttacggaagtactgcatgggagaccgaccggtgcagttcgagatcttgagcgaccagtccgtcaactttggcttctcaaagtttccttgggtgaactaccaggatggcaatctgaacatcagcatcccagtcttctcgatccacggctag

SEQ ID NO: 25052 - DNA, 336 bp, synthetic construct
  misc_feature 1..336: note = Description of Artificial Sequence: Synthetic coding sequence
  source 1..336: mol_type = other DNA
atgagcaccgccgacgccctggacgacgagaacaccttcaagatcctcgtagcaactgatattcatcttggctttatggaaaaggatgccgtgcgggggaatgacacattcgtcacccttgacgaaatcctccgcctggcccaagagaatgaggtagattttattctgctgggaggagatctgttccacgaaaacaaaccttcccggaaaaccctgcacacttgtttagaattattgcgaaagtattgtatgggtgatcggcccgttcagttcgagatactcagcgatcagtctgttaattttgggttctccaaattcccctgggtgaactattag

SEQ ID NO: 25053 - DNA, 666 bp, synthetic construct
  misc_feature 1..666: note = Description of Artificial Sequence: Synthetic coding sequence
  source 1..666: mol_type = other DNA
atgagcaccgccgacgccctggacgacgagaacaccttcaagatcctggtcgcaacggatatccacctcggcttcatggagaaagacgcagtgcgcgggaacgataccttcgttacactggacgaaattttgcggttggcccaggaaaatgaggttgacttcatactgcttggcggggatctattccacgagaataagccgtcacgtaagaccctgcatacatgccttgaactgctaagaaagtactgtatgggagataggcccgtgcaatttgaaattctctcggatcagtccgtgaactttggcttttcaaaatttccatgggtaaattaccaggacggcaatctcaatatctccatcccagtgttcagtattcatggcaatcacgatgaccccaccggcgcagatgccctgtgtgcccttgacatcctttcctgcgccggttttgtgaatcattttggcaggtctatgagcgtggagaagatagacataagcccagtgcttcttcagaagggaagcacgaaaatcgctctttacggtctgggctccataccggatgagcgtctatatcggatgtttgtgaacaagaaagttactatgctgcgcccgaaagaagacgagaattcctggttcaaccttttcgttatccatcagaatagggtctag

SEQ ID NO: 25054 - DNA, 822 bp, synthetic construct
  misc_feature 1..822: note = Description of Artificial Sequence: Synthetic coding sequence
  source 1..822: mol_type = other DNA
atgacccccggcacccagagccccttcttcctgctgctgctgctgacggttctaactgtcgtgaccggaagtgggcacgccagctctaccccagggggcgagaaggagacttcggctactcagagatctagtgtgccatcctccaccgaaaagaatgccctgtccaccggcgttagcttcttttttctcagtttccatatatctaacctgcagtttaattcgtccctggaagacccctctaccgactattaccaggaactgcagcgggatatctccgagatgttcctgcaaatttataagcagggggggttcctgggactgtctaacataaaatttcggcccgggagcgttgttgtgcagttgacactcgccttccgtgaggggacgatcaatgtgcacgacgtggaaacccagttcaatcagtacaaaactgaggccgcctcaagatacaatcttacgattagtgatgtgtcagtttcagatgtcccctttcctttctcggcgcagtctggtgctggagtccccgggtggggcattgccctcctggtgctggtgtgcgtcctggtggcactcgcaatagtttatcttatcgcgctagccgtttgccagtgccgaagaaaaaattacggtcagcttgacatttttcccgcaagagatacatatcatcctatgagcgaatatccgacctaccatacacacggaagatacgtgccccctagctccaccgacaggtcaccgtacgaaaaggtttcggcgggcaacgggggcagctcactcagttacaccaatccggccgtagctgcgaccagcgcaaatctatag

SEQ ID NO: 25055 - DNA, 675 bp, synthetic construct
  misc_feature 1..675: note = Description of Artificial Sequence: Synthetic coding sequence
  source 1..675: mol_type = other DNA
atgacccccggcacccagagccccttcttcctgctgctgctgctgaccgtgctgaccgccaccaccgccccgaaacccgctacagtggtgaccggctccgggcatgccagctccacccctgggggcgagaaagaaacaagtgccacacagcgctcttccgttccaagttctaccgaaaagaacgccttccgccctggaagcgtggtagtgcaattgactctggcgtttagggaggggaccattaatgtgcacgatgttgagacccagttcaatcagtataagacggaagccgcttctaggtacaacttgacaatatccgacgtatccgtgtctgatgtgccctttcctttcagtgcccagagtggtgccggggtcccgggctggggaatcgccttgctggtgctagtctgcgtgttggtggcactggcaatagtctatctgattgccttggctgtctgtcaatgtcggcggaagaattatggccagctggatatattcccagccagagacacatatcatccgatgtccgagtaccctacataccacacacatggccgctacgtgccccctagctccacggatcgtagtccttatgaaaaggtgtcggctggaaacggcggcagctctctgagctacacaaaccctgccgtggccgccacaagtgcaaatctttag

SEQ ID NO: 25056 - DNA, 501 bp, synthetic construct
  misc_feature 1..501: note = Description of Artificial Sequence: Synthetic coding sequence
  source 1..501: mol_type = other DNA
atgacccccggcacccagagccccttcttcctgctgctgctgctgaccgttctaacagcaaccacagcccccaaacctgccacggtcgtgaccggctccggtcacgctagtagcactcccggcggcgagaaggaaactagcgccactcagcggtcttcggtgccaagcagcactgagaagaacgcttccggggcgggagtgcccggttggggaatcgccctgttggtgctagtgtgtgtccttgtcgctttggccattgtgtacctgatcgcactcgcggtgtgccaatgtaggagaaaaaactacggccagctggatatcttccctgcgagagacacctatcatcctatgtcggagtacccaacctaccacactcacgggagatatgttcctccttcctcgaccgatcggtctccttacgaaaaggtctcagccggaaacggcgggtcctcccttagctataccaatcccgccgttgcagccacaagcgccaatttatag

SEQ ID NO: 25057 - DNA, 612 bp, synthetic construct
  misc_feature 1..612: note = Description of Artificial Sequence: Synthetic coding sequence
  source 1..612: mol_type = other DNA
atgacccccggcacccagagccccttcttcctgctgctgctgctgacagtgctgactgtagtcaccggctcaggacacgcttcctctacacccggcggcgaaaaagagacctccgctacccagcggtcctccgtgccgagctccactgaaaagaacgccattccagcccccacaacaaccaagtcttgccgcgaaacttttcttaaatgcttctgcaggtttattaacaagggcgtattttgggctagtccaatcctgtcttcagtcagtgacgtaccttttcctttcagcgctcaatccggcgccggtgtaccagggtggggtatcgcactgctcgtgctggtttgcgtactggtcgccctcgcaatcgtgtacttgatagcactggctgtctgccaatgtaggagaaagaactatggccaacttgatatcttccccgcacgggacacctaccatcctatgtcggaatatcctacctaccacacacacggccggtatgtgccaccatcatctacagatcgctctccctatgagaaagtgagtgcaggaaacggtggctcttcattgagctacacaaacccggcggtcgcagctacatctgcaaacttatag

SEQ ID NO: 25058 - DNA, 507 bp, synthetic construct
  misc_feature 1..507: note = Description of Artificial Sequence: Synthetic coding sequence
  source 1..507: mol_type = other DNA
atgacccccggcacccagagccccttcttcctgctgctgctgctgacagtgctcactgtcgtgactggcagcggacatgcgagttcaactcctggaggcgaaaaggagacaagcgctacacagagatcctctgtccctagcagtacagagaaaaatgcactgagtacaggagtgtcttttttttttttgtctttccacatcagtaaccttcagttcaatagcagcctcgaagatccatctacagactactatcaagaactgcagagggatatctccgaaatggccgtgtgtcaatgcaggaggaagaactatggccagctggacatattcccagctagggacacctatcaccccatgtccgaatatcctacttaccatacccacggaaggtatgtaccaccatcaagtacagaccgttctccttacgagaaggttagcgccgggaacggagggtcatcactctcatacaccaaccctgcagtagcagcaaccagcgccaatctctag

SEQ ID NO: 25059 - DNA, 768 bp, synthetic construct
  misc_feature 1..768: note = Description of Artificial Sequence: Synthetic coding sequence
  source 1..768: mol_type = other DNA
atgacccccggcacccagagccccttcttcctgctgctgctgctgacagtactgaccgtagtgactgggtcggggcatgcatcaagtacccccgggggagaaaaggaaacgagtgccactcagcggtcatccgtgccaagctctaccgagaagaatgcctttaacagcagcctggaggacccatccactgattattatcaagaattacagagggacatctccgagatgtttctccaaatatacaagcagggcggtttcctcggactgtcaaatattaaattccgtcctgggtctgtcgtggtgcagttgactcttgccttccgagaagggacgattaatgtgcacgatgtggaaacccaattcaaccaatataaaactgaggccgcttctagatataatctcactatctccgatgtgtctgtgagtgatgtgcccttccctttctcagcacagtcgggcgctggagtcccaggatgggggattgccctgctcgtgctggtgtgcgtgttggtcgccctggctattgtgtacctcatcgccttagccgtatgccagtgtcgtcggaagaactacggacagctggatatttttccagctagagatacataccacccgatgagtgaatatcctacctaccatacccacggtcggtatgttccacccagctcaactgatcggtctccttacgaaaaggtgtcagcgggaaacgggggaagttctctgagctacaccaatcctgctgtagcggccacaagcgctaacttgtag

SEQ ID NO: 25060 - DNA, 795 bp, synthetic construct
  misc_feature 1..795: note = Description of Artificial Sequence: Synthetic coding sequence
  source 1..795: mol_type = other DNA
atgacccccggcacccagagccccttcttcctgctgctgctgctgaccgtgctgactgcaaccactgcgcctaaacctgcgactgtggtgacaggaagtgggcacgcctccagtactccaggaggggaaaaggaaaccagcgccacccaaagatcctcagttccatcgagtactgagaaaaatgctttcaattccagcctagaagacccttccactgattattaccaggagctgcagagagacatcagcgaaatgttcctccagatttataagcagggcggctttctaggcctctcaaatataaagtttaggcctggtagcgttgtggtgcagttgacgcttgcctttagagagggtactatcaatgtgcatgacgtggagacacagtttaaccaatacaagactgaagccgcctctcgctataacctgactatcagtgatgtgtcggtttccgatgtgcctttccctttcagtgctcagagtggggcgggggtaccaggctggggcatcgccctgctcgttctcgtctgcgttctcgttgcacttgcaatagtgtatctgatagcactggccgtttgccagtgccgaaggaagaattatggacagctggatatattccctgctcgcgacacgtaccacccgatgtccgagtatcccacatatcacacccatggccgatacgtgcccccgagctcaactgatagatccccctacgagaaagtatctgccgggaacggcggctcgtcactgtcctacactaatcccgccgtggcggcgactagtgcgaacctgtag

SEQ ID NO: 25061 - DNA, 597 bp, synthetic construct
  misc_feature 1..597: note = Description of Artificial Sequence: Synthetic coding sequence
  source 1..597: mol_type = other DNA
atgacccccggcacccagagccccttcttcctgctgctgctgctgactgtcctgactgtagtcactgggagtggccacgccagctccacacctggcggagagaaagaaacgtcagcaacacaaagaagctccgtgcccagctcaaccgagaagaacgcactgtcaactggagtgtcattttttttcctctcttttcacatcagcaatctgcagtttaattcttccttggaagatcccagtactgactactaccaggaattgcagagggatatctctgagatgttccttcagatctacaaacagggcggctttcttggactgtcaaatataaagttcaggcctggctccgttgtggtccagctcactcttgcatttagagaagggactatcaacgtgcatgacgtcgagacacagtttaaccagtacaaaactgaagcagccagtagatataacctaacaatcagcgacgtgagtggctgtttgagcgtccctccaaaggaactgcgagccgctgggcacctcagttcaccaggctatctcccatcctatgagagggtcccgcacctgccacacccctgggccctatgtgccccttag

SEQ ID NO: 25062 - DNA, 1428 bp, synthetic construct
  misc_feature 1..1428: note = Description of Artificial Sequence: Synthetic coding sequence
  source 1..1428: mol_type = other DNA
atgacccccggcacccagagccccttcttcctgctgctgctgctgactgttttgacggtggttacgggttctgggcacgcctcttctacgcccggaggtgagaaggaaacgtccgccacccaaagatcctccgttccctcgtccactgagaagaatgcagtgagcatgacaagttccgtgctctcgtctcactctcccgggagtggcagtagtaccactcaaggacaggatgtcacgctcgcacccgccaccgagccagccagcggtagtgccgccacctggggccaggatgttacctctgtgcccgttacacggccagccctcgggagcacgacacctcccgcccatgacgtcacgtccgcccccgacaataagcctgcgccgggctcaacagcccctcccgcacacggagtgaccagtgctcccgataccaggcctgcgcctggttctacagccccgccagcccacggagtaacgagcgcgcctgataaccgtcccgccctcggatctaccgccccccccgttcataacgttacatcggcgagcggtagcgcctctggcagcgcctctacccttgtgcacaacgggacatccgcccgcgccaccaccacacctgcgagcaaatcgaccccgttctctattcctagccatcattccgacacaccgaccacactggctagccattccactaaaacagacgcctcttcgactcatcattccacagttcctccgctgacctctagtaaccacagtacctccccgcagctatccacaggggtttctttctttttcctcagttttcatatcagtaatctgcagtttaactcgtctctggaggatcctagtacagattattatcaagaactccagcgtgatatctctgagatgttcctacagatatataagcaaggcgggtttcttggcctgtccaacattaagtttcgtccgggctctgtcgttgttcagctgacccttgccttcagggaggggaccattaatgttcatgatgtcgaaacccagttcaatcagtataagaccgaagccgctagccggtataacctgacaatctctgatgtgtcagtgagcgatgtccctttccctttttcagcccagagtggtgcgggggtgccaggatggggtatcgccctcctggtcctagtttgtgtgctagtggccctggcgatcgtctacctgattgccctagctgtttgtcagtgccgccgtaagaattacgggcagctggatatctttccagcgcgtgatacctaccacccgatgagcgagtatccaacatatcatacccatggccgctatgttccccccagtagcacagataggtccccatatgaaaaagtgagtgcgggcaacggagggagtagcctgagctataccaatccagcagtggctgctacttctgcgaacctatag

SEQ ID NO: 25063 - DNA, 480 bp, synthetic construct
  misc_feature 1..480: note = Description of Artificial Sequence: Synthetic coding sequence
  source 1..480: mol_type = other DNA
atgacccccggcacccagagccccttcttcctgctgctgctgctgacagtgctgacagctaccaccgccccaaagcctgctactgtcgtcacaggctccgggcacgcctcatctacccctggcggagaaaaggaaacaagcgctactcaacggagctctgtgccatcttcaacagaaaaaaatgcattcaactctagcttagaggatccttccacggattactaccaggagctccagcgcgacatcagcgagatggccgtttgtcagtgtaggcgtaagaattacgggcagctcgatatcttcccagccagggacacctaccacccgatgtcagaatatcccacttaccatacccacggccgctatgtaccccccagcagcaccgatcgctccccctatgagaaagtgagtgctggcaacggcggatcatcccttagctacacaaatcctgcggtcgccgccactagtgccaacctgtag

SEQ ID NO: 25064 - DNA, 693 bp, synthetic construct
  misc_feature 1..693: note = Description of Artificial Sequence: Synthetic coding sequence
  source 1..693: mol_type = other DNA
atgacccccggcacccagagccccttcttcctgctgctgctgctgactgtgttaacggtcgtgaccggatcaggacacgcttcatctacccccggaggagaaaaagaaacctctgccacgcagcgcagtagcgtgccttcctcaaccgagaaaaatgcaattcccgctcctactactaccaaatcttgtcgtgagacattcctaaagtggccgggctccgtcgtagtgcaactgacactcgcattccgggaaggcaccattaatgtacacgatgtcgaaacccagttcaaccaatataaaaccgaggctgcctctcgttacaacctcacaatctcggacgtttctgtatcagatgtgccattcccgttctctgcccagtctggagctggtgtgcccgggtggggaatcgctctgttggtcctagtgtgcgtactggttgcgctcgccattgtctacctgatcgccctagccgtctgccagtgtagaaggaagaactatggccaactggatatttttcccgctcgagacacgtatcacccaatgagcgagtacccaacataccacacgcacggtaggtacgtgcctcccagtagcaccgatcgatcgccctacgagaaggtgagcgccgggaacggcggctcatccctatcttacacaaatcctgcagtggccgcaacgtcagctaacctatag

SEQ ID NO: 25065 - DNA, 1686 bp, synthetic construct
  misc_feature 1..1686: note = Description of Artificial Sequence: Synthetic coding sequence
  source 1..1686: mol_type = other DNA
atgacccccggcacccagagccccttcttcctgctgctgctgctgacagtgctgaccgtggtgacgggcagtggtcacgcctctagcacccccggtggcgagaaagaaacctccgcaacacagcggtctagtgtgccttcctctaccgaaaagaacgccgtaagtatgacaagctccgtccttagctctcactcaccaggcagtggctcgtcaacgactcaaggccaggatgtgacactggccccggccacagaaccagcgtctggaagcgcggccacatgggggcaagatgtaacctccgtcccagttacccgaccagctttaggatcaaccactccccccgcacatgacgttacatcagctccagatacacggccggcacctggctctacagcgccgccggctcatggcgtgacctcggctcccgataccaggcccgcccccgggagcacagccccacccgcccacggagtaacatcagcccccgatacgaggccagcacccggctctacggcgccccccgctcatggagtcacgtcagcccccgacaccagaccagccccgggatccacagctccccctgcccacggggtgacttccgcgcccgacacaaggagagcacccgggagtacccctgcgccaggttccacagcgcctcccgcccacggagtgacctcggctcctgacacccggcccgcccctggctcaaccgcacctcctgctcacggcgtcaccagcgccccagacaatcgtcctgcgttgggcagtacagctcctcccgtgcataacgttacatcagcctcaggtagcgcttcaggatccgctagtaccctggtacacaacgggacatcagcccgcgcgactaccacacccgcatctaagtctaccccattttctattccctcccatcactcggacacaccaaccactctggccagccactcgacaaagaccgatgctagcagtacacaccactccaccgtcccaccactgacaagctcaaatcattccacctccccacagttgagcactggagtttcattcttttttctgagtttccacatcagcaatctgcagttcaacagtagtctggaagaccccagtaccgactactatcaagaacttcagcgggatatctctgagatgtttctgcagatttacaaacagggaggttttcttgggctgagcaacatcaaatttagacctggaagcgttgtggtgcaactgacattagcatttcgcgaggggactatcaatgtgcatgacgtcgagacgcagtttaaccagtataaaaccgaggctgccagcaggtacaatctgaccatctcagatgtttccgtatccgatgtgccttttccgttttccgcccagagtggcgccggcgttccagggtgggggatcgccctgctggtcctggtatgtgtcttggtcgccttagcaattgtatacttaatcgcgctggccgtctgtcagtgccgtcggaagaactatggacagctggacatctttccagcccgcgatacatatcatcccatgagtgaatacccgacctatcacacccacggaaggtacgtgccaccctcctccaccgatcgctctccctatgaaaaggtgagcgcaggtaacggggggtcttcactgtcatatactaatcccgccgtggccgcaacttctgccaacctgtag

SEQ ID NO: 25066 - DNA, 690 bp, synthetic construct
  misc_feature 1..690: note = Description of Artificial Sequence: Synthetic coding sequence
  source 1..690: mol_type = other DNA
atgacccccggcacccagagccccttcttcctgctgctgctgctgaccgttctgacggtcgttaccggatctggccacgcctcttcaactcctggcggggagaaggagacttcagccacccagcggagctctgtaccaagttctacggagaaaaatgccatttataaacaaggagggttcttggggttatccaacattaagtttcgaccgggctctgtcgtggttcagttgactctggctttccgggagggaacaataaacgtgcatgacgtcgagacccagtttaatcaatataaaaccgaagccgcctctaggtacaatctgacaatctcggacgtgtcggttagcgacgtcccgtttccattctctgctcagtctggggctggagtgccagggtggggcatcgcactgctcgtccttgtgtgtgtgcttgtggccttggccatagtctatttaatcgccctagcagtgtgccaatgcaggcgaaagaactacgggcagctcgacatctttcccgcacgagatacataccacccaatgagcgaataccccacgtaccatacacacggaaggtatgtgcccccgtctagtactgatcggagtccttacgagaaggtgagtgcggggaacggtgggtcatcactctcctacacaaaccccgccgtggctgcgacatccgctaatctgtag

SEQ ID NO: 25067 - DNA, 780 bp, synthetic construct
  misc_feature 1..780: note = Description of Artificial Sequence: Synthetic coding sequence
  source 1..780: mol_type = other DNA
atgacccccggcacccagagccccttcttcctgctgctgctgctgaccgtcctcactgctaccaccgctcccaaacccgctaccgtcgtcacgggaagtggccacgcttcctctacgcctgggggagagaaagaaacaagcgccacccagagatccagtgtaccaagctctactgagaagaacgcttttaacagctccctcgaggatccgtctacagactactaccaggagctgcagagagacatcagcgagatgtttttacaaatctacaaacagggggggttccttggacttagtaatattaagttcaggcccggctccgtagtcgtacagcttacccttgccttccgcgaaggcacaattaatgtacacgacgttgagacccagtttaatcaatataaaacagaagcagccagtaggtacaatctcacaatcagcgacgtcagtgtgtcggacgtcccattcccgttttcagcgcagagcggcgcaggtgtgcctgggtggggcatcgctctgcttgtccttgtctgtgtgcttgttgctcttgcaattgtgtaccttatcgccctagccgtctgtcagtgtagaaggaagaattacgggcagctggacatttttccagctcgcgatacgtatcaccccatgtcagagtaccccacttaccatactcacggtaggtatgtgcccccgtcctctactgacagatccccctacgaaaagcgccagaatggttggtctactatgcctcggggcgccctccccgaagagagccagggctag

SEQ ID NO: 25068 - DNA, 1833 bp, synthetic construct
  misc_feature 1..1833: note = Description of Artificial Sequence: Synthetic coding sequence
  source 1..1833: mol_type = other DNA
atgggcctgaaggccgcccagaagaccctgttccccctgcggagcattgacgatgtggttaggttgttcgctgcagagcttgggagagaggagccagacctggtattactgtctcttgtgttaggatttgtggagcactttctggccgtgaatagggtgatccccactaatgttccagaactcacatttcagccctcgcccgcccctgatcctcccggcggacttacttatttcccggtcgcagacttgtctataatagcagcactctacgcaagattcaccgcccagatccggggagcagttgacttaagtctgtatcctagggagggtggcgtgtcaagccgggaactggtgaagaaagtcagtgacgtcatttggaattctctgagtcggagttactttaaggatagagcccacattcaaagcctgttctcattcatcacaggcacaaaattggatagcagcggggtggcattcgcggtggtaggcgcctgtcaagcgctcggtttacgggacgtgcacctcgctttaagcgaggaccatgcttgggtggtgttcggaccaaacggcgagcagactgcagaagtgacatggcacggtaaaggaaacgaggaccgccgaggtcagactgttaacgccggtgtggccgagcgctcatggttatatttgaagggctcctacatgcgctgcgaccggaaaatggaggtggccttcatggtttgtgccattaatccctctatcgacttgcatactgactcgctcgagctactgcagttacagcagaaactgttgtggttactttacgatctaggccacctggaacgatatccgatggccctgggaaacctggccgacctagaagagcttgagcccactccaggccgaccagaccccctaacgctttatcacaaagggatcgcctccgctaagacgtattatagagacgaacacatctatccatacatgtacctggccggttatcactgccggaaccgtaatgttagggaagcactacaggcctgggccgacaccgcaacagttatccaggactataattattgtcgagaggatgaagaaatctacaaagagtttttcgaggtggccaatgacgtaatccctaatctgctgaaagaagccgccagcttacttgaggcgggagaggagagacctggcgagcaatctcagggcacacagtcccaaggaagcgctttgcaggatccagagtgctttgcccatctgcttcgcttttacgatggcatttgtaagtgggaggaaggcagccctactcctgtacttcacgttggctgggccaccttcctggtgcaaagtctcggacggttcgaggggcaagtccgtcaaaaggttcgaattgtctctcgggaggccgaagcagcagaggctgaagaaccatggggggaagaggcccgcgagggtcgcagacgcggcccccggcgagagagcaagcctgaagaaccaccaccgcctaaaaaaccagcactcgacaagggcctggggacaggtcagggggcagtcagtggaccccctcgaaaaccgccaggaaccgtggccggaacagcgcgaggacctgaggggggctccacagcacaggttcctgccccaacagctagcccccctccggaggggcccgtattgacgttccagtcggaaaaaatgaagggaatgaaagaactcctcgtcgcgaccaaaattaactccagcgctataaagctccagttaacagctcagtctcaggtgcagatgaaaaaacagaaagtaagcactccgagcgactacacattgagcttcttaaaaaggcagcgaaaaggactttag

SEQ ID NO: 25069 - DNA, 1833 bp, synthetic construct
  misc_feature 1..1833: note = Description of Artificial Sequence: Synthetic coding sequence
  source 1..1833: mol_type = other DNA
atgggcctgaaggccgcccagaagaccctgttccccctgcggagcatcgatgatgtagtgaggttgttcgccgcggaactcggtcgtgaggagccagatctcgttctcctgagtcttgtattaggcttcgttgaacactttctggccgtcaatcgagtaattcctacgaatgttcccgagctgacctttcagccgtccccagcacctgatccccccggcggcctcacctattttcctgtcgcggatctgtccatcattgctgctctatatgcgcggttcactgcccagatccgcggcgctgtggacctgtcactgtacccgagggaggggggcgttagttctcgggagctagtgaagaaggtgtcagacgtgatttggaatagcctgagccgatcatacttcaaagatcgagctcacatccagtcattgttcagcttcatcactggcactaaattagactcttcgggtgtggcattcgccgtcgtaggggcctgccaggccctgggtcttcgcgatgtccatctcgctctctcagaggatcacgcatgggtcgtcttcggaccaaacggggaacaaactgctgaagtcacatggcacggcaaaggtaacgaagaccgcaggggtcaaaccgttaacgccggagtggctgaaagatcttggctgtatctgaagggatcttatatgcggtgtgaccgtaaaatggaagtggcttttatggtgtgtgctatcaacccttccatcgacttacatacagatagtctggaattattgcagctgcaacaaaagttattgtggctcctgtacgacttaggtcatctcgagcgctatcccatggcattgggtaaccttgcggatcttgaagagctcgaacctacaccgggccgacccgatccgctgacattgtaccataaaggcatcgcttcggcaaagacctattacagagacgagcacatctacccctatatgtatctcgcgggctaccattgtagaaaccgaaatgtcagagaggctctccaggcgtgggctgatacagcaactgtgatccaggattataactactgccgagaggatgaagaaatctacaaggaatttttcgaggtggctaacgacgttattcccaacctgctcaaggaagcagcctcacttctcgaagccggggaggaacgcccaggagagcagtcccagggcacgcagtcccagggtagcgcactccaggacccagaatgcttcgcccatctgctacggttctacgatgggatatgtaaatgggaagagggcagtcccacgcctgtgctgcacgttgggtgggccacatttcttgtgcagagtcttggcagatttgagggacaagtgagacagaaggtgcgtattgtcagtagagaggccgaggccgccgaggctgaggaaccatggggcgaagaagcaagggaggggcgtcgcaggggccccagacgtgagtccaagcccgaggaaccgccaccgcctaaaaaaccagccctggacaagggccttggaaccggccagggggcggtttccggtccaccccgcaagcctccaggcactgtggcaggtaccgccaggggcccagagggaggaagtactgcgcaggtgccggctcctactgccagccctcctcctgaagggccggtgctgactttccagtcagaaaaaatgaagggaatgaaagagctgctagtcgccaccaagattaatagttccgcaatcaaactgcagcttaccgcgcaatctcaggtgcagatgaagaagcagaaggtctcaacccccagtgattacacactgagcttcctcaagcggcagcgcaaggggctttag

SEQ ID NO: 25070 - DNA, 1848 bp, synthetic construct
  misc_feature 1..1848: note = Description of Artificial Sequence: Synthetic coding sequence
  source 1..1848: mol_type = other DNA
atgggcctgaaggccgcccagaagaccctgttccccctgcggagcattgacgacgtcgtccgcctgttcgccgccgaattgggaagggaggaaccagacctggtgctgctgtctttggtgctcggatttgttgagcactttctcgcagtaaacagagttatcccaaccaatgtccccgagctgacgttccaaccatcaccagccccagatcctcctggagggttaacttacttccctgtcgctgacctgtctataatagccgccctctacgctagattcacagcgcagatcaggggagcagttgatctgagtttgtaccctcgagaaggtggagtatcatctcgggaattagtgaagaaggttagcgatgtgatctggaacagcttgtcgcggtcctatttcaaggaccgagcgcatatccagtcacttttcagtttcatcacaggctggtctcccgtcggcaccaagttggatagctctggagtagccttcgcagtagtcggtgcatgtcaggctttaggtctcagagatgtacatctagcgctttcagaagatcatgcctgggtcgtgtttggccctaacggagaacagaccgctgaagtaacctggcatggcaagggtaatgaagaccgacgtggccaaaccgtgaacgccggggtcgcagaaagaagctggctctatctaaaggggagttatatgcggtgtgaccgcaagatggaggtggcttttatggtctgcgccatcaaccctagtattgatctgcatacagactcccttgaactgttgcaactccagcaaaaactcctttggcttctgtatgatctgggacacctcgaacggtatcccatggcccttggaaacctggccgacctggaggaactggaaccaacccctggccggccggaccctcttactctctatcataaagggatagcttccgcaaaaacgtattatcgcgacgaacatatctacccatacatgtacctcgctggttaccactgtcgcaataggaacgtgagagaggctcttcaggcctgggccgacacagctaccgttatccaggactataactattgtcgtgaggatgaggagatttacaaagagttctttgaagttgccaatgatgtcattccaaatctccttaaggaggccgcctccctactggaggccggtgaagaacgacccggagaacagtcgcagggcactcagtcacaaggctctgcacttcaagaccccgagtgctttgcccacctgctgagattctacgacgggatatgcaaatgggaggaggggtcgccaactcctgtactgcatgtgggttgggcaaccttcctagtgcagtcacttgggcgctttgagggacaagtccgccagaaggtccgtattgtctcacgggaagcagaagcagccgaggctgaggaaccatggggcgaggaggctagagagggaagaaggcgaggccctcggcgggaatcgaaacccgaagagcccccgccccccaagaagcctgctcttgataagggtctagggaccgggcagggcgccgtgtctgggccccctcgcaagcctccaggcaccgttgccggcaccgccagaggtcctgaaggaggatctactgcacaagttcctgccccgacagcctctcctcctcctgagggtcccgtgcttacattccagagcgagaagatgaagggcatgaaagaactactggtggccacaaaaatcaacagttccgccattaagctgcagctgacggcccagtcccaggtgcagatgaaaaaacaaaaagtgagtaccccctcggattatactctgtccttcctcaagcggcagagaaaagggctttag

SEQ ID NO: 25071 - DNA, 1848 bp, synthetic construct
  misc_feature 1..1848: note = Description of Artificial Sequence: Synthetic coding sequence
  source 1..1848: mol_type = other DNA
atgggcctgaaggccgcccagaagaccctgttccccctgcggagcatcgacgatgtcgtgaggttattcgctgcagaactcggccgggaagaaccggatttagtgctgctctccctcgtgctcggcttcgttgaacatttcctagctgtaaaccgcgtcattccaacaaatgtgccagaactaaccttccagccctctcctgccccggatccgcctggaggtctgacctattttccggtggctgatttgtccataatagcggcactttatgctcggtttacggcccagatccgcggagccgtggacctgtctttatatccgcgggaaggaggggtatcatcaagggagcttgttaagaaggtgagcgacgttatatggaattccttgtccagaagttacttcaaagatcgggcccacatccagagtctgtttagctttattactggatggtcaccggttggaacaaaactggactcttcgggtgtggctttcgccgtagtgggggcatgtcaggctcttggcctccgggatgtgcacctcgcactctcagaggaccacgcgtgggtggtattcggacccaacggggagcagactgcagaggtgacctggcacgggaagggcaatgaagatcggcggggccaaaccgttaatgccggcgtagcggaacgtagctggctttatctcaaagggagttatatgagatgtgacaggaaaatggaggtggctttcatggtctgcgcaatcaaccccagtatcgacctgcacaccgatagcctcgaactgttgcagctacagcagaagctgctctggttgctgtacgacctagggcatctcgaacggtaccctatggcccttggaaatctggccgacctagaagaactagaacctacacctggccgtccggaccccctcaccctctatcataagggcatcgcctcagcgaagacatactatcgagatgagcacatttacccttatatgtatcttgcaggataccattgtagaaaccggaacgtccgcgaggctctgcaggcgtgggccgacactgctacagttattcaggactacaattattgcagagaggacgaggaaatttacaaggaattctttgaggtagccaacgatgtcatcccgaacctgctgaaggaggcagctagcctgctggaagccggggaggagcggcccggcgaacagtctcagggaacacagtcccaggggtccgccctacaagaccctgagtgctttgcccatctgctgcgattctacgatggcatctgtaagtgggaggaagggagcccaacccctgtcctgcacgtcggctgggccactttcttggttcagtctctagggcgtttcgagggacaggttcgacagaaggtcaggattgtctcccgggaagcggaggctgctgaagctgaggagccctggggcgaggaggctcgggagggacgccgaagaggcccgaggagagagagcaagccagaggaaccccctcctccaaagaagcctgcgctagacaaagggttgggcaccggccagggcgccgtctctggcccacccagaaaacctcctgggacagtcgcagggactgctcgagggccagaaggggggtccaccgcacaggtccctgcccctacagccagccctcctcccgagggccctgtgctgactttccagtcagagaaaatgaagggcatgaaagagcttctggtggccacaaagattaacagttcagctataaagctccagctcacagctcagtctcaggtgcaaatgaagaagcagaaggtaagtaccccgtctgattacacactttcctttttgaagcgtcagagaaaaggactgtag

SEQ ID NO: 25072 - DNA, 1668 bp, synthetic construct
  misc_feature 1..1668: note = Description of Artificial Sequence: Synthetic coding sequence
  source 1..1668: mol_type = other DNA
atgggcctgaaggccgcccagaagaccctgttccccctgcggagcattgacgacgtggtgcggttatttgctgcagagttgggtcgggaagaacccgacctggtgctattgtctctcgtgctgggctttgtcgaacactttcttgccgtgaatagagtcatacccacaaatgtgcctgagcttacctttcaaccaagtccagctcccgacccccctggtgggctgacatatttcccagtcgctgacctgtctataatcgcagccctctatgcgcgcttcaccgctcagattaggggagccgtggatctaagcctctatcctagagagggcggcgtatcctcccgcgagctggttaagaaggtgtctgacgtgatctggaatagtctgagtaggtcttactttaaggaccgagctcatattcagagtctattttctttcatcaccggtacgaaactcgatagctcaggggtggcattcgccgtagtgggcgcctgccaggccctgggattgagagacgtccatctggctctctctgaggaccatgcttgggtagtgtttgggccaaatggtgagcagactgctgaggtgacatggcacggtaagggaaacgaagatcggcgcggacagactgtgaacgccggggtggcggagcgctcctggctgtacttgaagggctcttacatgaggtgcgaccgcaaaatggaagtggcttttatggtgtgtgctatcaacccatctattgacctgcacacggactctctcgagctccttcaacttcaacaaaagctcctctggctgttgtacgatctgggccatctggaaaggtacccgatggctttgggcaacctggccgacctggaggagctcgagccaacacctggccggccggatccccttactttgtaccacaaagggatcgcctccgctaaaacttattacagggacgagcacatctatccgtacatgtacctggctggctaccactgcaggaacaggaacgtgcgggaggctctgcaggcttgggccgatacagccacagttattcaggattataactattgccgtgaggatgaggagatctataaagagttcttcgaggtggcaaatgacgtcatccctaacctgctcaaagaggccgcatcgctgttggaggctggcgaagagcgacctggcgagcagagccaggttcgtcagaaagtgagaatcgtaagtagagaggccgaagcggcggaggcagaggagccgtggggcgaagaggccagagagggcaggcggcgaggaccaagacgtgaatccaagcctgaggagccgccacctcctaagaagcctgccctcgataaagggctaggtacaggccaaggggccgtgtcggggcccccacgcaagccccccgggaccgtcgccggaacggcccggggtcctgaaggcggctcaacagcacaagttcccgcccccaccgcctccccgcctcccgaagggcctgtcttgacttttcagagcgaaaagatgaagggcatgaaagaactgcttgtggcaactaaaattaactcttctgctattaagctccagctgacggcacagtctcaggtacagatgaagaagcagaaggtgtccactccgagcgactacactctttctttcctgaaacgacagcgaaagggtctgtag

SEQ ID NO: 25073 - DNA, 1728 bp, synthetic construct
  misc_feature 1..1728: note = Description of Artificial Sequence: Synthetic coding sequence
  source 1..1728: mol_type = other DNA
atgggcctgaaggccgcccagaagaccctgttccccctgcggagcatcgacgacgtagttagactgttcgctgccgaattaggacgcgaagaacccgacctggtgttgttgtccctggtgcttggatttgtggagcattttctcgcagtgaacagagtcatccccacaaacgtgccagaactcacttttcagccatctcccgccccagacccacccgggggcctcacatacttccctgtggctgacctaagtattattgcagctctctacgctcgcttcacggcccagattagaggggccgtcgacttaagtctttatccaagagaggggggcgtaagctcgagagaactggtgaaaaaagtttccgatgtgatatggaacagcctgtctcggtcttattttaaagacagagcacatatacagtcactcttttccttcattacaggcaccaagcttgattcttccggcgtggcgtttgcagtggtcggggcttgtcaggccttggggttacgagatgtccatctcgccttgagcgaagatcatgcatggagctggctctacctgaaaggttcctatatgaggtgtgatagaaagatggaggtggcctttatggtctgtgccatcaatccttcaattgatttgcatactgattctctggagctgcttcagctgcagcagaagcttctgtggctgttatatgacttgggccacctcgaacggtaccccatggccctggggaatttggccgatttggaggagttggaacccaccccaggacgcccagaccctctgaccctgtaccataaagggatcgcctccgctaagacttactacagggacgagcacatttatccctatatgtacctggccgggtatcactgtagaaaccgaaacgtgcgcgaagctttgcaagcatgggcagacacagctacggtgattcaggattacaattactgccgggaggatgaagagatctacaaagagttcttcgaggtcgctaatgacgtcattcctaacctgctgaaagaggcagccagcttgctggaggcaggagaggaacgacccggagaacagagccagggtacccagagccagggtagcgccctccaggatccagaatgtttcgcccaccttctcaggttctatgacggaatttgtaaatgggaggagggtagccctaccccggtgttgcacgtcgggtgggctacctttctggtgcagtctctggggcggtttgagggacaggtcaggcagaaggtgcggatcgtctcgcgcgaggccgaggccgcggaggccgaggagccttggggggaagaagcaagggaaggcaggaggcgcggtccgcggagagagagtaagccagaagagcctccaccaccaaaaaaaccagcgttggataaaggactgggtactggtcaaggagctgtgagcgggccaccccgaaagccccccggcaccgtggcagggacagcgagggggcccgagggcggctcaactgctcaggtacctgcccccacagcatcaccacccccagagggacctgtgctcacctttcaatctgaaaagatgaaaggaatgaaggagttgcttgtcgccacaaagattaatagtagtgcaatcaagctgcaattgactgcacagtcacaggtgcagatgaagaaacagaaagttagcacccctagtgattatactttgagcttccttaaacgtcagcgcaaagggctttag

SEQ ID NO: 25074 - DNA, 1833 bp, synthetic construct
  misc_feature 1..1833: note = Description of Artificial Sequence: Synthetic coding sequence
  source 1..1833: mol_type = other DNA
atgggcctgaaggccgcccagaagaccctgttccccctgcggagcatagatgacgtcgtacggctcttcgctgcagaactcggcagagaagaaccagaccttgtacttttaagcttggtgctagggttcgttgagcattttctggcagttaatagagttattcccacaaacgttcctgaactgaccttccagccatctccagctcccgatccccctgggggactgacctacttcccggtagctgacctgtccatcatcgctgcattgtacgcacgctttaccgcccagatacgcggggccgtggatttgagcctctaccctagggaagggggtgtgtccagtagagaactggtgaaaaaagtgtccgacgtcatctggaactcactgtcgcgctcatatttcaaggatagggctcacatccagtctctgtttagctttattactggtaccaagttggattccagcggcgttgcgtttgccgtcgtgggcgcctgtcaggccctgggtcttcgcgatgtccacctggcactgtccgaggaccacgcatgggtagtattcggaccgaacggggagcagactgctgaggtaacatggcacggtaaaggaaacgaagatcggcggggtcaaaccgtgaatgccggggttgcagaaaggagttggctgtacttgaaaggatcttacatgcgttgtgatcgtaaaatggaggtggcttttatggtgtgcgccatcaatccttccattgacttgcacactgattccctggaactccttcaactgcagcagaaactgctctggcttctgtacgacttaggacacctcgagagatatccgatggccctgggcaatttagcagaccttgaagaactcgaaccaacacccggtagaccagaccccttgacgctgtaccataagggcatcgcaagcgccaaaacttactaccgagacgagcatatctacccgtacatgtatctggcaggatatcactgccgaaaccgaaacgtgcgggaggcccttcaggcctgggctgacacggcaacagttattcaggattataactactgtagagaggatgaggagatctacaaggagttctttgaggtggccaatgatgttattcccaatctgctgaaggaggcggcctcattactggaagcaggggaggagaggcccggcgagcagagccaaggaacccagtcccagggcagtgcgctccaagacccggaatgtttcgcccacctgctgaggttctatgatggcatctgtaaatgggaggaaggttctccaacgccggttttgcacgtgggttgggctacattccttgtacagtctttaggacgttttgagggacaggtgcggcagaaggtgaggatagtgagcagagaagcagaggccgctgaagcagaggaaccctggggcgaagaggcaagagaaggccggagaaggggacctagacgcgagtccaaacccgaggagcctcctcccccgaagaaaccagctttggacaaaggactgggaaccggccagggcgccgtttccggccctcctaggaaacccccaggcaccgtggcaggcactgccaggggccccgaaggcggcagtacagcccaagtgccagccccaaccgctagccctccccccgaaggccctgtgcttactttccagtctgaaaagatgaagggaatgaaagaattactggtggccactaagataaactccagcgcaataaaactgcagctcacagctcagtcacaggtccagatgaaaaaacagaaagtctctactcccagtgattacacgctgagtttcctcaagcgtcagcgcaaaggtttgtag

SEQ ID NO: 25075 - DNA, 1848 bp, synthetic construct
  misc_feature 1..1848: note = Description of Artificial Sequence: Synthetic coding sequence
  source 1..1848: mol_type = other DNA
atgggcctgaaggccgcccagaagaccctgttccccctgcggagcattgacgacgttgttaggctgtttgctgctgagctgggtagggaggagcccgacctggtcttgctttccttagttttgggtttcgtcgaacatttccttgctgtgaacagagtgatccccacgaatgtgcctgagctcacatttcagcccagtcctgcaccagacccccctgggggcctcacctatttccctgtggctgatctctccatcatagctgcactatacgcacgatttaccgctcaaattagaggcgccgttgacctgtcactctatcccagggaaggtggggtgtcatcccgcgaactggtaaagaaagtgagcgacgtgatatggaatagtctctcaaggtcctacttcaaagaccgcgcacatatacagtcactgtttagtttcattaccgggtggtcacctgtgggtactaagttggactcatctggcgtggcctttgccgtcgtcggggcctgccaggccctgggtctgcgggatgtgcacctcgccctctctgaggatcatgcatgggtggtgttcggcccaaatggagaacagacagctgaagtgacctggcatggaaaagggaacgaagaccggaggggacagaccgtaaacgccggcgtagcagagaggagctggttatatctgaaaggctcttatatgcgctgtgataggaagatggaagtggctttcatggtgtgtgccatcaacccttccatcgacttacacaccgactctcttgagttgctccagttacaacagaagctcctgtggctcttgtatgatttgggccacctggagaggtatccaatggccctgggcaatctggccgatctcgaggaattggaacctacccctggacgtcccgaccctctcactctgtaccataaaggcatagctagcgccaaaacttattaccgagatgaacatatttacccttacatgtacttagcaggatatcattgccgcaacagaaatgtgcgcgaagcactacaggcatgggctgataccgcgacagtcatacaagattacaattactgcagagaggacgaggagatctataaggagttttttgaggtggccaatgatgtgatcccaaacctgctcaaagaagccgcttccctgctggaggcgggagaggagagaccgggcgagcaatcacaaggtacacagtcacaaggaagcgccctgcaggatcctgaatgcttcgcacatcttcttcgcttttacgacggcatttgcaagtgggaagaaggctcccccacccccgtattacatgtcggatgggccacctttctggtgcagagtctcgggcgcttcgaggggcaagttagacagaaagtgagaatcgtttctagagaggccgaggcagccgaagccgaggagccttggggtgaggaagcccgcgaaggaaggaggaggggcccacgcagggaatctaaaccagaagaacctccacctccaaaaaaacctgccctggataagggcctgggtacaggccagggagcagtgtcagggcctccacggaagccgcctggcaccgttgccgggacggctaggggcccagagggcgggtcaactgcacaggttccagctcccaccgcctctcctccaccagaaggcccggttttgacatttcaaagtgagaagatgaagggaatgaaagagctgctggttgctacaaagatcaattcaagcgccatcaagcttcagctcacggcccaatcgcaggtccagatgaaaaagcagaaggtctcaactccaagtgattacaccctcagcttcctgaaacgtcagcggaagggattatag

SEQ ID NO: 25076 - DNA, 1848 bp, synthetic construct
  misc_feature 1..1848: note = Description of Artificial Sequence: Synthetic coding sequence
  source 1..1848: mol_type = other DNA
atgggcctgaaggccgcccagaagaccctgttccccctgcggagcatcgacgacgttgtccggctgttcgctgccgaactgggccgcgaggagcccgatctggtgttattaagcttagtcctgggcttcgtagagcactttttggccgtgaatagggtgattccaaccaacgtgccggagctcaccttccagccctccccagcccccgatcctcccggaggattgacctattttcctgtggccgatctgtcgatcatcgccgcactctacgcccgattcacagcccagattcggggcgccgtcgacctcagtctatatccaagagaagggggtgtcagctcgcgcgagctggtgaagaaggtttccgatgtcatttggaattcattgtcaaggtcctatttcaaggatcgcgcacacatacaatctctttttagctttattacaggatggtcccccgttggaaccaaattggacagctctggggttgcgtttgctgtcgtgggcgcctgccaggcgctgggcctgagggatgttcatttggctctaagtgaagatcacgcatgggtcgtgtttggacctaacggcgaacaaacggcggaagtgacctggcacgggaaagggaatgaagacaggagaggccagactgtgaacgctggtgtggcagagcgtagctggctgtatctcaaaggaagctacatgcggtgcgaccgcaaaatggaagttgcctttatggtgtgtgcgatcaatccttctatcgatctgcataccgactccctggaacttctacaattgcagcagaagctactgtggctgctgtacgacttgggtcacctggaacgctaccccatggctctcggcaatctggctgacctggaagagctagagccgacacctggtaggccagacccgctgactttgtatcataaagggatagccagcgcaaaaacttattacagagacgagcacatttatccctatatgtatttggcgggctaccactgtagaaatcgtaacgttcgggaggcattgcaggcctgggcggacaccgccaccgtgatacaggattataattactgtcgcgaggacgaggaaatttataaggagttctttgaagtggccaacgatgtaattccgaacctgctgaaagaagccgccagtttgctggaggctggagaagagaggcccggggagcaatcacagggtacacagtcccagggaagtgccctgcaggaccctgagtgttttgcccacttgctacgcttttatgacggtatttgcaaatgggaggaaggctcacctacccccgtgctgcacgtgggctgggcaacatttctagtccagtctctggggcgcttcgagggacaggtgcgtcagaaggttcggattgttagccgggaggctgaagcagcagaggctgaagaaccctggggcgaagaagctagagagggacgccggcgaggccccagaagagaatctaaacctgaagagccccctccgccgaagaagcctgcactcgataaggggctgggaactgggcaaggagctgtcagtgggcccccaagaaagcctcctggtacggtggccggaactgctagagggccggaaggaggaagcactgcgcaggttcccgcccctactgcctcaccccctcccgagggaccagttctcacctttcagtcagagaagatgaagggcatgaaggaactgttagtggccaccaaaatcaatagctccgcaataaaacttcagctgaccgcccagagccaggtccagatgaagaagcagaaagtctctactccctctgattataccctgtcatttctgaaacgccagagaaagggcttgtag

SEQ ID NO: 25077 - DNA, 786 bp, synthetic construct
  misc_feature 1..786: note = Description of Artificial Sequence: Synthetic coding sequence
  source 1..786: mol_type = other DNA
atgggcctgaaggccgcccagaagaccctgttccccctgcggagcattgacgatgtagtcaggctctttgcagcagagctcggtcgggaagaacctgatctggttcttttgtcactagtgctcggcttcgttgaacacttcctggctgtcaatagggtgattcccaccaacgtgccagaactgacctttcaaccatcacctgcacccgaccctcccggaggacttacctactttcctgttgcagatctgtctataatcgcggccctgtatgcgcgctttaccgcccagattagaggcgccgttgatctgtcactatatccacgagagggcggggtgtccagtagagagctcgttaaaaaggtgtcggacgtcatctggaactccctgtcccggtcttacttcaaggaccgtgcacatatccaaagtcttttttccttcattaccggtaccaaattggactcaagcggggtcgccttcgccgttgtcggtgcctgccaggctctgggcctaagagacgtgcatctcgctttaagtgaagatcacgcctgggtggtgtttgggcccaacggcgaacagacagctgaggttacctggcatggcaagggcaatgaagaccggcgtggacaaaccgtaaatgccggcgttgcagaacggtcttggctttaccttaaaggctcttatatgcgctgtgacaggaagatggaggtggccttcatggtctgcgccataaacccgagcattgacttgcatacagattctctcgaattactccagctccagcaatag

SEQ ID NO: 25078 - DNA, 441 bp, synthetic construct
  misc_feature 1..441: note = Description of Artificial Sequence: Synthetic coding sequence
  source 1..441: mol_type = other DNA
atgggcctgaaggccgcccagaagaccctgttccccctgcggagcatcgacgatgttgtcaggttattcgcagccgagctcggacgcgaggaacctgatcttgtgctgctgtctctggtgctgggatttgttgaacacttcctggcagtgaacagagtgattccgaccaacgtcccagaactgacctttcagccctcacctgcgccggatcctcccggtggactgacctatttccccgttgccgacttgtcaattatcgctgcactctacgcccgcttcactgcgcaaatccgaggtgcagtcgacctttctttatacccgcgcgagggaggtgtgagctccagagagctggtgaagaaagtaagcgacgtgatctggaactcactttcccgctcctatttcaaagatagagctcacatccagagtctgtttagtttctag

SEQ ID NO: 25079 - DNA, 441 bp, synthetic construct
  misc_feature 1..441: note = Description of Artificial Sequence: Synthetic coding sequence
  source 1..441: mol_type = other DNA
atgggcctgaaggccgcccagaagaccctgttccccctgcggagcattgatgacgtggttaggctgttcgccgccgagttgggcagagaggagcctgatctagtgcttctgagtcttgtgcttggatttgtggagcactttctagccgttaatagagtaattccaactaacgttcccgaattgacttttcaaccaagcccagccccagatccaccaggcggcctgacatactttccagtggcagatctgtcaattattgccgctctgtatgccagatttactgctcagattcgcggagccgtggacctgagtctatacccgagagaaggcggcgtgagttctcgtgaactggtgaaaaaagttagtgatgtgatttggaacagtctgtctcgctcctattttaaagatagagctcacattcaatcactgttctctttctag

SEQ ID NO: 25080 - DNA, 1041 bp, synthetic construct
  misc_feature 1..1041: note = Description of Artificial Sequence: Synthetic coding sequence
  source 1..1041: mol_type = other DNA
atgggcctgaaggccgcccagaagaccctgttccccctgcggagcattgacgatgttgtgcgtctgttcgctgccgagctgggccgcgaagagcccgatttggtgctcctctcacttgtgttgggctttgtcgagcatttcctggccgtcaatagagtcattcccacaaacgtgccagaactgactttccaaccatcgcctgcccctgatccacccggtggtctcacctattttcccgtcgccgacttgtccattatagcagcactatatgcacgctttaccgcccagatccgaggggcagtcgatctgtccttgtatccgcgagaagggggagtgtcttcccgcgagttggttaagaaggtgtcagacgtgatttggaacagtctgagcaggagctactttaaggatcgggcacacatccaatccctattctcattcatcacgggtacaaaactggatagctcaggcgtggctttcgccgttgtgggagcttgccaggcattaggtttgcgcgacgtgcatttggcgctatcagaagatcacgcctgggtcgtatttggaccaaacggagagcagaccgccgaggtgacgtggcatggcaaagggaatgaggacagacgcggccagactgtgaatgccggggtggcagagcgcagctggctgtatctcaagggttcgtatatgcggtgtgataggaaaatggaggtggcatttatggtatgcgctatcaacccatcaatcgacctccacacggattcccttgaactgctgcagcttcaacaaaagctgctgtggctcctgtacgatctcggtcaccttgagagatacccaatggccctgggaaacctggccgatctggaagagctggaaccaacccccgggcgacctgaccctcttacgctctatcacaagggaattgcctcagcgaagacctattatagagatgagcacatttatccctatatgtatttagctgggtatcattgtcgaaatcggaacgtgagggaggctttacaggcctgggccgacaccgcaacctag

SEQ ID NO: 25081 - DNA, 1848 bp, synthetic construct
  misc_feature 1..1848: note = Description of Artificial Sequence: Synthetic coding sequence
  source 1..1848: mol_type = other DNA
atgggcctgaaggccgcccagaagaccctgttccccctgcggagcattgatgacgtggtgcgtttgttcgcagctgaattagggagagaagaacccgatctggtgctcctatccctggtgcttggcttcgtggagcacttccttgctgtcaatagagttatcccaacaaatgttcctgagctgacattccagccaagtccagccccagaccccccagggggtctaacgtactttccagtggccgacctatccattattgctgccctgtatgctaggtttacggcccagattagaggggccgtcgatctctccctgtacccgcgggagggaggcgttagcagcagagaactggttaaaaaggtgtctgacgtcatatggaattctttgtcccggtcttactttaaagatagggcccatatccaaagtctgttttcattcataacaggctggagtccagttgggacaaagctcgattcaagcggtgtggccttcgccgtggtgggtgcatgtcaagctttaggactccgtgacgtgcatctggctctgtccgaagaccacgcttgggttgtcttcggacccaatggggagcagacggccgaagtgacgtggcacgggaaagggaacgaggatcgacgtggtcaaactgtaaatgcaggtgtcgctgaacggtcttggctatacctgaaagggtcctacatgaggtgcgatcggaaaatggaggtggccttcatggtctgcgccattaacccctccatcgacctgcatactgactctcttgaactcctacaactgcaacaaaagctgctctggcttctgtacgacctgggtcacctggagcggtacccgatggccctcggaaacctggcggacctggaggagctggaaccaacaccggggcggcctgaccctctgactctttatcataaggggatagcatcagccaaaacctactatcgagacgagcacatctatccatatatgtacctggccggctaccactgcaggaaccgtaatgttagagaagcgcttcaggcctgggctgacaccgctaccgtgatacaggactacaattactgccgcgaagacgaggagatctataaagagttcttcgaagtcgcaaatgacgtcatcccaaacctgctaaaagaggctgcctctttactggaggccggagaagaacggcctggagagcagtcgcaaggaacccagtcacaggggagcgcactgcaggacccggagtgctttgcccatttgttgcgcttctacgatgggatttgcaaatgggaagagggtagccccactccggtgttgcacgtggggtgggccacatttctcgtccaatccctgggccggttcgagggccaagtgaggcagaaggtcagaatcgtaagtcgcgaggcggaggccgctgaggccgaagaaccgtggggcgaggaagccagagagggccgacggcgcgggccccgccgcgaaagcaagcccgaagagccaccaccgcccaaaaaacctgctctggataaaggcctcgggaccgggcagggtgccgtgtctggccctccacgtaagccccctggaacagtagctggcactgctcgggggcccgaggggggttctacagcacaggtcccggctccaactgcctcgcctcctccggagggtccagtgctgacgttccagtccgaaaagatgaaggggatgaaggagctgctggtagcaactaaaatcaacagttcggcaattaagctgcagctgacggctcagtctcaagtccagatgaaaaagcagaaggtgtcaacaccgtctgattatactctcagcttcctgaagcggcagcggaagggcttgtag

SEQ ID NO: 25082 - DNA, 846 bp, synthetic construct
  misc_feature 1..846: note = Description of Artificial Sequence: Synthetic coding sequence
  source 1..846: mol_type = other DNA
atgggcctgaaggccgcccagaagaccctgttccccctgcggagcattgatgatgtggttcgcttgttcgctgctgaactcggacgcgaagagcctgaccttgtcctgctgagcctggtcctcggcttcgttgagcacttcttagccgtgaatcgagtgattcctacaaacgtcccagagctgacctttcagccatctcccgctccggaccccccaggcggattgacctacttcccggtggccgacctgtcaatcattgctgccctctatgcaaggtttaccgcgcagatccgcggagcagtggacctgtccctgtatccaagagagggcggcgtcagcagcagagagttagtcaagaaggtcagcgatgttatttggaactccttgtcaaggtcatacttcaaagatcgggcacacatacaatctctgttttcatttatcactggtaccaagctcgatagctctggggttgcctttgctgtggtaggtgcctgccaagctcttggcctgagagatgtgcatctggccctgtctgaggatcatgcctgggtcgtgttcggaccaaatggagagcagaccgccgaggtcacttggcatgggaaggggaacgaggaccgacgggggcagaccgtgaatgccggcgtcgcagaacggagttggctgtaccttaaggggagctacatgcggtgtgataggaagatggaggtagctttcatggtctgtgccatcaatccttcaatagatttacatactgactctctcgaactgctgcagttgcagcaaaagctgctgtggctcctctacgatctgggacatttggagaggtatcccatggccctaggatag

SEQ ID NO: 25083 - DNA, 1656 bp, synthetic construct
  misc_feature 1..1656: note = Description of Artificial Sequence: Synthetic coding sequence
  source 1..1656: mol_type = other DNA
atggccgcccccgtgcggctgggccggaagcggcccctgcccgcctgcccaaatcctttgttcgtccgatggctgacggaatggagggatgaggcaacgcggtcccgacgaaggaccaggttcgtcttccagaaggccctgcggtccctcaggcgctacccccttcctcttaggagcgggaaagaagctaaaatcctgcagcacttcggggatggactttgtcgcatgttggatgagcgcttgcaaaggcaccgcaccagcgggggtgaccacgcacccgattcgccctctggagaaaactctcctgcgccccaaggacggctggccgaagtgcaggacagttccatgccggtgcctgcacagccaaaagccggcggaagcggctcttactggcccgctcgccattccggagccagagttatcctgttggttctatatcgcgagcatctaaatccaaacggtcaccactttctcacaaaggaggaactgttgcagcggtgcgcacagaaatctcctagggtcgcacccggcagcgcccgtccatggcctgcactacgttctctgctgcataggaacctcgtcctgagaactcatcaacccgccagatatagcctaacgcccgagggtttggagctggctcaaaagctggccgagtcagagggcttatccttattgaacgtgggtatcggacctaaggaaccccccggagaggaaacagctgtccccggggctgctagcgcggaactggcgagcgaggcaggcgtgcagcaacagcccctggagttacgacccggcgagtacagagtactgctgtgtgttgatataggagaaacaaggggcggcgggcaccgccctgaactcctgagagaactgcagcgtctccatgtcacacacactgtgcggaagctgcacgttggggattttgtctgggttgcacaggaaacaaatcccagagacccagctaatcccggagaattggtattagaccacatcgtcgagcggaagcgcctcgacgatctgtgcagctccatcatcgatggccggtttcgagaacagaagttccggcttaaacgatgcgggctagaacggagagtgtacttggtagaagaacacggttcagtccataacctgtctctgcccgaaagcaccctgctccaggccgtgacaaatacgcaggtaatcgacggcttttttgttaagaggaccgcagacatcaaggagtccgcggcctacctggcgctcctgactaggggcctgcagcgcctgtaccaaggacacactctgcgcagccgcccgtggggaacaccagggaatccagaatctggtgccatgacatcacctaatccactctgttccctgctaactttcagcgactttaatgctggcgccatcaagaacaaggcccagtcagtgcgggaggtgttcgcacggcaactcatgcaggtgaggggggtgagcggcgagaaagctgcagctttggtggaccgatattctacaccggcatccctccttgccgcttatgacgcctgtgccactcccaaggagcaggaaaccttgctctctaccattaagtgtggccggttgcagcggaacctgggtccggctctgtctagaacgctcagtcaactgtactgttcttatggaccactgacttag

SEQ ID NO: 25084 - DNA, 1656 bp, synthetic construct
  misc_feature 1..1656: note = Description of Artificial Sequence: Synthetic coding sequence
  source 1..1656: mol_type = other DNA
atggccgcccccgtgcggctgggccggaagcggcccctgcccgcctgcccaaatccattatttgtgcgatggctcaccgagtggagggacgaggctactcggtctaggaggaggacccgcttcgtatttcagaaagccttgagatcgctgcgccgataccccctgcccttgcgatcaggaaaggaagcaaagatccttcaacatttcggcgatggtctttgtagaatgctggatgaaagacttcagcgacacaggacgtccggcggggatcatgctcccgattctccttcgggggaaaattctccggcgccgcagggaagactggccgaggtgcaggattcctcgatgcctgtccctgctcaacccaaagccggtggcagtggttcttactggcctgctcggcactctggggctcgcgtaattctgcttgtgttataccgcgaacatctgaacccaaacggacaccattttttgacaaaagaggaacttctccaacggtgcgctcagaaaagcccgcgcgttgccccaggctcagccaggccctggcccgcattgagatctctgctccatcggaaccttgtgctgaggacccaccaacctgcccgctatagcctgactccagagggcctggagctggctcagaagctggcggagtctgaaggactgtccctgttaaatgttgggattgggccaaaggagccacccggcgaagagaccgccgtgcctggagccgccagcgccgaactggcatctgaggccggcgtgcagcagcagccgcttgagttgcgacccggggaatatagggttttgctgtgtgtggacattggcgagaccaggggaggtggtcacaggcccgagttattgagggaattgcagcgactccatgtgacgcatactgttaggaagctgcatgtcggggacttcgtttgggtggcgcaggagacaaacccccgtgacccggccaatccaggagagctggtcctcgaccacattgtggagagaaagcgactcgacgacctgtgctctagtatcattgatggtcggtttagggaacagaagtttcgcttaaaacggtgcggcctcgagagacgcgtgtatcttgtggaggaacacggttctgtccacaatctgtcactgcctgagtccaccttactgcaggctgtaacaaatacccaggtcatcgacgggttctttgtgaagcgaactgcggacatcaaggaatccgccgcgtatcttgcccttttaactaggggactgcagagactttaccaaggtcacacccttcgctcacgaccttggggaaccccaggaaatccggagagtggcgctatgacttcacctaatcccctgtgttctctcctcaccttctctgatttcaacgctggggccattaagaacaaagctcagtcagtgagggaagtattcgccagacagcttatgcaggtgcgtggggtcagtggtgagaaagccgcggcactggtggacaggtactccacgcctgcctctctgttggcggcgtatgatgcgtgcgcaaccccaaaggagcaagagaccttgctgtccacgattaagtgcggacggcttcagcggaacctcggacccgccctctcaagaacattgtctcaactgtactgtagttacggccctctcacatag

SEQ ID NO: 25085 - DNA, 2490 bp, synthetic construct
  misc_feature 1..2490: note = Description of Artificial Sequence: Synthetic coding sequence
  source 1..2490: mol_type = other DNA
atgaacagcggcgtggccatgaagtacggcaacgacagcagcgccgagctcagcgagttgcactccgccgcgctcgcatcgttgaagggtgacatcgtggagctgaataagcggctgcagcagactgaaagagagagggatctgttggaaaagaagctcgcgaaggctcagtgcgaacaatctcatctgatgcgggaacacgaagacgtccaagagaggactacgctgaggtacgaagaacgaatcacagaactgcatagtgttatcgcagagctgaataaaaagatcgataggctgcaaggaaccaccattcgcgaagaggacgagtattcagagctgcgctcggagctatcacagtcccagcacgaggtcaatgaagacagtagaagcatggatcaggatcagactagtgtttctattccagaaaaccagtccacaatggtaaccgccgatatggacaactgctctgatcttaactctgagctgcagcgcgtcctgacgggactagagaatgtcgtgtgtggccggaaaaaatcatcatgtagtctgtccgtcgccgaagtggataaacatattgagcagctgaccacagctagtgaacactgcgatctggcaattaagactgtggaagaaattgaaggggtgctgggccgggatctataccctaacttggcagaagagagatcccgctgggagaaagaacttgctggtctccgtgaggaaaatgagtccctaacagcaatgttgtgcagcaaggaagaggaactgaaccggactaaggctaccatgaacgcgatccgagaggagagggatcggctgcgccgtagagtgcgcgagttgcagacaaggctccaaagcgtgcaggcgaccggaccaagtagtcccggccgcttgacgagtacaaaccggcctatcaatccatccacaggcgaactctccacttcctcctctagtaacgacattccaatcgccaaaatagctgaacgcgtcaaactgtctaagactaggagtgaatcctcctcaagtgatcggccggtcctgggctctgagatatcgagcatcggcgtgagctcttctgtggccgagcacctggcccacagcctgcaggattgtagtaatattcaggagatttttcagacattgtattcccatggatccgcgatcagcgaatccaaaatacgcgaatttgaagttgaaactgaaagattgaattctaggatcgaacatttgaagagccagaacgatctgctgacaattactctcgaggagtgcaaatccaacgccgagagaatgtcaatgctggtgggaaaatatgaatctaacgcgacggccctgcgcctcgccctacagtactcagaacagtgtattgaagcctacgaactgttgctcgcactggccgaatccgaacagagcctaattttgggacagttccgagcagccggtgtaggatcgtcccccggcgaccagagcggggatgagaatattacccagatgttaaagagagctcacgactgtcgaaagaccgctgagaacgctgcgaaggcacttcttatgaaattagatggctcttgtggcggcgcctttgcggtggccgggtgcagcgtacagccctgggaaagtctatcttccaattcacacacaagcacaacgtcttccactgcctcttcctgcgacaccgaatttactaaggaggacgaacaacggctgaaagattatattcagcagctcaaaaatgatcgagcggccgtcaaactgacaatgcttgaactggagagtatccacattgatcccctgagttacgacgtgaagccaaggggggactcacagagactggatctagagaacgctgttctgatgcaggaactgatggccatgaaggaggagatggccgaactgaaggcgcagctgtacctgcttgaaaaggaaaaaaaggcactggaactcaaactctctacgcgcgaggcacaggagcaggcttatctggttcacattgagcatttgaagtcggaagtggaagaacagaaagagcagcggatgcgttctctgtctagtacgagctcaggctccaaagacaagcccggcaaagaatgcgccgatgccgcctctcccgccttgtctctggctgaattgaggactacatgttccgaaaatgagctcgccgctgagtttacaaatgcgatacgcagagaaaagaagctgaaagccagggtccaagagttggtaagtgcactggaaaggttgactaagtctagtgagatacggcatcagcagtctgctgagttcgtcaacgaccttaagcgagcgaattccaacctcgtcgccgcatatgagaaggctaaaaagaaacaccagaataagctgaagaaactcgaatcgcagatgatggccatggtcgagagacatgaaacccaggtccggatgcttaaacagcggatcgcactgctggaggaggaaaatagccgcccccatacaaacgaaacatccttgtag

SEQ ID NO: 25086 - DNA, 2133 bp, synthetic construct
  misc_feature 1..2133: note = Description of Artificial Sequence: Synthetic coding sequence
  source 1..2133: mol_type = other DNA
atgaagctggtgttcctggtgctgctgttcctgggcgccctgggcttgtgcctggccggacgccggcgcagtgttcagtggtgcgccgtatcccagccggaggcgacaaagtgttttcaatggcagcgaaatatgcgaaaagtgaggggtccccccgtgagctgcatcaaacgcgactctcccatccagtgcatccaagccatcgctgagaatagagccgatgccgtgactctggacggcggatttatttatgaagcgggccttgcaccttataagctacgacctgtcgcggcggaggtctacggaaccgaaaggcagccaaggacacactattacgccgttgctgttgtcaagaaaggcggctcctttcagcttaacgagttgcagggcctgaagtcttgtcataccgggcttaggcggactgccgggtggaatgtcccaattggcactctgcgtccattcttgaactggactggtccccccgagcccattgaggctgcagtggctaggttcttctctgcctcctgtgtgcctggtgcggacaaagggcagttcccgaatctgtgcaggctctgcgccggtactggagagaacaagtgcgccttttccagccaggaaccttacttttcttactctggtgcctttaagtgcttgcgggacggtgcgggggacgtggctttcataagggagtccactgttttcgaagaccttagcgacgaggccgagagggacgagtacgaactcctttgccctgataatacccgaaaacctgtcgataagtttaaagactgccacctggcaagggtaccctcacacgctgttgttgcgaggtcagtgaatggaaaagaagatgccatttggaacctgttgaggcaggctcaggagaaatttggtaaggacaaaagtcctaagttccagctcttcgggtcaccttcagggcagaaggatctgctgtttaaagacagcgccatcggcttctctagagtgccccctagaatcgattccgggttatacctgggtagcggctacttcacagcgatacagaacttgcggaagtccgaggaagaagtggccgctagacgagctagagtggtatggtgtgcagtgggcgaacaggaactgcggaagtgcaatcaatggagcggtctctctgaggggtcagtcacatgttcaagtgcatccacaactgaagattgcatcgcccttgtcctgaaaggggaggcagacgcaatgtccttggatggcggttatgtttacacagccggaaaatgcggcctcgtacccgtcttggccgagaactataaatcccagcaatcaagcgatccagaccccaattgtgtggaccgtcccgtggaaggctatctggcggtcgcagtcgtgagacggtccgacacctctttaacatggaacagtgtaaaaggcaagaaaagttgtcacaccgccgtggatcgcaccgccggctggaacatccccatgggcctgctctttaaccagactggatcatgtaagttcgacgagtactttagccagagttgtgctccaggctctgacccaaggagcaacttatgtgccctgtgtatcggggacgaacagggggagaacaaatgcgttcctaactcaaacgaaaggtactacgggtacactggcgccttcaggtgcctcgctgaaaatgccggcgatgtagcttttgtcaaagacgtcaccgtcctccagaatactgacggtaacaataatgaggcctgggcaaaggacttgaagctcgccgactttgcactcctctgcctcgatgggaagcgaaagcccgtgacagaggctcgcagctgtcacctcgccatggcgcccaatcacgcggtagtctcaaggatggataaagtggagcggctgaagcaggtgcttcttcaccaacaagccaagttcggcagaaacggatctgactgtcctgacaagttctgcctttttcagtccgaaactaagaacctcctgtttaacgacaataccgaatgcctcgcgcggcttcacggcaaaaccacatatgagaagtacctgggtccccagtatgtggcggggattaccaacctgaagaagtgctcaacgagccccctgctggaggcatgcgaatttctgcgaaaatag

SEQ ID NO: 25087 - DNA, 1656 bp, synthetic construct
  misc_feature 1..1656: note = Description of Artificial Sequence: Synthetic coding sequence
  source 1..1656: mol_type = other DNA
aagcccctgctgaaccacgtgctggccatcaagggcccccggagcaggtggcgaactttctataatatcgcaacccgccgaaaggctttgaaaaatcctagtgaagagtacgggaaaattctcgaggtcgttggacgctatagtgtccacaacgctggcatcagcttctctgttaagaaacagggagagacagtggcggatgtgaggactctgccgaatgcgagcaccgtcgacaacataaggtccatttttggcaatgccgtatcacgggagctcattgagatcgggtgcgaggacaagaccttggcgttcaaaatgaatggctatattagcaacgccaattactccgtcaaaaagtgtatttttttgctgttcattaatcaccgattagtcgaatccaccagtctccgaaaagccatcgagaccgtttatgctgcttacctacccaagaatacccacccgttcctctacttgagccttgagatctccccacaaaacgttgacgtgaacgttcacccaaccaagcacgaagtgcatttcctgcatgaagaatctatcctcgagcgggtacaacagcacatcgaaagtaagctgttgggcagtaactcaagtcgaatgtattttacacagaccctgctccctggccttgccggtcctagtggcgagatggttaagtccacaacatccctgacgagctcctcaacctccggcagtagcgacaaggtctatgctcaccaaatggtacgtacagatagccgagaacagaagttggatgcttttctccaacctctgtccaagcccctctccagccagccccaagcaatcgtgactgaagacaaaacagacatttcctccgggcgggcgagacaacaggacgaagagatgctggagttgccggccccagcagaggtggccgccaaaaaccaatccctggagggggacaccaccaagggcacttccgaaatgtcagaaaagcggggccctacttcttccaatcccaggaaacgacatcgggaagactcggatgtggagatggttgaagacgacagccggaaagaaatgaccgccgcctgtacaccgaggcgtcgtataattaacctgacttccgtgctctccctccaggaggaaataaatgagcagggccatgaagtactgcgcgagatgctccacaaccacagtttcgtcggctgcgtgaacccacagtgggctttagcacagcaccagactaaattgtatcttctgaataccacaaagctgagtgaggagctcttctaccagatactgatttacgatttcgctaattttggtgtactccgactgtctgagcccgccccactattcgatctagcgatgctggctctggactctccagaatctggatggactgaagaggacggcccaaaagagggactagccgagtacatcgtagagtttctgaagaaaaaggctgaaatgcttgccgactatttctctcttgagatcgacgagagcgaggtacctggaagtatcccgaacagttggaagtggaccgtggaacacatcgtctataaagctctccgatcccacatcctgcccccaaagcactttaccgaggacggaaatattttgcagcttgctaatctgccagatttgtacaaagtgttcgaacgttgttag

SEQ ID NO: 25088 - DNA, 351 bp, synthetic construct
  misc_feature 1..351: note = Description of Artificial Sequence: Synthetic coding sequence
  source 1..351: mol_type = other DNA
atgagcgagaagcggggccccaccagcagcaacccccggaagcggcaccgagaggacagcgacgtggagatggttgaggacgattccaggaaggagatgactgcagcctgcaccccgagacgcagaatcataaatctgacaagcgtcctctccctccaggaagagatcaatgaacagggccacgaggttcttcgggagatgcttcacaaccattcattcgtaggctgcgtcaaccctcaatgggctcttgcccagcaccagactaagttgtatctgctgaacactaccaagcttcgggtcaaatgcctggcccctttccagacaccagggtcaggtttgtggaacacgtag

SEQ ID NO: 25089 - DNA, 525 bp, synthetic construct
  misc_feature 1..525: note = Description of Artificial Sequence: Synthetic coding sequence
  source 1..525: mol_type = other DNA
atgagcgagaagcggggccccaccagcagcaacccccggaagcggcacagagaggactctgatgtggagatggttgaagatgatagcaggaaggagatgacagccgcctgcaccccaagacggcgcattatcaacctgacatctgtactctccctgcaggaggagataaatgagcaaggccacgaggtgctacgagaaatgttacacaaccactcattcgttggctgtgtaaatcctcagccttggcattcaatcaaaccgagctacaccttctccacccctccttctttttccgaagaattgttctaccagatcctgatatacgactttgccaactttggggtacttcgactcagttccgaagtaccagggtcaatccctaactcctggaagtggaccgtggagcatattgtatataaagctctgaggagtcacattctccctcccaaacatttcacagaagatggcaacatcctgcagctagcgaatctgccagacctgtacaaagtgttcgaaaggtgttag

SEQ ID NO: 25090 - DNA, 1977 bp, synthetic construct
  misc_feature 1..1977: note = Description of Artificial Sequence: Synthetic coding sequence
  source 1..1977: mol_type = other DNA
atggccttcgaggccctggccagcatcagccacgtggcccacgtgaccatcactactaagacggccgatggaaagtgtgcctaccgggctagctactctgatgggaaactgaaggcacctccaaaaccctgcgcgggtaatcaaggaacccagattactgtagaagacctgttttataatatagcgacccgcaggaaggctctgaaaaaccctagtgaggaatacggcaagattctcgaagtggtaggcaggtactccgtgcacaacgcaggaatatcatttagcgtgaaaaaacaaggtgagacagtggcggatgtgaggaccttgcccaatgcttctactgtcgataatatccggtcaatctttggcaacgctgtgagccgggaactgatcgagatcgggtgcgaagacaagactcttgccttcaagatgaatggctatataagcaatgcgaactattccgtgaaaaagtgtatctttctcctgtttattaatcacaggttggtggagtctacatctctccgcaaggccattgagacagtttacgctgcctacctgcctaagaacacccatccatttctatatttgtcactggagatcagtccccagaatgtggatgtcaacgtgcatcccaccaaacacgaggttcatttccttcacgaggaaagcatacttgagagggtacagcagcatatcgaaagtaagctgttggggagtaactcgagccggatgtacttcacccagaccctcttacctggcttagctgggccaagtggagagatggtgaagagcacaacttctctcacctcttcttctacaagcgggtcaagtgataaggtttatgcacaccagatggtaagaacagactcgcgggagcagaaactggatgctttcttgcagcctctgtcaaaacccctaagctctcagcctcaggctatcgtcactgaagacaagacggacatctcctctggacgggcccgccaacaagatgaagaaatgctggagctccctgctcccgctgaggttgcagccaaaaaccaaagcctcgagggcgatacgactaagggcacttccgaaatgtccgagaagcgtggtccaaccagctctaatccccgcaagcgccacagagaagattctgatgtcgaaatggtcgaggatgactccaggaaagaaatgaccgccgcctgcactccaaggcgaaggattatcaatctgacttctgtactctcattacaggaggaaattaatgagcaggggcacgaagttctgcgcgagatgctccataaccacagctttgtgggatgcgtgaaccctcaatgggctctggcccagcatcaaaccaagctgtacctgctgaacacgacaaagctgagtgaagagcttttttaccagatccttatttacgacttcgccaattttggcgtgctgagactcagtgagccagccccgctgttcgacttagctatgctcgcactcgattcgccagagtctggctggacggaagaggatggacccaaggagggcctggccgaatacattgtagaatttttaaagaagaaggccgagatgcttgctgattactttagcctcgagatagacgaagaaggcaacttgattggactccccctcctgatagacaattacgttcctccactcgaggggttgcctattttcatcctcagacttgccaccgaggtgaattgggatgaggagaaagagtgtttcgagtcattgagcaaggagtgcgcgatgttctattcaatccggaagcaatacatctcagaggaatcaaccctcagcggacagcagagcgaggttccgggcagcatcccgaatagttggaagtggacagttgaacatatcgtatacaaagcactgcggtcccacatcctccctccaaagcacttcaccgaagatggcaacatattacagctcgccaatctgcctgacctttacaaggtcttcgaacgctgctag

SEQ ID NO: 25091 - DNA, 960 bp, synthetic construct
  misc_feature 1..960: note = Description of Artificial Sequence: Synthetic coding sequence
  source 1..960: mol_type = other DNA
atgatcgagaactgcctggacgccaagagcaccagcatccaggtgatcgttaaggagggtggcctgaaattgatccagatccaggacaatgggacggggattcgtaaggaggaccttgacatcgtgtgtgagcgatttacaacctccaagctgcagagttttgaggatctggcatcaatttctacctatgggttccggggcgaggcactggccagtataagtcacgtggcacacgtgacgatcacaacaaaaacagcagatggtaagtgtgcctacagggcctcttatagcgatggcaaacttaaggctccccctaagccatgcgcaggaaaccagggcacgcagatcactgttgaagatctgttctacaacatcgctaccagacgaaaagcactgaaaaatccgtccgaggagtacggtaagatcctcgaggttgtcgggcgctatagcgtgcataacgcaggcatctcattcagtgtgaaaaaacagggggaaacggttgccgatgtccggacccttccaaatgcctcaaccgtggataacatacggtctatctttggtaacgccgtgtctcgcgaactgatcgaaattggttgtgaggacaagaccctcgcttttaaaatgaacggatacataagtaacgcaaattactctgtcaagaagtgtatctttctactgtttataaatcacaggctcgtggagagtacctctttgcgaaaagccatagagacagtgtatgccgcctatctccccaaaaacacccacccgttcctttacctttccctggaaatctccccccaaaacgtcgacgtgaatgtacatcccactaaacatgaggtgcactttctgcatgaggagtcaatactggaaagggtgcaacagcacattgagtccaagttgttaggtagcaattcatctcgcatgtattttacacaaaaggagacaagcggacggttttag

SEQ ID NO: 25092 - DNA, 1548 bp, synthetic construct
  misc_feature 1..1548: note = Description of Artificial Sequence: Synthetic coding sequence
  source 1..1548: mol_type = other DNA
atgaacggctacatcagcaacgccaactacagcgtgaagaagtgcattttcttgttatttatcaatcaccgattagtggaatctacttccttgcgcaaagctatagagactgtgtacgccgcttatcttccaaagaacacccatcccttcctgtacctgtctctggagatctctcctcaaaacgtggacgtcaatgtacatcctacaaagcacgaggtccattttttacatgaggaatctattttagaaagggtgcaacagcacatcgaaagtaagcttttggggtccaactcatcccggatgtattttacgcagaccctgctccccggattagcaggaccaagcggcgagatggtgaagtctacaacctccctcacctcctcgtccacctctggttctagcgacaaggtatacgcgcaccagatggtgaggacagatagccgagaacagaagctggacgcctttcttcagccactcagtaaaccactgagctctcagccacaagcaatcgtgaccgaggacaagacagatatatcatccggaagagcaaggcagcaggacgaggaaatgcttgagctgcccgctcctgctgaggtcgctgctaagaaccaatcgttggagggcgataccaccaaagggacaagcgagatgtctgagaagaggggacccacaagttctaacccaagaaagcgacatcgggaagactcagacgtcgaaatggttgaagatgacagtaggaaggagatgaccgccgcgtgcaccccaaggcgacgcatcatcaatcttacttcagtcctctctctgcaggaagaaatcaacgagcaggggcacgaggtgctccgagagatgctgcacaatcactcttttgtgggttgtgttaacccccagtgggccctggctcagcatcagacgaaattgtacctgctcaatacgacaaagctatccgaggaactcttttaccagatcctcatttatgatttcgccaattttggggtgctgaggttaagcgaaccggctcccttgttcgatctggctatgcttgctctggactcgcctgagtcagggtggaccgaagaggatggcccgaaggaaggtctggccgaatatattgttgaatttctgaaaaagaaggccgaaatgctggcagactacttctctttagaaattgatgaagaaggaaacctcatcgggctcccactgctgattgacaattacgtaccccccttggaaggtctccctatattcatcctgcgcctggccaccgaagtcaactgggacgaggagaaagagtgctttgagagcctctcaaaggaatgtgccatgttctactccatacgtaagcagtacatctcggaagagagtacactctccggacaacagagtgaggtcccgggttccatacctaatagctggaaatggaccgtcgagcacatcgtctataaggccctgagaagtcacatcctgcctccaaaacatttcactgaggatggaaatatcctccagctggcaaatcttccagacctatataaggtattcgaacggtgctag

SEQ ID NO: 25093 - DNA, 2040 bp, synthetic construct
  misc_feature 1..2040: note = Description of Artificial Sequence: Synthetic coding sequence
  source 1..2040: mol_type = other DNA
tgacggctggacgagaccgtggtgaaccggatcgccgccggcgaggtcatccagagacccgcaaacgccatcaaggagatgatcgaaaattgcttggatgcaaaatccacatccattcaggtgatcgtgaaggaaggcggtttaaagttaattcagattcaagacaacggcactggtatacggaaagaggatctcgacatcgtttgcgagcgctttaccacttctaaactccagtcttttgaggacctggccagcatatcgacctacggtttcagaggcgaggccctggcctctatttcccacgtggcccacgtgacaatcacaaccaagacagccgacggtaagtgcgcatatagagccagctactctgacggcaagctgaaagctcctccgaagccttgcgccggtaatcagggcactcagatcacagtcgaagatctgttctataacatcgcaaccaggagaaaggcgctgaaaaatcccagcgaggagtatgggaaaatcctggaagtggttggtcggtactccgttcacaacgcaggtatctcatttagtgtgaagaagcaaggcgagaccgtcgccgatgtgagaaccctgcctaatgcatccaccgtggataatattagaagcatcttcggcaatgccgtatctcgcgaattgatcgagatcgggtgtgaagataagacattagccttcaaaatgaacggatatattagcaacgccaattactccgttaagaaatgcatttttctgcttttcattaatcaccggcttgtggaaagtacatctctgagaaaggctatcgagacagtttacgctgcctacctgcccaagaatacccatcccttcctctacctgtcattggaaatttccccacagaatgtggatgtgaatgtccacccgaccaaacacgaggtccactttctccacgaagagtcgatcctcgaaagagttcagcagcacatcgaaagtaagctactgggcagcaacagttcccggatgtacttcacacaaactctgctgccagggctggctggaccatccggcgagatggtcaaatcaactacatccttgactagttcctctacatcagggtcatccgataaagtctacgcccaccagatggtgcggaccgatagccgcgaacagaagctggatgcctttttacaaccgctgagtaaacctctgtccagccaacctcaagcaattgtgactgaggataagactgacattagttctggaagagccagacagcaggacgaggaaatgttggaactgcccgcacccgctgaggtggccgctaaaaatcagtctctcgagggggataccacgaaaggcacttcagagatgagcgagaaacggggcccaacctcttctaaccctagaaaacgacacagggaagattcagatgtggagatggttgaggatgattctcggaaagagatgactgccgcatgtacacctaggcggcgaatcattaatcttacatccgttctgtcactgcaggaggaaatcaatgaacaggggcatgaggtgttgcgcgaaatgctccacaatcacagcttcgtgggctgtgtaaaccctcagtgggcgcttgctcaacaccagacgaagctctacttgttaaataccactaagctgtctgaggagctgttttaccagattctgatctatgattttgcaaattttggcgttttgagattgagtgaacccgccccgctctttgatcttgcaatgctggcactggattccccagaaagcgggtggaccgaggaagatgggcccaaagaagggctggcggaatatattgtggagttcctcaagaagaaggctgagatgttagctgactatttcagcctagagatcgatgagagcgaagtgcctggatctatccctaactcctggaagtggactgtcgaacacatcgtttataaggctctgagaagccacatactgcctcctaagcattttacagaagatggaaatattctgcagctggctaacctccctgatctgtataaggtttttgagcgctgctag

SEQ ID NO: 25094 - DNA, 1548 bp, synthetic construct
  misc_feature 1..1548: note = Description of Artificial Sequence: Synthetic coding sequence
  source 1..1548: mol_type = other DNA
atgaacggctacatcagcaacgccaactacagcgtgaagaagtgcatttttctgctgtttatcaatcacaggctcgttgagagcacatccctcagaaaagccatcgagactgtgtacgcagcttacctccccaaaaatacccacccttttctgtacctgagcctcgaaatctccccccaaaacgttgatgttaatgtgcatcctacaaaacatgaagtgcacttcctacacgaggaaagcatcctagagagggtgcaacaacatatcgagagcaaactcctggggtctaatagcagtagaatgtattttacacagacactcttgccagggctggcagggcctagcggagagatggtcaaatctaccacatcactgacctcctcctccacttcagggagctctgacaaggtatacgcccaccagatggtgagaactgactctcgcgaacaaaaacttgacgcttttcttcagccactatctaagccgctttccagtcagccccaggcaatcgtgacagaagacaagaccgatatatccagcgggcgcgcacggcagcaagatgaagagatgcttgaactgcccgctcccgctgaggtagccgctaaaaaccaaagcctcgagggggacaccaccaaaggtaccagcgagatgagcgagaaacggggaccaacttccagcaacccccggaagcgtcacagggaagatagcgacgttgagatggtggaggatgactcccggaaggaaatgacagcggcctgcaccccgcggagaaggattatcaacctcacttcggtgctgtccctgcaggaggagattaatgagcagggccatgaagtcctgcgtgagatgctgcacaaccacagtttcgtgggctgcgttaacccacagtgggctctcgctcagcaccagactaagttgtacctgctgaatacgactaaacttagcgaagagctgttttaccaaattctaatttacgacttcgctaactttggcgttctgcgcctgtccgagccggcccccttattcgacctagcgatgctagctcttgactccccagagtcggggtggaccgaagaagacggccccaaggaaggcctggccgaatacattgtggaattcttgaaaaaaaaagctgagatgttggcagactatttcagcctagagatcgacgaggaggggaacttgattggtctcccactacttattgataactatgtaccccccctggaggggctcccgatatttatcctgcgtctggccacagaggtgaattgggatgaggagaaggagtgttttgagagtcttagtaaggagtgcgctatgttctatagtatcagaaaacagtatataagcgaggaaagtaccctctcagggcaacagtccgaagtgccaggtagcatccctaactcctggaaatggactgtggaacatattgtttataaggctcttaggtcccatattcttccacccaagcattttaccgaggatggtaacattctccagctggccaaccttccagacttatacaaagtattcgaacgatgctag

SEQ ID NO: 25095 - DNA, 1383 bp, synthetic construct
  misc_feature 1..1383: note = Description of Artificial Sequence: Synthetic coding sequence
  source 1..1383: mol_type = other DNA
atgaacggctacatcagcaacgccaactacagcgtgaagaagtgcatattcctcctgtttatcaatcaccggctcgtggagtctacgtcgctgcggaaggctattgagaccgtttacgccgcttacctaccaaaaaatacccatccgttcctctacctttcactggaaatctccccccaaaacgtggatgtcaatgtgcatccaacaaaacatgaggtccactttctgcacgaggaaagtattctggagagagtgcaacaacatatagagtccaagttgctcggtagtaactcttcacggatgtactttacgcagacgttgctgccaggcctggccggacccagtggtgagatggtcaaatccactacctcactcacctccagcagcacaagcggtagctccgataaggtgtatgcccaccagatggttcgtactgatagcagggaacaaaagctggatgcatttctgcagccattgtccaagcctctctcgagccagccacaggctatcgtgactgaggacaagaccgatatctccagcggcagggccagacaacaggacgaggaaatgctcgaactgcctgcccccgccgaagtggcggccaaaaaccagtctttggaaggggacactactaagggtaccagcgaaatgagtgagaagcgaggcccaacatcctctaacccgagaaagagacatcgggaagactccgatgtggagatggtggaagacgattcccggaaagagatgaccgccgcctgcacgcctcgaaggagaattataaacttaacatcggtcctaagcctccaggaggagatcaatgagcagggccacgaagttttacgcgagatgctccacaaccattcttttgttggctgtgtcaaccctcagtgggccctcgcgcagcaccagaccaaactgtatctcctgaataccacaaaactcagcgaggagctgttttaccagatccttatatatgatttcgccaactttggcgttttgaggctatctgaacccgctccactttttgacctggccatgctagcccttgactctcctgagagcggctggaccgaggaagatgggcccaaagaaggcctggccgagtacatcgtggagtttttaaagaaaaaggctgaaatgcttgctgattatttctctctggaaatcgatgaggagggaaaccttataggactccccctgcttattgataactatgtccctccactggaaggcctgccaatattcatcctgcgcctggcaacagaggtcaactgggacgaagaaaaagagtgcttcgaaagccttagcaaggaatgcgctatgttctattctattaggaagcagtacatttcagaggagtcaactctgagcgggcagcagtag

SEQ ID NO: 25096 - DNA, 843 bp, synthetic construct
  misc_feature 1..843: note = Description of Artificial Sequence: Synthetic coding sequence
  source 1..843: mol_type = other DNA
atgatcgagaactgcctggacgccaagagcaccagcatccaggtgatcgttaaggagggtgggttgaaactcattcagatccaggacaatggcaccggcattcgtaaggaggatttggatatcgtctgtgagcggtttactacctctaaattgcagtccttcgaggatctggcgagtatttctacttacgggttcaggggcgaggctctcgcctcgatcagtcacgttgcgcatgtgacgataactaccaaaacagccgatggtaagtgtgcttacagggcttcctactccgatggcaagctcaaagctcccccaaagccttgtgctgggaaccaggggactcagatcacagtcgaggatctcttttacaacatcgcaacccgccgtaaagctctgaaaaatcccagcgaggaatacggcaagatacttgaagtggttggaaggtatagtgtacataatgcaggtattagctttagcgttaagaaacagggagagaccgttgcagacgtcagaactctgcctaacgcctctactgttgacaacattcggagtatcttcgggaatgctgttagtagggagcttatcgagatcggttgcgaagacaagaccttggcttttaagatgaatggttatatcagcaacgccaattattcagtgaagaaatgtatattcttattgttcattaaccatcgcctggttgaaagtacctcacttcgcaaggccattgagacagtttatgccgcctacttaccaaaaaatacacacccctttctctaccttagactctgttatcaggacctgctggcccccttggggcgctggctcaaccctcaacaggtgtag

SEQ ID NO: 25097 - DNA, 1548 bp, synthetic construct
  misc_feature 1..1548: note = Description of Artificial Sequence: Synthetic coding sequence
  source 1..1548: mol_type = other DNA
atgaacggctacatcagcaacgccaactacagcgtgaagaagtgcatcttcctcctgttcatcaaccatcgcttggtcgagtctaccagtctgcggaaggcgattgagacagtttatgccgcttacctgcccaaaaatactcatccatttttgtacctcagtctggagatatccccccagaacgtggacgtgaatgtgcacccaaccaagcacgaagttcacttccttcatgaggagagcatcctggagcgcgtccagcagcatattgaatctaaactcctcggatccaatagctcccgcatgtatttcacacagaccttattgcccggccttgcggggcccagtggggaaatggtgaagtctaccactagtctaacctcttccagcacgtctggatctagcgacaaggtctatgcgcaccagatggtgcgaacagactcacgggagcagaaactggacgcatttctccagcccttgagtaaaccgctaagcagtcagccacaggcaatagtgaccgaagataaaacagacataagttctgggagggccaggcagcaggacgaagagatgctagaattgcccgctccggcggaagtagcagccaagaatcagtcacttgagggcgacacaactaaaggaacttctgagatgtctgaaaagagagggccgacatcttctaatcctagaaagcgccatcgcgaggactcggacgtggaaatggtagaggatgattctcggaaggagatgacggcggcctgtactccacgcagacgcatcatcaatctgacttccgtgctgtctctccaagaggagattaacgagcaagggcatgaagtccttagggaaatgcttcacaaccattcttttgtgggatgtgttaatcctcagtgggcgctcgcccagcatcaaacaaagctgtatcttttaaacacgaccaaacttagtgaagagttgttttaccagatcttgatctacgactttgctaacttcggagtgctaaggttgtctgagccagcacccttattcgatttagctatgctggctcttgatagcccagaaagtggatggacagaagaagacggccctaaagaggggcttgccgagtacattgtcgagtttctgaaaaaaaaggcagagatgctggccgactactttagtctagaaattgacgaggaggggaatctgataggactgcccctgctgatcgacaactacgtcccaccactggaaggactacccattttcatcctcagactggccacggaggttaactgggacgaggagaaggaatgctttgagtccttatctaaggagtgcgctatgttctacagcatccgtaagcaatatatctcagaagagtcaactctgtctggtcaacaatccgaagttccaggtagcatcccaaactcatggaaatggaccgtcgaacatatcgtctacaaggctcttagaagtcatatactccctcccaagcatttcacagaggacgggaatatcctgcagctcgctaacctgcccgacctgtacaaggtcttcgagcgctgctag

SEQ ID NO: 25098 - DNA, 4290 bp, synthetic construct
  misc_feature 1..4290: note = Description of Artificial Sequence: Synthetic coding sequence
  source 1..4290: mol_type = other DNA
atgatcaagtgcctgagcgtggaggtgcaggccaagctgcggagcggcttggctatatcctctcttggacaatgtgtcgaggaactggctttgaatagcattgatgctgaggctaaatgcgtagcggtcagagtgaacatggagacattccaggtccaggtgatcgacaacggatttggcatgggcagcgacgatgtggaaaaggtcggtaacaggtactttacctcgaaatgtcacagcgtccaggaccttgaaaatccgcgattttacggctttcgaggggaggctctggctaatattgctgatatggcgtcagccgtggagattagcagcaagaagaaccgcactatgaaaacttttgtcaaactgttccaaagcgggaaagcattaaaagcttgcgaggcagacgtgactcgagcctctgcggggacaaccgtcaccgtgtacaaccttttttatcagctacctgtgcgccgaaaatgtatggaccctcgcctagaatttgagaaggtgcgccagcgcatcgaggccctctctctcatgcatccctcaatttccttctctctaagaaacgacgtttccggctctatggtccttcagttgcccaaaaccaaagacgtgtgctcccggttctgtcagatttatggtctgggaaagtcacaaaaattacgcgagattagtttcaaatacaaggaattcgagttgtcaggatacatttctagtgaggcacattataacaaaaacatgcagttcctgtttgttaataagaggttggttctccgcactaagctgcacaagctgatagattttcttcttaggaaggagtcaattatttgtaagcccaagaatggtccaacctcaagacaaatgaattcttcactgaggcatcggtctactcctgaactctacggtatatacgtgattaacgtgcagtgtcagttttgcgaatacgacgtgtgcatggaacccgccaaaactctaatcgaatttcagaactgggatacactgctgttctgcatccaggaaggcgtgaagatgttcctgaagcaggaaaaactattcgttgaactctctggagaagacatcaaagagttcagcgaggacaatgggttctcgctctttgacgccaccctgcagaaacgtgtgacttcagacgaaagatccaactttcaagaggcctgcaacaatattcttgattcctacgaaatgtttaacttacagagcaaggccgtgaaacggaagaccactgccgaaaatgtgaacactcagtccagccgcgatagcgaagcaacgagaaaaaacacgaatgacgcctttctgtacatttacgagagtggcggcccagggcatagcaagatgacagaaccatctctgcagaacaaggattcctcatgctcggagagcaagatgctggagcaggagactatcgtcgcgtctgaagccggcgagaatgagaagcacaagaagtcctttctggaacactcatctctggaaaacccctgcggaacatccctggaaatgtttctcagccctttccaaacgccgtgtcacttcgaggaatccgggcaagatcttgaaatttggaaggagtccacaacagtgaacggcatggctgccaacatcctgaagaacaacagaattcaaaatcagccgaagcggttcaaggacgccaccgaagtgggctgtcaacctctgcccttcgccaccactctgtggggggttcacagcgcacaaacggagaaggaaaaaaagaaggaatccagcaactgcgggagacggaacgtgttcagctacggacgggtgaaactgtgctcaactggcttcattacgcatgtggttcagaacgaaaaaactaagtcaaccgaaacagaacattccttcaagaactatgtaagacccggtccaacccgcgcacaggagacgttcggtaacaggacacgtcattccgtggagaccccagatattaaggacttggcatcaaccctttcaaaggaaagtggacaactgcccaataaaaagaattgccgaactaacatctcgtatgggctcgagaacgaaccgacggctacatacacaatgttctccgcctttcaagagggatcaaagaagtctcagacagattgcatcttgtctgacacctccccctcatttccatggtatcgacacgttagcaatgacagtcggaagacagacaagctcatcggtttttctaagccaattgtccgcaaaaagttgagcctgagctctcagctggggtctctcgaaaagtttaaacgccagtatggtaaagtcgagaacccacttgataccgaagtggaagaaagtaacggagtgaccaccaatctttctctccaggtggagcccgacatcctgctgaaggacaaaaaccgacttgagaattccgatgtctgcaaaatcaccacaatggagcattctgacagtgactcctcatgccagcctgctagccatatcttaaattcagaaaaatttccgtttagtaaggatgaagactgtctggagcaacaaatgccaagtctccgggaatccccgatgacgcttaaagagctgtctttgttcaatagaaagcccctggatctggagaagtccagtgaaagcctcgcctctaaactttctagactgaagggaagcgaacgcgagacccagaccatggggatgatgtcacgcttcaacgaactgccaaatagtgacagcagtcgcaaagacagcaaactctgttcggtccttacccaagacttctgcatgctttttaataacaagcatgaaaagacagagaatggcgtgattccgacgtccgattccgctactcaagataactcatttaacaagaattctaagactcactctaatagcaataccaccgagaattgtgtgatcagcgagacaccgcttgtacttccctacaacaactcaaaagtcaccggcaaggactctgacgtacttatacgcgctagcgaacagcagatcggctctctggactctcctagtggaatgttgatgaatcccgttgaagacgcaacaggcgatcagaacggcatctgtttccaatcagaggagtctaaggcaagagcttgcagcgagacagaggaaagtaatacttgttgctctgattggcagcgacatttcgacgtggcactggggcgcatggtgtacgtaaacaaaatgaccggactgtcaacatttatcgcaccgacagaagacattcaggcggcctgcaccaaggatctcactacagtcgccgtcgatgtggtgctggagaacggatctcaatataggtgccagccgttccgtagcgatctggtcttgccgtttctccctagggctcgcgcagagaggactgttatgcgccaggacaacagggacactgtggatgacaccgtgtcaagcgaatccttgcagtctcttttctccgagtgggacaatcctgtcttcgcccggtatccagaagttgctgtggacgtaagttccgggcaggccgaaagccttgccgtcaagatccataatatactgtacccctatagatttaccaagggcatgatccattctatgcaggtgctgcagcaggttgataacaagttcatagcatgtcttatgagcacaaaaactgaagagaatggagaggctgattcctacgaaaagcagcaggctcagggctccggtcggaagaaactcctgtcttctacgctcatccctcctctggaaattacagtgacagaagaacagaggagactcttatggtgttatcataaaaacctggaggatctgggtcttgagtttgtatttcctgacaccagtgacagccttgtattggttgggaaagtgcccctgtgcttcgtggagcgggaagcaaatgagcttaggagaggcaggtcaactgtcactaagtccatagtggaagagtttattcgggagcagttagaactgttgcagactacaggcggcatccagggtacactgccgctcactgtgcaaaaggttctcgcctcccaggcttgccacggggcgattaaattcaatgatgggctgtcgctccaggaatcgtgccgccttatagaggcactatcctcctgccagcttccgtttcagtgcgcccacggcagacccagcatgttgcctcttgctgatatcgaccatctggagcaagagaagcagattaaaccaaatttgacaaagctgagaaaaatggcgcaggcttggcgattatttggtaaagccgaatgcgacacacgccaatctctgcagcaatcaatgcccccatgtgaaccgccatag

SEQ ID NO: 25099 - DNA, 4362 bp, synthetic construct
  misc_feature 1..4362: note = Description of Artificial Sequence: Synthetic coding sequence
  source 1..4362: mol_type = other DNA
atgatcaagtgcctgagcgtggaggtgcaggccaagctgcggagcgggcttgctatttcctccttaggtcaatgtgtcgaggagctcgcgctgaatagcattgacgctgaagccaagtgcgttgccgtgagagtgaacatggagacgtttcaggtgcaggtcatcgacaatggtttcggcatgggaagcgatgatgtagaaaaggtcgggaatcgatatttcaccagtaagtgtcattcagtccaagatctggagaatcctaggttttacgggttcagaggggaagctctggctaatattgcagacatggcttcagccgtggaaatctcgagcaagaaaaacagaacaatgaagacctttgtgaagctgttccagtcgggcaaggccctgaaagcgtgcgaggccgatgtcactcgcgcctccgccgggacaaccgtcactgtttataacctgttctaccaactgcctgtgcgccgaaagtgcatggacccccgtttggagttcgagaaggttcgtcagcgtattgaggccctgtcactgatgcatccatcgatctccttcagcttgaggaatgatgtgtctggatctatggtgctccagctgccaaagaccaaggacgtctgcagtagattctgtcagatctatggcctgggaaaatcacagaaactcagggagatttcgtttaagtataaggagttcgagctgtcgggctatataagcagcgaagcacattacaacaaaaacatgcagtttttatttgtgaacaagagattagtcttgaggaccaagctgcataaactgatcgactttcttctgaggaaagagtccataatatgcaagcctaaaaacgggcccaccagccggcagatgaactcatccttaaggcatcgctcaaccccagaactatacggaatatacgtcataaatgtgcagtgccaattttgcgaatatgatgtgtgtatggagcctgccaagacactcatcgaattccagaactgggacacattactgttctgcattcaggagggcgtaaagatgttcctcaaacaggaaaaactttttgtggagctcagtggggaagacattaaggaattttctgaggataatggttttagtctgttcgatgccaccctgcagaaacgggtcacgtcagatgagagatcaaacttccaggaggcctgtaataacatactggactcatatgaaatgttcaatctgcagagcaaggccgttaagagaaaaactactgcagagaacgtgaatacccagagctccagggactcagaagcgacacgcaaaaacaccaacgacgcatttctgtatatttacgaatccggagggcccggtcactctaaaatgacagagcccagtctacagaataaagactcatcttgttccgaatccaagatgctggagcaggagactatcgtggccagcgaggctggagagaatgagaagcataagaagtcatttcttgaacacagttccttggagaatccttgcgggacatctttggaaatgtttctgagcccatttcagacgccttgtcattttgaagaatccgggcaggacctcgagatctggaaagagtctacgaccgtcaacggtatggccgcgaatatcctaaaaaacaataggatacaaaaccaacccaagagattcaaggatgcgactgaggtaggctgccagccccttccctttgcaaccactttatggggcgtgcatagtgctcagaccgaaaaggagaagaagaaggagtcctccaattgcggcaggcgtaatgtcttctcttacggcagagtgaaactttgcagcactggattcattactcacgtagttcagaacgagaaaactaagtctacggagacagagcattcctttaagaactatgtccggcctggccctactcgggcccaggaaaccttcggaaaccgtactcgccactccgttgaaaccccggatataaaggatctggcaagcacactgtctaaagagtcagggcagttgccaaataaaaagaattgccgtacaaacatctcttacggcctcgaaaacgaacctacagcaacttatacaatgttttccgcattccaggaaggttccaaaaagagtcagaccgattgtattctgagcgatacaagtccttctttcccttggtacaggcacgtatctaatgattctcgcaaaaccgataagctgataggtttcagcaagccgatcgtgaggaagaagctgtctctgagctcccaattagggagcctggagaaattcaaacggcagtatggcaaggtagaaaatccccttgacacggaagtagaggaaagcaatggtgtgacaactaatctgagcttacaagtggagccagatatactgctgaaggacaaaaataggctggagaattccgatgtgtgtaaaatcactaccatggagcacagcgactctgacagttcgtgccagcctgcatctcatattctgaatagcgaaaagttccctttctcaaaggacgaagactgtttagaacagcagatgcctagcctccgggagagtcctatgacactcaaggaactgagtctgtttaatcgcaaaccactggacttggaaaagagcagcgaatcactcgcaagcaaactgtcgagacttaaagggagtgagagagaaacccaaacgatgggcatgatgagtcggtttaacgagctgccgaatagcgattcctccagaaaggatagcaaactgtgcagtgttttaacacaagatttttgcatgctgtttaacaataaacacgagaaaacagagaacggggtaatacctaccagtgacagcgccacgcaggacaattcatttaacaagaattctaaaacgcactcaaactctaatacaaccgaaaattgtgtgatctccgaaacaccgctagtgctgccctacaacaactccaaggtcactggaaaagactcagacgtgcttattcgcgcctcagaacagcaaattgggagcctcgattctccatccggaatgctcatgaatccagtggaggatgcgaccggtgatcagaatggcatctgcttccagtctgaagaatccaaggccagagcatgctcagaaactgaggagagcaacacatgttgtagcgactggcaaaggcacttcgacgtggccctgggaaggatggtgtatgtgaataagatgaccggacttagtacatttattgctcctaccgaagacatccaggccgcctgcacgaaagacctgaccacagtggccgtcgatgttgtgctcgagaacggctcacaataccggtgccagcccttcaggagcgatctggtgcttcctttcctgcctagggcgcgggccgaaagaaccgttatgaggcaggacaacagggacacggttgacgacacggtatcttccgagtccctccaatcactcttctcagagtgggacaacccagtattcgctcggtatccagaagtggccgtggacgtgagcagcgggcaggctgaatcccttgctgtgaagatccataatattctctacccgtatcggtttactaagggaatgatccacagtatgcaagtgttgcaacaggtggataataagttcatcgcatgccttatgtccactaaaacggaagagaatggagaggccgggggaaatctgctggtgctcgtggatcaacacgccgcgcacgagagaatccgcttagagcagttaataattgacagctatgagaaacagcaggcccagggatctggccgtaagaagctcctttcaagcacccttattcctcctctggagatcactgttaccgaagagcagaggcgcctgctgtggtgctaccataaaaacttagaagacctgggcctggagttcgttttcccagacacatccgattctttagtcctggtggggaaggttccattgtgtttcgttgagcgtgaagcaaacgagctgaggagaggtcgaagtacagttacaaaaagcatcgtggaagaatttattcgggaacagctcgagctcctgcagacaaccggcggtattcagggcactctcccactgaccgtacagaaagtgcttgctagtcaagcgtgtcacggtgctataaagttcaacgatggcctgagcttacaggagagctgcaggctgatcgaggcacttagctcctgtcaactcccctttcagtgcgcccacggacggcccagtatgctgccgctcgccgacatcgaccatctcgagcaggaaaagcagatcaaacctaatctcaccaagctcaggaaaatggctcaagcctggaggctctttggcaaagcagaatgtgacacacgccagtctctgcagcagtcaatgcctccctgtgaaccaccttag

SEQ ID NO: 25100 - DNA, 1176 bp, synthetic construct
  misc_feature 1..1176: note = Description of Artificial Sequence: Synthetic coding sequence
  source 1..1176: mol_type = other DNA
atggtgtacgtgaacaagatgaccggcctgagcaccttcatcgccccaactgaggatattcaggcagcctgtactaaagacttgacaacagtggccgtcgacgtcgttctggagaacggatcacagtaccgatgccagccttttaggtccgaccttgtgctgccattcctgccccgcgcccgtgccgagcgaactgttatgaggcaggacaaccgagataccgtcgacgacaccgtatcttccgaatccctgcagtccctcttttctgagtgggataaccccgtgttcgcaagatatcctgaggtagccgtagacgtgagtagcggccaggctgagtcactggctgttaaaatccacaatatcctgtacccttacagatttacaaaaggtatgatccatagtatgcaggtattgcagcaagtggataataaattcatagcctgcctcatgagtacaaaaacagaagaaaacggcgaagcaggcggcaacttgctggtgctggtcgatcagcacgccgctcacgagcgaattcgcctagagcaactgatcattgactcatatgaaaaacagcaggcacagggttccggtcggaagaagttactcagcagcacactgatccctcctctggagatcacagtcacggaagagcagcgcaggctcctctggtgttatcataaaaacttagaagatcttggcctggaatttgtctttcccgacacctctgacagcttggttcttgtgggaaaggtgccgctgtgttttgtggaacgtgaggccaacgagctccgcaggggacgcagcactgtaaccaaaagcattgttgaacttttgcagacgaccggtgggatccaaggaacactgccacttacggtccagaaggtcctggcgagtcaggcttgccacggtgcaatcaaattcaatgacggtctttcgttgcaggaatcgtgccgcttgattgaggccctttcatcttgtcagctccctttccagtgcgctcatggacgccccagtatgttgcctctggctgatattgatcatctagagcaggagaaacagatcaaaccaaacctgactaaactccgtaaaatggcacaagcctggaggctgttcggcaaagcagagtgcgatacgcggcaatcactgcaacagagcatgccgccctgcgagcccccctag

SEQ ID NO: 25101 - DNA, 597 bp, synthetic construct
  misc_feature 1..597: note = Description of Artificial Sequence: Synthetic coding sequence
  source 1..597: mol_type = other DNA
atgaaccccgtggaggacgccaccggcgaccagaacggcatctgcttccagtccgaagaaagcaaagctagagcgtgttctgagactgaggagagcaatacatgctgctccgattggcagcgacattttgatgttgccttaggaagaatggtttatgtaaacaaaatgacaggtttgtctaccttcatcgcgccgaccgaggacatccaagcggcttgcactaaagatttgaccactgtcgcggtggatgtggtcctggagaacggctctcagtaccgctgtcaaccctttagatcggaccttgtccttccattcttacccagagcccgggccgaacgaaccgtgatgcgtcaagataatcgcgacacggtcgacgatactgtcagctcagagtcactacaatctttgttttctgaatgggataaccccgtatttgccagataccctgaagtgttgcagcaggtggacaacaagttcatcgcctgcttgatgtcgactaaaaccgaggagaacggcgaggccgctgagttgatgatgctccaagatccttgctgtaggcaatcccgcgaggacgaaaatcacgagtttagcctttag

SEQ ID NO: 25102 - DNA, 489 bp, synthetic construct
  misc_feature 1..489: note = Description of Artificial Sequence: Synthetic coding sequence
  source 1..489: mol_type = other DNA
atgatcaagtgcctgagcgtggaggtgcaggccaagctgcggagcggcctggcaatctcgagcttggggcagtgcgtggaagagctagccttgaattctatcgatgccgaggccaagtgcgtggcagtacgcgtgaatatggaaactttccaagtacaggttatcgacaacggcttcggtatgggtagcgatgacgttgagaaagtggggaatagatattttacaagtaagtgtcactccgtgcaagacctggagaaccccaggttctacggttttagaggcgaggccctcgcaaatatcgccgacatggcaagcgctgtcgagatctcttctaagaaaaatcggacaatgaaaacttttgtgaaactgttccagtctggtaaagcattgaaggcatgtgaggcggacgtgacaagagccagtgctgggacaacagttactgtatataaccttttctatcagctccctgttaggcggaaatgcatgtag

SEQ ID NO: 25103 - DNA, 4362 bp, synthetic construct
  misc_feature 1..4362: note = Description of Artificial Sequence: Synthetic coding sequence
  source 1..4362: mol_type = other DNA
atgatcaagtgcctgagcgtggaggtgcaggccaagctgcggagcggcctggctatcagtagcctaggccagtgcgtggaagagttggctttaaatagtatagacgccgaggccaagtgtgtggcagtgcgcgtcaatatggaaacgttccaagtccaggtcatagacaatggctttggcatgggttccgatgatgtggaaaaggttgggaatcgatactttacatccaagtgtcatagcgtacaggacttggagaaccctcgcttttatggtttcaggggggaggccctcgctaacattgccgacatggctagcgccgttgaaatttccagcaagaaaaaccgaacaatgaaaaccttcgtcaaactgttccaaagtggaaaagccctgaaggcatgcgaggctgacgtgacccgagcatcggcaggcaccaccgtaaccgtgtacaatctattctatcagcttccagttcgacgcaagtgtatggatccacgcctggaattcgagaaggtgcggcagcggatcgaagccctgagtctgatgcatccctccatttctttctccctccgtaatgatgtttctggatctatggtactccaactccctaaaacaaaggatgtttgtagccgattctgccaaatctacggcctgggcaagtcccaaaagcttagagagatcagttttaagtacaaggagttcgaactctctggctacatttcatctgaagcccactataacaagaatatgcaatttctgtttgtaaataaaagacttgtgctgcggacgaagttgcataagcttatcgacttcttacttcgaaaggaatcaatcatctgtaaacccaaaaatggccccacttcgagacagatgaactcatccctccgccacagaagtacccccgaactgtacggcatctacgtcattaacgtgcaatgtcaattttgcgaatatgacgtttgcatggaacccgcaaagacgttgatcgagtttcagaactgggataccctcctcttttgtatccaagaaggtgtgaagatgttcttgaaacaggaaaaactgtttgtagagctgtcaggggaggatatcaaggaattttctgaagacaacgggttcagtctgttcgacgcaaccttgcagaagcgcgtgacctctgatgagcgctccaactttcaggaggcttgcaataatattctggacagctacgagatgttcaacctccaaagcaaggcggttaagaggaagactacagccgagaatgtcaacacacagagcagccgcgacagcgaggcaacccgcaagaataccaacgatgccttcttatatatttacgagagcggggggcctggccactctaagatgacagaaccctccttacaaaacaaggatagttcttgcagcgagtcaaagatgctggagcaggaaacaatcgtggctagtgaggctggagagaatgaaaagcacaagaagagcttcctggaacacagcagtctggaaaacccctgtggcacttctctcgaaatgttcctcagcccctttcagacaccatgccatttcgaggagtctggacaggatttagagatctggaaagaaagtaccaccgtgaacggcatggccgccaacattctgaagaataatcggattcagaaccagcccaaaagatttaaggacgcaaccgaggtgggatgccagcccctccctttcgccactacactctggggcgtccatagcgctcaaacagagaaagagaagaagaaggagagttccaactgtggtcgtcggaatgtcttcagctacggaagggtgaaactgtgcagtactggcttcataactcatgtggttcagaacgaaaagacaaagagcacagaaactgagcactcgtttaagaattacgtaaggccaggcccaactagggcccaggagacgttcggtaatcggacccgacatagtgttgagaccccggatatcaaagacctggcaagtactctctccaaagaaagtggccagctgcccaataaaaaaaactgtaggacaaacataagttatgggctggaaaacgagccgacagccacttataccatgtttagtgccttccaggaaggctccaaaaaaagccaaaccgattgcatccttagcgatacctctccatcattcccatggtacaggcatgtcagcaacgacagccgaaaaactgacaaactgatcggctttagtaaacctatcgtaagaaagaaactcagcctttcctcacagctgggtagcctggagaagttcaagaggcagtacggaaaggtcgagaaccccctcgatacggaggtggaggagtccaatggcgtgacgaccaacctctcgttacaagtggaaccagatatactcctgaaagataaaaacaggttggaaaattccgacgtctgtaagataaccacgatggagcactctgattcggactcttcgtgccaacctgccagccacatcttaaactccgagaagttccccttttcaaaggacgaagactgcctggaacagcagatgccctctttaagagaatctccgatgactctgaaagaactttccctcttcaaccgaaagcccctcgatctggaaaagtcttcagaatcgctggcgtccaaattgtctcgcctgaaaggttccgaacgcgagacccagactatgggcatgatgtctcgcttcaatgagctgcctaactccgactctagcaggaaggactctaaactgtgcagcgtgttgacccaagacttctgcatgctcttcaacaacaaacacgaaaagacggagaatggtgtaatccctaccagcgattcggccacgcaagacaactcattcaataagaattcaaaaacacactccaatagcaacacgacagaaaactgtgttatcagcgagacccctctagtacttccatacaataacagcaaagtcaccggaaaggactccgacgtgctgatccgcgcttcagagcagcagatcgggagcttggattctccatccggaatgctgatgaatccagtggaggatgcgactggcgatcagaatggcatttgtttccaaagcgaggagagcaaagcaagagcttgcagtgaaactgaagaatccaacacgtgttgcagtgattggcaacggcacttcgatgtcgctttgggacgtatggtgtatgttaacaagatgaccgggctatctacatttatcgcaccaactgaagatatccaagcagcgtgcacaaaggacttgacaacagtggcagtggacgtggtgctggagaatggcagtcaataccgctgtcagccctttcgatctgacttggtgctaccctttctgccgcgagccagagcggagagaacggtgatgagacaggataaccgggataccgtcgatgatactgtttcctccgagtctctgcaaagtttattctctgaatgggacaatcccgtgtttgctcgatatcctgaagtggcagttgatgtgagctccgggcaggctgaatcccttgccgtcaaaatacacaacattttgtatccgtaccggttcacaaaaggaatgattcattcgatgcaggtgttacagcaggtggataataaatttattgcctgtctgatgtccacaaagacagaagagaatggagaggcagggggcaatctactggtcctggtggatcaacacgccgcccacgagaggattcggctggagcagctcattattgacagttacgaaaagcagcaagcacagggttcaggtcgtaaaaagcttttgagtagcactctcatccccccccttgagattaccgttacagaggagcaaaggagactgctgtggtgttatcataaaaatcttgaagacctcggcctggagttcgtcttccctgacacaagcgatagtttggtgctggtgggcaaggttcctctgtgctttgtggagcgcgaagctaacgagctcaggcgtgggagatcaacggttacaaaaagcattgtggaggaattcatccgggaacaactggagctgctccaaaccactggtggcatacagggaaccctacccctcactgtgcaaaaggtgttggcctcccaggcctgtcacggtgccattaaatttaacgacggcctgtccctccaggaatcctgtaggctgatcgaggctctcagctcatgtcagctgcctttccaatgcgcccacggtcggccctctatgctgcccctcgccgatatcgatcacctggagcaggagaagcagataaagcctaacctgactaagctgcgtaaaatggcccaggcttggaggctcttcggcaaagcagagtgcgatactcgacagtccctgcaacagagtatgccaccgtgtgagcccccatag

SEQ ID NO: 25104 - DNA, 321 bp, synthetic construct
  misc_feature 1..321: note = Description of Artificial Sequence: Synthetic coding sequence
  source 1..321: mol_type = other DNA
atgatcaagtgcctgagcgtggaggtgcaggccaagctgcggagcggactggccatcagttcactgggacagtgcgtggaagagctggcacttaactccattgatgcagaagcaaagtgtgtggccgtccgtgtcaacatggaaacctttcaggttcaggtgattgataacggattcggcatgggctctgatgatgtcgagaaggtcggcaacagatattttacaagcaagtgccactctgtccaggacctcgagaatccacgcttttacggctttaggggagaagcactcgccaacatcgctgatatggcatcggcctag

SEQ ID NO: 25105 - DNA, 135 bp, synthetic construct
  misc_feature 1..135: note = Description of Artificial Sequence: Synthetic coding sequence
  source 1..135: mol_type = other DNA
atggccgacaagcccgacatgggcgagatcgccagcttcgacaaggccaagttaaagaagaccgaaacacaggagaagaatacgcttcctaccaaggagactattgagcaagagaagcggtccgagatcagctag

SEQ ID NO: 25106 - DNA, 1026 bp, synthetic construct
  misc_feature 1..1026: note = Description of Artificial Sequence: Synthetic coding sequence
  source 1..1026: mol_type = other DNA
atggccgtgcagcccaaggagaccctgcagctggagagcgccgccgaggtgggatttgtccgcttctttcagggcatgccggaaaaaccgacaaccactgtaagactgtttgatagaggagatttttacaccgcacatggggaggatgccctgctggccgcaagggaggtgttcaagactcagggggtcatcaagtacatgggacctgcaggcgcaaagaacctgcaaagtgtggtgttgagcaaaatgaatttcgagtcctttgtgaaagatcttctcctggtgcgtcagtacagagtggaggtttataaaaacagagccgggaacaaggcgtccaaggaaaacgattggtacttggcttataaggcctcgcctggcaacctgtctcagttcgaagacattctgtttggaaataatgacatgagcgcctctattggagtggtaggagtgaaaatgtcggcggtggatggtcagaggcaggtgggggtcggatatgtggatagcattcagcggaaactgggcctttgtgagtttcccgataacgatcagttcagtaacctggaagccctactcatacagattggccctaaggagtgcgtattgccaggaggtgagacagctggggatatgggcaagctacgtcagataattcagcggggtggaatactaattaccgagcggaaaaaagctgacttcagtaccaaagatatctaccaagacctgaaccgtcttctgaagggcaagaagggtgaacaaatgaattccgctgtgctccccgagatggagaatcaggttgctgtaagtagtctgagtgccgttatcaagttcttggaactcctgagtgatgacagtaactttggtcagttcgagcttaccacatttgatttctcccaatatatgaagctggacattgctgcagtcagagctttgaatctctttcagggctcagtggaggatacaacaggatctcagtcgctggctgcgctacttaataaatgtaagaccccacaggggcaaacttgttag

SEQ ID NO: 25107 - DNA, 2766 bp, synthetic construct
  misc_feature 1..2766: note = Description of Artificial Sequence: Synthetic coding sequence
  source 1..2766: mol_type = other DNA
atggccgtgcagcccaaggagaccctgcagctggagagcgccgccgaggttggcttcgtgagatttttccagggaatgcccgagaagccaaccactaccgtccgtctattcgaccggggagacttttatactgctcatggtgaggatgctctgctggctgcacgcgaagtgttcaagactcagggagtgataaaatacatgggtcccgccggcgccaaaaatttacaaagcgttgttctgtcgaagatgaacttcgaatcttttgtgaaagatctgctgctggtaaggcagtatagggtggaggtttataagaatcgggccggtaacaaagcctcaaaggaaaacgattggtatctcgcgtacaaagcaagtcccggaaacctcagtcagttcgaagacatccttttcggaaacaacgacatgtccgccagtattggtgtggtcggcgtcaaaatgtccgcagtagacgggcagcggcaggtgggggtaggatatgttgattccattcagcggaagctgggtttatgtgagtttcctgataatgaccagtttagtaatctggaagctttactgatccaaataggtcctaaggaatgcgtcttacccgggggagagacagccggcgacatgggaaaacttcgccaaattattcagagaggaggtatccttattacagaaagaaagaaggcggatttcagcactaaagacatttaccaagacctgaatagactcctgaaggggaaaaaaggagaacaaatgaactccgccgttctgcctgagatggagaatcaggtcgctgtcagttctctttccgccgtcattaaattcctggaacttctctccgatgacagtaatttcggtcagttcgagctgacgacctttgacttttctcagtatatgaaactcgacatagcagccgttcgagcactgaacctgtttcaggggtcggtggaggacacgacaggtagccaaagcctggcagctttactgaacaagtgcaaaaccccacaggggcagaggttggtgaaccagtggatcaaacaaccactaatggacaagaatagaatagaggagcgactgaacctcgtcgaagcattcgttgaggacgctgagctgcgccagaccttacaggaggacctgctgagacggtttcctgatctgaatagacttgcgaaaaagttccagagacaggcagcaaatctgcaggactgctacaggctgtatcaaggaatcaatcagctgcccaacgtgattcaagctttggaaaaacacgaaggcaaacaccagaagctcctgttggctgtatttgtcacacccctcacagacctccggagcgacttcagcaagtttcaggagatgatagagaccacactggacatggatcaagtggaaaatcacgaattcctcgtaaaaccctccttcgacccgaacttgtccgagctacgagagattatgaatgaccttgagaagaagatgcaatctacattaatcagcgccgcacgcgatttgggacttgaccccgggaagcagatcaaactcgattccagtgctcagttcggatactactttcgggtcacctgcaaggaagagaaagtcctgaggaataacaaaaatttttcaactgtggacattcagaagaacggcgtcaagttcactaacagtaagctgactagcctgaatgaggaatacaccaagaacaagactgaatacgaggaggcccaggacgctatcgtaaaagaaattgtcaacatctcatctggatacgtggaaccaatgcagactctgaatgatgtattggcccagctggatgctgttgtgtcatttgctcacgtgtccaatggagccccggtgccctacgtgagacctgcaatactggagaaagggcagggtcgtatcattcttaaggcaagccgacatgcatgtgtggaggttcaggatgagattgccttcatacccaacgacgtttacttcgaaaaggataagcaaatgttccatattattaccggcccaaacatggggggcaaaagcacctacattcgacagaccggggtgatcgtgttaatggcgcagattggctgcttcgtgccttgcgagagtgccgaagtgagtatcgtggattgcatactggcccgcgtgggagcaggggactcccaacttaaaggggtgtccacctttatggctgagatgctcgaaaccgcttctatcctcaggtcagcgactaaggactcacttatcataatcgacgaactcgggcgcggcacttccacctatgatgggtttggactagcatgggccatttctgaatatatcgccactaagatcggagcattttgtatgttcgccacccactttcacgaactgacggctctggcaaatcagataccaaccgtcaacaatctgcacgttactgctcttaccaccgaggagaccctgactatgctataccaggtgaaaaagggtgtgtgcgatcagagtttcggaattcatgttgctgagctggccaatttccccaagcacgtgatcgagtgtgctaaacaaaaagccctcgagctggaggagttccaatacattggcgagtcacaagggtatgacatcatggagcccgcagccaagaaatgttatctggaaagagagaatctgcgggtcacagaacccaaggaccagtgccttatactgctgacctggaagcgcaaactgcgtggcggcaaacgaagcgcttgctcccggcccgaaagacagaaccagggatccggggagctgtcatag

SEQ ID NO: 25108 - DNA, 2163 bp, synthetic construct
  misc_feature 1..2163: note = Description of Artificial Sequence: Synthetic coding sequence
  source 1..2163: mol_type = other DNA
atgatcggcatctggcacatccggctgctgctggccatcagcctgtctttaaaaacttttagcctcgtgacgatgatatgccagttacctcttgtcttgtgggttcttaagtgccctcaactaatggcaagagacatgggtaagcttaggcagattatacagcggggcggtattcttattactgagagaaagaaagcagatttcagtacaaaggacatatatcaggatttgaataggctcttgaaggggaagaagggcgagcaaatgaactcagcagtactgcctgagatggagaatcaggggtctgttgaagacaccaccggtagtcaatcgttggcggcactcctgaacaagtgcaaaaccccacagggccagagactcgttaaccagtggatcaaacagccactgatggataagaatcggattgaggagcgattaaacctagtggaggccttcgtcgaggacgccgaacttaggcagacactgcaagaggaccttcttaggaggttccccgatctgaaccgccttgctaaaaaatttcagcgacaagcagccaaccttcaggattgctataggctctaccaggggattaaccaactcccgaacgtgatacaggccctggaaaaacatgaaggaaagcatcagaaactcttgctggccgtcttcgtgactcctctcactgacctgcgcagcgacttttcgaaattccaggaaatgatagagaccaccctagatatggatcaagtggaaaatcacgagtttctggttaagcccagcttcgatcccaatttgtccgagttgagagaaattatgaatgatctcgagaaaaaaatgcagagcaccctaatctccgccgcccgggatctagggctcgacccgggaaagcagatcaaattagatagtagtgctcagttcggttactatttcagagtgacctgtaaggaagaaaaggtgctgcgaaacaataaaaattttagcacggtggatatccaaaaaaatggggtaaagtttactaatagcaagctgaccagcctgaatgaagaatacactaagaacaagacagagtacgaggaggctcaggacgctatcgtgaaagagattgtgaacatctccagcggctacgtcgaacccatgcagaccctaaatgacgtgttggcacagctggacgcggttgtgagtttcgcacacgttagtaacggtgcaccagtcccatacgtgcgtcctgcaatactggagaagggacagggcaggattattctcaaggcctctcgccacgcgtgcgtcgaagtccaggatgagatcgcctttattccaaatgatgtgtacttcgagaaagataaacagatgtttcatattatcacgggaccaaacatgggagggaagtctacttacatccgtcagacaggggtgatagtgcttatggcacagatcggttgttttgtgccttgcgaatccgccgaagtttctattgtagactgcatcttagctcgcgttggggctggggactctcagcttaagggtgtgtctactttcatggctgagatgctggagacggcatcaatcctgcggtccgccactaaggattccctgattattatagacgagcttggaagaggaacttctacttatgacggatttggtctggcttgggctattagcgagtatatcgccacaaaaataggagctttctgtatgtttgcaacccactttcacgagttgaccgccctcgcgaaccagattcccacggtgaataatctgcacgtcaccgccttaacaacagaggagacactcaccatgctgtatcaggtgaagaagggggtttgcgatcagtcatttggaatccacgtggcagagcttgccaactttcccaagcacgtgatcgagtgcgccaaacaaaaagccctggagcttgaggagttccagtatatcggtgagagtcaaggatacgatatcatggagcccgctgctaagaaatgttatctggaacgagaacagggagagaagattatacaggaatttttgtcaaaagttaaacagatgccgttcactgagatgagtgaagaaaacataactatcaagttaaaacagttgaaagccgaagtgattgctaagaataattctttcgtgaacgagattattagtcggatcaaagtgacaacttag

SEQ ID NO: 25109 - DNA, 2433 bp, synthetic construct
  misc_feature 1..2433: note = Description of Artificial Sequence: Synthetic coding sequence
  source 1..2433: mol_type = other DNA
atggccgtgcagcccaaggagaccctgcagctggagagcgccgccgaagttggattcgtgagattctttcaggggatgcccgaaaagccaactacaactgtccgattgttcgaccgcggggacttctatacagctcacggtgaagatgctttgttggctgcaagagaggtgtttaaaacccagggggtgatcaaatacatgggacccgctggcgccaaaaatctgcagagcgtcgttctgagcaagatgaacttcgaaagctttgtgaaagaccttctcctggtgcggcagtacagggtggaagtctacaagaacagagctggaaataaggctagcaaggaaaacgactggtacttggcatacaaggctagccctggcaatctcagtcagtttgaggacatactgtttggcaataatgatatgtccgcctccataggagtggtcggcgtgaagatgtcagctgtcgacggtcagcgacaggttggtgtcggctacgtggactctattcagcgaaagttgggcctttgcgaattccctgataatgatcagttctcaaatctggaagcactcctgattcagattgggcctaaagagtgtgtcctgcccgggggggaaaccgccggcgacatgggcaagctccggcagattatccagagaggcggcattctgatcaccgaaaggaagaaggccgacttctcgacaaaggatatctatcaggacctcaacagactcttaaagggcaagaaaggggagcagatgaactctgccgttttaccagagatggaaaatcaagtggcagtctcaagcctgtctgccgtaattaaattccttgagctgctgtctgacgatagcaatttcggtcagtttgagctcactacctttgatttcagtcaatatatgaaacttgatattgccgccgtccgcgcgctgaacctgttccaggggagcgttgaggacacgacaggctcccaaagtcttgctgcactgctcaacaagtgcaaaaccccacagggccagaggttggtgaaccagtggattaagcaacccttgatggacaaaaatcgcattgaggaacgcctgaacctggtggaagcctttgtggaggatgctgaattgcgccagacactgcaggaggatctgctgagaaggtttcctgacctcaataggttggctaaaaaatttcagcggcaggctgccaatcttcaagattgttaccggctgtaccagggtattaatcaattacccaatgtgatccaggctttggaaaaacatgaaggcaagcaccaaaagttactgctcgccgtttttgtcaccccacttactgatctccggagcgactttagtaagtttcaggagatgattgagacaaccctggatatggatcaagtcgaaaaccatgaattcctggtaaagccctcctttgaccctaatctcagcgaacttcgcgagatcatgaacgacctggagaagaaaatgcagtctacgctcattagtgctgctcgcgatctgggcttagacccagggaagcaaattaagctggacagctccgctcagttcgggtactatttccgcgtcacgtgcaaagaggagaaggtcctgaggaacaataaaaatttttccaccgtggacattcagaaaaatggcgttaaattcaccaacagtaaattgacctcattgaatgaggagtatactaaaaacaagacggaatacgaagaagcccaggatgccattgtaaaagagatcgtgaatatttcttcaggttacgtggaaccgatgcagacacttaatgacgtacttgcacagctagatgccgttgtttccttcgctcacgtttcaaacggggcaccagttccttatgtcagacctgctatcctcgagaagggacagggcaggattatcctgaaagcatctagacacgcttgcgtcgaagtgcaggacgaaatagctttcataccaaatgacgtttatttcgagaaggataagcagatgttccatataatcacaggacctaacatgggggggaaaagcacgtatatccgccagaccggggttatcgttctgatggcccaaataggctgtttcgtgccctgtgaaagcgcggaagtcagcatcgttgactgtatcctggcccgagtcggagccggtgacagccaattgaagggtgtttccactttcatggcagaaatgcttgagaccgcaagtatactacgttctgccacaaaggattctcttattattatcgatgaacttggtagaggaacttctacgtacgatggatttggcctcgcctgggctattagtgaatatatcgctactaaaattggtgcattctgcatgttcgcgacaattttcatgaacttactgccgtggcctattcgctaccagcttctcatcatctatatgtcccagcattcccccctcaagaggccatag

SEQ ID NO: 25110 - DNA, 507 bp, synthetic construct
  misc_feature 1..507: note = Description of Artificial Sequence: Synthetic coding sequence
  source 1..507: mol_type = other DNA
atggacaagaaccggatcgaggagcggctgaacctggtggaggccttcgttgaggatgctgagctcaggcagactctccaggaggaccttcttcgcagattccccgatctgaaccggctagccaagaagtttcagcgtcaggcagctaacttgcaggactgttaccggctgtaccagggcattaaccagctgcctaacgtgattcaagccttagagaagcacgagggtaagcatcaaaaactcctattggctgttttcgtgactccactgaccgatctccgttccgattttagtaagttccaggagatgatcgagaccaccctcgacatggaccaggtggagaaccacgagtttctcgtcaagccctcctttgaccctaacctgtctgagttaagagagatcatgaacgacctcgaaaagaagatgcagagcactttgatttctgccgcaagggatctggggggatctctgcagcctagaagctctaggcttgcctgcgcaacctag

SEQ ID NO: 25111 - DNA, 1602 bp, synthetic construct
  misc_feature 1..1602: note = Description of Artificial Sequence: Synthetic coding sequence
  source 1..1602: mol_type = other DNA
atggccgtgcagcccaaggagaccctgcagctggagagcgccgccgaggttgggtttgtgcggttcttccagggtatgcctgaaaagccaactactactgtgcgtctgtttgaccgcggagatttttatactgcccatggtgaggatgcccttctggcagctagggaagtgtttaaaactcagggagtcataaaatacatggggcctgctggtgctaaaaatttacagtctgtagttttgagtaagatgaattttgagtccttcgttaaagatctcctgctggtccgccagtacagagtggaggtctacaaaaatcgggctggcaacaaagcttccaaagagaatgattggtacctggcatataaagcctcacctggcaatctctctcagtttgaggacatcctgttcggaaacaatgacatgtctgcatctatcggagtggtgggagtgaaaatgtctgccgttgatgggcagaggcaagtgggtgtagggtacgtcgactcaatccaaaggaagctgggactgtgtgaattcccagacaacgaccaattcagcaacttagaagccctcttaatccagattggccccaaagaatgcgtcctgcctggcggcgagactgccggcgacatgggtaagttacgacagatcattcagaggggggggattttaattaccgagcgcaaaaaggccgatttttccactaaagatatctatcaggatctgaaccgacttctgaaagggaagaaaggcgaacagatgaactccgccgtacttcctgagatggaaaatcaagtcgcggtctcttctctgagcgccgtaatcaaattcttagagctcctttctgatgattcaaactttggtcaatttgagctcactacgtttgatttttcccagtatatgaaacttgacattgcagctgtaagggcccttaacttgttccaaggatccgtagaagacaccaccgggtcgcagagcttggcagccctgctgaacaagtgcaagactccccaagggcaacggctggttaatcaatggattaaacaacctctgatggataagaatcggatcgaggaacgcctcaatcttgtcgaggcctttgttgaagacgcagaactgaggcagactcttcaggaggacctgctgcgcagattccccgatctcaacaggttagcgaaaaagtttcaacggcaggctgcaaacctgcaagactgctacagattgtatcaagggatcaaccaactgccaaacgtgatccaagcactagaaaaacacgaaggcaagcatcagaaacttctgctggctgtcttcgtgacacccctgactgatctgagatctgatttctccaagtttcaggagatgatcgaaacaaccctcgatatggatcaagtggagaatcatgagttcctcgtaaagcccagctttgatcccaacctgtccgagttgagagagattatgaacgacctggagaaaaagatgcagtccaccttaatttccgcagcacgcgacctcggtttggaccctggcaagcagatcaaattggatagttcagcccagtttgggtattactttcgggtgacatgtaaggagaaaagtccttcctag

SEQ ID NO: 25112 - DNA, 1233 bp, synthetic construct
  misc_feature 1..1233: note = Description of Artificial Sequence: Synthetic coding sequence
  source 1..1233: mol_type = other DNA
atggccgtgcagcccaaggagaccctgcagctggagagcgccgccgaggtgggatttgttaggttcttccaggggatgcctgagaagccaactaccactgtgaggctgtttgacaggggggacttttatactgctcatggagaagacgctcttctagctgctcgggaagtctttaagacacagggagtcataaaatatatgggtcctgccggggccaagaatttgcagagcgtggtattgtccaagatgaactttgagagctttgtcaaagatctgttgctcgtccgccagtaccgcgtagaggtgtataaaaaccgcgcaggcaataaggccagcaaagagaacgactggtaccttgcctacaaagcatctcccggcaacctgtcccagtttgaagatatcctattcggtaataacgatatgtctgcttccataggagtggtgggggtaaagatgagcgctgtggatggacagagacaggtgggcgttgggtacgtcgattcaatccaacgaaagctcggcttatgtgagttcccagacaatgaccagttttccaatctggaggctttgctaatccagatcggcccaaaggaatgcgttctcccgggcggagagacggcgggtgatatgggcaaactgcgccagatcattcaaagaggcggcattttgattaccgagcgaaaaaaagctgatttttcgaccaaagatatttatcaggacctgaacaggcttttaaaaggaaagaaaggagaacagatgaactctgccgtattaccagaaatggaaaaccaggtagcagtttcatccctatcagccgtgattaagtttctcgaactcctttccgatgactctaatttcggccaatttgaacttaccacgttcgatttcagccagtatatgaaactcgacatcgccgctgtacgtgctctaaacctgttccaggggtctgttgaagacactacaggaagtcagtccctggccgctcttctcaataagtgtaaaactccccaaggacagaggttagtcaaccagtggatcaagcagcccctgatggacaagaatcgtatcgaggaaaggctgaacttagtggaggcttttgtagaggatgctgaactcagacaaaccctgcaagaagactacttcgtcgactctcagatcctgaccgaccttccccgcagcttcaaggacaagcagcagacctataaaattgtaaccgatagcataagggtgtag

SEQ ID NO: 25113 - DNA, 1458 bp, synthetic construct
  misc_feature 1..1458: note = Description of Artificial Sequence: Synthetic coding sequence
  source 1..1458: mol_type = other DNA
atggccgtgcagcccaaggagaccctgcagctggagagcgccgccgaagtcggcttcgttcggttcttccagggaatgcccgaaaaaccaacaactacagtccgattattcgatcgaggagatttttataccgctcatggagaagacgctctgcttgccgcccgggaggtgtttaagactcagggtgtgattaaatatatgggaccagcaggagccaagaatttgcagagcgttgttctcagtaaaatgaattttgagtctttcgttaaagaccttttactcgttcgtcaataccgagtagaagtgtataagaaccgggcgggcaacaaagccagcaaggagaatgactggtatttggcctataaagcttcccccggcaatctttctcagttcgaggatatcctattcggtaacaatgatatgagtgcaagtatcggcgtagttggagtcaaaatgtccgctgtggacggccagcgtcaggtgggcgtcggctatgtcgacagcattcaacggaagctgggactctgcgagtttccagacaatgatcagttttcgaacctggaggctcttctgattcaaattggccccaaagagtgcgtgctgcctggtggtgagacggctggtgatatgggtaagctgaggcagataatacagcgcggtggaatcttaataactgagcggaagaaggccgacttctccacgaaagacatttatcaggatctgaatagactgctgaagggcaagaaaggcgaacagatgaacagtgctgtgctgcccgagatggaaaaccaagtcgcggtcagttccttaagtgctgttattaaattcctggagttactatctgacgattctaattttggccagtttgaactcactacattcgactttagtcagtacatgaaactggatattgcagcagtgagagccctgaatctctttcagggctcagtggaagataccacagggagccaatcactggcagcgctgctgaacaaatgcaaaaccccccagggccagcggctggtgaatcagtggatcaaacagccgttaatggacaagaatcgcattgaggagcggttaaacctggtggaagcatttgtggaagatgccgagctgcggcaaacactgcaggaagacctcctgagaagattccccgatcttaatcggttggccaagaagtttcagcgccaggcggccaacctacaggactgttaccgtctgtaccagggcataaaccagctaccaaatgtgatccaagcgctggagaagcacgagggcaaacaccagaagctactcctggcggtattcgtgactcctctgaccgatctccgaagcgacttcagcaaatttcaagaaatgatcgagacaacgttggacatggaccaggtggagaaccatgagttcctggtgaagcctagtttcgaccccaatctgtcggaactgcggaacaacgaatag

SEQ ID NO: 25114 - DNA, 2607 bp, synthetic construct
  misc_feature 1..2607: note = Description of Artificial Sequence: Synthetic coding sequence
  source 1..2607: mol_type = other DNA
atgggccccgccggcgccaagaacctgcagagcgtggtgctgagcaaaatgaatttcgaatccttcgtgaaggacctgcttctagtgcgccagtatcgcgtcgaggtgtacaagaatagagccggcaacaaggcctcaaaggaaaacgactggtaccttgcgtacaaagcctctcccggcaatttgtcacagttcgaagacatcctgttcggcaataacgacatgtccgcatctataggagtggtgggggtgaagatgtcagcagtagacggtcagcgtcaggtcggcgtggggtatgtggattctattcagcgaaagttagggctgtgcgaatttcccgataacgatcagttttctaacctagaagctctgctgatccagattggaccaaaagaatgtgtgctgccaggaggcgaaacagctggggatatgggtaagcttagacagataatacagaggggtgggatcctgatcacggagcgtaagaaagccgacttttccactaaggatatctaccaggacctgaatcgcctgcttaaggggaaaaagggagagcaaatgaatagtgcggtattgccggagatggagaaccaggtggccgtctctagtttgtctgcagtcattaagttcctggagctgctgtccgatgactccaacttcgggcagtttgaactgacgactttcgacttctcgcaatacatgaagctcgatatcgctgccgttagggcattgaacctatttcagggctctgtggaggacactactggcagtcagagcctcgcggccttattgaataaatgcaaaaccccccagggacagcggctggtcaaccagtggatcaagcagccattaatggataagaatcggatagaggaacggctgaacctggtggaggcattcgtggaggacgccgaactgcgtcagaccttgcaggaggatcttctaaggcgattccctgatttgaaccggctcgcaaagaagtttcagcggcaggccgcaaaccttcaagactgctataggctttatcaagggattaatcaactgcccaatgtgattcaagcccttgaaaagcacgaaggcaagcatcagaagctgctcctggccgtctttgtgactccactcacagacctcagaagcgacttcagcaagtttcaggaaatgatcgagacaaccttggacatggatcaagtcgaaaaccatgaattcctggtcaagccctctttcgacccaaacctgtctgagctgcgcgagattatgaatgatctggaaaagaagatgcagagtacattgataagtgcagcccgcgacttggggcttgatcctgggaaacagataaagctagattcgagcgcacagtttggatattatttccgtgtcacgtgcaaggaagaaaaagttctgagaaacaacaaaaacttctccaccgtggacatccagaaaaacggggtgaaattcactaactcgaagttgacctccctgaacgaagagtatacaaagaacaagaccgagtacgaggaagcccaggatgccatagttaaagaaatcgtaaacatcagttctggatatgtagagccgatgcagaccctgaacgatgtactggcccagctcgatgccgtagtatcctttgcccacgtgagcaacggggcacctgtgccatatgtgagaccagctatcctggagaagggacagggaagaatcattctcaaagctagccgccacgcctgcgtggaggtccaggacgaaattgcgtttattccaaacgacgtgtactttgagaaagacaagcagatgttccacatcattaccgggcctaatatgggaggcaagtcaacctatattagacagacaggcgtgatcgtgttgatggctcagattggctgcttcgtcccatgcgaaagcgctgaggtgtcgattgtagattgtatcctggcaagagtgggggcaggcgactcccagttgaaaggggtgtccacctttatggcagagatgttggagacagcaagcatcctgcgttctgccactaaggacagtctcattattattgacgaactgggccggggaacatccacctacgacggttttggtttggcctgggcaataagcgagtacattgccacgaaaattggcgctttttgcatgtttgccacacattttcacgagctaactgcacttgcaaaccagattccaaccgtgaacaacctccacgtcacagctttgaccacagaggaaactctgaccatgctgtatcaggtgaagaagggggtgtgtgatcagagcttcgggattcacgtggcagagctggcaaattttccaaaacacgtgatcgagtgtgccaagcagaaggctctggaacttgaagaatttcagtacattggcgaatcacaggggtacgatatcatggaacctgccgctaagaagtgttacctggagagggaacagggcgagaaaattatacaggagttcctgtccaaggtaaaacagatgccttttaccgagatgtcggaggaaaatattaccataaagttgaaacagctcaaggccgaggtaattgccaaaaacaattcttttgtgaacgagatcatttctaggatcaaagtcacgacgtag

SEQ ID NO: 25115 - DNA, 3414 bp, synthetic construct
  misc_feature 1..3414: note = Description of Artificial Sequence: Synthetic coding sequence
  source 1..3414: mol_type = other DNA
atgagccggcggaagcccgccagcggcggcctggccgccagcagcagtgctcccgccaggcaggccgtcctatcaaggttctttcagtccacaggaagtctaaagtccacttccagctccactggcgccgccgatcaggtggacccaggagctgcagccgctgccgccgctgccgcggcagccgccccacctgcaccccccgcacccgctttcccaccccaactccccccccacattgctaccgagattgataggcgcaagaaacgacccctcgagaacgacgggcctgtgaagaagaaggtcaagaaagtgcagcagaaagagggaggtagcgaccttggtatgagcggaaattcagaacccaagaaatgcttaaggaccaggaatgtaagcaaaagtctagaaaagctaaaggagttctgctgcgacagcgcactgccgcagtcccgggttcagacagaatccctgcaggagcgcttcgccgtgctgcctaaatgcacagactttgacgacatctctctgttacacgctaagaatgccgtttcctccgaagactccaagcgccagattaaccagaaggacacgaccctgtttgacctttcccaattcggttcttctaatacgagccatgagaatctccaaaaaaccgcgagcaaaagcgcaaataaaaggtctaagtctatctatactcccctggagctccagtacatcgagatgaagcagcaacacaaggatgcagttctctgcgtcgaatgcggttacaagtaccgctttttcggtgaggacgccgagatcgccgctcgagagttgaacatatactgtcacctggaccacaatttcatgactgcctcaattcccacccaccgacttttcgtgcatgttagaagacttgtagcaaaaggatacaaggtgggggtagttaaacaaacagaaactgctgctctgaaggccataggagataatcggagctcactcttctcacggaaactgacagctctctatacaaagtccacgctgatcggagaagacgtgaatccacttatcaaactggacgacgctgtgaacgtggatgaaatcatgactgacacgtccacatcctatctgctctgcatcagcgagaacaaggaaaatgtgcgcgacaagaaaaaagggaacatctttataggaattgttggcgtccagccagccactggcgaggtcgtctttgactcatttcaggattctgcctctcggagcgagcttgaaacccggatgagctcactccagcctgtcgaattacttcttccgtccgccctgtcagaacagacggaagcactcattcacagagctactagcgtgtccgtacaggacgacaggatacgcgtggaaaggatggacaatatttactttgagtatagtcacgctttccaggctgtcactgaattttacgctaaagatactgtagacataaaggggtcccaaatcatcagtgggattgtaaatcttgagaaacctgtaatatgttcgctggctgctatcattaagtatctgaaagagttcaatctggagaaaatgttgtcgaagcccgaaaacttcaagcagttatcttcgaaaatggagtttatgaccataaacggaaccacactccgaaatcttgaaatcttgcagaatcaaacagatatgaaaaccaaaggatctctcctctgggtgctggatcatacgaagacatctttcggacgcagaaagctaaagaagtgggtaacccagccgcttctaaaactgagagagatcaacgcgcgcctagatgccgtttcagaagtccttcattctgagagttccgtttttggccagatcgaaaaccacctccgaaagctccctgatatcgagcggggcctctgctcaatctatcataagaagtgtagcactcaggagttttttctaattgtgaagacactttaccacctgaaaagtgaattccaggctatcataccagcggtgaatagccatatccagtcggacctgctgaggaccgttattctggagatccctgaactgttgagtcctgtagagcactatctcaaaattcttaacgagcaagctgctaaagtgggcgacaagacggagctgtttaaagacctcagtgatttccccttgatcaaaaagcgaaaggatgagattcagggcgtgattgacgaaatacggatgcacttgcaagagatccggaagattctgaagaatccgtccgctcagtacgtgactgtgtctggtcaagagtttatgattgagataaagaacagtgcagtctcctgcattccgacggactgggtgaaagtcggcagcaccaaggctgtgtccagatttcattctccgtttattgtcgaaaactaccggcacctgaaccagttgcgggaacagctagttctggattgtagcgctgagtggctggatttccttgaaaaattctctgaacactaccactcactgtgtaaagcagtccaccatctagccacagtggactgcatcttcagccttgcgaaagtggcaaagcaaggggattattgccggcccaccgtccaggaagagcgcaagatcgtcatcaagaacggacgccatcccgtcatagacgtgctgttaggggagcaggaccagtacgtccccaacaacacagatttgtcagaggattcagagagggttatgattattactggacctaacatgggcgggaaatcctcttacataaaacaggttgcgctcataactatcatggcccagataggaagctacgtcccggctgaggaagctactatcgggatagtcgacggcattttcactcggatgggcgccgccgataacatctataagggccagagcacttttatggaagagcttactgatacggctgagatcatccgcaaagccacatcccaatccttggtgatcttggacgaactggggcgggggacaagcacacatgatggcattgccattgcctatgctaccctggaatacttcatcagagatgtgaaatctctcacattgtttgtcacacactaccctcccgtatgtgagcttgagaaaaattatagccaccaggtgggcaactaccacatgggttttttagtcagtgaagatgagtctaaattggacccaggggcggccgagcaggtccctgactttgttaccttcttataccagattacccgtggcatcgctgcgcggagttatggtctgaatgttgctaagttagctgacgttcccggcgagatactgaaaaaggcggctcataagtccaaggaattagaaggtctgattaacacaaagaggaaaaggctgaaatacttcgcgaagctctggaccatgcacaacgcgcaagacttacagaaatggacagaagagtttaatatggaggagacccagacctccctcctgcattag

SEQ ID NO: 25116 - DNA, 3387 bp, synthetic construct
  misc_feature 1..3387: note = Description of Artificial Sequence: Synthetic coding sequence
  source 1..3387: mol_type = other DNA
atgagccggcggaagcccgccagcggcggcctggccgccagcagcagcgcacccgcccgtcaagcggtgctctcccgcttctttcagtccacggggtcacttaagtccactagcagttccaccggcgctgccgaccaggtggaccctggtgcagccgccgccgcagctccgccagcgcccgcttttcctccccagctccccccccatattgcaaccgagatagatcggaggaaaaaacgacctctggagaatgatggcccagtcaagaagaaagtcaagaaggttcagcagaaagaggggggttcagaccttgggatgtcaggcaatagtgagcccaagaaatgcctgcggacaaggaatgtgtcaaagtccctggaaaagttgaaggaattctgttgtgattcagctctccctcagtctagggttcaaaccgaatcactgcaagagagatttgcagtgttacccaaatgtaccgattttgatgacatcagcctcctgcatgcaaagaatgccgtgtcgtccgaagactctaagcggcagatcaatcaaaaagatactactctgttcgacctgagtcaattcggtagctcaaataccagtcacgagaatcttcagaaaaccgcctctaagtccgctaacaaaaggagcaaatctatttatactccccttgaactgcagtatatcgaaatgaagcagcaacataaggatgccgttctgtgtgtcgaatgtggctacaaatatagattctttggcgaggatgcagagattgctgcccgcgagttgaatatatactgccatctcgatcacaatttcatgaccgcaagtattccaacacacaggctattcgtccatgtgaggcggcttgtcgcgaagggctacaaagtgggtgtcgtgaagcaaacagaaaccgctgcactgaaggccattggagataacagaagttccctattttctaggaagctcacagcgttgtacacaaaatctacacttattggagaagatgtgaatccgttgatcaagctggacgatgccgtgaacgtggacgaaattatgacagatacgagcacatcatacttgctgtgtatcagcgagaacaaagagaacgtccgggacaaaaaaaaggggaatatatttatcggaattgtgggtgtccagccggccaccggggaagtggtgtttgactcatttcaagacagcgccagccgttcagaattggaaacacgcatgtcatccctccagccggtcgagctgttgcttccttctgctctatctgagcagacagaggccctcatccacagggccacaagtgttagcgtccaggacgacagaattcgcgtagaaaggatggataatatttatttcgagtattcccatgcgtttcaggctgtcaccgagttttacgccaaggataccgtggacattaaaggttcgcagataatatctgggatcgttaacctagagaagcccgtgatctgcagcctggccgctattataaaatacctgaaggaattcaacctggaaaagatgctgtccaagccggagaattttaaacagctatcatcaaagatggaattcatgactattaacggcaccacgctcaggaacctagagatcctgcagaatcagaccgacatgaagactaagggatctctcctgtgggtcttagaccatactaagacttcttttggtaggcgcaagttgaaaaaatgggtgacccagccattgttaaaactgagagaaataaacgctagattagacgcagtgagcgaggtgttacattccgaatcttcagtgttcggacagatcgagaatcacttgcgcaagctgcccgacattgagcgcggcctgtgtagcatctaccataaaaaatgctccacgcaagagttctttctgatcgtgaagacgttgtaccacctgaaaagtgagtttcaagctataatacctgccgtgaacagtcatatccagtctgacctgctgcgaacagtcattcttgagattccagaactcttgagtcctgttgagcattacctgaaaattctcaacgaacaggccgccaaggtaggggataagaccgagctgtttaaagacctctctgattttccactcattaagaagcgaaaagacgagattcagggcgtcattgatgaaatccggatgcacttgcaggaaatcaggaaaattctcaagaatccctctgctcagtacgtcacagtgagtggccaagagttcatgatcgagataaagaacagcgctgtgtcttgcattccaacggattgggttaaagtgggctcaacaaaggccgtttctaggtttcactccccttttatcgttgaaaattaccgccacctgaaccagctgagggaacagcttgtcttggactgctcggccgagtggctcgattttctcgagaaattctccgaacactatcatagcttgtgtaaggccgtccaccacctcgccaccgtggattgtatctttagtttggccaaggtcgctaaacaaggggactactgccggcctacagtccaggaggagcgaaagatcgtgatcaagaatggaaggcaccccgtaatcgacgtcctgctcggagagcaagatcagtatgtgccgaacaacacagatctctcggaagatagtgagcgtgtgatgataattaccggcccaaatatgggcggcaagtcaagctatattaagcaggtggccctgatcacaattatggcccagatcggctcttacgtgcccgcagaggaggcaaccatcgggatcgtggatgggattttcacaagaatgggagccgccgataacatctacaaggggcagtcaacttttatggaagaactgactgataccgccgaaatcattcgcaaggcgacttcccagagcctcgtgattttggacgagctggggcgcggtacatccacccatgacggaatcgcaatcgcctatgccaccctggaatactttattagagacgtgaagtccttgactttatttgtcacacattatcccccagtttgcgagctcgaaaaaaactattcccaccaggtgggaaactaccacatgggtttccttgtgagtgaagacgaatctaagctcgatcccggcgctgctgaacaagttcctgatttcgtaacctttctctatcagatcaccagaggcatcgccgctcgatcctacgggctgaacgtggctaagctcgccgacgtaccaggggagatcctgaagaaggccgctcataaatctaaagagctggaaggactgataaatactaaacgtaagcgcctgaaatattttgcgaagctttggaccatgcataacgctcaagacctccaaaagtggaccgaggaatttaatatggaggaaacacagacatcactactgcattag

SEQ ID NO: 25117 - DNA, 2811 bp, synthetic construct
  misc_feature 1..2811: note = Description of Artificial Sequence: Synthetic coding sequence
  source 1..2811: mol_type = other DNA
atgctgcggcccgagatcagcagcaccagccccagcgcccccgccgtatcaccaagtagtggcgaaactagatcccctcagggccccagatacaatttcgggctgcaggagacaccacaatcccgaccttcggtgcaggttgtgtccgcgtccacctgccccggcacctctggggcggccggggatcgctctagtagtagctctagtctgccatgtcccgcccccaattccaggcccgcgcagggatcatacttcggaaataagagagcttatgcagagaatacagtcgccagtaacttcacattcggggctagctctagctcagctcgagatacaaactacccacagacgctgaaaactcccctgagcaccggcaacccccagagaagcggttacaaatcttggacaccccaggtagggtatagcgcttcctcaagctccgccatatctgcccatagcccctcggtgattgtggcagttgtcgaagggcgaggattggctcgaggcgaaataggtatggcctctatagatcttaaaaacccacaaataattctgtctcaatttgccgataatactacatatgctaaggtgatcacaaagctgaaaattctcagtcccttagaaattatcatgagcaacaccgcttgtgctgtgggtaattccacgaagctgtttactctcattactgagaactttaagaatgttaacttcaccacaatccagaggaagtatttcaatgaaacaaaaggtctggagtacatcgagcagttgtgcattgcagaattttctacagtgctgatggaggtgcagtctaagtattattgcctggccgccgtagcagccttgctgaagtacgtagagtttatacagaacagtgtgtatgcacctaaatcactgaagatttgttttcaggggagcgagcagacagccatgatcgacagttctagcgcccagaatctggagttgctcatcaacaaccaggattatcggaataaccatacgctgttcggagtattaaattacactaagacacccggaggctctcggagattacgatctaacatcctcgagccactcgttgatattgaaaccatcaacatgcgactcgattgcgtccaggaacttttgcaggacgaagagctgttttttggcctacaaagcgtgataagccgcttcctggacaccgagcaactgctatcagtgttagtgcagataccaaagcaggacactgtgaacgccgccgagagcaagattactaatctgatttatctgaaacatacattagagctcgtagaccccctgaaaatcgcgatgaagaattgtaacacccctctgcttagagcctactatggttccctggaagataagagatttggtataatcctcgagaaaattaagacagtgatcaatgacgacgcacgatatatgaaaggctgcctgaacatgaggacccaaaagtgctacgcagtgaggtcaaatatcaatgagtttctggatatcgcaagacggacgtacaccgaaattgttgacgatatagccggtatgatttctcaactgggggagaaatactccctgccgcttcgaacctccttctcatccgcccgcggcttttttatccagatgacaaccgattgcattgcactgccttcggaccagctgcccagtgaattcatcaagatctctaaagtcaagaattcctacagcttcacaagtgctgacctcatcaagatgaacgagcggtgccaagaaagcctgcgcgagatttaccacatgacgtacatgatcgtttgtaagctcctgtcagagatctatgagcacattcactgtctctataaactcagcgataccgtcagcatgctggacatgctgctcagctttgctcacgcctgtacactgtcagattacgtgcgacctgagttcacagatactttagcaattaagcaaggatggcacccaattctggagaagatttcagctgagaagcctatcgccaataacacatatgttaccgagggaagcaactttctgatcatcacgggaccaaatatgtctggtaagagcacctatctgaagcaaattgccctgtgccaaatcatggcccaaatcggatcatacgtcccagccgagtacagtagctttagaattgccaagcagatctttaccaggattagcaccgacgacgacatcgaaactaatagctcaaccttcatgaaagaaatgaaagaaattgcatatatactgcacaacgctaacgataagagcctcattctcatcgatgaactagggcgtggaacgaatactgaggaaggcatcggaatttgttatgctgtttgtgaatatctgctctctctgaaagcctttactctgttcgctacacactttctcgagctttgccatatcgatgctctttatccaaacgtagaaaacatgcatttcgaagtacagcacgtcaagaacaccagtagaaataaggaagcaattttatacacctacaagctgtcaaaggggttgaccgaggagaagaactatgggctgaaggccgcagaagtgtcttcactgcctccctccatagttctggatgcgaaggaaattaccactcagattacacggcaaattcttcaaaatcaaagatcaactcctgagatggagcgacagcgtgccgtgtaccacctcgcaacacgcctggtgcaaaccgctagaaattctcagctggaccccgattctctgagaatttacctgagcaatttaaagaagaaatacaaagaggatttcccaaggacagagcaggttcccgagaagaccgaagaatag

SEQ ID NO: 25118 - DNA, 813 bp, synthetic construct
  misc_feature 1..813: note = Description of Artificial Sequence: Synthetic coding sequence
  source 1..813: mol_type = other DNA
atggccagcctgggcgccaacccccggcggaccccccagggcccccgcccaggggcggcaagttcaggctttccatctccagcccccgtgccggggcctcgcgaggcggaagaggaggaagttgaggaggaagaagaactggcggagatacatctctgtgttctgtggaactccggctaccttggcatcgcttactatgacaccagtgacagcacaatacacttcatgccagacgcgccggaccatgagagcctgaagctcctgcagagggtgctcgatgagatcaatccacagtccgtggttacctctgccaagcaagacgagaatatgacacgcttcctcggaaagctggcttctcaggagcacagggagcccaaaagaccggagatcatctttttacctagcgtcgacttcggattagagatcagcaagcaaaggctactgtctggtaattactctttcattccggatgctatgaccgcgaccgaaaaaatccttttcctcagttcaatcattccatttgactgcctgctgaccgtgcgagctctggggggcctgttgaagttcctcggtcggcgccgaattggggtagagctcgaagactacaatgtgtccgttcccatactaggattcaagaagttcatgctgacacaccttgtgaatattgaccaggacacatacagcgtcctgcagatattcaaatcagaaagccatccatcggtgtataaggtggcatccggccttaaggagggactgtccctctttgggattctcaataggtgccattgcaaatggggggaaaaactcctgtag

SEQ ID NO: 25119 - DNA, 813 bp, synthetic construct
  misc_feature 1..813: note = Description of Artificial Sequence: Synthetic coding sequence
  source 1..813: mol_type = other DNA
atggccagcctgggcgccaacccccggcggaccccccagggccccaggcccggagccgctagctccggcttcccgagccccgcccctgtacctggtcccagggaggccgaggaggaagaggtggaggaagaagaggaattggctgagatccacttatgtgtgctgtggaactccggttacttagggatagcctattacgacacgtctgactcaaccattcactttatgccagacgcccctgatcacgagtccctaaagttactccagcgagtcctggatgaaataaatccccaatctgtggttaccagcgcaaagcaggacgaaaacatgaccagatttctgggtaaacttgctagccaggaacaccgcgagccaaaaaggccagagataatcttccttccttccgtggatttcggattagaaatctcaaaacaacggctgctctccgggaactattccttcatacccgacgccatgacagcgaccgaaaaaatcctgtttttgagttctattattccatttgattgcctcctgactgttagagcccttggaggactgctgaaattcctggggcggcgtcggatcggagtagaactcgaggactacaatgtgtctgtgccgatcttaggattcaagaaatttatgctgacacacctcgtgaatatcgaccaagacacatacagcgtgctgcagatcttcaagtctgagtcccacccaagcgtgtacaaggtagcatcagggcttaaggagggactatcactgtttggcatactgaatagatgccattgtaagtggggggagaaattgctgtag

SEQ ID NO: 25120 - DNA, 585 bp, synthetic construct
  misc_feature 1..585: note = Description of Artificial Sequence: Synthetic coding sequence
  source 1..585: mol_type = other DNA
atggccagcctgggcgccaacccccggcggaccccccagggcccccggcccggagccgcttcctcaggcttccctagccccgcccctgttcctggtccccgcgaagctgaggaagaggaggtcgaggaggaagaggagctcgccgagattcacctgtgcgtcctctggaatagtggatacttaggaatagcgtactacgacacgtctgattccacaatacattttatgcctgacgcccccgatcatgaatcgctgaagctattgcagcgggttttggacgaaataaatcctcagagcgttgtcacgtctgcaaagcaagatgagaacatgacacgcttccttgggaaactggccagccaggaacaccgagaaccaaagagaccggagatcatcttcctgccttctgtggacttcgggctcgaaataagtaaacaacggctcttaagcggcaattacagctttatccctgacgctatgacagccaccgagaaaatactcttcctgagctcaatcatcccctttgattgtcttttgactgtgcgggccttggggggcctgctgaaatttctgggtaggcggcggtag

SEQ ID NO: 25121 - DNA, 813 bp, synthetic construct
  misc_feature 1..813: note = Description of Artificial Sequence: Synthetic coding sequence
  source 1..813: mol_type = other DNA
atggccagcctgggcgccaacccccggcggaccccccagggccccaggcccggcgctgcatccagtggatttccatctcctgcacctgtcccaggaccacgggaagcggaggaggaggaggtggaggaggaggaggagctggcagaaattcatctgtgcgtactgtggaattcaggttacctgggaatagcgtattacgatacaagcgatagcacaattcacttcatgccagacgccccagaccatgagagtctaaagctcctgcaaagagtgttagacgagattaacccacaatcagtggtaacctccgctaaacaagatgagaatatgacgcgcttcctgggcaagctggcttcacaagagcatagggaaccaaagagacctgagataatttttctgccctccgtggatttcggacttgaaatatctaagcagcggctcctgagcggcaattacagtttcatccccgacgctatgaccgctactgaaaaaatactattcctatcctccatcattccctttgattgtcttctgaccgttagggcattgggcgggctgctgaagttcttgggccggagacggatcggtgtggaactggaggattacaatgtatctgtacccatcctgggttttaagaagttcatgttaacccaccttgtaaatattgatcaggacacttattctgtgctgcagatttttaagagtgaatcacacccaagcgtatacaaagtggcctcaggactgaaggagggcctgtctctgttcggtatcctgaatcgatgtcattgtaaatggggcgagaagctcttgtag

SEQ ID NO: 25122 - DNA, 864 bp, synthetic construct
  misc_feature 1..864: note = Description of Artificial Sequence: Synthetic coding sequence
  source 1..864: mol_type = other DNA
atggccagcctgggcgccaacccccggcggaccccccagggcccccgccccggcgctgcatcgagtgggtttccatctcctgctcccgtgcccggacctcgagaggctgaggaagaagaagtggaagaggaggaggagttggcagagatccatttatgcgtgctgtggaactccggatacctgggcatcgcttattatgataccagcgatagcacgattcacttcatgcctgatgctccagatcacgaatcgctcaaacttctgcagcgtgtcctggatgagattaatcctcaatcagtggtaacaagcgcaaaacaagatgagaatatgacccggttcctggggaagttggcaagccaggaacatagagaaccgaagagacctgaaatcatattcctcccttcagtcgatttcggactggagatttccaagcagcgtctgttaagcggaaattacagttttatcccagacgctatgacagcaacagagaagatcctgtttctgtcatccataattccatttgactgtctcttgacgccgccgggcgacctccggttcaccccgatccccttgctgataccctctcaggtgagagcgctgggggggttattgaaattcctgggccgacgccgcattggggtcgagctggaggactataacgtcagtgtgccaatattgggcttcaagaagttcatgttgactcatctggtaaatatcgatcaggatacctattcagtgttgcaaatattcaaaagtgagtcccacccttccgtgtacaaggtggcttccggattgaaggagggattaagcctattcggcatccttaaccggtgccactgcaaatggggagagaagcttctgtag

SEQ ID NO: 25123 - DNA, 324 bp, synthetic construct
  misc_feature 1..324: note = Description of Artificial Sequence: Synthetic coding sequence
  source 1..324: mol_type = other DNA
aagatcctgttcctgagcagcatcatccccttcgactgcctgctgacggtgagggctttaggcggactgctcaaattcctgggaagacgcaggattggggtcgagctggaggattacaacgtttccgtccccatcctaggctttaagaagtttatgcttacacacttggtaaatattgatcaggatacatattcagtcctgcagatttttaagagcgagtcacatccttcggtgtacaaagttgcatccggactgaaggagggattatcacttttcgggattttgaaccgatgccattgtaaatggggggagaagttgctctag

SEQ ID NO: 25124 - DNA, 765 bp, synthetic construct
  misc_feature 1..765: note = Description of Artificial Sequence: Synthetic coding sequence
  source 1..765: mol_type = other DNA
atggccagcctgggcgccaacccccggcggaccccccagggcccccggcctggtgccgcaagttctggtttcccctcgcccgctccggtgccagggccaagagaggccgaggaagaggaggtggaagaggaagaagaacttgcagaaattcacctatgtgtgctgtggaactctgggtacctgggtatcgcttactacgacaccagtgattctacaatccatttcatgcccgatgctcccgatcatgagtccctgaaactgttgcagcgcgtcctggacgaaatcaacccccagagcgtggtgacatcggctaagcaggacgagaatatgactagatttcttggcaaactcgcctcacaggagcaccgggagcccaaaagacctgagatcatttttctgccctccgtggacttcggactggagatatccaaacagcgattattgtcagggaactactcttttatcccagatgcaatgaccgccacagagaaaatcttgttcctgtcatcgatcatcccgtttgactgtctattaacggtgagggccttgggcggcctcttgaagtttttgggccgccgcaggattggcgtcgaactggaagattataacgttagtgtgcccatcctcggttttaaaaaatttatgttaacccatctcgtgaacattgaccaggatacttacaggctagagtgtaatggcgctataagcgcccagtgcaacttatgtctgctgggcagttctgattcacccgctagcgccagctag

SEQ ID NO: 25125 - DNA, 1542 bp, synthetic construct
  misc_feature 1..1542: note = Description of Artificial Sequence: Synthetic coding sequence
  source 1..1542: mol_type = other DNA
atggccatggagatcgacagccggcccggcggcctgcccggcagcagctgcaatctcggtgcagcacgggagcatatgcaggctgttactcggaattatattacacatccccgagtgacctatcgcacagtgtgctccgtcaatgggcccctcgtagtgctggatcgcgttaaattcgctcagtacgcggagatcgtccatttcaccctccccgacggcacgcaacggtcaggacaggtcctggaagtggccggcactaaagctatagtgcaagtattcgagggaacctccggcatcgatgctcgcaagacaacttgcgaatttaccggagatatcctaagaacacccgtgagcgaggacatgctcggccgggtatttaacggctctggtaaacccattgataagggccccgtcgtgatggctgaggatttcctggatataaatggacagccaataaacccccattctcgcatatatccagaggagatgattcagaccggcatatcaccgattgatgtaatgaacagcatcgctaggggacagaaaatccccatattcagcgcggccgggctgcctcataacgagattgccgctcagatatgccggcaggcagggctagtgaaaaagtcaaaggctgttctggattaccacgatgataattttgctatcgtgttcgccgccatgggcgtgaacatggaaacagcaagattttttaagtctgacttcgagcagaatgggactatgggcaacgtgtgtctgtttcttaacctggctaacgaccctacaattgaacggattataacacccaggttggccctcacgaccgcagaatttctcgcctaccagtgcgaaaagcatgtactggttatattgacagacatgagcagttatgccgaggctctccgagaggtctccgctgcccgcgaagaggtgcccggacgtcgcggttttcctggctatatgtatacggatctcgccacgatctacgaaagagccggcagagtagagggtcgcggagggtctatcactcagatccctatccttacaatgccgaacgatgacattacacatccaatcccggacttgacgggtttcatcactgaaggtcagatttatgtggaccgccagctgcataatcggcagatttaccctccaataaatgtgcttccaagtctatccagattgatgaaaagtgcgataggagagggaatgacccgcaaagaccacggcgacgttagcaaccagctgtatgcctgttacgctatcggcaaggacgtgcaggccatgaaagccgtcgttggggaagaggcattaacgagcgaagatctgctgtatctggaattcctccagaaatttgaaaagaattttatcaaccagggtccctatgagaatcgtagcgtcttcgaatctctggacttgggctggaaactcctgagaatcttcccaaaggagatgctgaagaggatcccacaggctgtcatcgatgagttttactctcgggaaggcgctctgcaggaccttgccccagacacagcgctctag

SEQ ID NO: 25126 - DNA, 759 bp, synthetic construct
  misc_feature 1..759: note = Description of Artificial Sequence: Synthetic coding sequence
  source 1..759: mol_type = other DNA
atgagccggcagagcaccctgtacagcttcttccccaagagccccgccttatctgatgccaataaggcctctgccagagcatcacgagaaggtggtagggccgcagcagcacctggggcctctccttctcctggaggagatgccgcctggtccgaggccggacctggacctcgtccactggctagaagcgcgagcccacccaaagcgaaaaacctaaacggaggtcttcgtcgctccgtcgcccccgccgcgcccacatcctgcgatttttcccccggcgacctggtgtgggctaagatggaaggttacccatggtggccctgcctggtgtacaaccatccatttgacggtactttcattcgggagaaaggaaagagtgttagagtccatgtacagttcttcgatgacagcccaactaggggctgggttagtaagcgcctattaaagccctatactggcagcaagagcaaagaggctcagaaaggtgggcacttctattccgcgaaaccggagatcctgagagctatgcaacgggccgatgaggcattgaataaggataagattaaacgcctggagctggccgtttgcgatgaacccagcgagcccgaggaggaagaggaaatggaggtgggtacaacctacgtgaccgacaagagcgaggaggataatgagatagagtccgaagaggaggttcagcctaagacccagggatctcgcagatcttctcgccagataaagaagcggcgaaagaaaagatag

SEQ ID NO: 25127 - DNA, 3177 bp, synthetic construct
  misc_feature 1..3177: note = Description of Artificial Sequence: Synthetic coding sequence
  source 1..3177: mol_type = other DNA
atggtgaccggcaacggcagcctgaagcggaagagcagccggaaggagacaccctccgccaccaagcaagcgacctccatctcttcagagacaaagaacaccctgcgggcattcagcgcaccacagaacagtgagtcacaggcgcacgtatccggaggtggagacgactcgagtaggcccactgtgtggtaccacgagacgctcgagtggttgaaagaagaaaaaaggcgcgatgaacaccggcgacgccccgatcaccctgatttcgatgcctcaactctttatgtgccagaagactttctgaactcatgtacaccagggatgcgtaaatggtggcaaatcaagtcacaaaactttgacttggtgatttgttataaggtgggcaaattttatgagctgtaccacatggatgcactgatcggggtgtccgaattgggcctcgtcttcatgaaaggaaactgggcccacagcggatttcccgaaatagcattcggtagatactccgacagcctggtgcagaaggggtataaagtggcgcgcgtagaacaaacagagacccctgaaatgatggaagctcgatgtcgcaaaatggcccacatctcaaagtacgatagggtggtacgtcgggagatttgccggattattacaaaaggtacacaaacatactccgtcctggaaggcgatccaagcgaaaattacagtaagtatctcctgtctctcaaggagaaggaagaagactcttccggacatacccgcgcgtatggagtttgctttgtagatacttctctcggtaaattcttcatcggccagttctctgatgaccggcactgctcccggtttaggaccttggttgcccactatcctccagtgcaggtgctgttcgagaagggaaacctcagcaaggagacgaaaaccattctcaagagctccttaagttgctccctgcaggaaggcctgatcccgggtagtcagttctgggacgccagcaaaacactccggactctgttggaagaagaatactttcgtgagaaactctccgacggtattggtgtaatgttgccgcaggtcctgaagggaatgacaagcgaatcagactctataggtctcactccgggagagaaatccgagctggcactgtctgctctgggcggttgtgttttttatctgaagaagtgtttaatcgatcaggagctattaagcatggccaactttgaagagtacattccgttggacagtgataccgtgtccacgacccggagcggcgctattttcacaaaggcttaccagcgtatggtgctggatgctgtgactctgaataatctggagatctttctgaacgggaccaatggatctactgaaggtacgttgctggaaagagtggacacttgtcatacacctttcgggaagaggttattgaaacagtggctttgcgccccactgtgtaatcattacgccatcaacgaccggctcgacgccatcgaggacctcatggtcgtccctgacaaaatttcagaggtggtcgagttactgaaaaaacttcccgaccttgaacgcctcttgtcaaagatccataatgtgggatctcctctgaaatcacaaaaccaccctgatagtcgagctatcatgtacgaagagactacttattccaagaagaaaataattgatttcctcagtgccctcgaggggtttaaagtgatgtgcaaaataatcgggattatggaagaagtagccgacggctttaaatctaagattctgaagcaggtaatttccctgcagactaaaaatcctgaaggacggttcccagatctgaccgttgaacttaatagatgggacactgcctttgatcacgaaaaagcccggaaaacaggactgatcacgcccaaggcgggctttgatagcgactatgaccaggcacttgctgatattcgcgaaaatgagcagtccctgctggagtatctggagaagcagcgcaatagaattggatgcagaaccattgtatattggggcatagggagaaatcgctatcagctcgagatcccagagaattttacaacccgcaatctgcctgaggaatatgaactcaaatccactaaaaaaggttgtaagagatactggacaaagaccattgaaaagaaactcgcgaacctcatcaacgcagaagagagaagggacgtgagcctgaaggattgcatgagaaggctcttttacaattttgacaagaattacaaagactggcagagtgctgtggagtgcatcgcagtgcttgatgtgttgctgtgcctcgctaactattcccggggcggagacgggcctatgtgcagacccgtgattcttctgcccgaagatacaccccctttcttagaactaaaggggagtcgccatccttgcattacgaagacctttttcggtgatgatttcattcccaatgatatactgatcggctgtgaggaggaggagcaggaaaacggaaaggcatattgcgttctagtgaccggccctaacatgggaggtaagagtactctcatgcgtcaggcgggactgctcgctgtgatggcccagatgggctgctacgtgccagccgaagtatgtcgactgacccccatcgaccgggttttcacccgcttgggggctagtgaccggatcatgagcggtgagagcacgttcttcgtggaacttagcgaaactgccagtatcctgatgcatgctactgcccattccttggtgctagtagacgaactcggcaggggaaccgccaccttcgatggaaccgccatcgctaacgctgtcgttaaggagcttgcggagacaattaagtgtcgcacgttattttccacgcactatcattccctggtagaggactatagccaaaacgttgcggttcggctcgggcacatggcttgcatggtcgagaatgagtgtgaagacccttcacaagagaccatcacttttttgtataaatttattaaaggtgcttgcccaaaatcttacggcttcaacgccgcaagactcgccaatctgccagaggaggtgatccagaaagggcatagaaaggctcgtgagttcgaaaaaatgaaccagagtctcaggctctttcgggaggtgtgcctcgcatcggagagatcaactgtggacgctgaggccgttcataaattgctcactctgatcaaagagctgtag

SEQ ID NO: 25128 - DNA, 3693 bp, synthetic construct
  misc_feature 1..3693: note = Description of Artificial Sequence: Synthetic coding sequence
  source 1..3693: mol_type = other DNA
atgagccggcagagcaccctgtacagcttcttccccaagagccccgccctaagcgatgccaataaagcaagtgctcgggcgagtagggagggcggccgggctgcagccgcgccgggtgcctcaccttccccgggcggcgatgcggcctggtctgaagccggacccggtcctaggccgctggcccgcagcgcgtccccacctaaggccaaaaacctcaatgggggtcttcgtcggagtgtgggcacaacgtatgtgactgacaagagcgaagaggataacgagatcgagtctgaagaggaggtgcagccaaaaacgcaaggctctcgtcggagttccaggcagattaaaaaacggcgggttattagcgattctgagagcgacattggaggctcagatgtcgagtttaaacccgatactaaagaagaaggcagtagcgatgagattagctccggcgtgggggactctgagtctgagggcctgaattccccagtcaaagtcgcgaggaaaagaaagaggatggtgactggaaatggctctctcaagcggaagtcaagcaggaaggagacgcccagtgcgaccaagcaggccacgtctatctcaagtgaaaccaaaaatacacttcgcgccttttctgccccacaaaatagtgagtcacaggcacacgtgagcggcgggggggacgattcatctcgtcccacagtttggtatcatgaaacactggagtggctgaaggaagagaagcgccgcgatgaacatcgacgccgtcccgaccatccagatttcgacgcctccactttatatgtacctgaggactttctgaactcatgcactcctggaatgaggaagtggtggcagatcaaaagtcagaatttcgatctcgtcatctgctacaaggtcggaaaattttacgagctgtaccatatggacgcccttatcggcgtctctgagctgggtctggtgttcatgaaggggaactgggcccattctggatttcccgaaattgcttttggtaggtactccgactctcttgtccagaagggatacaaggtggccagggtggagcagacagagaccccagaaatgatggaggcccggtgccgcaagatggcgcacatctcgaaatatgaccgagttgtgcgacgcgaaatctgtcgcattatcaccaagggcacacagacctacagcgtcctcgaaggcgacccgtcagaaaattatagcaagtatttactcagtctgaaggagaaagaagaggactcttccggccacacgagagcgtacggtgtttgcttcgtcgacaccagtctggggaagtttttcattggtcaattttcagacgaccgtcactgttctaggttcagaaccttagtggctcattaccctcctgtccaggtcctcttcgagaaaggcaacttatctaaggaaaccaaaacaatcctgaagtctagcctcagctgcagtctgcaggaggggctgattcctggcagtcagttttgggacgctagtaagacactgcggacgcttctcgaagaagaatacttccgtgaaaagttatctgacgggattggagttatgctgcctcaagtactcaaaggtatgacgtctgaatccgacagtatcggcctcactcccggcgagaaaagtgagctcgcactgagcgctttaggaggctgcgtgttttatctgaaaaaatgtcttattgatcaagaactgctgtccatggccaattttgaagagtacatcccgctggatagcgataccgttagcaccaccagatccggagccatatttaccaaggcctaccaacgcatggtgctggacgccgtgacattaaataatcttgaaatctttctgaacggaaccaatgggagtaccgagggtacactgctagagcgggtagatacatgccacactccattcgggaagcgcctcttaaaacagtggttgtgtgcacccttgtgtaaccactatgctatcaatgatcgactggacgcgatcgaagacctgatggtcgtgccagacaagatctccgaagtagttgaactactgaaaaaactccccgaccttgaaagactgctgtcaaaaatacacaacgtcggctcccctctaaaatcacagaaccacccagattctagagccattatgtatgaagagactacatactccaaaaaaaagattatagactttctctccgccctcgaaggctttaaagtcatgtgtaagatcattggcataatggaggaggtagcagacgggtttaaatcaaagattctaaagcaggttatttctctccagactaagaatccagaaggtcgattccctgatttaacagtcgaactgaatagatgggatacagcttttgatcatgagaaagccagaaaaaccggcctgattactcctaaagccgggttcgatagcgattacgatcaggccctggctgatataagagaaaacgagcagtctctactcgaatacctcgaaaagcagcgcaaccggataggctgtaggacgatcgtatactggggaatcggcaggaaccggtatcagcttgaaattcccgagaattttacgactagaaacttacccgaggagtacgagctcaaatcaaccaaaaagggctgtaagcggtactggaccaagaccatcgaaaaaaagttggccaatctcatcaacgcggaggagaggagggatgtttccctcaaagattgtatgcgccggttgttttacaactttgacaagaactacaaagactggcagtccgcagtggaatgtatcgccgtgcttgatgtgctgctgtgtctggccaattactcaagagggggagatggaccaatgtgtaggccagttatcctcctgccggaagacacacctccttttcttgaactgaaaggcagcagacatccgtgcattactaaaaccttttttggggatgactttatccccaatgatatccttattggctgtgaggaggaggagcaggagaatggtaaggcctactgtgtgctagttaccgggccaaatatgggaggaaagtcaaccttaatgagacaggcaggcctgctggccgtgatggcccagatgggttgctacgtgcctgctgaggtgtgtcggctcacacctatcgatagggttttcacgagacttggcgcctccgaccggattatgtctggcgaaagtacattctttgtggagctgagtgaaacagcatctatcttaatgcatgccaccgctcactccctggtgctggtggacgagttaggcagagggacggccacgttcgatggcaccgcaatcgcaaacgccgtggtaaaagagttggccgaaacgattaaatgccggacccttttctctacccattaccattcgctggttgaagattactcccaaaatgtggcggtccgcctggggcatatggcgtgtatggttgaaaatgagtgtgaagacccttcacaggagacgataacgttcttgtataaatttataaagggagcgtgccccaaatcttacggattcaatgccgcgcggctggcgaatcttcctgaggaagttattcagaaaggtcacaggaaagctcgagaatttgaaaaaatgaatcagtccctgcgcctctttagggaagtgtgtcttgcatctgagcgcagcacggtcgatgccgaggcagtacacaagttgctaactctcatcaaggaattatag

SEQ ID NO: 25129 - DNA, 975 bp, synthetic construct
  misc_feature 1..975: note = Description of Artificial Sequence: Synthetic coding sequence
  source 1..975: mol_type = other DNA
atgcggcggctgttctacaacttcgacaagaactacaaggactggcagagtgctgttgaatgtatcgctgtgctggacgtcctcctgtgtcttgccaattattcaagagggggagatggacctatgtgtagaccagttattctgctacctgaagacactcctccattcctggagttaaagggttctcggcatccttgcatcactaaaactttttttggcgatgactttattccgaacgatattcttataggctgcgaggaggaggagcaggagaacggcaagatagtgtgcctgctgttagatcagatttggggcgcctcgctacgcatgaggcaggcgggcttactcgcagtgatggcccagatggggtgctatgtgccagcagaggtttgcagactcaccccgatagatagagtgtttactaggctgggggcgagcgacagaatcatgtctggggagtcaacatttttcgtggagctttcagaaacagcatccatcttgatgcatgctactgcccacagcctcgttctggttgatgaactgggcagaggcacagcaacatttgatggcacagctatcgccaacgcggtggtgaaagagttggcagaaactatcaaatgtcgtactttgttttccacacactaccacatatcccggcggttgttcagcaagtgttgctgtttagggcatatggcttgcatggtggaaaacgaatgtgaagatccttctcaggagactataacatttctatataaatttatcaagggtgcctgccctaagtcctacgggtttaatgcagctcggctggcaaatcttccagaagaggttatacagaaaggccatcggaaggctcgcgagtttgagaaaatgaatcagtcattgagactgtttagggaagtctgtctcgcctccgaacggagcaccgtcgatgccgaggccgtgcacaagctcctgacccttatcaaggagctgtag

SEQ ID NO: 25130 - DNA, 3201 bp, synthetic construct
  misc_feature 1..3201: note = Description of Artificial Sequence: Synthetic coding sequence
  source 1..3201: mol_type = other DNA
atgagccggcagagcaccctgtacagcttcttccccaagagccccgcgttgtctgacgctaataaggcctctgcaagagctagccgagaaggcgggagggccgcttgccctagaggtctgagcttcccaaggagaggatgcgggcttgagagaggctgggcgtggaggccactcgcaaggtcagccagccctcccaaagccaagaacctgaatggggggctccgaagatctgtggcccctgccgcaccaactagttgtgacttctcccctggggatcttgtctgggctaaaatggaaggatacccctggtggccctgccttgtgtataatcaccccttcgatggtacattcattagggaaaagggtaagagcgtgagggtccacgttcaattcttcgatgactccccaacacgtggctgggtatcgaaaaggttgctcaaaccgtacacgggatccaagtcaaaggaggctcagaagggcggccatttttacagcgctaagccagagatactgagagcaatgcagcgggccgatgaagctttaaataaggataagattaaaaggttggaactggcagtatgtgacgaaccgagcgaacccgaggaagaggaggaaatggaggtgggtacaacttacgtaaccgacaaaagtgaagaagacaatgaaatcgaaagcgaggaggaggttcagccaaaaacgcagggcagccgccgaagctctcggcagatcaagaagagaagagttattagcgattccgagagtgacattggtggctccgacgtggaattcaagcctgataccaaagaagagggaagcagcgacgagatttcttcaggagtgggtgactccgaaagcgaagggttgaatagccccgtcaaagtggccagaaagagaaaacgtatggtgacaggaaacgggtctttgaagcggaagtccagcagaaaggagactccctctgccacaaagcaggccacatccataagttccgaaactaaaaacaccctgagagccttttcagctccccagaactctgaatcacaggcccatgtctctggcggcggcgatgattcttcccgccctaccgtatggtatcacgagaccttagagtggctcaaagaggaaaaaagaagagacgagcatcggcgccggccagaccacccagactttgatgcatccacactgtatgtacctgaggacttcctaaactcatgcacaccggggatgcgaaagtggtggcagataaagtcccagaattttgacctggtgatctgctacaaagtgggaaagttttacgagctgtaccacatggacgctctgatcggcgtaagcgaacttggactggtttttatgaaaggcaactgggcgcatagcgggtttccagagatcgcgttcggcaggtattcagatagccttgttcagaaaggttataaagtagctcgagtcgaacagacggaaactcccgaaatgatggaagcgcggtgtcgcaaaatggctcacatctccaaatacgatcgggtcgtgcggcgcgagatctgccggattattactaagggcacccagacttacagtgttctggaaggggacccctccgaaaattacagcaagtacctgctgagcctgaaagagaaggaggaggacagcagtggtcacacgagggcttacggggtctgctttgttgacacatcacttggcaagttcttcattgggcaattctcagacgacagacattgctctagattcagaaccctagtcgcacactatccacccgtccaggtactgttcgagaagggcaatctctcaaaagagacaaaaaccatcctgaaatcttctctgagttgctcacttcaggaaggcctaataccagggagccagttctgggatgcctccaaaaccctcagaacgttgctggaggaggaatactttagagaaaagcttagtgacgggattggagtaatgcttccgcaggtgctgaagggcatgacaagcgaatctgacagcattggtctgactcccggagagaagagcgaactggcactgtcagccttggggggttgcgtattctaccttaaaaaatgtctgattgaccaggagctgttgtccatggcgaatttcgaggaatacataccactggattcggacaccgtgtccactacccgctccggggcgatttttaccaaggcctatcaaaggatggttcttgacgctgtgacactcaacaacctggagatctttctgaatggaactaatgggagcacagagggaacactgctggaacgcgtggatacctgccatacaccctttgggaaacggctgctgaagcagtggctttgtgctccactctgtaatcactatgctattaacgatagactcgatgcaattgaagacctaatggtcgtgccggacaagatttcagaggtcgtggagctgttgaagaagctgccagatctggagcgtctgctgtccaagattcacaatgtcggatccccactaaagtcccaaaaccatcctgatagtcgagccattatgtatgaagaaacaacctacagtaaaaagaagatcatcgactttctatcagctttggagggcttcaaggtgatgtgcaagatcatcggcatcatggaagaagtggccgatggctttaaaagcaagattctcaagcaggtcatttcccttcagacaaagaatccggaagggcggttccccgatctaactgtcgagctgaacaggtgggataccgcctttgatcacgagaaagcccggaaaaccggcctgattacccccaaggccggcttcgactcagattacgaccaggcactcgcagacatacgtgagaatgagcaatcacttcttgagtatctggagaaacagcgaaatcgcatcggctgtaggactatagtctactggggaatcggcaggaacagataccagcttgagatccccgagaactttacaacccggaacctgcctgaggaatacgaactaaagtctacaaagaaaggttgcaaacgctactggaccaagaccattgagaaaaaattggcaaatctaattaacgctgaggaacgcagagatgtatccctcaaggattgcatgcgtcgccttttctacaacttcgacaagaactataaagattggcagtccgccgtggaatgcattgcagtccttggtaaaaccttgaacaaattggtcttgcggctgtag

SEQ ID NO: 25131 - DNA, 1569 bp, synthetic construct
  misc_feature 1..1569: note = Description of Artificial Sequence: Synthetic coding sequence
  source 1..1569: mol_type = other DNA
atgcggaagccccgggccgccgtgggcagcggccaccggaagcaggctgcctcgcaagaaggaagacagaagcacgcaaaaaacaattcgcaggcaaaaccgtccgcctgtgatgcaggtctcgctcgccaacctgaggaggttgtacttcaggcctccgtgagctcttatcatctgtttcgtgacgtggcggaagtcacagcttttcggggatcactgctgagctggtatgaccaggagaaacgggatctcccttggaggagacgagccgaggatgaaatggatttggacagaagggcttacgccgtctgggtttcagaagtgatgctgcagcagactcaggtcgctactgtgatcaattactatactggatggatgcagaagtggccgaccctacaggatttggcatccgcgtctctggaggaagttaaccagctttgggcagggctgggctactattctaggggcaggaggctgcaagagggtgctcgaaaggtagtcgaagagctggggggccacatgcctcgaaccgcggaaaccctgcaacagcttctacccggggtgggaaggtacaccgccggggccattgcaagcattgcctttggacaagctaccggtgtagtggatggcaatgtggctcgtgttttatgtagagtgagagcgattggagcagaccctagtagtacccttgtcagtcaacagctttggggcctcgcacagcaacttgtggatccagccaggcccggtgacttcaaccaagccgccatggaacttggcgctaccgtatgtaccccccaacgacccctgtgctcccaatgcccggttgaaagtctctgtagggctcggcaacgcgtcgaacaggagcagttgctggccagcggctccctgtccggcagccccgacgtagaagaatgtgcgcctaacaccggacaatgtcacctgtgtttgccaccttctgaaccttgggatcagacattaggagtggtgaacttccccagaaaagcctctagaaaacctccccgggaggagtcctctgctacttgcgtgctcgaacagccaggagcactgggtgcccagatactactcgtgcaacggcccaactctggtcttctggccggtctatgggagtttcctagcgttacttgggagccttccgaacagttgcaacggaaagccttgttgcaggagctgcaacgctgggctggacccctaccagcaacccatctgaggcacctcggtgaggttgtgcatactttctcccacattaaacttacatatcaggtgtatgggctggctctggaaggtcagaccccggtgaccacggttccccccggagctaggtggctgacacaagaggaattccacaccgcggccgtcagtactgccatgaaaaaggtgttcagagtctatcaggggcagcagcccggcacttgcatgggaagcaaacgtagtcaggtatcctcgccctgtagtcggaagaagccgaggatgggccaacaggtcttggataactttttcaggagccacatcagtaccgacgcccactcgttgaacagcgccgcacaatag

SEQ ID NO: 25132 - DNA, 1566 bp, synthetic construct
  misc_feature 1..1566: note = Description of Artificial Sequence: Synthetic coding sequence
  source 1..1566: mol_type = other DNA
atgcggaagccccgggccgccgtgggcagcggccaccggaagcaggccgcgagccaggaagggaggcaaaaacatgcaaagaacaattcccaagcgaagcctagtgcctgcgacggtctcgccagacaacccgaggaagtggtgctccaggcctctgtgtcatcttaccatctctttcgggatgtggccgaagtgactgccttccgggggtccttgctcagctggtacgaccaggaaaagcgagatctcccatggcgccggagggcagaggatgaaatggatctggatcgtagagcctatgccgtgtgggtcagtgaggtgatgctccagcagacgcaggtggccaccgtgattaactactataccggatggatgcaaaagtggccaactctgcaggacctcgcatctgcctctcttgaggaagtgaaccagctttgggccggactcggatactacagccgaggaagacgcctacaggagggggccagaaaagtggtcgaggagctggggggtcacatgcctcgaacagccgagacgctgcaacagctgctgcctggggtgggcagatacactgccggggccattgcctctatagcctttggtcaggccacaggggtggtcgacggcaacgtggctagggtgctctgcagggtcagagccatcggtgcagatccgagctcaacactcgtgtcccagcaactttggggactcgcgcaacaattggtcgaccccgcccggcccggcgattttaatcaagcagcgatggagctgggagctacggtgtgcacgccacaacgacccctgtgctcacagtgccccgtagaatccttgtgtagggctagacagcgtgtcgagcaggagcagctgctggccagcggtagcttgtctggatcccctgatgtcgaagagtgtgccccaaacaccggacagtgtcacctctgtcttccaccatctgagccctgggaccaaactctaggggttgtcaactttccccgtaaggccagccggaaacccccccgcgaggaatccagtgctacttgcgtcctggagcagccaggtgctctcggtgctcaaatcttactagtgcagcgtcctaacagtggactcctggccggattgtgggagtttccctccgtcacttgggagcccagcgagcagctgcagagaaaagccttgctgcaggagttacagcgatgggccgggccactacccgccacacatctcaggcatctaggagaggttgtacatacgtttagtcacataaaacttacatatcaggtttacggtctggctcttgagggacagacaccagttaccactgtcccgcccggagcccgatggctgacccaagaagagttccacacagccgcagtctcgacagcaatgaagaaagtcttcagagtgtaccaggggcagcagccaggcacatgcatggggtcgaaaaggtcccaagtctcttctccctgttctcgcaaaaagcctcggatgggccaacaggtcctggataacttcttccgatcccatatttctacagatgcgcattcactgaatagtgcagcccagtag

SEQ ID NO: 25133 - DNA, 1641 bp, synthetic construct
  misc_feature 1..1641: note = Description of Artificial Sequence: Synthetic coding sequence
  source 1..1641: mol_type = other DNA
atgacccccctggtgagccggctgagccggctgtgggccatcatgagaaaacccagagctgctgtgggctccggccaccgtaagcaggctgcatcacaggaggggaggcagaaacacgccaaaaacaacagtcaggctaagccttcagcctgtgatggcatgattgctgaatgccccggcgccccagccgggctggcccgtcagccagaagaggtagtattacaagccagtgtgagctcttaccacctcttccgggacgtggcggaggtgactgccttcaggggcagcctgctctcctggtacgaccaggaaaagagagacctgccttggagaagacgagctgaggacgagatggaccttgatcgcagggcttatgctgtctgggtatcggaagtcatgctgcaacaaactcaggtggcaaccgtgattaactactacacgggttggatgcagaagtggccaactctgcaagaccttgccagcgcgtctctggaggaggtgaaccagctctgggctgggttgggatattactctagaggtcgacggctacaggaaggagccaggaaggtggttgaggaactgggcggacacatgccccggaccgctgagaccttgcagcaacttttgcctggagtgggacgctacacagcgggtgcaatcgccagtatcgcttttggccaggcgacaggggttgttgacggcaacgtggcccgggtgctatgccgtgtcagggcgatcggggccgatccaagctccactctcgtcagccaacagttatggggcctggctcaacagctggttgacccagccaggccaggggattttaaccaagcagccatggagttgggcgccacggtctgcaccccgcagaggcccttgtgttcacagtgccctgtggagagtctgtgtcgtgcccggcagcgggtggagcaggaacagctcctcgctagcggaagcttgtccggctctccagacgtggaagagtgcgcgcccaacaccggacagtgccacctgtgtttaccaccttccgaaccttgggaccagactttgggcgtggtaaatttcccacgcaaagcttcaaggaagcccccgcgggaagagagttctgccacgtgtgtgttggagcagccgggggccctcggtgcacagatacttctggtacaacggccaaatagtggcctgctggctggcctctgggaatttccaagcgtaacctgggaacctagcgagcagctgcagcggaaagctctgttgcaggagctgcagcgctgggcaggccctctgccagccacccacttacggcacttgggggaggtggttcatactttcagccatatcaagttaacctaccaggtttatgggctcgcactggaaggccaaacacccgtcacaactgtccccccaggagctcggtggctgactcaggaggagtttcataccgccgctgtgtcgactgcgatgaagaaggtgtttagggtttaccaagggcagcagcccggcacttgcatgggctctaaaagatcccaggtgagctcaccttgcagtcgaaagaaacctagaatgggacaacaagtgttggacaacttcttccgcagccacataagcactgacgcgcatagcctcaactctgccgcacagtag

SEQ ID NO: 25134 - DNA, 1599 bp, synthetic construct
  misc_feature 1..1599: note = Description of Artificial Sequence: Synthetic coding sequence
  source 1..1599: mol_type = other DNA
atgcggaagccccgggccgccgtgggcagcggccaccggaagcaggccgcttcacaagaaggccgacaaaagcatgcgaagaacaatagccaggccaagccatccgcatgcgatggcatgattgccgagtgccccggcgcgcccgccggccttgccagacagccagaagaagtggtgctccaggcaagcgtctctagttaccaccttttccgtgacgtcgctgaggtcacggcattccgcggctcactcctcagctggtatgatcaggagaagagagacctgccttggaggagaagagctgaggacgaaatggatttagatcgtagggcctatgccgtgtgggtgagtgaagtcatgctgcagcagacccaggtggcaacagtgataaattattacacagggtggatgcagaagtggcccactttgcaggacctggcctctgcatctttggaggaagttaaccagctgtgggcgggactggggtactactcaagagggagacgcctgcaggagggcgcccggaaggtggtagaggagcttggaggacacatgcctcgcacagccgagacgctgcaacaactgctcccaggggtgggcaggtacactgctggagccattgcctcgatagcattcggccaggcgacgggagtagtggatgggaacgtggccagggtactgtgcagggttcgggccattggcgccgacccgagctccacacttgtgagccaacagttgtggggcctggctcagcaactcgtagaccccgcacgtccaggtgatttcaatcaggctgctatggagttgggggctactgtatgtaccccccagaggcccctctgcagccagtgccctgtagaaagtctctgtagggccaggcagcgtgttgaacaggaacaactgctcgcctctggaagcctctcaggcagcccagacgtcgaagagtgcgctcccaacacagggcaatgccatctctgcctgccgccctctgagccatgggaccagacattgggcgtcgttaatttcccacggaaggcatctcgcaaaccacctagggaagaaagctctgccacctgtgtgctggagcagcccggagccctcggagctcaaatcctcctcgtgcagcgcccaaatagcggcttgctggcaggcctctgggaattcccttcggttacatgggagccgagtgaacagcttcagaggaaagctctgctccaggagctgcagaggtgggcaggccccctccccgcgacccatctccgccatctcggagaggttgtgcatacctttagccacataaaattgacatatcaggtgtacggcttagccctggagggacaaacacctgtcaccaccgtccccccaggagcacggtggctgactcaggaggaattccatacagcagccgtgtccacagccatgaaaaaggtgttccgtgtgtatcagggccagcagcccggaacttgcatgggatccaaaagatcccaagtgagcagcccctgtagcagaaagaaaccgagaatgggccagcaggtgctcgataactttttccggtctcacatctcaacagacgcccatagcctgaacagcgccgctcaatag

SEQ ID NO: 25135 - DNA, 1566 bp, synthetic construct
  misc_feature 1..1566: note = Description of Artificial Sequence: Synthetic coding sequence
  source 1..1566: mol_type = other DNA
atgcggaagccccgggccgccgtgggcagcggccaccggaagcaggctgcttcccaggaaggaagacagaaacacgcaaaaaataattctcaagctaagccgagcgcttgcgacggtcttgctcggcagcctgaggaggttgtgctgcaggcttctgtttcttcataccacctcttcagggacgtggccgaggtgacagcattcaggggctccctgttgtcctggtatgaccaggagaagcgcgacttgccatggagaagacgggccgaagacgaaatggacttggaccgccgcgcttacgcggtgtgggtttctgaagtgatgttacaacagacacaagtggccaccgtcattaattattatacaggctggatgcagaagtggcccaccctgcaggatctggccagtgcatcactcgaggaggtcaatcagctttgggccggactgggatattactctcgagggcgtaggcttcaagagggtgccagaaaggtggtcgaggagctgggaggccacatgcccagaacagccgaaaccttacagcagctgctgccgggtgtcgggcgctacaccgcaggcgcaatcgcgtccatcgctttcggtcaagcaactggcgtggtggacggcaacgtggccagggtcctctgtagggttagagccattggagccgatcctagttcaacccttgtctctcaacaactgtgggggctcgcccagcagttggtagatcctgccaggccaggggatttcaaccaagccgctatggagttgggagcaacagtttgtacccctcagcgacccctgtgctcacagtgtccagtagagtcactgtgtagggccagacagagagtggagcaagagcaactattggccagcggctctctttcagggtcacctgacgtcgaggagtgcgcccctaacacaggacagtgccacctctgtctgccaccatctgaaccatgggatcagacattgggtgtcgtcaacttcccaaggaaagcaagtcgcaagccaccccgcgaggagtcctcggcaacctgcgtgctcgaacagcccggcgccctgggagctcagatcctcttggtgcaaaggcccaattctggcctacttgccgggttatgggaatttccctcagttacttgggaaccctccgagcagttgcaaagaaaggcattactgcaggaattacaacggtgggccgggcccttgccggctacccatcttaggcatttaggagaggtagtgcacaccttttctcatatcaaattgacctaccaggtctacgggcttgctctcgagggacagaccccagtgactacagtgccccccggggcaaggtggcttacccaagaggagttccacacagccgctgtgtcaacagccatgaagaaggtattccgcgtgtatcaggggcagcagccagggacctgcatgggaagcaagcggagccaggtctctagcccctgtagcaggaagaagcctcgtatgggtcagcaggtgctcgataactttttccgaagccatatatccacagacgcacactccctcaactcagcagcacaatag

SEQ ID NO: 25136 - DNA, 1611 bp, synthetic construct
  misc_feature 1..1611: note = Description of Artificial Sequence: Synthetic coding sequence
  source 1..1611: mol_type = other DNA
atgacccccctggtgagccggctgagccggctgtgggccatcatgcgcaaaccacgggccgcagttggctccgggcatagaaagcaagccgcatctcaggagggccgccagaagcatgccaaaaataatagccaggccaaacctagcgcctgcgatgcaggtctggcccggcagcctgaagaggtcgtgctgcaggccagtgtgtcatcataccacctattcagggatgtagctgaggtcaccgcatttcggggttccctgcttagctggtatgaccaggagaagcgcgacttgccgtggcgccggcgcgccgaggacgaaatggatcttgatagaagagcctatgccgtctgggtatctgaggtaatgctacagcagacccaagtagcgaccgtcattaactattacaccggctggatgcagaagtggcctacgttgcaggaccttgccagcgccagcttggaggaggtaaatcagctgtgggccggcctcgggtactattctcggggcaggagattacaggagggcgcgcgcaaggtggtggaagagttaggcggtcatatgcctcgaacagccgaaacgctccagcagctcttgccaggcgtggggagatacacagctggcgccatcgcctctatcgcttttggtcaggcaacaggagtcgtggacggcaacgttgcacgggtgctctgtcgggtgagagcaatcggcgctgaccccagtagcacattggtgtcccaacaattatggggcctcgcgcaacagctggtggatccagcccgaccaggtgacttcaaccaggccgccatggagctgggggctaccgtgtgcacaccccagcgcccactatgcagtcagtgtcctgtggagagtctctgccgcgcacgtcaacgcgttgagcaggaacagctgcttgcttccggcagcttgtctggatcgccagatgtggaagaatgcgcccctaatacagggcagtgccatttatgcctgcctccgtccgaaccttgggatcagactctgggggttgtgaactttcctagaaaggccagcagaaagcccccgagggaggaatccagcgcaacttgtgttctcgagcagcctggcgctctcggggctcagattctgcttgttcagcgaccgaattcagggctactggccggtctctgggagttccccagtgttacctgggaacctagcgaacagcttcaaaggaaagctctcctgcaggagctacaacgatgggccggacccctccctgcaacgcatctcagacacttaggcgaagtggtgcatacattctctcacatcaagctcacataccaagtgtatggtctggccctagaaggacagaccccagtcacaacggtgccccccggagcccggtggctgactcaggaggaattccatactgcagccgtctccaccgctatgaaaaaagtgttccgggtgtaccaaggccagcagcccggaacatgcatgggctccaagaggtctcaggtttcttcgccttgctcgaggaaaaaacctcgcatgggtcaacaggtgctcgacaacttcttccgaagccacatctcgaccgacgcccactccctgaattccgccgctcagtag

SEQ ID NO: 25137 - DNA, 1608 bp, synthetic construct
  misc_feature 1..1608: note = Description of Artificial Sequence: Synthetic coding sequence
  source 1..1608: mol_type = other DNA
atgacccccctggtgagccggctgagccggctgtgggccatcatgaggaagccacgcgccgctgttggaagcggccatcgcaaacaggccgcttcccaggaggggaggcagaaacacgcgaagaacaactcacaggccaaaccaagcgcatgcgacggacttgcccgccagccggaggaagtggtattacaggcttccgtttcaagctatcacttgttccgcgatgtagccgaggtgacggcctttagaggttcgctgctgtcttggtatgatcaagagaagagagatttgccttggaggaggcgagcggaggacgaaatggacttggatcgacgggcttacgccgtctgggttagcgaagtcatgctacagcaaacacaggtggcaactgtcataaactactacaccggttggatgcagaaatggccgactttacaggatcttgcttcagcctcacttgaggaggtgaatcagctctgggccgggctaggttattattctcgaggccgtaggctacaagagggtgcgcggaaagttgtcgaggagttggggggacatatgccaagaacagccgagacactgcagcagctgttgccaggagtgggaaggtatacagccggcgctattgcatcaatagccttcggtcaggccacaggcgttgtggatggcaacgtggcccgagtgttgtgccgggttcgggccataggcgcagatcccagttctaccctggtgtcccagcagctgtgggggctagcacagcaactggtggatcctgcccgtccaggtgatttcaatcaggccgcaatggaactgggagccacggtttgcaccccacaacggcccttgtgttctcagtgccccgttgagagtttgtgccgcgctaggcagagggtggagcaggaacagctcctggcctcaggtagcctgagtggctcccccgatgtagaggaatgtgcccccaatacgggccaatgtcatctgtgcctgcccccttccgagccatgggatcaaactctgggcgtggtgaacttcccccggaaagccagcaggaaacccccaagggaagagtcttccgccacatgtgtgctcgagcagcccggcgctctcggggcccagatcttgctcgttcaacgacctaatagcggcctactggccggtctctgggaattcccctctgtaacctgggaacccagcgagcagctgcagcgcaaggccctcctgcaggaacttcagcgttgggccggccctctgccggccacccacctgcggcatctcggagaggtggtgcacacttttagccatatcaaactgacctaccaggtgtacgggttggctttggagggccagaccccggtaacaactgttcctcctggcgcgaggtggctcacccaggaagaattccacaccgcggccgtctcaaccgccatgaagaaggtgttccgggtctaccaggggcagcagcccggcacatgcatgggatcgaagagaagtcaagtcagcagtccatgctctcgaaaaaagcctcgcatgggtcagcaggtgttggacaatttctttagatcacacataagcacagacgcgcacagtttgaatagcgcggcccagtag

SEQ ID NO: 25138 - DNA, 876 bp, synthetic construct
  misc_feature 1..876: note = Description of Artificial Sequence: Synthetic coding sequence
  source 1..876: mol_type = other DNA
atgcggaagccccgggccgccgtgggcagcggccaccggaagcaggccgcgtcgcaggagggtcggcagaaacacgccaagaataatagtcaagcaaaaccttctgcttgtgacggcatgattgccgagtgtcccggcgccccagccggactagccaggcaacctgaggaggtagtgctgcaggcttctgtgtcaagctaccatctatttcgggatgttgcagaggtgacggcttttcgcggcagtttactttcctggtacgatcaagaaaagagagatctgccctggaggcgtcgcgcggaggatgaaatggatctggatcgacgcgcatatgccgtgtgggtgagcgaggtcatgctgcagcagacacaggttgccaccgtcataaattattatactgggtggatgcagaagtggcctacgttacaggatctggcgtccgccagccttgaggaggtcaaccaactgtgggcaggtttaggttactactctcgcgggagacgcctgcaggagggggcccgaaaagtagttgaggagttggggggacacatgccaagaactgcagagacactgcagcaattgctgcctggcgtggggcggtacactgctggggccatagcatccattgcttttggccaagccacaggcgtggtcgacggcaatgtggcgagagtgctctgtcgcgtaagagcaatcggagccgatccttctagcaccttggtaagccaacaactatggggactggcccagcagctcgtggatcccgctcgacccggggacttcaatcaggctgctatggagctgggcgcaaccgtgtgtacaccacagcgccccctgtgctcccaatgtccagtggagtcattatgccgagcctag

SEQ ID NO: 25139 - DNA, 1599 bp, synthetic construct
  misc_feature 1..1599: note = Description of Artificial Sequence: Synthetic coding sequence
  source 1..1599: mol_type = other DNA
atgcggaagccccgggccgccgtgggcagcggccaccggaagcaggcagcctcccaggagggaagacaaaagcatgccaagaacaacagtcaggctaagcctagtgcctgtgatggaatgattgccgagtgtccaggggctccagctggtctggcaaggcagccggaggaagtggtcctgcaggctagtgtaagttcataccacttattccgcgacgttgcagaagtcactgcttttagaggcagcctgctcagctggtacgaccaggagaaacgggaccttccctggaggcggcgggccgaagatgaaatggatcttgacaggagggcttacgcagtctgggtgtccgaagttatgctgcaacagactcaggtcgcaacggtaattaattactatacaggatggatgcaaaagtggcctactctgcaggatctggcatctgcatctcttgaggaagtgaaccagctgtgggctggtctgggctactattctaggggcagaaggctgcaggagggcgcaaggaaggtcgtggaagaactcggaggccatatgccaagaacagccgagacactgcaacagttgctgccaggcgtggggaggtacactgcgggagcaatcgcgagtatagccttcggacaagccacaggcgttgtggatggcaacgttgctagggtgctttgtagggtccgggcaattggcgcggacccctcctcaacactggtgagtcagcaactgtggggactggcccagcagttggtggacccagccaggcctggagatttcaaccaggctgccatggagctcggcgcaacagtctgcactcctcagcgtccactgtgttctcagtgcccagtggagagcctgtgcagagcgaggcagagggtcgaacaggagcagttactggccagtggaagtctatccggcagccccgacgtggaggagtgtgctcctaacactgggcaatgccacctatgtcttcctccatctgagccctgggatcagacgctgggggttgtgaatttcccacgcaaggcttctcggaagcctcccagagaagagtcctccgccacctgtgttctggaacaacccggcgcactgggggcgcagattctgctggtgcagcgaccgaattccggcctgttagctggcctgtgggaatttccgtctgtaacctgggagccaagtgagcagctgcagcggaaagcgctactgcaggaactgcagagatgggctggtcctctccctgccacacacctgaggcacctgggggaggtcgttcacactttcagccacataaagctcacttaccaagtgtacggcctggccctggaaggccagacccctgtgaccacagtaccccccggagccaggtggctgacacaagaggagtttcacaccgctgctgtgagtacagccatgaagaaagtcttccgggtctatcagggacagcagcctggaacttgtatgggaagtaaaaggagtcaggtgagcagcccctgcagcagaaaaaagcctagaatggggcagcaggtgctagataacttcttcaggtcacatattagcactgacgcacattcccttaatagtgctgcgcagtag

SEQ ID NO: 25140 - DNA, 1650 bp, synthetic construct
  misc_feature 1..1650: note = Description of Artificial Sequence: Synthetic coding sequence
  source 1..1650: mol_type = other DNA
atgacccccctggtgagccggctgagccggctgtgggccatcatgaggaagccccgggcagccgtgggctcaggtcaccgaaagcaggcagcctcacaagagggacggcagaagcacgccaaaaataacagccaagccaaaccctccgcctgcgacgcctgtgccggaatgatcgctgagtgtcccggagcccctgctggccttgcccgacagcccgaggaagtagttctccaggctagcgtgtcctcttaccacttgtttagagacgtcgccgaggtcactgcattccgaggcagtctactcagttggtacgaccaggaaaaaagagatcttccatggcgcaggagagccgaggacgagatggacctagaccgtcgtgcctatgcagtatgggttagtgaagtgatgttacaacagactcaagtggcaaccgtaattaactattacaccggctggatgcagaaatggcctaccctgcaggacctcgccagcgctagccttgaggaagtcaaccagctttgggctgggttgggctactactcacgaggaagacgcctacaggagggagccagaaaggtggttgaagagttagggggtcacatgccacggaccgccgaaactctccaacagctgctgcccggtgtgggcagatataccgctggcgccatagcatcaatcgcatttggtcaggccaccggcgtggtggacggcaacgtggcaagggtgctgtgtcgtgtccgggccattggtgccgacccttcaagcacgctcgtaagtcagcagttgtggggcctagctcagcagctagtggaccctgcgcgaccaggtgactttaaccaggctgctatggagctgggtgccacagtgtgcacaccacaacgacctctgtgcagccagtgtcctgtcgagtcgctgtgtcgcgctagacagcgggtggaacaagagcagctgcttgcaagcgggagcctgtctggaagccctgatgtggaggagtgcgcaccaaataccgggcagtgccatttgtgccttccaccttctgagccttgggatcagactctgggcgtcgtgaacttcccgaggaaggctagtcggaaacccccaagagaagaatcaagcgcgacttgcgtgctcgagcaacccggcgcactgggagctcaaattctgctggtccagcgacctaactctggcctcttggcaggcctatgggagttccccagcgtgacatgggagccgagcgaacagctgcagcgcaaagcgctactgcaggaactgcagcgatgggccgggcccctgccggcaacccacctgagacacctcggagaggtcgtccacacttttagccacataaagcttacctaccaggtgtacggactggccctggaaggccagacacccgtgaccactgttccacccggagcccgctggttgacccaggaagagttccacactgcagctgtatctaccgcaatgaaaaaggtgtttcgggtatatcaaggacaacaacccggaacctgtatgggatccaagcggtcccaggtctcatctccttgttctaggaagaaacccagaatggggcagcaggtgttagacaacttcttccggagtcatatttccaccgatgcccacagcctgaactccgcggcccagtag

SEQ ID NO: 25141 - DNA, 1566 bp, synthetic construct
  misc_feature 1..1566: note = Description of Artificial Sequence: Synthetic coding sequence
  source 1..1566: mol_type = other DNA
atgcggaagccccgggccgccgtgggcagcggccaccggaagcaggcagcctcccaggaaggccgacagaagcacgccaaaaataacagccaggccaaaccctccgcttgtgatggcctagctaggcaacctgaggaagttgtcctacaggcgtccgtgtcttcctaccacttgtttagggatgtagcagaagtgaccgccttcaggggcagtctactcagctggtatgaccaagagaagagggatctgccctggcggaggcgggccgaagacgagatggatctggacagacgcgcttacgccgtctgggtgagcgaggtgatgctacagcaaacccaggttgcaaccgtcatcaactattacaccggctggatgcagaagtggcctaccctgcaggatctagcttccgccagcctcgaagaggtgaatcaactctgggcggggctcggttactacagccgcgggagacggcttcaggagggcgcaagaaaggtggtggaggagctaggggggcacatgccaaggaccgccgaaaccctgcaacagctactgcctggagtcggtcgatacaccgctggcgcaattgccagcattgccttcgggcaggctacaggagtagtcgatggtaacgtcgcacgggtactgtgcagagtccgggccatcggagcggatcctagctctacactggtaagccagcagctgtggggcctggcacaacagcttgtggatcccgcccggccaggcgacttcaatcaggccgccatggagttgggagccaccgtgtgtaccccacagaggcccctctgcagccagtgccccgttgagtctttatgccgcgctcgccagagagtcgagcaagaacagctccttgcctccggttcgctttctggcagccccgatgtggaggagtgtgcaccgaataccgggcaatgccacctgtgtctccctccatccgagccctgggatcaaaccctgggcgtggtgaatttcccacgcaaggcttccagaaagccaccccgcgaggaatcaagcgctacttgcgtgcttgagcagccaggagccctgggcgctcagatcctacttgtccagcgcccaaactctggccttctggctggcctttgggagttcccaagcgtgacttgggagccatctgagcagctgcagagaaaggctctactgcaggagctgcagcgctgggctgggccgctgcccgctactcatctacggcacctgggagaggttgtccataccttttctcacataaagctgacatatcaagtgtacggtcttgctctcgagggccagacacccgtgactactgtcccgcccggggccaggtggcttactcaggaggaattccacaccgcagctgtgagtaccgccatgaagaaagtgtttcgcgtttatcaggggcagcagccaggaacatgcatgggcagcaagcggagtcaagtttctagcccctgttcacggaagaagccccgcatgggccaacaggtgctggacaactttttccgctcccacatttctaccgatgctcactcactgaattctgcagcccagtag

SEQ ID NO: 25142 - DNA, 648 bp, synthetic construct
  misc_feature 1..648: note = Description of Artificial Sequence: Synthetic coding sequence
  source 1..648: mol_type = other DNA
atgacccccctggtgagccggctgagccggctgtgggaggtgaaccaactctgggccggactgggatattacagcagagggagaagactgcaggaaggggcccgcaaagtggtggaggagttaggagggcatatgcctcggacggccgagaccctccagcagctgctgcccggagtcggtaggtatacggccggagccattgctagtatcgcattcgggcaggctaccggagtggtggatgggaacgtcgctcgagtgttatgccgagtccgcgctatcggtgcagacccatcatcaactctggtctcgcagcagctttggggactcgctcagcagctcgttgaccccgctcgccccggcgactttaaccaagcagccatggaattgggggccacagtgtgcaccccacagagacctctgtgctcccagtgtcctgtagaaagcctctgtagagcccgccagcgcgtggagcaagaacagctgctggccagcggctcactgagcgggtcccccgatgtggaagagtgtgccccaaacaccggacagtgccatctctgtttgcccccaagcgagccctgggaccagactctcggcgtggtgaattttccccggaaggctagcagaaagcctcctcgagaggagtcgtag

SEQ ID NO: 25143 - DNA, 693 bp, synthetic construct
  misc_feature 1..693: note = Description of Artificial Sequence: Synthetic coding sequence
  source 1..693: mol_type = other DNA
atgacccccctggtgagccggctgagccggctgtgggccatcatgaggaaaccacgcgccgccgtgggctccgggcatcgcaagcaggccgccagccaggaaggaaggcagaagcatgcgaagaataacagccaggcgaagccatcggcctgcgacgggggggaaagcacgctgggttggcctggactgctctttagctggcccgcggccgccggaggaagtagcgaaggactcttggccggcctctgggaattccctagcgtgacgtgggaaccgtccgagcagcttcagcgcaaagccctgttgcaagaattgcagcgttgggcagggccgttacctgcgacccacttgcgccatttaggagaggttgtccataccttttctcatattaagctcacatatcaggtgtacgggttagccctggaaggccaaactcccgttactaccgtcccccctggggctcgttggctaacacaggaagagttccacacggctgccgtgtccacggctatgaagaaggtctttagggtgtatcaaggccagcagcccgggacttgtatgggctccaaaagaagccaagttagtagtccgtgtagccgtaagaaacccaggatgggccagcaagttctggataacttcttccggtctcatatttccaccgacgcccattccctgaacagcgccgcacagtag

SEQ ID NO: 25144 - DNA, 291 bp, synthetic construct
  misc_feature 1..291: note = Description of Artificial Sequence: Synthetic coding sequence
  source 1..291: mol_type = other DNA
atgagcgacaacgacgacatcgaggtggagagcgacgaggagcagccacggttccaatccgcagccgacaaacgcgcacatcacaacgcccttgaacggaaaaggagggaccacatcaaagactcctttcatagccttcgcgactctgtcccctctcttcaaggcgagaaactgtatttcctgttttggaagctctgcacgcctgtccttcacagacagtccctcatgcagaaatgccacacgttcatctccagctatcaggttcacaagaagaaggagtgtaaaatctag

SEQ ID NO: 25145 - DNA, 405 bp, synthetic construct
  misc_feature 1..405: note = Description of Artificial Sequence: Synthetic coding sequence
  source 1..405: mol_type = other DNA
atgagcgacaacgacgacatcgaggtggagagcgacgaggagcagccacggtttcagagcgcagctgataaaagagctcatcataacgccttggagcgcaaacgacgtgatcatatcaaggattcgttccacagcctaagagacagcgtgccttcgctacagggggagaaggcttcacgggctcagatcctggataaggctaccgagtatattcagtacatgcggagaaagaatcacacacaccagcaagacattgatgacttaaagcggcagaacgcgctcctggaacagcagggggagcacccatcctcctggggatcctggccctgttgtgccccagccagatcagggtttggcacctgggcgtgcagggtgcgcgcctcccacggagtctgtgcacagtag

SEQ ID NO: 25146 - DNA, 252 bp, synthetic construct
  misc_feature 1..252: note = Description of Artificial Sequence: Synthetic coding sequence
  source 1..252: mol_type = other DNA
atgagcgacaacgacgacatcgaggtggagagcgacgaggagcagccccgattccagtctgccgctgataaacgcgcacaccacaatgccctggaacgcaaaaggcgggaccacattaaggactcgttccactctcttcgcgactcagtgccttcgctccaaggcgagaagggtacaaagatgaagctcactctaccacctgtctttccatacgaacacttacctttccctacggtgttttgtcatggctag

SEQ ID NO: 25147 - DNA, 456 bp, synthetic construct
  misc_feature 1..456: note = Description of Artificial Sequence: Synthetic coding sequence
  source 1..456: mol_type = other DNA
atgagcgacaacgacgacatcgaggtggagagcgacgccgacaagcgagcccatcataacgctctggagagaaagagacgcgaccatataaaagactccttccactctcttcgggattcagttcccagcctgcaaggcgaaaaggcgtctagagctcagattctcgataaggccacagagtatattcaatatatgagaagaaaaaaccatactcaccagcaggatattgacgatttaaagagacaaaacgcgctcctggaacaacaagtcagggccctcgaaaaagctcgttcctccgcgcagctccagactaattacccctcctctgacaatagtttgtacactaacgctaaggggagcacaatctcagccttcgacggcggctctgacagcagcagcgaaagcgaaccggaggagccgcaatcaagaaagaaactgcgcatggaagcctcctag

SEQ ID NO: 25148 - DNA, 483 bp, synthetic construct
  misc_feature 1..483: note = Description of Artificial Sequence: Synthetic coding sequence
  source 1..483: mol_type = other DNA
atgagcgacaacgacgacatcgaggtggagagcgacgaggagcagccccgattccaaagcgctgccgacaagagggcccaccataacgccctcgagaggaaaagacgggatcatataaaagactctttccacagcttacgggattcggttccttcattacagggggaaaaggcatcgcgggcccaaatattggacaaagctacagaatatattcagtatatgaggcgaaagaaccacactcatcaacaagacattgatgatctcaaacgccagaacgccctgctcgagcagcaagtacgggctctggagaaagcccggagctccgctcagttgcagactaactatcccagctccgacaatagcctgtacactaacgctaaaggaagtaccatcagcgcctttgatggcggatccgattcttcctccgagagcgagccggaggagcctcagagtcggaagaagctcagaatggaggcatcctag

SEQ ID NO: 25149 - DNA, 426 bp, synthetic construct
  misc_feature 1..426: note = Description of Artificial Sequence: Synthetic coding sequence
  source 1..426: mol_type = other DNA
atgctgagcgtgaagatcaccagcatcttcagcatcttcttcttcctcctcttccaggaagagcagccaagattccagtcagcagctgataagagggctcatcataacgcgctcgaacgtaaacgacgcgaccacattaaggacagcttccatagcctgcgggactctgtcccctcactgcagggagaaaaggcctccagagcccagatcctggacaaggccactgaatatatccagtatatgagacgcaagaaccatactcaccagcaagatatcgacgatctaaagcgtcaaaacgccctgctggagcagcagggggagcacccaagtagctggggctcatggccttgttgtgccccagctaggtcagggttcggcacctgggcttgccgtgtgcgagcttcacacggggtatgcgcccagtag

SEQ ID NO: 25150 - DNA, 312 bp, synthetic construct
  misc_feature 1..312: note = Description of Artificial Sequence: Synthetic coding sequence
  source 1..312: mol_type = other DNA
atgagcgacaacgacgacatcgaggtggagagcgacgaggagcagccccggtttcagagcgccgctgacaagcgagcccaccacaacgcattggagcgaaaacgccgcgatcatatcaaggatagctttcactccctgagagactccgtcccgtccctgcagggtgaaaaggcgtcaagggcacagattttagataaagcaactgaatacattcagtatatgcgccgaaagaaccacacccaccagcaggacatagacgaccttaagcgacaaaacgcccttctcgagcaacagggggaatctgaatcatag

SEQ ID NO: 25151 - DNA, 312 bp, synthetic construct
  misc_feature 1..312: note = Description of Artificial Sequence: Synthetic coding sequence
  source 1..312: mol_type = other DNA
atgagcgacaacgacgacatcgaggtggagagcgacgaggagcagcccaggtttcagtccgctgctgataaaagagctcatcacaacgccctggagcgcaaacgccgagaccacataaaggactccttccacagcctgcgagactctgtccccagcctgcaaggggaaaaagcatcccgggcacaaattttagacaaggctaccgagtatatacaatacatgagaaggaagaatcacacacaccagcaagacatcgacgatttgaaacggcaaaacgcactgctggaacaacagggagagtctgagagctag

SEQ ID NO: 25152 - DNA, 13923 bp, synthetic construct
  misc_feature 1..13923: note = Description of Artificial Sequence: Synthetic coding sequence
  source 1..13923: mol_type = other DNA
atgcccgtgcccgacggcagcgtggccgccgccggcctgggcctggggttgcctgcagccgacagccggggacactatcaactgctcctttccggacgcgcgctggcagatcggtaccggcgtatatatacagctgccctgaatgacagggaccagggcggtggctcagcggggcatcccgccagccgcaacaaaaaaatcctgaataaaaagaagttgaagagaaaacagaagtcaaaaagtaaggtgaagacacggtcgaagagtgagaatcttgagaacacagtaataatccctgacatcaagttacactcaaacccatctgccttcaatatttactgtaatgtaagacattgcgtccttgagtggcagaagaaggaaatcagcctggcggccgcatctaagaactcagtgcaaagcggcgagtccgacagtgacgaagaagaggaatccaaagaacccccaattaagctccctaaaatcattgaagttggcctgtgcgaggtatttgagctcattaaggagacacgcttctcccatccatcgttgtgccttagatccttacaagcgctgttgaatgttctacagggccaacagcccgagggactgcaaagcgagccaccggaggtgttagaatcattattccagttactattggaaattactgtgaggtccacaggcatgaacgactcgaccggacagagccttacagcccttagctgcgcctgtttattctccttagtggcgtcctggggagagaccggtcggaccctgcaggccataagcgccattctgaccaacaatggcagccacgcttgccaaaccatccaggtccccacaattctgaactcacttcagaggagcgtccaggccgtcctggttggcaaaatccagatccaagattggttctcaaacggtattaaaaaggctgcacttatgcataaatggccgctcaaagagatcagtgtagacgaagatgaccagtgtctcctgcagaatgacggcttttttttgtacctgctgtgcaaggatggcctttacaaaataggatccggctactcagggacagttcggggtcatatctacaacagtacctcacggattcgtaatcgcaaggaaaagaaatcctggctcggttacgcacaaggttatttgctgtaccgtgatgtgaacaatcactcaatgaccgctattcggatctccccggagacgctagagcaggacggtactgtaatgctacctgattgccataccgaaggacagaacatactgttcaccgacggggagtacattaaccagattgccgcttctcgcgacgacggctttgtcgttcggatcttcgccacttctaccgaacctgtgctccagcaggagttgcagctcaaactggcaagaaaatgcctccacgcttgtggcatttcactctttgacctggagaaagatctgcacattatcagtactggattcgacgaggagagcgcaatactcggcgctgggagggagtttgctctgatgaagacagccaacggtaagatttattacacaggcaaatatcagagcctgggcatcaaacagggtggcccctcagctggaaagtgggtagagctgccaataaccaaatcccctaagatcgtccacttcagcgtcggtcacgatggcagccatgccttgctggtcgctgaagacggcagtattttctttaccggtagtgcatctaagggagaggacggcgagtccactaaatcgcgccgtcagtctaaaccctacaaacccaaaaagattattaagatggagggcaaaattgtggtgtataccgcctgtaacaacggcagttcatccgttatatctaaggacggcgaactttacatgtttggtaaggacgcgatttacagtgacagttcatctctagtcactgacctcaagggtcactttgtaactcaggtggcaatggggaaagcccacacctgcgtccttatgaagaacggagaggtatggaccttcggggttaataataagggccagtgcgggcgagatactggagccatgaaccagggcgggaaggggtttggagtagaaaatatggcgaccgccatggatgaggatcttgaggaagaattggatgagaaggacgagaagtcaatgatgtgtcctcctggaatgcacaagtggaagctggaacagtgtatggtatgcacagtttgtggggattgtaccgggtatggggcttcatgcgtgtcctcaggcaggcccgacagagtccctggagggatctgtggctgtgggagtggtgaatcaggctgcgccgtgtgtggatgctgcaaggcctgcgcccgcgagttggatggccaagaggcacgacagagaggcatcctcgacgcagttaaggagatgattcccttggatctgcttctggccgttccagtgcctggcgtgaacatagaggagcatctccagctccggcaagaggagaaacggcagcgtgtgataaggcgccaccggttggaggaagggagaggccctttagtattcgctggacccatctttatgaaccatcgagagcaggcgctagcccgcttgcggagccaccccgcccaactcaaacataagcgggataagcacaaagacggatccggtgaacgtggggagaaggacgcttccaaaatcacgacttatcccccagggtcagtgcggttcgactgcgagctgcgtgcagtgcaggtaagttgtggctttcaccactctgtagtgctaatggaaaacggggatgtatatacatttggctatggtcagcatggtcagcttggccacggcgacgtgaacagcagaggttgtccaacgttggtgcaagccctccctggaccctctacacaggtcacggcaggatctaatcacaccgccgtgctgctgatggacggccaggtgtttacttttgggtcattctctaaaggacaattgggccggccaatactcgatgtcccctattggaatgctaagcccgcccccatgcccaacataggcagtaaatatggcagaaaagctacctggattggcgcgtcgggcgaccagaccttcctgaggattgacgaggcgcttattaattcccacgtgctcgccaccagcgaaatcttcgcgtcaaagcatatcattgggctggtgccggcttccatttctgagcccccaccattcaaatgtttgctcattaataaggtggacggctcctgtaagaccttcaacgatagcgagcaggaggacctccaaggctttggcgtctgcttggaccccgtctatgatgtcatctggagatttcgacctaacaccagggaattatggtgctacaatgctgtggtcgcggacgcacgtttgcccagcgcagctgacatgcagtctcgatgtagtatcctgtcaccggagctggcactgcccaccgggtcaagagcactgaccacgcgcagccacgccgccctgcatattctcgggtgcctcgatacattagcggcgatgcaggacctcaagatgggagtggcctctaccgaggaggagacacaggccgtgatgaaagtgtactctaaggaggactactccgtggtgaatcgattcgagagccatggcggtggatggggatattcagcacatagtgtcgaggctattcggttttccgccgacacggacatcctgttgggtggacttggcctgttcggtggccgcggggaatacaccgcgaaaattaaactgtttgaattgggtccagacggcggagaccacgaaacagacggagatctcctggccgaaacagacgtgcttgcatatgactgtgctgccagggagaaatacgcaatgatgtttgatgaacccgtgctgctgcaggcgggctggtggtatgtcgcttgggctcgcgtgtcggggccctcgtctgattgcgggtctcatggccaagcctcaattactactgatgacggggtcgtctttcagttcaagagttcaaaaaaatccaacaacggcactgatgtcaatgcgggtcagattcctcagttgctctatcggctcccaacatctgatggatccgcatctaaaggcaaacagcaaacctccgagccagtgcacattctgaaaagatcctttgctagaaccgtcagcgtggagtgctttgagagccttctgagtattcttcactggagttggaccaccctagtcctaggcgtagaagagctccggggcctgaaggggtttcagtttaccgcaaccctcctggacctggagcgcctgagatttgtaggtacgtgttgtcttcgcctgcttcgagtctatacgtgcgaaatttatcccgtgtccgcaactggaaaggctgtcgtggaagaaacctctaagctggctgagtgtattggcaagacacggacactgctgcgcaaaatattgtccgagggggtcgaccactgtatggtcaagttagacaacgatcctcagggctatctttcgcagccactgtccctgcttgaggctgtgttgcaggaatgtcataacacctttactgcttgcttccactccttttaccctactccagcgttacagtgggcctgcctctgcgatctcttgaattgccttgatcaggatatccaggaagccaacttcaagaccagttcctcccggctgttagcagctgtgatgtcagccctctgtcataccagtgtgaagctgaccagcattttccctattgcatatgatggggaggtgttactgcggtccattgttaagcaggtgtccaccgaaaatgactctaccctggtgcacaggttccctttgctggtggctcacatggagaaattatctcaaagtgaagagaatatttcgggaatgacatcctttcgagaagtcctggagaaaatgctcgttatcgtggtgctccccgtgcggaacagtctgcgacgagaaaacgagctgttttcttcgcatctcgtgagtaacacttgtggattgttagcttctatagtctctgagctcacagcgtctgcgctggggagtgaggtcgacggactgaacagcttacattcggtgaaagccagtgccaacagattcacaaagacctctcaggggcggtcttggaacactggtaatgggagtccagacgccatttgcttctcagttgacaaacccgggattgtggtcgtcgggttttctgtgtatggcggcggtggcatccacgagtacgagcttgaagtgcttgttgatgactccgaacatgcaggagatagcacccactcacatcgatggacgtcattggagttagttaagggtacttatactactgatgatagtcctagcgacatcgctgaaattcggctggataaagtcgtgccactgaaagagaatgtaaaatatgcagtgaggctccggaactacggttcccgcaccgctaatggagacggcggaatgacaactgttcagtgcccggatggggtgacatttacatttagcacctgttcactgtcttctaacggaacaaatcagacccgaggacaaatcccccagattctatactatcggagcgaatttgacggcgacctacagtcccagttgctctctaaggctaatgaagaagacaagaattgtagcagagcattgagcgtcgtgtccactgtggtgcgtgcctcaaaggacttactgcatcgtgcccttgctgtagatgccgatgacatccctgaactgctgagtagctcctccctgttcagcatgctgctccctctaatcattgcatacattggacccgttgccgcagcaattccaaaggtcgccgtggaggtgttcgggctcgtccagcagctactgccctctgtcgctattttaaatcagaagtacgcacccccagcttttaaccccaaccagtctaccgatagcactaccggcaatcagcctgagcagggtctaagcgcctgcacaacaagttctcactatgcggtaatcgaaagtgagcatccatataaacctgcctgcgtgatgcattataaggtgaccttccccgagtgtgttcgctggatgacaatagaattcgacccacaatgtggcaccgcacagagtgaagatgtgctcaggttgttgatccctgtcaggacagtccagaatagtgggtatggccctaagctcactagcgtccacgagaatttgaatagttggatagagctaaagaagttttctggctctagcggctggccaaccatggtcctcgtgctccccggtaatgaggccttattttcacttgaaacagcaagtgactacgttaaggacgataaggctagcttctatggctttaagtgttttgctattggctatgaattttcacctggtccggacgagggggtcatccagctcgagaaagaactcgctaacctaggaggagtgtgcgctgctgcactgatgaagaaagatcttgcacttcccattggcaatgaattagaggaagacctcgagattctagaagaagcagctttacaggtgtgtaagactcactcgggaatattgggcaaggggctagccctctctcacagccctacaattctcgaagccctggaggggaatctacctttgcagatacagtcaaatgaacagagcttcctggatgatttcattgcttgcgttcctggcagctctggcggacgactggcgcgctggctccagcccgactcctatgcagacccacagaagaccagtttaattctgaataaggacgacattcgatgtggctggcccacaactattaccgtgcaaacgaaagatcagtatggcgatgtggtgcatgttcctaatatgaaggtggaggtgaaggccgttcctgtgtcccagaagaagatgtctttacagcaggatcaagccaagaagccgcagcggattcctgggtccccagcagttacagcggctagttcgaacacagatatgacgtacggtgggctcgctagccctaaacttgacgtttcctacgaacctatgatagtcaaagaagccagatacattgccatcacaatgatgaaagtctacgaaaattatagctttgaagagctgcggtttgcgtcgcctacccccaaacgaccatctgagaatatgctgatcagagtgaataatgacgggacctattgtgctaactggacaccaggagcaatcggcctgtatactctgcacgtaacaattgacggcatcgagatcgatgccggacttgaggtaaaggtgaaggatccacccaaaggcatgatacctcctggaacacagcttgtgaaaccaaagtccgaacctcagccaaataaggtgcggaagtttgttgcaaaagattccgccggtcttaggatccgatctcaccctagtctgcagtcagagcagattggtatcgtgaaggtgaatggaaccatcacatttatcgatgagattcacaacgacgatggtgtatggttgcgattgaacgatgagaccattaaaaaatacgtccccaacatgaatggctacaccgaagcgtggtgtttaagttttaaccagcacctgggaaagtcactacttgtacctgtggacgagtccaagacaaataccgacgacttctttaaggacatcaacagttgctgcccccaggaagccaccatgcaggagcaggacatgccattcttacgaggcggacccggtatgtataaagtcgtcaaaaccggaccctctggacacaacattcgatcatgccctaatctgaggggcataccaattggcatgcttgtgttgggcaataaagtgaaggccgttggcgaggtgactaacagcgagggcacttgggtccaactagaccagaacagtatggttgaattctgtgagtcagatgaaggcgaggcctggtctctggcacgggataggggaggcaaccaatacctacgccatgaagacgagcaggctctgctcgaccagaactcccaaacaccaccaccttctccgttctcggtgcaagctttcaacaaaggggcttcttgtagcgcacagggttttgattatgggttgggtaactccaaaggggatagaggaaacataagtacctcaagcaaaccagctagcacctccggaaaatccgagctgtctagtaagcacagtaggtctctgaaaccggacggcaggatgagccggaccacagctgatcaaaagaagcctaggggaactgagagcctgtcagcgtctgagtctcttatcctcaagagcgacgccgctaagctgagaagcgacagccatagccggtcccttagcccaaatcacaatacccttcaaacactgaaaagcgatggtaggatgccatccagcagccgcgccgagtcccccggtcccggctctaggctttcctcaccaaaacctaaaactttgccagccaatcgatcgtccccgtccggggccagcagtccaagaagttcctcgccacatgacaagaatttacctcaaaaaagcaccgcccctgtgaagacaaaactggatccgcctcgcgaacgtagtaaatccgattcttatacacttgaccccgatactcttcggaaaaagaaaatgcccctgacggagcccctcagaggacgaagcacatctccaaagccaaagtctgtccctaaagatagtacagactcccctggcagtgagaatagggcccctagtccccacgtagtgcaggagaacctgcactcggaggttgtggaggtttgtacatcctctactttgaaaacgaattcgctgaccgacagcacgtgtgatgatagttcagagtttaagtcagtagatgaggggagcaacaaagtgcacttctcaatcggaaaagctccccttaaggacgaacaggaaatgagagcatctcccaaaatatcccgtaaatgtgccaataggcacacgagaccaaaaaaggaaaagtctagcttcctatttaaaggtgacggtagtaagcctcttgagcccgccaagcaggccatgagccccagcgtggcggagtgtgctcgtgcagtgttcgcgtcctttctgtggcacgaaggcattgtgcacgacgccatggcctgctcatcttttttaaagtttcaccccgagctctccaaagaacacgcaccaatccgatctagcctgaattcacagcaacccaccgaagagaaagaaaccaagcttaagaaccgccattctctggagataagctctgccctgaacatgttcaacatcgccccccatggcccagatattagcaagatgggctccattaataagaacaaagtcctgtccatgttaaaagaacctcccctgcatgaaaagtgcgaggacggtaaaacagagactacatttgagatgtcaatgcataacaccatgaaatctaagtctcccttaccacttaccctgcagcacctagtggccttctgggaggacatcagcctggccaccattaaggcagcttcacagaacatgattttcccatctcccggctcttgcgcagttctgaagaaaaaggagtgcgagaaagagaacaagaagagtaaaaaggaaaagaaaaagaaagagaaggcagaagttcgtccccgagggaacttatttggggaaatggcccagctggctgtcggcggtcctgagaaggataccatttgtgagctgtgcggtgagagccacccgtatccagtcacctatcacatgcggcaggcccaccccggttgtggaaggtatgctggcggccaaggctacaatagcatcggccatttctgcggaggctgggccggtaactgcggggacggcggtattggcggaagcacctggtacctggtttgtgatcgctgccgggagaagtacctgcgagagaaacaggccgctgcacgtgaaaaagtgaagcaatctcgtcggaagcccatgcaggtgaaaactccgcgcgcccttccaacaatggaagctcaccaggtcattaaggctaacgcactgtttctgcttagcctgagctccgccgctgaaccaagcatcctttgctatcacccagccaagccattccagtcccagttgccatctgtaaaggaaggcatctctgaagatctgcctgtaaagatgccctgtttgtatttgcagacgttggctcgtcatcaccatgagaactttgttggataccaagatgataatctgttccaggacgagatgaggtacttgcggagcacaagtgtacccgcgccctacatttcagtcactccggacgcctctcccaacgtatttgaggaacccgaaagcaacatgaagagcatgcccccgtcactggaaacctcacccatcaccgatactgatcttgcaaagcggacagtattccaaagatcctattccgtggtagcgtcggaatacgacaaacagcactccattctcccagcaagagtaaaagcaatacctcggcggcgcgtgaattccggtgacacagaagtcggaagttccttattgagacaccctagtccagagctgtctagattaatttcagcacatagctcactctctaaaggtgagagaaacttccagtggcccgtactagcatttgtgattcagcatcacgaccttgaaggtctggagattgccatgaagcaggcgctgcgcaaatcggcgtgcagagtctttgctatggaagcatttaattggcttctctgtaatgtaattcaaaccacatctttacacgatattctatggcactttgtcgctagcctgacgccagctccagtggagcctgaggaagaggaagatgaggaaaataagacaagtaaggagaacagcgaacaggagaaggatacacgggtatgtgagcatcccttatcagatattgtcattgcaggtgaggccgcgcaccctttaccacatacattccaccggctgctacaaaccattagtgacctgatgatgtccctcccttccggatcctctttacagcagatggcacttcggtgctggagcctgaagtttaagcagtcagatcaccaattcctgcaccagagcaatgttttccatcacataaacaacatactaagcaaatcggatgatggagattcagaagagtcatttagtatcagtatccagagcggctttgaggcgatgtcccaggagttatgcatagtaatgtgtctgaaagacctcacctccattgtggacatcaagaccagcagtaggcccgcaatgatcgggtccttgacagatggatctacggagacattttgggagtccggggacgaagataaaaataagacaaagaacattactatcaactgcgtgaagggaatcaacgcgaggtacgtgtcagtccacgtggataattctcgggatctgggtaacaaagtgacaagcatgaccttcctgaccgggaaagcagtggaggatctgtgtagaataaagcaagtggacttggactctcgccatatcggatgggtgacatctgaactcccaggtggagacaaccacatcatcaagattgagctgaaggggcctgaaaatacattacgtgtgaggcaggtgaaagtgctgggatggaaagacggtgaaagtacaaaaatcgcagggcaaatttcagcctctgtagctcaacagcgcaactgtgaggcagaaacactcagagtgtttcgattaatcacaagccaagtgtttggtaaactcatttctggagacgccgagcccactcccgagcaagaggaaaaagccttgttgtctagtcccgaaggcgaggagaaggtttataacgctacgtcggacgcggacctgaaggagcatatggtcgggatcatttttagtcgctcaaaactgaccaatctccaaaaacaggtgtgcgcccatatcgtgcaggcaattagaatggaggccactcgggtgcgcgaagaatgggagcacgcaatctcatcgaaagagaacgctaactcacagccaaatgatgaggatgcgagtagcgatgcttattgcttcgaactgctgtcaatggtattggctctttcaggtagtaacgtcgggagacagtacctcgcccagcaactcacactgctgcaggatctgttctcgctgctgcacaccgcctccccaagagttcagcgacaggttacctccctgttgagacgggtgctcccagaagtaaccccatcgcgcctggcttctataatcggggtcaaatccctgccacctgcagacatttccgacatcatccatagcacggagaagggagattggaacaaactgggaattctagacatgttcttgggctgcattgcgaaagccctcacagtgcagctgaaagcaaagggcacgaccataactgggactgctggcacgacggtcggaaaaggggtcactaccgtcacgctgccaatgatctttaactcatcatatctgagacgtggcgagtcacattggtggatgaagggatcaactcccacccagatcagtgagattatcattaagctgattaaagatatggctgctggccacttgtcagaagcctggtcccgtgtcactaaaaatgcgattgccgagactatcattgcactcacaaagatggaggaagaatttcggagcccagtgagatgcatcgccactaccagactatggttagctctggccagcctgtgcgtattggaccaggaccacgtggaccgactgagttcgggtcggtggatgggtaaggacggacagcagaagcagatgccaatgtgtgacaaccacgatgatggagagaccgctgccattattctctgcaacgtatgtggcaatctctgtaccgattgcgatcggttcctccatcttcacagaaggacaaagacacatcagaggcaggtgtttaaagaggaggaagaggcgatcaaagtggatttgcatgagggatgcggtaggacaaaactcttctggttgatggcattggccgattccaagactatgaaagctatggttgaatttcgcgaacacactggaaagcctacaaccagttctagcgaagcttgccgattctgcggatcccgcagcggtaccgaattgtcagccgtcggctctgtgtgtagtgatgccgactgtcaggaatacgctaaaatagcctgtagtaagacccacccctgtggccatccctgcgggggcgtcaagaatgaagagcactgcttaccttgtctgcacgggtgtgataagtctgccacaagcctgaaacaagacgccgatgacatgtgcatgatctgcttcaccgaggccctgtcagcagcccccgcgatccagcttgattgctcacatatttttcatttacagtgttgcagacgcgttttggagaatagatggctgggccccagaataactttcggttttatttcctgcccgatttgcaagaacaagattaaccacatcgtgttgaaggatcttctcgatccaattaaggagctgtatgaagatgtaagaagaaaagccttgatgcgactcgagtacgagggccttcataaaagtgaggctatcacaaccccaggggtgcgcttctacaacgatcccgctggctacgccatgaatcgttatgcttattacgtgtgctataagtgtagaaaagcatacttcgggggagaggctagatgcgacgccgaggcaggccgtggagacgactatgacccgagggagctcatctgtggcgcatgcagcgatgtgagcagggcacagatgtgtccaaaacacgggacggatttcttggaatacaagtgtcgttactgttgttccgttgcagtcttcttttgctttgggacaacccacttttgcaacgcgtgccatgacgactttcagaggatgacatcaatccctaaagaggaactgccccactgtcctgcgggccccaaaggcaagcagctcgaagggacagaatgcccattacacgtggtgcacccaccaaccggggaggaatttgcactcggctgtggtgtttgccgcaacgcccacactttttag

SEQ ID NO: 25153 - DNA, 1542 bp, synthetic construct
  misc_feature 1..1542: note = Description of Artificial Sequence: Synthetic coding sequence
  source 1..1542: mol_type = other DNA
atgcaggagcaggacatgcccttcctgcggggcggccccggcatgtataaggttgtgaaaacaggcccgtctggccacaatatcagatcctgtcctaacctcagaggcatccctatcggaatgctggtgctcggcaacaaggtgaaggccgtaggagaggtcactaattcagaggggacttgggtgcagctggatcagaactctatggtggagttttgcgagagtgacgagggagaggcttggagccttgccagagacaggggcggtaaccagtatctgcgccatgaagatgagcaggcactgctggaccaaaacagccagacaccacctccctctcctttttcagtccaggctttcaataagggggctagttgctcagcccagggcttcgactacggtctggggaactctaaggttctgacagttctgcccactgcaggtgaccagctcagcgcaattctgaacagcatccaaagtcgccctaacctgcccgcaccaagcattttcgaccaagccgcaaaaccaccaagttccttggttcactctcctttcgttttcggccagcctctcagtttccagcaaccacagctgcaatctgacagaggtaacatcagcacgagctcaaagcctgcctctacctctggcaaatccgagctgtcaagcaagcacagcagaagtcttaagccagacggcagaatgtcacgaaccactgctgaccagaagaaaccgcgcggcacagagtcactaagcgcgtctgagtctctgatactgaagagcgacgctgcaaaactgcggtcagactcgcactcccgatcgttgagccccaaccacaataccctccaaacgctgaagtctgacgggagaatgccctcctcaagccgggcagaatctccaggcccgggaagcagattgagcagtcctaagccgaagaccctgcctgctaataggtcatctccaagtggcgccagcagccccagatccagcagccctcatgataagaatctccctcagaaaagcaccgcccccgtgaagacaaaactggacccgcctcgcgaaaggtccaagtctgatagctacacactcgaccccgacactctgcgcaaaaagaagatgcccttaaccgagccactgcgggggagatctacatcaccaaagccaaagagcgtgcctaaagacagcaccgattcccccggcagtgagaatagggcaccaagcccgcacgttgtccaggagaatctccattctgaagtggtggaggtttgcacaagcagcacactgaaaaccaacagtctgaccgatagtacgtgtgatgacagctctgaattcaaatcagttgacgagggcagcaacaaagtccatttttccatcggaaaggccccccttaaggacgagcaggaaatgagggcaagccctaaaattagtcggaaatgtgctaacagacatactagaccaaaacgcaagatagagttttccttccagagaaggtggatccaagcctttcgcgccagccaggcctcgcacgtgtccttttgtgggaggtag

SEQ ID NO: 25154 - DNA, 14037 bp, synthetic construct
  misc_feature 1..14037: note = Description of Artificial Sequence: Synthetic coding sequence
  source 1..14037: mol_type = other DNA
atgatgatgtgcgccgccaccgccagccccgccgccgccagcagcgggcttgggggcgatggcttctacccagccgctacattttccagtagtcctgcacctggcgccttgtttatgcccgtgccagatggcagcgttgccgcagctggtctcggacttggtttgccagccgcagactcaagggggcactatcagctgctgttgtcgggacgcgccctggcagacaggtataggcggatttatactgcagctctcaatgatcgcgaccagggagggggttcagccggccaccccgcgagccggaacaagaagattttaaataagaaaaagttaaaacggaaacagaagagtaagtcaaaggtgaaaacacgatcaaagagcgagaatctggaaaatacagtgataatccctgatatcaaactgcacagcaacccttccgcattcaacatttactgcaacgtgagacactgtgtattagagtggcagaagaaggaaatttccctggctgccgccagcaaaaatagtgtgcagagcggagaatcagacagtgatgaagaggaagagtcaaaagagccaccgattaagttacccaaaatcatagaagtgggactctgcgaagtcttcgagcttatcaaggagactagattctcacatccttctctgtgcctaaggagtcttcaagcactcctcaatgtgctccagggtcaacagcctgagggcctccagagtgagcctcctgaagtcctcgagtctctgtttcagctgctgctcgagataacagtcaggagtacggggatgaatgattccactggccaatctctgactgcgctttcctgcgcttgcctgttctccctcgtcgcttcatggggcgaaacaggacgaacacttcaggcaataagtgccatcctgactaacaatggctcacatgcatgtcagaccatacaggtgcctactatattgaattccttgcagaggtccgtgcaggcggttcttgtgggcaaaatccaaatccaagattggttttcaaacggcatcaagaaggctgccctgatgcacaagtggccattaaaagaaatctccgttgacgaagacgatcagtgcctgctccagaatgatggcttttttctttatttgctgtgtaaagacgggctctacaagatcggctctggctatagtgggactgtaagaggccacatctataatagtacaagcagaatcaggaaccggaaggaaaaaaaatcatggctcgggtatgcccaagggtatctgctttatcgagacgtcaacaatcattctatgacagccatccggatatcaccagagactcttgagcaagatggcacggtcatgttgccagactgtcacaccgaagggcagaacatcttgttcacagacggggagtacattaatcagatcgcggcaagccgggatgatggattcgtggtccgtatattcgcaacctccactgaacccgtgctgcagcaggagcttcagttgaagctggcgaggaaatgtttgcatgcctgcgggatttctctgtttgaccttgaaaaggacctacatattatctccactggattcgatgaggagtccgccatcctgggcgccgggagggaattcgccttgatgaagaccgctaacggtaagatttattatacagggaaataccagtccctaggaatcaaacaggggggtccgtccgctggcaagtgggtggaattacctattaccaagagccctaaaatcgttcacttttctgttggtcatgacgggagccatgcacttctcgtggctgaggacggaagcatttttttcacaggctctgcctctaagggtgaagatggggaatcaactaagagccgccgacagagtaagccctataaacccaagaagatcattaagatggagggcaaaattgtggtatacacggcctgtaacaatggatcatcctccgtaatttccaaggacggcgagctttatatgttcggtaaagacgctatttacagtgactcctcctctttggtgaccgatctcaagggtcactttgtgacccaagtcgcaatgggcaaggctcatacatgcgtattaatgaagaacggcgaagtatggacttttggcgttaacaacaaaggacagtgcggacgggacaccggggctatgaaccagggtggaaaaggcttcggagtagagaatatggccaccgcaatggacgaagacctggaggaggagttagacgaaaaagacgagaagtcaatgatgtgtcctccaggaatgcacaagtggaaattggaacagtgtatggtttgtaccgtgtgtggggactgtacaggttacggcgcttcatgcgtaagcagcggcaggccagatcgtgtaccgggtggcatttgcggatgcggctccggggagtccgggtgtgcggtttgcgggtgctgtaaggcttgcgcccgggagcttgacggtcaggaagctaggcagcgcgggatcctggacgcagtaaaggagatgatccctctggacctcttgcttgctgtgccggtacctggtgtcaatatcgaagagcatctgcaactgcggcaggaggaaaagcggcaacgagttatccgaaggcacaggttagaggagggcagaggcccactcgtctttgccggtcctatttttatgaaccaccgtgaacaggccttagcccgccttaggtcccaccctgcacaactgaagcacaaacgcgataagcacaaggatgggagcggtgagcggggggaaaaggatgcttccaagattacgacctatcctcctggctcagtgagattcgattgcgaactcagggccgtccaggttagctgtgggtttcaccattccgtggtgttgatggaaaacggggacgtctacacattcgggtacggacagcacggccagttgggccatggcgacgtcaactccagaggctgccccacgctggtgcaggctttgccaggaccgtccacacaggttactgctggcagcaaccataccgccgtgcttttgatggacggacaggtcttcacattcggctccttctctaaagggcagcttggccgacccatcctggacgtaccatactggaacgccaagcccgctccgatgcccaacattggatcaaagtacggcaggaaggcaacctggataggagcctccggggaccaaacatttctgaggatagatgaagcactcataaactctcacgtgcttgctacaagcgaaatattcgcaagcaagcatatcattggcctggttcccgcctccatatcagagccaccgcccttcaaatgtctgctgattaataaggtggatggaagctgcaaaaccttcaatgactcagaacaggaggacttgcagggctttggcgtctgcctagacccagtttacgatgttatatggaggttccgtcccaatactcgggaactctggtgttacaatgctgtagtggccgacgcacggcttccatccgctgcggatatgcagagtagatgtagtatcctaagccctgagctggcactgcctactggaagtcgcgccctgaccactcggtcacatgcagccctacacattctaggatgcctcgatacattggcggcaatgcaggacctgaaaatgggggtggcctcaactgaggaagaaacgcaggccgtaatgaaggtgtacagcaaggaagactacagtgtggttaaccgattcgagtcacatggcggcggatggggctattccgcccactccgtggaggcaattcggttcagtgcagatacagacattttgctggggggactcggtctgtttgggggcagaggggaatacactgcaaagattaagctgttcgagctgggcccggatggtggggaccacgagaccgacggagatctcctcgcggagacagacgtcctggcttacgattgcgctgcccgggagaagtatgcaatgatgtttgacgagcccgtcctactgcaggcaggctggtggtatgtagcctgggctcgggtcagtggacctagcagcgattgtggaagtcacggtcaggcgtctatcaccacagacgatggcgtcgtatttcagtttaagtcatctaagaagtctaacaatggcaccgatgtaaacgccggccagatcccacagctactctacagactgcctacaagcgacggatcagcttccaaggggaagcagcagactagcgaacccgtccacattttaaagagatcgtttgcccggactgtgagcgtcgagtgttttgagagcctcctttccattttacactggtcatggaccaccctcgtgctcggagtggaagagttacgggggctcaagggatttcagttcacagctaccttgctggatttagagaggttgcgattcgtgggcacgtgctgcctgcggctgttgcgagtctacacttgtgaaatctacccggttagcgcaaccggtaaggctgtggtagaagaaacctccaagctggcggagtgtatcgggaaaaccagaaccctgctgagaaagattctgagtgagggagtggaccactgtatggttaagctcgacaatgacccccaggggtacctaagtcagccgctctctttgttagaggccgtgctgcaggagtgccacaacaccttcactgcatgttttcactccttctatccaactcctgctctgcaatgggcatgcctgtgcgatttgctgaattgcctggaccaggacatccaggaagccaactttaaaacatcgtcatcaaggctacttgcggcagtaatgtctgctctgtgtcacacgtccgtcaagctgacgtcaatttttcccattgcttatgacggtgaagttctgctgcgtagtattgtgaaacaagtcagcactgaaaatgacagtacactggtgcatcggttcccgctcctggtcgcacatatggaaaaactaagccaatccgaggagaacataagcggtatgacttcattcagggaagtgctggaaaaaatgctggtgattgtggttctcccagtgagaaatagtctgcgccgggagaatgagcttttcagctcacacctcgttagcaacacatgcggattgcttgcaagcatagtatctgaactgacagcgtcagccttaggatcagaggtggatggccttaatagtttacattccgttaaggcgtcagccaaccggttcaccaaaacctcgcaagggaggtcatggaacacagggaacggatccccagatgcaatttgcttttcagtggataaacctggtatcgtcgtggtaggttttagtgtctacggcggaggtggaattcacgaatacgagctggaagttcttgtcgacgacagcgaacacgccggggattccactcattctcaccgctggacaagcctggaactcgtgaaaggtacatacacaactgatgacagcccttccgatattgcagaaatccggttagataaggttgttcctttgaaggaaaatgtgaagtatgcggtgcgattgcggaattacggttcccgcacagcaaatggagacggcggcatgactacagtccaatgcccagatggagtaacctttacttttagcacatgttccctgtcctcgaatggcaccaatcagacgagaggacaaatcccacagatactgtactaccgctctgaattcgatggggatcttcagtcgcagctgctgtccaaagccaacgaagaggataagaattgttctcgggccctgtctgttgtcagcaccgtggtccgtgcttctaaagacctcttgcaccgggcccttgctgtggacgcggacgatatccctgagctactgagctcttcctcactcttctcgatgctgctgcctctcataattgcttatattgggccagtagctgctgcaatccccaaggtggccgtggaggtgtttggtctcgtgcagcaactcttaccttctgttgccattcttaaccagaagtatgcccctccagctttcaatcccaaccaaagcaccgattccacaacaggcaatcagcctgaacagggattgtctgcgtgcaccacttccagccattacgccgtgatcgaaagcgagcacccgtacaaacctgcctgtgtgatgcattataaggttacattcccagaatgcgtcaggtggatgacaatcgagttcgacccccagtgcggcactgcccaatcagaagacgtgctacggctgctgattcctgtcaggaccgtccagaactccgggtacggccccaaactcacatccgttcacgaaaatctgaatagttggatcgaactgaagaagttttcaggttcttctggatggccaaccatggtgttagttctgcctggcaatgaggctcttttttccttggagacagcctctgattatgtaaaggacgataaggcatccttttacggattcaagtgtttcgccatcggctatgagtttagtcccgggccggacgagggagtgattcaattggaaaaagagcttgccaacctgggaggggtttgcgctgctgctctcatgaaaaaagatctagcgctgcccatcggaaatgaactcgaggaggatctggagatcttggaggaagcagcactccaggtctgcaagacgcattctggaatcctgggaaaaggcctggcactatcacattccccaactattctggaagccctcgaaggtaatctgccactgcaaatacagagcaacgagcagtctttcctggatgattttatcgcatgtgttcctgggtcctccggtggtaggcttgctaggtggctgcagcctgactcatatgcagatccccagaaaacaagcctgatccttaataaggatgacatcaggtgtggttggcctacaacgattacagtccagactaaggatcaatacggtgatgtggtccacgtgcccaatatgaaagtcgaggtgaaggccgtgcctgtgagtcaaaagaagatgtcactacagcaggatcaggccaagaaacctcagcggattccagggagccccgcggttactgctgcttcctctaatactgatatgacatacggaggactggcttcgcctaaactggatgtgagttatgaacccatgatagttaaagaggccaggtacatcgccatcaccatgatgaaagtctatgaaaattacagttttgaggagctcagatttgccagccctactccaaaaaggccatcagagaacatgctgatcagagttaataacgatggcacgtattgtgctaattggacccccggagcaattgggctgtacacacttcatgtgacaatcgacgggatagagatcgacgccgggctggaggtcaaggttaaggacccaccaaaaggaatgatcccaccggggacacagctcgtcaagcctaaaagcgaacctcagcctaacaaagtccggaagttcgtggcaaaggattctgcaggacttcggatcagatcccacccctctctacagtccgagcagatcgggatagtcaaggtgaacggcacaattactttcatcgatgagatccataacgatgacggcgtttggctgagacttaacgacgaaactatcaagaagtacgtgcctaatatgaacggttatacagaggcctggtgtctcagtttcaaccaacatctggggaaatccctcttagttccagtggacgaatctaagacaaatacagatgatttttttaaggacattaacagctgctgtccgcaggaagcaacaatgcaagagcaggacatgcccttcctgcgaggtgggcccggaatgtacaaggtggtgaaaacgggcccctcagggcacaatatccgttcctgccccaacctgagaggtatccctattggcatgctggtcctgggaaacaaagtgaaagccgttggcgaagtgaccaatagcgaagggacttgggtacagctggaccaaaattcgatggtcgagttctgtgaaagtgacgagggggaggcatggtctttggcccgcgatcgaggtggtaaccagtaccttaggcacgaagatgaacaggccctgttggatcagaattcacagacgccccccccctcacctttttctgtgcaggctttcaacaagggcgcttcctgctccgcccaggggtttgactacggactgggaaattcaaagggagaccggggaaatattagcacaagcagcaaaccggcctcaactagcgggaaatcagaattaagctccaagcattcacggtcacttaaacccgacggccggatgtctcggaccactgccgaccaaaaaaaaccccgtggcactgagtcactttcagcttcagaaagcttaatcttgaaaagcgacgctgcgaagctgcggagtgatagccacagccgaagcctttctcccaatcataatactctgcagacactgaagtcagacggcagaatgccatcatccagccgcgcagagtctcctggccccgggtcccgcctctcatctcccaagcccaagacattgcctgccaacagatcatccccctcgggcgcgtcttctcctcgctcctccagcccccacgataagaacctgcctcagaaatcgacagccccagtgaagaccaagctggatccccctcgcgagagaagcaagtccgatagctatactctcgatcccgacactctgcgcaagaaaaaaatgcctctcaccgaacctttacgcggccgtagtaccagcccaaaacctaaatccgtgcccaaagattctactgacagcccaggtagcgagaacagggcaccctctccacatgttgttcaggaaaatctacattccgaagttgtcgaggtgtgcactagctcaactctgaagaccaacagcctcacagactccacttgcgatgatagctctgaattcaagtccgtagatgaagggtcaaacaaggttcacttctcgattggaaaagctcctctgaaagatgagcaggagatgagagccagcccgaaaatctctaggaaatgtgccaatagacacacccgcccaaaaaaggagaagtcatcttttttgtttaagggtgatggatctaaaccccttgagcctgccaagcaggctatgagtccttctgttgccgaatgtgcacgagcagtttttgccagcttcctctggcacgaaggaattgtgcatgatgcaatggcctgcagctcattcctgaaatttcacccagagttgagcaaggagcacgcccccattcgctccagtctcaactctcagcagcctaccgaagagaaggaaacaaagttgaagaacaggcatagcttagaaatttcatcagccctgaacatgttcaacattgccccgcacggccccgatatcagcaaaatgggatcaattaataagaacaaggtactttctatgctaaaggaacccccactgcatgagaagtgcgaggatggaaaaacagaaactacgttcgagatgagcatgcacaacaccatgaaaagcaagtctccgctgcctctgaccctgcagcatctcgtcgccttctgggaggatatctccctggctactatcaaggccgctagccaaaatatgattttcccctctcctggctcttgcgccgtgctaaaaaagaaagagtgcgagaaagagaataaaaagtccaaaaaggaaaagaaaaagaaggagaaagccgaggttaggccacgcggaaatctcttcggtgaaatggcacagctcgctgtcggaggccccgagaaagataccatctgcgaactttgtggagagtctcatccatacccagtgacctatcacatgcgccaggctcatcctggatgcgggcgatatgcaggggggcagggatataattccatagggcacttttgcgggggctgggccgggaattgcggggatggcggcattggcggctcaacctggtacctggtgtgtgatcgatgcagagagaaatatttacgcgaaaagcaggcggcggcgcgcgagaaggtcaagcagtcgcgcaggaaacctatgcaggtgaagacaccacgtgcactcccaaccatggaagctcatcaagttataaaggctaatgccctctttctgctgtctctaagtagtgcagccgagcccagcatattgtgctatcaccccgctaaaccttttcagtctcagttgccgtccgtcaaggaagggatttctgaggaccttccggttaagatgccttgcctgtacctccagaccctggcccgccatcatcatgagaatttcgtgggatatcaggacgataacctgtttcaggatgagatgcggtacctcaggtcaaccagcgtgccagcaccttacatatccgtgaccccagacgcttctcccaatgtgttcgaggaacccgaaagcaacatgaagtcaatgccgccctccttagaaacaagtccaatcaccgatactgatttggctaagaggacagtcttccagagatcgtacagcgtagtggcctcagaatacgataaacagcattctatcctgcctgccagagtaaaggcaatcccacgccgccgagtgaacagcggggacacggaagtggggagttcattgctgcgacacccatctcctgaacttagtagactgatttcagcccatagtagtttgtctaaaggagagcgcaatttccagtggcccgtattggcttttgtgatccagcaccacgacttggaagggctggagatcgcgatgaaacaggccctccggaagagtgcttgtagagtattcgccatggaagcattcaactggctgttgtgcaatgtgatacagacaacttctctccacgacatcctgtggcactttgtggcgtcacttactccggctccagtcgagcccgaagaagaagaagatgaggagaataagacatctaaggaaaactccgagcaggaaaaggacacgcgagtgtgtgagcatccgctcagtgacatcgtaatcgcaggggaagctgctcacccccttccacatacctttcacagactgctccagactatcagcgaccttatgatgtccctgcctagtggaagctctctccagcagatggctctgcgatgctggtcactgaaatttaaacagtcggatcaccagttcctgcatcaaagtaacgtgttccatcacatcaacaatatccttagtaaatctgatgatggcgactctgaggaaagtttttcaatctctatccagtctggatttgaagcaatgtcacaggagctgtgcatagtgatgtgcctgaaggatctgacctccatagtggacatcaagaccagcagccggcctgctatgatcggaagtctaacagacggtagcactgagacattctgggagtccggagacgaggacaaaaacaaaacaaagaatattactataaactgtgtaaaggggattaacgctaggtatgtgtctgttcacgtcgacaatagcagggatcttggcaataaggtgaccagcatgactttcctgacaggaaaggccgtggaggacctatgtaggatcaaacaggtggacttggattcgcggcatattggatgggtaacgtctgaactaccggggggagacaaccacattattaaaatagaactgaaggggccagagaatacactgcgcgtgcgacaggtgaaagtcctgggttggaaagacggcgagagtaccaaaatcgctggccagatcagtgcctcagtcgcacaacagaggaactgcgaagcagaaactctgcgggtcttccgtttaattacctcccaggtgtttggaaaattgatttctggggatgcggaaccgacccctgagcaggaggagaaagcccttttgtcttctccagagggcgaggaaaaagtatataatgcaacctccgacgctgacttaaaggaacacatggtgggtatcatcttttcccgatctaagctgacgaacctgcagaagcaggtgtgtgcacatatagtgcaagctatccgcatggaagccacgcgggttagagaagaatgggaacatgccatctcatccaaagagaatgcgaactcacagcccaatgatgaagatgcctcatcagacgcgtattgctttgagctcctatcgatggtgttagctttgtctggaagcaatgtgggccgacagtacctagcccagcaactgactctgctgcaagatctgtttagcttattgcacacagcttctccacgtgtgcagagacaggtgacttcactcctgcgccgcgtgctgcctgaagtcactccgtctaggttagcatctatcatcggtgtaaagtcactgccgcctgctgacatcagcgacatcatccatagcactgaaaagggggattggaataagctaggtattctcgacatgtttctaggctgtatcgccaaagccctcactgtccaactcaaggctaaggggacaactataaccggcactgcaggcaccacggtgggcaagggggtcacgacagtgactttacccatgatcttcaattccagctacttacgccgtggcgagtctcactggtggatgaaggggagtactcctacccaaatcagcgagatcattattaaacttatcaaagatatggccgctggccacttaagtgaggcctggtccagagtaaccaaaaatgcgatcgcggagaccatcatcgccctgacaaagatggaagaagaatttagaagccccgttcgctgcatagccactactagactgtggttggcactggcttccctgtgtgtactggaccaggaccatgtggataggctgagcagcggaagatggatgggcaaagatggacagcaaaagcagatgcctatgtgcgacaatcatgatgatggcgagacagccgccatcatcctgtgtaacgtgtgcggtaatctttgtactgactgtgaccgcttcctgcatttacatcggcgtaccaagactcaccagcggcaggttttcaaggaagaagaagaggccatcaaggtcgatctgcatgagggctgtggccggaccaaactcttctggctaatggccctggccgacagcaagaccatgaaagcaatggttgaatttcgcgagcataccggaaagccaacaacgtctagtagcgaggcttgcaggttttgcggcagtcggagtggcacagagctatcggccgtgggttccgtttgttccgacgctgactgtcaagagtacgcaaaaatcgcttgtagcaagacacacccctgcggccacccttgtggaggggtgaagaacgaagaacactgtctgccttgtctgcatggttgcgataagagtgcgacctctctcaagcaagacgccgatgacatgtgcatgatttgtttcacggaagccctgagtgctgctccagctatacagttggattgctcacatatcttccacctccagtgctgcaggcgggtactggaaaaccgctggctgggtccacgcataacattcggcttcatatcttgccccatatgtaagaacaagatcaaccacatcgtgctgaaagacctgctcgatccgatcaaggagttgtacgaggatgtacgacgtaaggccctgatgaggctggaatatgaaggattgcataagagcgaggcgatcactacccccggggtccggttttataatgaccctgcagggtacgccatgaatcgctatgcctattacgtgtgttataaatgtagaaaggcatacttcggcggggaggccagatgcgacgcagaagccggccgtggagacgattatgacccccgggagctcatctgcggggcttgttctgatgttagcagagcacaaatgtgcccgaagcacggcaccgactttctggagtataaatgccgatactgttgtagtgtggcggtctttttctgcttcggcacgacacacttctgtaatgcttgccacgacgatttccaacgaatgacatcgattcccaaggaagaattgccacactgtcccgccggaccaaagggcaagcaacttgagggcactgaatgcccattgcatgtagtgcatcccccaaccggagaggagtttgcccttgggtgcggagtctgtagaaacgcacacaccttttag

SEQ ID NO: 25155 - DNA, 13923 bp, synthetic construct
  misc_feature 1..13923: note = Description of Artificial Sequence: Synthetic coding sequence
  source 1..13923: mol_type = other DNA
atgcccgtgcccgacggcagcgtggccgccgccggcctgggcctgggcctcccagctgctgacagtagaggacattatcagctgttgctcagcggccgtgctctcgccgacagatataggcgtatttacactgcagcattgaatgatagagatcaaggtgggggctccgcagggcacccggcctcccgcaacaaaaagatcttaaataagaagaagttgaaaaggaagcagaagtccaagagcaaggtcaaaaccagatccaagtcggagaatctggagaataccgtaatcatcccggatataaagctgcattctaatcccagcgcgtttaacatttattgtaatgtgcgacattgcgtgcttgagtggcagaagaaggaaatctcactggccgccgcgagcaagaacagcgttcaaagtggtgaaagtgacagcgacgaggaggaggaatctaaggagcctccgatcaaattaccgaagatcatcgaggttggactgtgcgaggtgttcgagctcatcaaggaaacacggttttctcacccaagcctttgcttacgcagcctgcaggcattactgaatgtccttcagggccagcagccggaagggctgcagagcgagccccccgaggtgcttgagagcctgtttcagctcctgctggaaatcactgtccggtcgacgggcatgaatgattcaactggtcaatcccttacagctcttagttgcgcctgcctcttttccctcgtggccagttggggcgagacggggcgtaccctgcaggcaatcagcgctatcttgaccaacaatggctcccacgcgtgtcagacaatccaggttccaacaattctcaacagtttacagagatccgttcaagctgtcctagtgggaaagatccaaattcaggattggttctccaacgggattaagaaagccgcacttatgcacaagtggcctctgaaggagatcagtgtggacgaagatgaccaatgcctccttcagaacgacgggttttttctgtatttactgtgtaaggatggactctataaaatagggagcggttattccgggacggtccggggtcatatctataatagcacatctagaattcgaaacagaaaggagaagaaatcctggctgggctacgctcaaggctatctcctgtaccgggacgtaaacaatcacagcatgactgccatccggatcagccctgaaaccttagaacaggacggtactgtgatgttgcctgattgccacaccgaaggacagaacattctgttcacagatggggaatatattaatcagatcgccgcgtcccgtgacgacggattcgtagtgcgcatatttgccacatctacggaacccgtgcttcaacaggagctccagctgaagctcgcaagaaagtgcctccacgcctgtggtatatcactatttgacctagagaaggaccttcatatcatcagcactgggtttgatgaagaatccgcgatacttggggctggccgggaatttgccctcatgaaaacagccaacggaaagatctactacactggcaagtatcaatcccttggcatcaaacagggaggcccttctgccgggaaatgggtggagctgcccattactaagtccccaaagatagtacacttctctgtaggacacgacggcagtcacgcacttctggtggccgaagatggcagcatttttttcaccggttctgccagcaaaggcgaggatggtgagtccaccaaaagccggaggcagtccaagccctacaaacctaaaaagattataaaaatggaggggaagatcgtggtatacactgcgtgtaataacggcagctcaagtgtaattagcaaagacggagaactgtatatgttcggtaaagacgccatttactcagacagctcttctctggttaccgatctgaagggacactttgtaacccaggtggccatgggcaaagcgcacacctgtgtgctgatgaagaatggcgaagtttggactttcggcgtcaataataaaggacaatgcggtagggatactggcgccatgaaccaggggggcaaggggtttggagtggagaacatggcaaccgccatggatgaagaccttgaagaagaactggatgaaaaagatgagaagtctatgatgtgccctcccggtatgcataagtggaaacttgagcagtgcatggtgtgtactgtttgtggagattgtaccggctacggcgcatcctgtgtttctagcggcaggcctgaccgtgtgcccggtggcatttgcggatgtggatccggtgaatctggatgtgccgtttgcgggtgctgcaaggcctgtgcacgcgaactggacgggcaagaggcccggcaacgggggatcctggacgccgtgaaagagatgatccccctggatctgctcctggccgtgccagtacccggagtaaatatcgaagaacatttgcagctgagacaggaggagaagaggcagcgggtaattaggaggcatcgccttgaggaaggaagagggcctctagtcttcgccggtcctattttcatgaatcatagagagcaagccttagccagactgaggtcccatccagctcagctgaaacataaacgggataagcacaaagacgggtcaggcgagagaggcgaaaaggacgcctccaagatcaccacataccccccaggctccgtccgatttgattgtgagctgcgggcagtccaagtctcgtgcggatttcatcactctgtggtgcttatggaaaacggcgacgtgtacacctttggttacggacagcacggccaactgggccacggcgatgttaactccagagggtgccccactcttgtacaagctttacccggcccatcaacacaggtaactgctggatccaatcacaccgctgttctactgatggatggtcaagtattcacctttggatctttctccaagggccagctgggccgtccaatactggacgtcccttactggaatgccaaacccgcccctatgcctaacattgggagcaaatatggcagaaaagccacctggatcggggcatcaggcgatcaaacattcctccgaattgatgaagccctaattaactcacacgtgctggccactagtgagattttcgcctcaaaacatattattggcctggttccagcatccatctccgagcctcctccttttaagtgtttgctcattaataaggtggatgggagctgtaagacattcaatgattcagaacaggaagacctgcagggattcggtgtgtgcctggaccccgtctacgacgtgatctggcgctttcgcccaaatacacgcgagctctggtgttacaatgcggttgtcgcggacgcccggctcccatctgccgcggacatgcaaagtcgatgctctattttgtctcccgagctagccctgcccacaggctctcgcgccctcacaacacgttctcatgcagcccttcacatactggggtgcctagacaccctggctgctatgcaggatttgaaaatgggagtggccagtaccgaggaagagacacaagccgttatgaaggtatattccaaggaagactactcggtggtcaacagatttgagtcccatggaggcggctggggttattccgcacactctgttgaagccattcggtttagcgccgataccgatattctcttgggagggttgggtctgtttggtgggcggggagaatatacagccaagattaagctatttgagctgggacccgacggcggcgaccacgagactgacggggatctattggccgagaccgatgtgttggcctacgattgcgctgctcgcgagaagtatgcgatgatgttcgacgaacctgtgctcctccaagctggttggtggtatgttgcttgggcacgcgtgagcggaccgagcagtgactgcgggtcacacggacaagcttcgatcaccactgacgacggagtcgtcttccagtttaaatctagtaaaaaaagtaacaatgggactgacgttaacgctggccagatcccccagctcctctaccggctccctacgtccgacggcagcgcttcaaaaggcaaacagcagacctccgaaccagtccatattctgaagcgcagtttcgccagaactgtaagcgtcgagtgctttgagagtctgctttccattctgcactggtcttggactacgctggtgttgggcgtcgaggagttaagggggctgaaggggtttcagtttacagccactttgctagacctcgaacggctgcgattcgtcggaacttgctgtctgagactactgagagtgtacacttgcgaaatttaccccgtgtcagcaaccggaaaggctgtcgtggaggagacaagcaaactagccgagtgcattggcaaaacacggaccctactgcggaagattctgtcagagggagtagatcactgtatggtcaaactggacaatgaccctcaaggatatctgtctcaaccgctgagcctattggaggccgtcctgcaggaatgtcacaataccttcacggcctgtttccactctttttatccaacgccggccctgcagtgggcctgcctttgtgatctcctgaattgcctcgaccaggacatccaggaggcaaacttcaaaacctcatcgtcccgtttgctcgccgcagtgatgtccgcactctgtcacacgagcgtgaagctgacctcgatcttccccatagcatacgacggagaagtattgctgaggtcaatcgtgaaacaggtctcaacagagaatgactctacattggtgcaccgctttcccctcttggtggcacacatggaaaagctcagtcagtcggaggagaatatatccggcatgacatctttcagggaagtgcttgaaaaaatgctcgtcatcgtcgttctacctgtgcgcaacagtctgcggagggagaatgagctattcagttctcatttggtcagcaacacctgcggtctgctggcgagcatcgtttctgagctgacagcgtccgccttaggatctgaagtggatggactgaactctttacatagcgtcaaggcaagtgcaaaccggttcaccaaaacctctcaggggcgatcatggaatactggcaacggttcaccggatgccatttgtttttccgtggacaagccaggtatcgtggtggtgggattctcagtgtacggcggtggcggcatccatgagtatgagctggaagtattggttgacgacagcgaacatgcaggagattctacccactctcaccggtggacctcactagaactcgtgaagggcacgtacactacagacgacagccccagcgatatcgcagaaatcagactggacaaagtggtacctctgaaggaaaacgttaagtacgcagtgcgcctgagaaactatggtagcagaacagccaacggcgatggaggaatgacaactgttcaatgtccggatggcgtgactttcaccttctctacatgctcactgagctccaatggaactaatcagacgagagggcaaatcccgcaaatactttactaccgctctgagttcgacggcgacctccaatcacagctcctgagcaaggcaaatgaggaggataagaactgtagccgcgccctatcagtcgtgtcaaccgtggtcagggcttccaaagatctcctgcacagagccttggccgttgacgctgacgacatccccgaacttctgagttcatcatccctgttctccatgttattaccactcatcattgcttacatcggacccgtcgccgccgcaatccctaaagtggccgtggaggtgttcggactggtccagcaacttttgccctccgtcgccatcctgaaccaaaaatatgcccccccagccttcaatccaaatcagtctaccgactcaaccacgggcaatcaacccgaacaggggctatccgcctgcacaacctcgtcacactacgctgtcatcgaatctgaacatccctataaaccagcctgtgttatgcattacaaagtgacctttccagagtgcgtcaggtggatgacaatcgagtttgatccgcagtgcggcactgctcagtcagaagacgtgttacgcttgcttattcctgtgcggacagttcaaaactcgggttacggtcctaaactaacaagcgtgcacgagaatctaaacagttggatagagcttaaaaagttcagcggttcttctgggtggccaaccatggtgctggtcctcccaggaaatgaggctctcttttcactcgaaaccgcaagcgactatgtaaaggatgacaaggccagcttttacggctttaagtgcttcgctatcggctatgagttttccccaggacctgatgaaggcgtgatacaattagaaaaagaattggcaaacctggggggcgtgtgcgctgctgctttaatgaaaaaagatctcgccctccctataggaaacgagctcgaagaagacctggagatcttagaggaagcagctctgcaggtatgtaagacccatagtggtatcctgggtaaggggttggcactctctcacagtccaacaatccttgaggccctggaagggaaccttccgcttcagatccagtctaatgagcagtcctttcttgacgactttatagcatgcgtgcccgggagctctggagggagactggcaagatggttacagccagattcgtacgccgacccacaaaaaacctctctaatcctgaacaaagatgacatccggtgtggctggcctaccaccataaccgttcagacaaaagatcagtacggggatgtcgttcatgtgccgaatatgaaggtggaagtgaaggccgtcccggtttctcagaaaaagatgagcttgcagcaagatcaggccaaaaaaccccagaggattccaggttctccagcagtgactgcagcgagctctaacacagacatgacctatggaggattggcatcccccaagttagacgtttcctacgagcctatgattgttaaagaggcccgctatatagccatcaccatgatgaaggtatatgaaaactacagttttgaggaactgaggtttgcctctccaactcctaaaagaccttcagaaaatatgttgatcagagtgaacaacgacggaacatattgtgccaactggaccccaggagcaatcggcctttacaccctgcacgtaacaattgatggcatcgagatcgatgctggcctggaggtgaaagttaaggatccgcctaaggggatgatccccccaggcacccagttggtcaagcccaaatccgagccgcagcccaataaggtgcggaaattcgtggcgaaggactcagccgggctgaggatccgcagtcatcccagcttgcaaagcgagcaaataggcatagtgaaggtcaacggcaccatcaccttcatagacgagattcacaatgacgatggcgtgtggttgaggcttaatgacgagactattaaaaaatacgtccctaacatgaatggctacaccgaagcttggtgcctcagttttaatcagcaccttggaaagtccctcctcgtccccgtagatgagtccaaaaccaacaccgatgatttttttaaagacattaattcctgctgtccacaggaggcaactatgcaagagcaagacatgcccttcttgcgcggcgggccgggcatgtacaaagtggtgaagaccggcccatccggccacaacattaggtcctgccctaacttgagagggataccaatcgggatgttggtgctcggcaacaaggtaaaagcagtgggcgaggtaaccaacagcgagggaacatgggtccagttagaccagaactctatggtggagttctgtgaatctgacgaaggagaggcctggagtttggcccgcgataggggagggaatcaataccttcggcacgaggatgagcaggccttactggatcagaattcacagaccccaccaccttcaccgttctctgtccaagcgtttaataagggcgcatcctgtagcgcacaggggttcgactatggacttggcaactctaagggggatagaggcaatatatctacgtctagcaagcctgcgtccaccagcggtaaaagtgagctcagcagcaaacacagcagaagtctgaagccagacggccgaatgagcaggactacagcagatcagaagaagccgcgggggacggagagtctcagcgccagcgagtctctgatacttaaatctgacgccgcaaaacttaggtctgactcgcattcccgaagcttatctccaaaccacaataccttgcaaaccctaaaatcagacggccggatgccctccagttcacgtgcagaatcacctgggccaggttcacgtttgtccagcccaaaaccaaaaaccctcccagctaaccggtcctccccatccggtgctagtagcccacgttcctcaagcccccacgacaagaatttgccccaaaagtctacggcaccggtgaagaccaagttggatccgccgagagagagatccaagagtgattcttatactttggaccctgacactttaaggaagaagaagatgcctctgaccgaacccctgcggggacggtccaccagtcctaaacccaaaagcgtcccaaaggactcaactgacagcccgggcagcgagaaccgagcaccaagtcctcatgtggtccaggagaacctccatagtgaggtggtggaagtttgtacctcctctacactgaagaccaactcactcacagatagtacctgtgatgacagctctgagtttaaatcggtagatgaaggctctaacaaagtccattttagtatcggaaaggcacctttgaaggacgaacaagagatgagggcaagtcctaaaatttcccgcaagtgtgctaaccgtcacacaagacccaagaaggagaagagcagcttcctcttcaaaggggacggaagcaagccactggagcccgcgaaacaggccatgtctcccagcgtcgcggaatgcgcccgcgctgttttcgccagctttctgtggcacgaaggaatagtccatgatgccatggcgtgttccagctttctcaaatttcatcccgagttgtcaaaggaacacgcgcccattagatcgtcgctaaattcccagcagcccaccgaggagaaagaaactaagctgaagaatagacattcgctggaaatcagctctgccctgaatatgtttaacatagctccccacgggcccgatatctctaagatggggtccatcaataagaacaaagtcctgagcatgctcaaagagccacccctgcatgaaaagtgcgaagacggcaaaactgagacaactttcgaaatgagtatgcacaatactatgaaatctaagtccccattgccgcttacactacaacacctggtagctttttgggaggatatttccctggccacgattaaagctgccagccagaatatgatcttcccctccccaggcagctgtgccgtgctcaaaaaaaaggagtgcgagaaggaaaataaaaaatcgaaaaaggaaaaaaaaaagaaagagaaggctgaagtgaggcctaggggaaacctcttcggagaaatggcgcagctggccgtcgggggcccagagaaggatacgatttgtgaactatgtggggaatctcacccatacccagtaacttaccacatgcggcaagcccacccaggctgtggaaggtacgctggaggccaggggtacaatagcattggccatttttgtggaggatgggcaggcaattgcggggacgggggtattggcggttccacctggtatctagtgtgcgaccggtgtcgggagaaatatctaagagagaagcaagcggccgctcgcgagaaggtaaagcagagccggagaaaacctatgcaagtgaagacccctagagcgttaccgacgatggaggctcatcaggtcattaaagctaacgcactgtttcttcttagtttgagctccgctgctgagccctccattttatgttaccatcctgctaagccgtttcagtcacagctccctagtgtgaaggaaggcatttctgaggatctcccggtcaagatgccctgcctgtaccttcagacactggcccgtcaccaccatgagaacttcgtggggtatcaggacgataatctgttccaggatgagatgcgatacttgagatcaacctccgtgcccgccccttatatctctgtcacacctgatgcttcccctaatgtgtttgaagagcctgaatccaatatgaagtccatgcctccatcgcttgaaactagccctatcactgatactgatctggctaaaagaacagtatttcagagatcttacagcgtggtggcatctgaatatgataagcagcattccatactgccagcaagggtgaaagcgattcccagacgcagagtcaactccggagacacagaagtcggttcctcacttctccgccaccctagccctgaactgagtcgtctgataagcgcacatagttcattgtctaagggagaacgtaatttccagtggcccgtgttggcttttgtgatccagcaccatgacctggaagggttggagatcgccatgaaacaagccctgagaaagtctgcatgtcgtgtgtttgccatggaagcttttaattggctcctttgtaacgtcatacaaacaacatcccttcatgacattttatggcattttgtagctagcctcacgccagcacctgtcgagcccgaagaagaggaagatgaagagaacaaaacatcaaaggaaaattctgagcaggagaaagatacacgagtgtgtgaacatccactgagtgacattgtgatcgccggcgaggccgcacacccattgccccatacctttcatcggctcttgcagaccatctccgacttaatgatgtccctccccagcggttctagcctgcaacagatggctcttcggtgctggagcctgaagtttaagcagagcgatcaccagtttctgcatcagtcaaacgtgttccaccatataaacaacattttatccaagagcgacgatggggattccgaggagagttttagcatttcgatccagtcaggttttgaagcaatgtcccaggagctttgcattgttatgtgcttaaaggatctaacctcaatcgtggacataaagacatcaagcagacccgcaatgatcgggtctttgactgatgggtcaactgaaaccttctgggagtcaggcgacgaagataagaataagaccaagaacatcacgatcaattgtgtgaagggcatcaacgcacggtacgtgagcgtacacgtggataattctcgcgacctgggaaataaagtgacatctatgacgttccttacgggaaaggccgtggaggacctttgcaggatcaaacaggtggatctcgatagtaggcatatcggatgggtgacaagtgaacttcctggaggggacaaccacattatcaaaattgaactgaagggcccagaaaacacattgcgggtgcgacaggtgaaagttcttggatggaaggacggagagtcaaccaagattgcagggcagatcagcgcatccgtagcacagcaaaggaactgtgaggctgagaccctgcgggttttcagactgattactagtcaggtctttggtaaactgatcagcggcgacgccgaacccacgccagagcaggaagagaaggctcttctgtcgtctcccgaaggcgaggagaaggtttacaatgctacatccgacgccgatcttaaggagcacatggtgggaattattttctcaagaagcaaattgactaacctgcagaaacaagtttgcgctcatattgtacaggcaatcagaatggaggcgaccagggtccgggaggaatgggagcacgcgattagcagcaaagagaacgctaattcccagccgaacgacgaggacgcatcatcagatgcgtactgttttgaactactgtccatggtgctggcgctgtctgggagcaatgtcggaaggcagtacctcgcccagcagttgactcttttgcaggacctttttagcctcctgcatacggccagcccacgcgtccagaggcaggtcacttccctgctaaggcgggtgttacccgaggtgaccccgtcgagactggcttcaatcatcggagtgaaaagcctgcccccagccgatatttcagacatcattcattccaccgaaaaaggagactggaataagcttggaatactggatatgttcttgggctgtattgctaaggccctgaccgtccagctaaaagctaaaggaacgacaatcaccggcacagccgggacgactgtggggaaaggagtcaccaccgtcacacttcctatgatctttaacagttcatacctccggcggggcgaaagtcattggtggatgaaaggatctactcctacgcaaatcagtgagatcataattaaactgattaaggatatggcagccggccatctcagcgaagcctggagccgagtgacgaagaacgcaattgccgaaactataatcgcattaacaaaaatggaggaggagttcaggagtcctgtcagatgtattgccaccaccaggctgtggcttgccctcgcgtcgctgtgtgtgctggatcaagatcacgtggaccggctgtcaagcggccgttggatgggtaaggacggacagcagaaacaaatgccaatgtgtgacaaccacgatgacggggagaccgctgccatcatcctgtgcaatgtgtgtggcaacctctgtactgactgtgaccgtttcttacacctccatagaaggactaaaacccaccaaaggcaggtattcaaggaggaggaagaagccatcaaggttgatctgcacgagggctgtgggaggactaaactcttttggttaatggcgctagcagactctaagacaatgaaggcgatggtagaatttcgggagcacactgggaagcctactacatcctcatcagaggcctgccgcttctgcggtagtcggtcaggaacagaattatccgcggtaggatctgtctgttcggacgctgattgccaggaatacgccaaaatcgcctgctcaaaaacccacccttgcgggcatccttgtggaggcgtcaagaacgaggaacattgtcttccatgcctacatggttgcgataagagtgcaacaagcttaaaacaggatgcggacgatatgtgtatgatatgcttcaccgaagccctcagtgctgcgcccgccatacagttggattgcagtcacatctttcacctgcagtgttgccggagagtgttagagaacaggtggctcggacctcggattacatttggctttataagttgtcccatctgtaaaaacaagatcaatcacatcgttctcaaggatctcttggatcctatcaaagagctatacgaggatgtaaggagaaaggcactcatgcgactcgaatatgagggactgcataaatcagaagctatcactacacccggagtaagattctacaacgaccccgccgggtacgctatgaatcgctatgcctactacgtgtgctataaatgtcgcaaggcctactttgggggggaggctcggtgtgatgcagaggcaggccggggggacgactacgacccacgggagctcatatgcggcgcctgctcagacgtgtcgagggcacagatgtgtcctaaacacggaaccgatttcctcgagtataagtgtcgctactgttgttccgtcgccgtcttcttctgctttggcactacacacttttgcaacgcctgtcatgatgatttccagagaatgacatcgatcccaaaggaagaattaccccattgcccggcaggccccaagggcaaacagcttgagggcacagaatgccctcttcacgtagtgcatcctcccactggcgaggagttcgcactcggatgtggcgtttgcaggaacgctcacactttctag

SEQ ID NO: 25156 - DNA, 930 bp, synthetic construct
  misc_feature 1..930: note = Description of Artificial Sequence: Synthetic coding sequence
  source 1..930: mol_type = other DNA
atgcggcccgaccgggccgaggcccccggcccccccgccatggccgctgggggtccaggcgccggatccgccgccccggttagcagcactagctccctgcctctcgcagctctaaatatgcgagtgcggaggagactgtccctgttcctcaacgtgcgcacacaggtggctgcagactggacggccctggcagaagagatggacttcgagtatttagagatacgccaactagagacacaggccgaccccaccggtaggctgctcgatgcatggcaaggccggcctggcgcatccgtcgggcggctactcgagttgctgacaaagctgggaagggatgacgtgctgctggaactgggacctagcatagaggaagattgtcagaaatatatcttgaagcagcaacaggaagaggccgagaagccactgcaagtcgctgctgttgattcgtccgtgcctagaacagcggaattggccggtataaccaccctggacgatccattgggccatatgcccgagcggtttgacgcattcatttgctactgcccatctgatattcaattcgtgcaggaaatgatccggcaactggaacaaactaactataggttgaagttgtgcgtgtctgaccgtgacgtccttcccggaacttgtgtgtggtcaatcgcttctgagttaattgaaaagcggtgtcgaaggatggttgtggtagtgtcggatgactatctgcagagcaaggagtgtgacttccagaccaaattcgccctgagcctctctccaggggcccaccagaagaggctaattccgataaagtacaaggccatgaaaaaggagttcccttcaattctgcgtttcattaccgtgtgtgattatactaacccctgtaccaaaagctggttctggacaagattggcaaaggctctgagtttgccttag

SEQ ID NO: 25157 - DNA, 858 bp, synthetic construct
  misc_feature 1..858: note = Description of Artificial Sequence: Synthetic coding sequence
  source 1..858: mol_type = other DNA
atggccgccggcggccccggcgccggcagcgccgcccccgtgagctctaccagcagtttgcctctggctgccctcaacatgcgtgtgcgacggcggcttagcttgttcctgaacgttcgtactcaggttgcagcagactggactgccctggcagaagagatggatttcgagtatcttgagatccgccagctagagacacaggctgacccaactggcgctagcgtcggtaggctattggagctgctaaccaaactggggcgagatgacgtcctcctcgagttaggacccagcatcgaggaagattgccagaaatatatcctgaaacagcagcaggaggaggccgagaaacctctgcaggttgcagcagtcgattcgtctgtcccgcggaccgccgagctggcaggtattactactctggatgatccgctcgggcatatgcccgaaagattcgacgccttcatatgctattgcccctctgacatccaattcgtgcaggagatgataagacagttggagcagaccaattacaggttaaagctttgtgtgtctgatagagatgtgctgcctggcacttgtgtgtggtccatagcctccgagttgatcgaaaagagatgcaggcgtatggttgtagttgtctccgacgattatttgcagagtaaagaatgtgatttccagactaaattcgccctgtctctcagccccggggcacaccagaagcggttaatccctataaaatataaggctatgaaaaaagaatttccatcaattttgcgatttatcaccgtgtgtgactacaccaacccgtgcacaaaaagctggttctggactcggctagccaaagccctgagcttgccttag

SEQ ID NO: 25158 - DNA, 954 bp, synthetic construct
  misc_feature 1..954: note = Description of Artificial Sequence: Synthetic coding sequence
  source 1..954: mol_type = other DNA
atgcggcccgaccgggccgaggcccccggcccccccgccatggccgccggagggcccggagccggatcagcagctcctgtgagcagcacgtcctcactacccctggccgcgctgaacatgagggtccgcagaagactgagtttgttcctgaatgtacgcacccaggtggctgccgattggactgctttagccgaggaaatggactttgagtacctggagattcgtcagctagaaacccaagccgatccgactgggaggttgttagatgcttggcagggaagaccaggcgcaagcgtggggaggctcctcgagcttctgacaaagctgggtagagacgatgtgttgttagagctagggccatctatcgaagaggattgtcagaagtacatcctaaagcaacagcaggaggaggcagagaagcctctacaggtggccgcagttgattcttccgtgcccaggactgcagaacttgccggaatcaccacacttgacgaccccctgggtcacatgcccgagcgcttcgacgctttcatttgttactgcccctctgacatacagttcgtgcaggagatgatccgccagctggagcagacaaattaccgactcaagctatgcgtgtccgacagggacgtcttaccagggacttgcgtatggtctattgcatctgagttgattgaaaaaagactggccaggaggcctaggggcggctgccgaaggatggtggtcgtggtgtcagacgattatttacagagtaaagaatgcgacttccagaccaagttcgctctctcacttagtcctggcgcccatcagaagcgcctgatcccaatcaaatataaggccatgaaaaaggaattcccttccattctccgttttatcacagtatgtgactacaccaacccatgtactaaatcatggttttggactcggctggctaaagccttgagtctcccttag

SEQ ID NO: 25159 - DNA, 510 bp, synthetic construct
  misc_feature 1..510: note = Description of Artificial Sequence: Synthetic coding sequence
  source 1..510: mol_type = other DNA
atggccgccggcggccccggcgccggcagcgccgcccccgtgagctccacttcgagcctccccttggccgccctcaatatgagggttaggaggcggctgtccctctttctgaatgtcaggacacaggtcgcagctgactggaccgccctcgctgaagagatggatttcgagtacctggaaatccgccagctggagacccaggctgaccccaccggccggctattggatgcgtggcagggccggccaggcgctagcgtcggtaggctacttgagctgctgaccaaacttggacgggacgatgtgctgctcgaactaggcccaagcatagaggaagactgtcagaaatatattctgaaacagcagcaggaggaggccgaaaaacctcttcaggttgctgccgtcgactcgagtgtccctccccacttaatgactccgtggggaatctgcttgtcagtgagcatgcctagcagtgccatcgcacctgcaacgtcctctctttgcagaagatag

SEQ ID NO: 25160 - DNA, 963 bp, synthetic construct
  misc_feature 1..963: note = Description of Artificial Sequence: Synthetic coding sequence
  source 1..963: mol_type = other DNA
atggagctgctgagcccccccctgcgggacgtggacctgaccgccccggatgggagcctctgttcgtttgcgaccaccgacgatttctacgatgacccttgcttcgactcacctgacttgagattcttcgaagatcttgacccgagactcatgcatgtcggagcgctgcttaagcctgaggaacatagtcatttccccgctgctgtccaccctgcccccggggcaagagaggacgaacatgttcgtgctccgtccggtcaccatcaagccggccggtgcctgctgtgggcttgtaaggcctgtaagagaaaaaccaccaacgccgatcgcagaaaggctgccaccatgcgtgaaagaaggcgcttgtccaaggttaatgaggcatttgaaactttaaagcggtgtacttcttccaaccccaatcaacgactgccaaaagttgaaatcctcaggaatgcaattcgatatattgaggggctgcaggcactactgagagatcaagacgcagctcctccgggcgctgccgccgctttctacgcacctggaccactgcctcctggccgagggggggagcactatagcggggactcagacgcatcctcaccccgttcaaattgttcggacggtatgatggattacagcggaccgccctctggagctcgccggcggaactgctatgaaggggcgtactacaacgaagccccctccgaaccgcgccccgggaagtcggcagctgtgagctctttggactgtttgtcctctatagttgaaaggatctctaccgagtctccggcagccccggctttgttgctcgccgacgttcctagtgagagtccaccgcggcgtcaagaggctgcggcgcccagcgaaggagaatctagtggagacccaactcagtcacccgacgctgccccgcagtgcccagccggggcgaaccccaatcccatataccaagttctgtag

SEQ ID NO: 25161 - DNA, 5538 bp, synthetic construct
  misc_feature 1..5538: note = Description of Artificial Sequence: Synthetic coding sequence
  source 1..5538: mol_type = other DNA
atgggcgacgtgaagctggtggccagcagccacatcagcaagaccagtctgtcagtcgacccgtctagggttgactcaatgcccctcactgaagcccctgcctttatactccctccacggaacctgtgcattaaggagggggctactgcaaagttcgagggacgcgttaggggctacccggaaccacaggtcacttggcaccggaacggacagcctataacatctgggggacgcttccttctggattgtggaatccgcggaacgttcagtctggtcatacatgctgtccatgaagaagatcgcggcaagtacacctgcgaagcaactaatggctctggcgcaagacaggtgacagtcgaattgactgttgagggctcctttgccaaacagcttggccaacctgttgtctccaaaactctcggggatcgtttctcagccccggccgtggagaccagaccgagcatctggggcgagtgccctcccaagtttgcaactaaactcggccgcgtggtggtgaaagagggacagatgggacggtttagttgcaaaattacgggccgccctcagcctcaagttacctggctgaagggtaatgtgccattacagcctagcgcccgggtgagtgttagcgagaagaatggcatgcaagtgctcgagatccacggagtgaaccaggacgacgtaggggtctacacttgtctggtggtgaatggctctggcaaggcgagcatgtctgcagagcttagcattcaagggctagacagcgcaaataggtcgttcgtgcgagagacaaaggccaccaactcagatgtgcgcaaagaagtgacgaatgtgatctctaaggagtccaagctcgatagcttggaagcggcagcaaagtccaaaaactgcagctccccacaaagggggggatcccctccatgggccgccaacagccagccgcaaccgccccgcgagtccaagctcgagtcatgtaaggatagccctcgaacagcccctcagacgccagtgctgcagaagaccagctcttcgatcactttacaggcggctagagtgcagcctgagccaagggcccctggacttggagtactgtctccgtcaggagaagaacgtaaacgccccgcgccaccccgacctgcaacatttcccactcgacaacccgggttaggttcccaggatgtggtcagtaaggccgctaacagacgaattcctatggaagggcagcgagattctgcttttcccaagtttgaaagcaagcctcagtctcaggaagtcaaggagaaccagaccgtaaagttcaggtgcgagggactcgccgtgatggaggtcgcccctagtttctcgtctgttttgaaggattgcgctgtgatcgaggggcaggactttgtgctgcagtgtagcgtcaggggcaccccagttccgcggataacctggctcctgaatgggcaaccaatccagtacgcccgctcaacatgcgaagctggcgtagctgagcttcatattcaagacgcactgcctgaggatcatggtacatacacctgccttgctgagaacgccctaggccaagtttcctgttcggcttgggtgactgtgcacgagaaaaagtccagtcgcaagagcgagtatcttctgcccgtcgctcctagtaagcctaccgctcccatttttttacaggggctttctgatttgaaagtaatggacgggagccaagtcaccatgacagtccaggttagtggtaaccccccacctgaggtaatctggttgcataacgggaatgagattcaggaatctgaggatttccacttcgaacagagaggtactcagcatagtctttgtattcaggaagtctttccggaggataccggaacttatacttgtgaggcttggaacagcgcaggcgaagttagaacccaggccgttctgacagtccaggagcctcatgacggcacacagccgtggttcattagtaagccccgtagtgtaaccgcatctctggggcaatctgtgctgattagttgtgcaattgccggtgacccctttccaaccgtccactggttgagggacgggaaagccctgtgcaaagatacagggcatttcgaggtgctgcaaaacgaagatgtattcaccctggtgctgaagaaagtgcagccttggcatgcgggacagtacgaaattcttctcaagaacagagtgggagaatgtagctgtcaagtgtcactgatgttgcagaactcgagcgctagagcactccctcgaggacgagagcctgctagttgcgaggatctttgtggtggaggggtgggagcagatggcggaggaagtgataggtatggaagcctgcgccccgggtggcctgctcggggacaagggtggctggaagaagaggacggcgaggatgttagaggggtcttgaagcgcagggttgagaccaggcagcataccgaggaagccattcgacaacaagaggtagagcagttggatttccgcgacctgctgggaaagaaggtgagcacaaaaactcttagcgaggatgacttaaaggagatcccagccgagcaaatggatttccgggcaaacttacagagacaagtgaagccaaagaccgtgagtgaggaggaaaggaaagttcattcaccgcagcaggtggacttcaggtccgtgctggccaagaagggaacttccaagacaccagtccccgagaaagtccctccacctaaaccagcgactcctgatttccgatccgtgctgggtggaaagaagaagctgcccgcggaaaatggctcttctagtgccgagacactcaacgctaaagcagttgagagcagtaaaccgctgagcaatgctcaaccttcaggacctctgaagcccgtgggcaacgcgaaacccgccgaaaccctgaaaccaatgggcaacgccaagcccgcagagacactcaagccaatgggtaatgctaagccagatgagaatctcaagtcagcctctaaggaagagctgaagaaggacgtgaagaatgacgtgaattgcaagaggggacacgctggtacaactgacaatgagaagcggtctgagtcccaggggacagccccagccttcaagcagaagttgcaggatgttcatgtggccgaggggaaaaaactgctattacagtgtcaggtgagttcggaccctcccgctaccattatctggaccctaaatggtaaaaccctaaagacaacgaagttcatcatattgtcccaggagggttccctttgtagcgtgagtatcgagaaggcactgcctgaagacagaggcttgtataaatgcgttgctaagaacgacgccgggcaggccgaatgcagctgtcaagtcactgtcgacgatgccccagcatctgaaaataccaaggccccagagatgaagtccagacgacctaagtcttccttgcctccagtgctcggcacagaatccgacgccaccgtgaagaagaaacctgctcccaagacaccccctaaagcagctatgcctcctcaaataatccagttccctgaggatcagaaagtgagggccggggaatcagtggaactgttcggcaaagtgaccggaacacaacccattacttgtacctggatgaagttccggaaacagatccaggagtccgagcacatgaaagttgagaactcagagaacggaagtaaactcacaatcctggctgcccggcaggaacactgtgggtgctatactctgctggtggaaaacaaattaggctccagacaggcacaagttaacctgactgtcgtcgataaaccagatcctcctgctggcactccgtgcgcatccgacatcagaagttccagtctcaccctctcatggtacgggagtagctacgacggaggttccgccgtgcaaagttacagcattgaaatctgggactccgccaacaagacatggaaggagctcgcaacatgtaggtccacctcctttaatgttcaggacctactgcccgatcatgagtacaagttccgggtgcgggcaataaacgtatacggcacgtccgagcccagccaggaatccgagttaacgactgtgggcgaaaagccagaagagcccaaggacgaggttgaggtgagtgacgacgacgagaaagagcccgaagtcgattaccgcacagttaccattaatactgaacagaaggtgtcggacttttacgatattgaggagcgcctggggtccggaaagttcggtcaggtgtttagactggtggagaagaaaactagaaaggtctgggccggcaagttctttaaggcctactcagcaaaggagaaggaaaacattcgccaggaaatctccattatgaattgtctgcatcatcccaaactggtgcagtgcgtggatgcgttcgaggaaaaagcaaacatcgtgatggtcctcgaaatagtgagtggaggtgaactgtttgaaaggatcattgacgaggactttgagttaactgaacgggagtgcattaagtacatgaggcaaatttcagaaggagtggaatatatccataagcagggaatcgtgcacttggatcttaagccagaaaacattatgtgcgtgaacaagactggcacgagaatcaaactgatcgatttcgggttggctcgccgtcttgaaaacgcaggctcgttaaaggtactgtttggcacccccgaattcgtcgcccctgaagtgatcaattatgaacccatcggctacgctaccgacatgtggagtattggcgttatatgttacatcttggtgagcggcctaagccccttcatgggggataatgataacgagaccttagccaatgttacctctgctacttgggatttcgacgacgaagcctttgacgaaatctctgatgatgccaaggatttcatttctaatctgctgaagaaagacatgaaaaatcgcctggactgcacacaatgccttcagcacccttggctcatgaaggataccaaaaacatggaggccaaaaagctcagcaaggaccggatgaagaagtacatggcccggcgaaagtggcagaagacaggcaacgctgttcgagcaattgggagactctcaagcatggctatgataagcggtctttcaggcaggaaatcgagcacaggttccccaacatctcccctgaatgctgagaagttggaaagtgaggaggatgtctctcaagccttcctcgaagccgtggcagaggagaagccacacgtgaaaccctatttcagcaagacaatccgcgaccttgaagtggtggaaggttccgccgcgaggttcgattgcaagatcgaagggtatcccgatcccgaggtcgtttggtttaaagatgaccaatctattagggagagccgccacttccagattgattacgatgaagatggaaactgctccctgattataagcgacgtatgcggagatgatgacgccaagtacacttgtaaagccgtgaactctctgggcgaggctacctgcaccgcggagttaatcgtcgagactatggaggagggcgagggcgagggggaggaggaggaagagtag

SEQ ID NO: 25162 - DNA, 2145 bp, synthetic construct
  misc_feature 1..2145: note = Description of Artificial Sequence: Synthetic coding sequence
  source 1..2145: mol_type = other DNA
atgaagagccggcggcccaagagcagcctgccccccgtgctgggcacagagagcgatgccaccgtgaagaagaagccagcccctaagacccctccaaaggcggctatgccgccacaaattatccagtttccggaagaccagaaggttagggccggcgagtcagtagaactgtttgggaaggtaaccggaactcagcctatcacttgtacttggatgaagttccgcaagcaaatccaggagagcgaacatatgaaagtcgagaactcagaaaatggttccaagttaacgatccttgcagcccggcaggagcattgtggctgctacaccctgctggtggagaacaaactgggatcgaggcaagcccaggtcaatctgacagtagtggataaacctgatcctcctgcaggcacaccttgtgcctccgatatcagaagcagttcgctcaccctgtcatggtacgggtccagttatgacgggggtagcgctgtacagtcttattccattgaaatttgggactcggcgaacaagacttggaaagagcttgccacctgcagatctacgagttttaatgttcaggacctactgcctgatcacgaatacaagtttagggtacgagccatcaacgtgtatgggacaagcgagccttcccaagagtctgagctaaccaccgtgggcgaaaaaccagaggagcctaaagatgaagtggaagttagcgatgacgacgagaaagaacccgaagttgactatcgtaccgtcacaataaacaccgaacagaaagtctccgatttttatgatatagaggaaagattgggatctggaaaattcggccaggtgttcaggttggttgaaaagaagactaggaaggtttgggccggcaaattctttaaggcatacagcgccaaagaaaaggagaatattcgacaggagatatctatcatgaactgcttacaccatcccaaactggttcagtgtgttgacgccttcgaggagaaagccaacattgtgatggtactggaaatagtgagcggtggagagctatttgagagaattatagacgaggactttgagctcacagagagagagtgcatcaagtatatgagacagatttcagaaggggtcgaatatattcataagcaaggcatcgtacatctcgacctcaaacccgaaaacatcatgtgtgttaacaaaaccggcactagaataaagctgattgacttcggactggcccgtcggctggagaacgcaggaagcctgaaggtcctgttcggaacccctgaattcgtcgccccagaggttattaattatgaacccatcggatatgctacggacatgtggtccattggcgtgatatgttacatcttagtgtcggggctgtccccgttcatgggagataacgacaacgaaacacttgccaacgtgacgtctgcgacttgggatttcgacgacgaagccttcgacgagatcagtgatgacgctaaggacttcattagcaatcttctgaagaaagatatgaagaaccgacttgactgtacacagtgcctccaacatccctggttgatgaaagatacgaaaaatatggaagccaaaaagttgtccaaagatcgcatgaagaagtatatggcccgtcggaagtggcagaagacgggcaatgctgtccgcgccattgggaggctgtcatctatggcaatgatttccggcctgtcaggaaggaaaagttctacagggagcccaaccagccctttaaatgctgaaaagctggaatcagaggaggacgtgtcacaggcctttttggaagctgtggcagaggagaaaccccatgtgaaaccatacttttctaaaacaatcagagatctggaggtcgtcgaaggcagcgctgcccgcttcgactgtaagatagagggttacccagatcctgaagttgtgtggtttaaggatgaccaaagtatccgggagtccaggcattttcagattgactacgatgaagacggaaattgttctttaattatctctgatgtgtgcggggacgacgatgccaaatatacttgcaaggccgtcaattcattaggcgaggctacttgcactgccgaactaattgtggaaaccatggaagaaggtgaaggcgagggcgaagaggaggaggaatag

SEQ ID NO: 25163 - DNA, 5592 bp, synthetic construct
  misc_feature 1..5592: note = Description of Artificial Sequence: Synthetic coding sequence
  source 1..5592: mol_type = other DNA
atgggcgacgtgaagctggtggccagcagccacatcagcaagacctctctttccgtcgacccctcaagggtggacagcatgccactcaccgaagccccggcgtttatcctgccacctcggaatctgtgtatcaaagaaggtgctacggcaaagtttgagggccgtgtgcgagggtacccagagccacaggtcacatggcaccgaaacggacagcctataacctctggaggcagattcctgcttgactgtggcataaggggcacgttcagcctggtgatccacgcagtgcacgaggaagaccgcggtaaatacacatgcgaggctactaacggtagcggagctcggcaggttaccgtcgagctcaccgtggaggggtccttcgccaaacagttaggtcagcctgtggtgtccaagacactaggcgataggttctctgctccggcagtggagacccgcccctccatttggggggagtgtccaccaaagttcgctactaagctcgggcgcgtcgtggtcaaggaaggacagatggggagattctcctgtaaaatcactggccgaccacaaccccaagtaacgtggctgaagggcaacgtgccactgcagccaagtgcacgtgtgagcgtgtccgaaaaaaacggtatgcaggtgcttgaaatacatggtgttaaccaagacgacgtaggggtctatacatgtctagtcgtcaacgggagcgggaaagcaagcatgtctgctgaactctccatccagggcctcgattcagccaatagaagtttcgttagagaaacaaaggctacaaactccgatgtgcggaaggaggtaaccaacgtgattagtaaagaatcaaagctcgactccctcgaggccgcggcaaagagtaaaaattgctctagcccacagagaggtgggtcacctccttgggccgccaattcccagccccaaccaccaagggagagcaaactcgaaagctgcaaggattcaccacggacggccccccagacaccggtactacagaagacttcctcttcaatcaccctgcaggctgcaagggtccaacccgaaccaagggcccccggcttaggggtcttgtctccatccggtgaggagcgcaagcggccggccccaccaaggcccgccacctttcctactaggcagcctggactcggaagccaggacgtggtctccaaggccgccaacagacggattccgatggagggacaaagagactccgctttcccaaaattcgaatcaaagccccagtcccaggaagtaaaagaaaaccaaactgttaaattccgctgtgaggtgagtggaatacccaaacctgaggtcgcttggttcttagaagggactcccgtgagacggcaggagggctcaattgaggtgtacgaagacgctgggagccactacttgtgtttgctgaaggcccgcacacgcgattctggaacatacagttgcactgcgtcgaatgcccaagggcagttatcctgctcatggaccttgcaggtggagcgccttgcagtgatggaagtggcgccttccttttcatcagttctaaaggactgcgctgtcatcgaagggcaggatttcgtgctccagtgcagcgtgcgagggacccccgttccaaggattacatggctactgaacggtcagccaatccagtacgctaggtccacctgcgaagcaggggtggccgagctccacattcaggacgccctgcctgaggatcacgggacctatacctgtctcgccgagaacgcactcgggcaggtgagctgctctgcttgggtcactgtgcacgagaagaagagttcacgaaagagcgagtacctgctgcctgtggcaccctcaaagcccaccgcaccaattttcctacaggggctgtcagatcttaaggtgatggacggctcgcaggtaactatgacagtccaggtctcaggaaaccctccgcctgaagtaatttggctgcacaacggcaatgaaatccaagagtccgaagacttccactttgagcagcgtggtacacagcattccctttgcatccaggaggtgtttcccgaggacactgggacctatacctgcgaggcatggaattccgccggagaggttaggacgcaggctgtgttgaccgtccaagagccccatgatggtacccagccgtggttcattagcaaacctagatccgtcacagcttcgcttggccagtctgtgctcatctcctgcgccatcgctggtgatccattcccaaccgtgcattggttgagagatggtaaagccctgtgtaaagacacaggtcacttcgaggtactacagaacgaggacgtcttcacccttgtcttgaagaaggtacaaccttggcatgcaggacagtatgagatactcctgaagaacagggtcggagaatgtagctgtcaggtttcactcatgcttcagaacagcagtgcccgggctctccctcgaggcagagagcccgcgtcctgcgaagatctatgtggcggaggcgtgggagctgatggtgggggtagcgatcggtacggatccttgcgccctggatggcccgcgcggggacagggatggctcgaggaggaagatggggaagacgttcgaggagtgctgaaaagacgggtggagacccggcagcacactgaggaggctatccggcaacaggaggtcgagcagttggattttcgggatctcttgggaaagaaagtgtccacaaaaacattgtctgaggacgatctcaaagaaatccccgctgaacagatggattttcgcgccaatctgcagagacaggtcaagccaaaaacagtatccgaggaagaacggaaagtgcacagtcctcaacaggtcgattttagaagcgtgctggcaaaaaaaggaacatcgaaaactcccgtgcctgagaaagtgcctcccccaaaaccagccactcccgatttccggtctgtccttggaggaaaaaagaaactgcctgcagagaatggctctagcagcgccgaaacactgaatgcgaaggccgtagaatcgagtaaaccattgagcaatgcccaaccttctgggcccttaaagccagtcggaaacgctaaacccgctgagacactcaagcccatgggtaatgccaaaccagccgagacactcaagcctatgggcaatgccaaaccagacgagaacctgaaaagtgccagtaaggaagagctcaaaaaggatgtgaaaaacgatgtcaactgtaaacggggccacgccggaaccactgataatgaaaagagatcagagtcgcagggaacggctcccgccttcaaacagaagctccaagacgtgcatgtggcagagggcaagaaattactgctgcagtgtcaggtttcttccgacccaccagcaaccatcatctggactttgaatggaaaaaccctaaaaaccacgaagttcataatactgtcacaggaggggtccctgtgcagcgtgtctatagaaaaagctctgccggaagaccgtggtctgtacaagtgtgttgccaagaatgacgccggccaggctgaatgtagctgtcaggtaaccgtggatgacgcccccgctagcgaaaacaccaaagcgcccgaaatgaaatctcgcaggccaaagtctagcctgccccccgtgctcggcacggagtccgatgctactgtcaaaaagaaacccgctccaaaaacaccacccaaagcggccatgccgccacagattattcagttccccgaggaccaaaaagtgagggcgggagaatccgttgaattgttcggtaaggttacagggacacagccaatcacttgcacttggatgaaatttcgaaaacagatccaggaatccgagcacatgaaagtcgagaattcagaaaatggtagtaagctcacaattcttgccgctcgacaagagcactgtggttgttatacattactggtggagaataagcttggatctagacaggcccaggttaatctgacagttgttgataagcccgaccccccggccgggacaccatgcgcgtctgatattcgcagctcatccctcacactctcttggtacgggagcagctacgacgggggctctgcggtacaatcatactcgatagaaatatgggactcagcgaacaaaacatggaaagaacttgcaacatgcaggagcaccagcttcaatgttcaggacctcctgcccgatcacgaatacaaattcagagtcagggccattaatgtctacgggacctcagaaccttcacaggagagcgagcttaccactgtcggtgaaaaacccgaggagcctaaagacgaagttgaggttagcgatgacgatgaaaaggagccagaggtcgattacaggacggtgaccatcaatacagaacagaaagttagcgacttttacgacatcgaagagcggctcggctctgggaaatttggtcaggtctttaggctggttgaaaaaaagacacggaaagtgtgggcagggaaattctttaaggcctactcagcgaaagagaaggaaaacatccgccaagagatctcaatcatgaactgccttcatcatccaaagctcgtccagtgcgttgacgcattcgaggagaaggcgaacattgtgatggtcttagagatagttagcggcggcgagctgtttgaaagaatcattgacgaagatttcgagctgaccgagcgagaatgtatcaaatacatgcggcagatctctgagggcgtggagtacattcataaacagggaattgtgcatctagatcttaaacctgagaacataatgtgtgtcaacaaaactgggactcgcatcaagcttatcgatttcggcctggctaggaggctagaaaatgcaggcagtctgaaggttttgtttggcaccccggagtttgtggccccggaggtcatcaattacgagccaatcggctacgcgacggatatgtggtcaatcggggtaatttgctacatactgaatcggctggactgcacacaatgcttacagcatccgtggctcatgaaagataccaagaatatggaggctaagaagctatccaaagacagaatgaagaaatacatggcaagaagaaagtggcagaaaaccggcaacgctgtccgggccattgggcgactttctagtatggctatgatcagtgggctaagtggccggaagtcctccaccggctctcctacctcccccctgaacgctgagaagcttgaatcagaggaggacgtttcccaggcatttctcgaggctgtggccgaggaaaagccccacgttaaaccctactttagtaaaacaataagggatcttgaagtagtcgagggaagtgctgctagatttgactgtaaaatcgagggttaccccgaccccgaagtggtgtggtttaaagacgatcagtccattagagagagcagacactttcagattgactacgacgaagacgggaattgcagcttaattataagtgacgtatgcggtgatgatgacgcgaaatacacttgcaaagcggttaacagccttggagaagctacctgcacagccgaactaatagtggagacgatggaggaaggggaaggcgagggagaggaggaggaggaatag

SEQ ID NO: 25164 - DNA, 5745 bp, synthetic construct
  misc_feature 1..5745: note = Description of Artificial Sequence: Synthetic coding sequence
  source 1..5745: mol_type = other DNA
atgggcgacgtgaagctggtggccagcagccacatcagcaagaccagcctgagcgttgacccttccagagtggactccatgccactgactgaggcgcctgcctttattctccccccccgaaatctgtgtatcaaagaaggtgccaccgcaaaatttgaggggcgcgtcagagggtatcccgaaccccaggtaacatggcaccgcaacggacagccgataacgtctggaggcagatttctgctcgattgcggaattcggggaacattttctctggtgatccatgccgttcacgaagaggacagaggtaagtacacatgtgaggctaccaatgggagcggtgctcgacaggtcaccgtagaactgacagttgagggctcatttgctaaacaactcggccaacctgtggtcagcaaaacactaggcgatagattcagcgcccctgccgtagaaaccaggccctcaatttggggggagtgtccgcccaaatttgctactaagctgggaagggtggtcgtgaaggagggccagatgggccgctttagttgtaaaattactggacgcccgcagcctcaggttacttggctcaaaggaaacgtacctctacagccatcagcacgggtgagcgtcagtgagaaaaacgggatgcaggtgctcgagattcatggcgtgaaccaggatgacgttggcgtctatacctgtttggtggtaaatggctctgggaaggcctcgatgtcagcagagctctcaattcaaggcttggatagcgcaaatcgctcgtttgttagggaaacgaaggccaccaacagtgatgtgcgtaaggaggtaaccaacgttatttctaaggaaagcaaactcgattcccttgaggcggccgctaaatccaagaattgttcttccccccagcgaggcgggagtcctccatgggctgctaactctcagccacagcccccaagggagtcaaagctggaatcttgcaaagattcccctagaactgcgccccaaacccctgttctgcagaagacttcctcaagtattactttgcaagctgctagagttcagcctgaacccagggcgcctgggctcggcgtactttccccaagcggagaggaacggaaacgcccagctccccccaggcctgctacctttcccacacgtcagcctggacttggaagtcaggacgtcgtgtcaaaagccgctaaccgccggattccaatggaaggccagagggacagcgcttttcctaagttcgagtccaagccccagtcccaggaggtcaaggaaaaccaaacggtgaaattccgctgtgaggtgtccggcatccctaagccagaggtcgcttggttcttggagggcacacctgtccgtcggcaagaaggctcgattgaggtgtacgaggacgctgggagccactatttgtgtctccttaaggctaggacaagggatagtggtacttatagctgcacagcttccaatgcacagggccaactatcatgtagctggacactacaggtggagcgcttggccgttatggaagtggccccctctttctcttcagtgctgaaagattgtgccgtcattgagggccaggatttcgtcttacagtgttccgtgcgtgggacgccagtgccccgtatcacctggttgcttaatggccaacccatacagtatgccaggtcaacatgtgaagccggagtggccgagttgcatatccaggacgcactacctgaggaccatggtacctacacctgtctggccgagaatgcccttggccaggtcagctgcagcgcttgggttaccgtgcacgaaaagaagtccagtaggaaaagtgagtacctcctccccgtggcgcccagtaaaccgacagcccccatattcctgcagggcctttccgatctaaaggtaatggatggctcccaggtgactatgacggtccaggtatctggtaatccccctcctgaggtgatatggctacataacggcaacgagatccaggagtctgaggactttcactttgaacagagaggcactcagcatagtctgtgcatacaagaagtgtttccggaggataccggcacatacacctgtgaagcttggaactcagcaggagaggtcagaacacaggctgtcctcaccgtgcaggagccgcacgacggaacacaaccgtggtttatctccaagcctagatccgtgaccgcttccctgggccaatctgttctcatctcgtgtgcaatcgccggggatccttttccgactgtacactggttaagggatgggaaggcactgtgcaaagatacgggacattttgaggtgctgcagaacgaggacgtgttcacactggttttgaagaaggtccaaccctggcatgcggggcagtatgagattctgctaaagaaccgtgtcggtgagtgtagctgccaggtgtccttaatgctgcagaactcctcagctcgagcactaccccggggcagggagcctgccagctgcgaggatctgtgtgggggcggggttggagctgacggcggcggatcggacagatatgggagcctgaggccaggttggcctgctagggggcaggggtggctggaagaagaagacggggaggatgttcgaggggtgctcaaaaggagagtggagactaggcagcatacagaggaggcaataagacagcaggaagtggagcaactggattttcgggatctgctgggaaagaaggtttctacaaagactctgtcagaggacgacctgaaagagattccagccgaacagatggacttcagagccaatctgcagagacaggtaaagcccaaaactgtgtccgaggaggaaagaaaggtgcattccccccaacaggtcgattttaggagtgttcttgcaaaaaaaggtacaagcaagacaccagttcccgaaaaggtgccaccacctaagcctgccaccccagactttcgctccgtactgggggggaaaaagaagcttccagccgagaatggcagcagcagcgccgagaccctgaatgccaaggctgtcgagagctctaagcctctaagcaatgcccagcctagtgggcctttgaaacctgttggaaatgcgaagcccgcggaaactttgaagcccatgggtaatgcaaagccagccgagactcttaaaccaatgggtaacgccaagccagacgaaaatcttaagagtgcgtctaaggaggaactcaaaaaggacgtgaagaacgatgtcaactgtaagcgagggcatgctggaacaaccgataacgagaaaagatcagagtcgcagggcacagctcctgcgtttaagcagaaacttcaggacgtccatgtggctgagggcaagaagctactgttgcaatgccaggtaagcagcgacccgcccgctactatcatatggactttgaatggcaaaacactgaaaaccacaaagtttatcatcctcagtcaggagggcagcctgtgttcggtgtccatagagaaagctctccctgaggatcgaggcctgtacaagtgcgttgctaagaacgatgccggacaggctgagtgttcttgccaggtcaccgtggatgacgcaccagcttctgagaataccaaggcaccagaaatgaagtcccgccggccaaaatctagcttgccccccgtgctgggaaccgagtccgatgcaaccgtgaagaagaaaccggcacctaagacacctcccaaggcggcaatgcctccccagattatccagtttccggaagatcaaaaagtacgagccggcgaaagcgtggagctgttcggaaaggtcaccggaacacaaccaataacctgtacctggatgaagtttcggaaacaaattcaggagagtgaacacatgaaagtggagaatagtgagaacggctcaaagctcacaatcttggcagccaggcaggagcattgtggatgctacactcttcttgtggaaaacaagctaggatctcgtcaggcccaggtgaatctcacggtggtcgacaagccagatcccccggccgggacaccgtgcgcgtctgacatccgttcctctagcctgaccctgtcttggtacgggtcatcatacgatggcggctctgcagtccagagctactctatcgaaatctgggattctgcaaataaaacatggaaggaactggccacatgcagatctactagctttaatgtacaggacctgttgcccgaccacgagtataagtttagggtgcgggccatcaatgtgtatgggacgagcgaacctagtcaagagtctgaacttacaaccgttggtgagaaacccgaggagcctaaagacgaggtggaggtgtccgacgatgatgagaaagagccagaggtagattatagaactgtcacaattaatacagagcagaaggtctccgatttttacgacattgaggagcgcttgggctctggtaaattcggtcaagtatttaggctagtcgagaaaaaaactaggaaagtgtgggccggcaagttctttaaggcttactctgccaaggaaaaggaaaatattaggcaagagattagtataatgaattgtctacaccatcccaagctggttcagtgtgttgatgccttcgaggaaaaggcgaacattgtgatggttctggagatcgtgagcggcggggagctctttgagaggatcattgatgaagatttcgagctcacagaaagggaatgcattaaatacatgcggcagataagtgaaggtgtcgaatacatacacaagcagggcattgtgcacctggatctgaaacccgaaaatataatgtgtgttaacaagacgggcacacggattaagctgatcgacttcggcttggcccgaaggctcgaaaatgcagggagtctgaaggtcttgttcgggacccccgaatttgtcgctcccgaggtcattaactacgaacccatcggctacgccacagacatgtggtctattggggtaatctgttatatcttggtgagtggcctgagcccatttatgggggataatgacaacgaaaccttggccaatgttacctcagccacctgggacttcgatgacgaagccttcgacgagatctccgacgatgcgaaggatttcatatcaaatctcctgaagaaggacatgaagaatcgtctcgattgcacccaatgtctgcaacacccctggctgatgaaggatactaaaaatatggaggcaaagaaactgtcaaaagatagaatgaagaagtacatggcaagaagaaagtggcaaaagaccggcaatgcagtgagggctatcggacgcctgagctccatggccatgatctcaggcttgtccgggcgcaaatcctccacaggcagtcccacctcccctctaaatgctgaaaagctggaaagcgaggaggatgtgagccaggcctttctggaagcggttgccgaagagaaacctcacgtgaaaccttacttctctaaaacaattagggatctggaggtcgtggaagggtctgcagcgcggtttgactgtaagatagaagggtacccggatcctgaggtagtgtggtttaaggacgatcagtccatccgggagtcaagacacttccagatcgactacgacgaggacggtaattgctcactgatcattagtgatgtgtgcggcgatgatgatgctaaatacacctgcaaggctgttaatagcctgggagaagccacttgcactgccgaactgatcgtagagacaatggaagaaggtgaaggggagggggaggaggaagaagaatag

SEQ ID NO: 25165 - DNA, 231 bp, synthetic construct
  misc_feature 1..231: note = Description of Artificial Sequence: Synthetic coding sequence
  source 1..231: mol_type = other DNA
atgggcgacgtgaagctggtggccagcagccacatcagcaagacctcactcagcgtcgatccctcccgagtggactcaatgcctctcactgaggcgcccgctttcattctgcctccaaggaacctgtgtatcaaagagggagcaaccgctaagttcgagggccgggtaaggggctaccccgagccgcaggtcacctggcaccggaacgggcagcccattacgtccgggtag

SEQ ID NO: 25166 - DNA, 5592 bp, synthetic construct
  misc_feature 1..5592: note = Description of Artificial Sequence: Synthetic coding sequence
  source 1..5592: mol_type = other DNA
atgggcgacgtgaagctggtggccagcagccacatcagcaagaccagtctgagcgtggacccctctcgcgtggactctatgcccctgaccgaggccccagctttcatcctaccccctaggaatttatgtattaaggaaggtgcgacagcaaagtttgagggccgtgttcgcgggtatcctgagccccaagtcacctggcatcggaatggtcagccaatcacaagcggcggaagattcctgctggattgcggtattcggggcaccttcagcctggttatccatgctgttcacgaggaggaccgggggaagtacacttgcgaagcaacaaatggcagcggagctcgccaggtaacagttgaactcacagtcgagggctcattcgccaagcagttaggccagcctgtggtgtccaagacactgggggatcgattctctgccccagctgtcgagacccgaccaagcatttggggcgagtgcccgcctaagtttgcaacgaagttaggaagagtagtggttaaagagggtcagatgggccggttttcttgcaaaatcaccggcagacctcagccgcaggtgacttggcttaagggaaacgtgcccttgcagccctccgctagggtgagcgtaagcgaaaaaaatgggatgcaggtgcttgagatccacggcgtaaatcaagacgatgtgggcgtctacacctgccttgttgtgaatggatccggcaaggcatctatgtccgccgagttgtctattcaagggctggattcagccaaccgaagcttcgtgcgggagacaaaagcaacaaatagcgacgtccggaaagaggtcaccaatgtaatttctaaggaatcaaagcttgacagcctggaagcagctgctaagagcaagaactgctcctccccacagagaggcggatcccccccttgggctgctaatagtcaaccacagccccctagagaatccaaattggagtcctgtaaagatagcccacggaccgctcctcagacgcccgtgctgcagaagacctcctcctcaatcacactccaggcagctcgggtacagcctgagccaagagcccccggcctcggcgtgttaagcccctccggagaagagcggaagcggccagccccacctcggccagccacctttcctacgcggcagccaggcctgggttctcaggatgtggtctcaaaggccgcgaataggaggattcccatggagggccagcgagattccgcttttcctaagttcgagagcaagccccaatctcaggaggtgaaggaaaaccaaacggtaaaattccgatgtgaagtgagtggtatccctaagcccgaggtagcctggttcctggaaggaactcccgtgcgccgacaagaggggtccattgaggtctatgaggatgccgggtcacattacctgtgtctgctgaaagctcggacacgggactctggcacatatagctgtaccgcatccaatgcccagggccaactctcttgtagttggacacttcaggtcgaaaggctcgccgtgatggaagtggctccaagcttttccagtgtgctgaaggactgcgctgtgattgagggccaggactttgtcttgcagtgcagcgtgagaggtactcccgtgccacggattacctggctgctgaatggccagcctatccagtatgcccgttccacctgtgaagcaggcgtcgcagagcttcatatacaggacgcgttgcctgaggaccatggaacctatacgtgtctcgcagaaaacgcacttgggcaggtttcgtgcagcgcctgggttacagtacatgagaaaaagtcctctcgaaaatccgaatacctgctcccagttgcccccagtaagccaacagcaccgatcttcctccagggcctctctgacctaaaggtgatggatggatctcaagtaactatgacagtccaggtctccggaaacccgccgcctgaggtcatctggctccacaatggcaatgaaattcaggaatctgaggacttccacttcgagcagagggggacccagcacagcctctgcatccaggaggtgttccccgaagacacaggaacctacacctgtgaagcatggaacagcgcgggtgaagttagaactcaggctgtgctcacagtgcaagaacctcacgacggcacacagccctggttcatttccaaaccacgctctgttaccgcatctctcggccaaagcgtgctcatctcctgcgctattgccggcgatcctttccctactgtccattggctaagagacgggaaggccttgtgcaaggacaccgggcatttcgaagtgttacagaatgaagacgtcttcactctggtactcaagaaagtccaaccatggcacgccgggcagtacgaaatcctcctgaagaatagagtcggggaatgctcttgccaggtgagtctgatgctgcaaaactctagtgcgcgcgcgctccccagagggagggagcctgcctcttgcgaagatttgtgcggtggaggagttggggccgacggtggaggctcagatagatacggcagcctgaggcccggatggcctgctagagggcaaggctggctggaagaggaggatggggaggacgtgaggggcgtgttgaagaggagagtggagacccgacaacatacagaagaggcaatccggcaacaggaggtggagcagctagattttagagaccttctggggaagaaagtctcaaccaaaacactatccgaggatgacttaaaggaaattccggcagagcagatggatttccgggccaatttacagaggcaagtgaagccaaagactgtgagcgaggaggagcgtaaggtgcacagcccacaacaggtggactttaggtctgtcctagctaaaaaaggaacgagcaaaactccggtgcccgagaaagttccaccaccaaagcctgcaacacccgactttcgttccgttctcggagggaaaaaaaaactaccggccgaaaacggcagctcttctgccgaaactctgaatgccaaggctgtggagtcctctaaaccactatctaacgcccaaccctctggacccttaaaacccgtcggcaatgcgaagcctgccgaaacactgaaacctatggggaatgcaaagcctgccgaaactctgaagcctatgggcaacgcaaagcctgatgagaacctcaagtccgcctccaaagaggagttgaagaaagatgtgaagaacgatgtgaactgtaagcgaggacatgcaggcaccaccgataatgagaagcggagcgagagtcagggcacagcccctgcttttaagcagaaactacaggacgtgcacgtggcagagggcaaaaaactccttctgcaatgtcaggtgtcttctgatccaccagcaaccatcatttggactttgaatggcaagacacttaaaaccacaaaattcatcatcctgtcccaagagggcagcctgtgcagcgtgagcattgaaaaagcgttgccagaggaccgaggcctgtataaatgtgtcgctaagaatgacgctggccaagctgaatgctcctgtcaggtgacagtggatgacgctcccgcctcagaaaatacaaaggcacctgagatgaagtcaagacgtcccaagtcttcactgcctcccgtccttggaaccgagagcgacgcaaccgtgaaaaagaagccagcacccaagaccccgccaaaggctgccatgccccctcagatcatccaattccccgaggaccagaaagtgcgggccggcgagagcgtggaactgttcggcaaagttactggtactcaacctattacatgtacttggatgaagttccggaagcaaattcaggaaagtgaacacatgaaagtcgaaaactccgaaaacggcagcaagctaaccatactggccgctcgtcaagagcactgcgggtgctacactttgcttgtcgaaaataagttggggagtaggcaggcccaagtcaatcttactgttgtggataaacctgacccccctgcgggaaccccatgtgcttccgacatccgctcaagctctttaaccctctcgtggtacggttcctcctatgatggaggtagtgccgtgcagtcttacagtatcgagatttgggatagtgctaacaaaacatggaaggaactggccacatgccggagcacgagctttaatgtccaggaccttctacccgatcacgagtacaaatttagggtgcgggcaattaacgtgtatggtacctcggaacccagtcaggaatccgagttgacgaccgtgggcgaaaaacctgaagagcctaaggatgaggttgaggtgtcagatgatgacgagaaagagccagaggtggactatcggacggtcactattaatacagagcagaaggtgtctgatttttatgatattgaggagcgtctgggcagtgggaagtttggccaagtgtttaggctcgtggagaagaagactcggaaggtttgggcaggaaagttctttaaggcctactccgccaaggaaaaggaaaacattcggcaagaaatcagtattatgaactgcctgcaccaccccaagctggtccagtgcgttgacgctttcgaggaaaaggccaacatcgtgatggtcctggagattgtatccggaggagagctttttgaaaggattatcgatgaggattttgagctgactgaacgagagtgtattaagtatatgaggcaaatcagcgaaggcgtggagtatattcacaagcaagggattgtccacctggatctaaagcctgaaaacatcatgtgtgtaaacaagactgggactagaataaagcttattgatttcggtctagccaggcgactcgagaatgccgggtccctgaaagtgttgtttgggacacctgagttcgttgcccccgaggttatcaactatgagcctatcggctacgctacagatatgtggtctattggcgtgatatgttacatcctgaaccgacttgactgtacgcagtgcctgcagcatccatggctgatgaaggatacaaaaaatatggaggccaagaagctctccaaggatcggatgaagaaatacatggccagaaggaagtggcagaaaaccggtaatgcagttcgtgcaatcggccggctatcctcaatggctatgatctccggactgtccggccgcaagtcatcaacaggttctcctacatccccactgaatgccgagaagcttgagtctgaggaagacgtttctcaggcttttctggaggccgtcgccgaggagaagcctcacgtgaagccctacttcagtaaaaccatacgggatctggaggtggttgaagggtctgcagctcgctttgactgtaaaatagagggataccctgaccctgaagtcgtatggttcaaagacgatcagtccattcgcgagagcagacattttcagatcgattatgacgaggacggaaattgttccctgattattagcgacgtgtgtggggacgatgacgccaagtacacttgcaaagccgttaactccttgggcgaggccacctgcacagccgagttgattgtagagaccatggaggaaggcgaaggtgaaggggaggaggaagaggagtag

SEQ ID NO: 25167 - DNA, 465 bp, synthetic construct
  misc_feature 1..465: note = Description of Artificial Sequence: Synthetic coding sequence
  source 1..465: mol_type = other DNA
atggccatgatcagcggcctgagcggccggaagagcagcaccggctctccgacctctccgctcaacgccgagaaactggagtccgaggaagatgtgtcccaggcctttctggaagctgtggctgaggaaaagccacacgtgaagccatacttctcaaaaactatcagagaccttgaagtagtcgagggcagcgcggcgcggtttgattgtaaaattgaagggtatcccgatccagaggtcgtctggtttaaagatgaccaatccatccgggagagtcgccacttccagattgattacgacgaggatggcaactgcagcctcatcatctccgatgtgtgcggcgatgacgacgccaagtacacgtgcaaggccgtgaactccttaggagaggcaacatgcaccgcagagttgatcgtagaaactatggaggagggagagggcgagggagaggaagaggaggaatag

SEQ ID NO: 25168 - DNA, 5745 bp, synthetic construct
  misc_feature 1..5745: note = Description of Artificial Sequence: Synthetic coding sequence
  source 1..5745: mol_type = other DNA
atgggcgacgtgaagctggtggccagcagccacatcagcaagacctcactgagtgtggacccaagtcgagtggatagcatgccgctaactgaggcccccgcattcatcttgcctccccggaatttatgtattaaggagggggctaccgccaaatttgaaggaagggtgagaggttaccctgagccccaggtcacctggcatagaaacgggcagcctattacctccgggggtcgcttcttgctcgactgcggcataagggggaccttttctttagtcatacacgccgtgcacgaagaggatagagggaaatatacctgcgaagcaacgaatggctccggggcacgccaggtgactgtagagctcacagtggagggttctttcgctaagcagcttggacagcctgtcgttagcaagactctgggcgaccggtttagcgctccagccgtggaaacccggcccagcatctggggggagtgtccacccaagtttgctaccaagctgggccgggtcgttgtgaaggagggccaaatgggcaggttttcatgcaaaatcacgggtaggccccagcctcaggtgacttggctaaaaggtaatgtgccgttacaacccagtgcgagggtcagcgtctcagagaagaatggaatgcaagtgctggagatccacggcgttaatcaggatgatgtgggggtttatacttgcctagtggttaatggttccggcaaggccagcatgagcgctgaattgagcatccaggggctggacagtgccaatcgatcatttgtacgggaaacaaaggccactaacagcgacgtgaggaaggaggtcacaaatgttatttccaaggagtcaaagctggactctttagaagccgccgccaagagtaagaactgttcttcaccacagcgcggagggagtccaccatgggccgccaattctcaaccacagcctccaagagaaagcaaactggagtcctgcaaagacagtccaagaaccgctccccagacaccagtgctgcagaagacaagctccagcattactttgcaggccgcgcgggtgcagcccgagccacgggccccagggctcggagtgttgtcgcctagcggcgaagagcggaagagacccgctccgccacggcctgccacgtttcccaccagacagccagggctggggtcccaggacgtcgtatcaaaggctgcaaataggaggatccctatggagggccagcgagacagcgcctttcctaaattcgagagtaagccccagagtcaggaggtgaaagagaaccagactgtgaaattcagatgtgaggtgtccggtattcctaagcccgaggtagcctggtttttggaaggcacacccgttaggaggcaggagggttcaatcgaggtatacgaagatgcgggcagtcactacctctgtctgctgaaagcgcggacacgtgacagtggcacctatagttgcacggcgtcaaatgcccagggtcaactgtcttgcagctggacacttcaagtggagcgtctagccgtcatggaggtggctccatcattttcatccgtattaaaagactgcgccgtgattgaaggccaggattttgttctgcagtgcagcgtccggggcaccccggtgccgaggattacctggctcctgaacgggcagcccattcaatatgcgcggagcacctgtgaggcgggtgtggccgaacttcatatccaggatgcactgcctgaagaccacggcacatacacttgtcttgcggagaatgcattgggacaggtgagttgttctgcctgggttacagtgcacgaaaagaaatcctcacggaaaagcgagtatcttctgccggtagcaccttccaagcccaccgctccaattttcctgcagggattgtcagacctgaaggtgatggatgggagtcaggtgacaatgacggtccaggtttccggtaacccccctcctgaagtaatatggctccataacggtaatgaaattcaagagtccgaagatttccacttcgaacagaggggcacccagcattcgctctgcatccaggaggtgtttccagaggacaccgggacctatacatgtgaggcatggaattcggcaggcgaagtccggacccaagccgtcctcactgtccaggaacctcacgatggcacccagccttggttcatttccaagcctagatctgtcaccgcaagcttgggccagtcagtccttatctcttgtgccatcgctggagatccatttccaaccgtccattggctgcgggacggaaaggcgctatgcaaggataccgggcactttgaagtgcttcagaatgaggacgtgtttaccctcgtattgaagaaggtccagccatggcacgccgggcagtatgagattctgttaaagaatagagttggagagtgcagctgtcaggtgtcactaatgctccaaaactccagcgcgagggccctgccccgcggcagagagccggcaagttgtgaagacctttgtggcggaggcgtgggggccgacgggggcggctctgatagatacggcagtttaagaccaggttggcccgccaggggacagggatggctagaagaggaagatggtgaggacgtgagaggggtgctgaaacgccgcgtggagaccagacagcacaccgaagaagcaatccgccaacaggaggtggagcagttagatttccgagatctgctgggaaagaaggtctccactaaaacactcagcgaagacgatctgaaagagattcctgccgaacaaatggatttccgcgctaatctgcagaggcaggtaaagccgaaaaccgtgtccgaagaagagcggaaagtgcattcgcctcaacaggttgacttcagaagtgtgctggccaagaagggcacaagcaaaactccagtgcctgaaaaagtgccaccgcctaaaccagcaactcccgactttcgctccgttctgggcggaaaaaagaagctgcctgctgagaatggcagctcaagcgccgagacactgaacgccaaggcagtggagtcgagcaaaccactgagtaatgctcagccttcagggcctttgaagccagttggcaatgcgaagcccgcagagacacttaaacctatgggtaatgccaagcctgccgaaacgttaaagcctatgggaaacgctaagcccgatgagaacttgaaaagcgccagtaaggaagaactaaaaaaagatgtgaaaaacgatgtcaattgtaagaggggccacgcaggaacgactgataacgaaaaaaggtctgagtcccagggaactgcacccgcctttaagcaaaaattgcaggatgtgcacgttgccgagggaaagaagctgctgctgcaatgtcaggtgtcttctgaccccccggccactataatttggacccttaatgggaagacactcaaaaccacaaaattcattatcctatcccaagagggatccctttgttctgtgtccatcgaaaaagcccttcccgaagatcgcggtctgtacaagtgcgttgctaagaatgatgcaggacaggctgagtgctcatgccaagtcacagtggatgatgccccagcttctgagaataccaaagcccctgagatgaaatcacgacgaccaaagagcagtctccctcccgttttgggcacggaatctgatgctacagtgaagaagaaacccgccccgaaaacccctcccaaggccgccatgccaccacaaattatacaattcccagaggaccagaaggtccgtgcaggagaaagtgtggaactttttggaaaggtgactggcacccagcccatcacatgtacctggatgaagttccggaaacagatccaggagtccgaacacatgaaggttgagaattcagaaaacgggtctaagctcaccattcttgctgcaaggcaggaacactgcgggtgttatacattactggttgaaaacaaattaggcagccgccaagctcaagtcaacctcactgtggtggacaagcctgatcctcccgcaggcacaccctgcgcttctgatattaggtcctcatctcttactctgtcctggtacggttcaagctacgatggaggtagcgctgtacaatcatattctatcgagatctgggacagcgcgaacaaaacgtggaaggaactcgctacctgtcgtagcacatcctttaatgtgcaggatctactcccggatcatgagtacaagttccgcgttcgcgccattaatgtctacggaacaagcgagccctctcaagagtctgaactcaccaccgtgggcgagaagccggaagaacccaaggatgaggtcgaggtaagcgacgacgacgaaaaagagccagaggttgactatcgaacggtgaccatcaacactgaacagaaggtttctgatttctatgatatcgaagaacggttgggtagtggtaagttcgggcaggtatttcgtctggtggagaagaagacacggaaagtgtgggccgggaagtttttcaaggcctacagcgcaaaggaaaaagagaatatcagacaggagatatccataatgaactgtctgcaccatccgaaattggtacagtgcgtcgatgctttcgaggaaaaagctaatatcgtgatggtcctcgagattgtaagtggcggggagttattcgaacggataattgacgaagacttcgagcttaccgagagagagtgcatcaagtatatgcggcaaattagcgaaggcgttgaatatatccataagcagggcatcgtccacctggaccttaaaccagaaaacatcatgtgtgtaaacaagactgggactcgtattaagctgatcgacttcgggctcgctaggcgcctggagaacgctggctcactaaaagtgcttttcgggacgcctgagtttgtggctcctgaggtcatcaactatgagcccattggatatgccactgacatgtggagtataggcgtgatctgttacatcctggtcagcggcctgagccccttcatgggcgacaatgacaatgagactctcgccaacgtgacctccgcaacatgggacttcgatgatgaggccttcgacgagatcagtgacgatgccaaagatttcatttccaacttattaaagaaagatatgaagaaccgcctcgactgcacccagtgcttgcaacatccgtggctgatgaaggacaccaaaaacatggaagccaaaaagctgtccaaggaccgaatgaaaaagtacatggccaggaggaaatggcagaagactgggaacgccgtgcgtgctataggtcgactgtcttcaatggcaatgatctctggtctatcaggtcgaaagagttccactggaagccctacctcacctctcaacgctgagaagttagaaagcgaagaagatgtaagccaagcattcttggaagcggtggctgaagagaagcctcacgttaaaccatactttagcaagacaatccgagacctcgaggttgtagaaggatcggctgcacggtttgactgtaagattgagggataccctgacccggaggtcgtttggtttaaggatgaccagtcaatccgggagagccgtcacttccagatcgactacgatgaagacggcaattgcagcctgattatcagcgacgtgtgcggagacgatgacgcgaaatacacatgcaaggctgttaatagcctgggcgaggcaacctgcaccgcagagctgatcgttgagacaatggaggagggagagggcgagggtgaagaggaagaagagtag

SEQ ID NO: 25169 - DNA, 5931 bp, synthetic construct
  misc_feature 1..5931: note = Description of Artificial Sequence: Synthetic coding sequence
  source 1..5931: mol_type = other DNA
atggcccagcggaccggcctggaggaccccgagcggtacctgttcgtagatagagccgtcatctataatcctgctacacaggccgactggactgccaaaaaacttgtctggatcccttccgagcgccacggcttcgaggccgcatccatcaaagaagagcgaggtgacgaggttatggtagagctcgctgagaacggcaagaaggccatggtgaataaggatgacattcagaagatgaaccccccaaaattcagcaaggttgaggacatggccgagctgacctgtttgaacgaggctagtgtactgcataacctgaaggaccgatactatagtggactaatttacacttatagcggtttattttgcgtggttataaatccttacaagaaccttcccatctacagcgaaaacattatcgagatgtatcggggaaaaaagcgccacgagatgccccctcatatttatgctatctccgaatcagcttatcggtgtatgctacaagatagagaggatcaatccattctgtgtacaggggagtcaggcgccgggaagactgagaataccaaaaaggttattcagtacctcgctcatgtggcttcatcacataaaggtagaaaagaccacaatattccaggggagctggaacgccagctgctgcaggcaaatccgatcctagaatcgttcggcaacgctaaaactgtgaaaaatgacaattcgagtagatttggcaagttcattcggatcaacttcgacgtcactgggtacattgttggggccaacatagaaacctatctgctcgagaagtccagggctgtccggcaggccaaggatgagcgaacattccatattttctatcagctactctcaggggcgggggagcacctgaagtcagacctgttgctggagggattcaataactaccgattcctgtctaacgggtacattcccatcccaggtcaacaggacaaggataactttcaggagacgatggaggctatgcatataatgggcttctctcacgaggaaatactctccatgctcaaggtggtcagtagcgtgttacagttcggcaatatcagcttcaagaaggaacgaaacaccgatcaagctagtatgccagagaataccgtggcacaaaagctgtgtcacctgctcgggatgaacgtcatggagtttacacgcgcaatcttaacaccacgcatcaaggtcggacgggactacgtgcagaaggcccagactaaggaacaggctgacttcgccgtggaggctctggctaaggcaacgtacgaaaggctgttcaggtggctggtgcatagaatcaataaagcgctcgacagaacaaagcggcagggagcatcgtttatcggcattctggatatagcaggtttcgaaatcttcgagctgaattctttcgagcagctatgtatcaattatacgaatgaaaagttgcagcaactcttcaaccacaccatgttcatcttagaacaggaagagtaccaaagagaagggatagaatggaatttcatcgactttggcttagatcttcagccttgcattgatctgatagagaggccagctaatcctccaggggtgctcgctctcctcgatgaagagtgttggtttcctaaagccactgataagacgttcgtggagaaacttgtgcaggaacagggctcccatagtaaattccagaagcctcgccagctcaaggacaaagcggacttctgcatcattcattacgccggaaaggtggactataaagcagacgagtggctgatgaaaaacatggacccattaaatgataatgtggccacgttgctccaccagtcaagtgatcggttcgttgccgagttatggaaggatgtggatcgcatagtaggtttggatcaggtaacaggcatgactgaaactgccttcggcagcgcttacaagactaagaagggcatgttccgcacggttggacagctgtataaagagtccctcaccaagttaatggcaacattacgtaacacaaatccgaactttgtgcggtgcatcatccccaatcatgaaaagcgtgctggtaaactggatcctcacttagtcttggaccagcttagatgtaacggggtgctcgagggtatccggatttgccgacagggctttcctaaccgcatcgtgttccaagaatttaggcagcgctacgaaattctcactccaaacgctatccccaaaggcttcatggatggcaagcaggcttgcgagcgaatgattcgagccctcgagctggaccccaacctgtaccgcattgggcagtctaagattttcttcagggccggagttttagctcacctggaggaggagcgcgacctgaagatcacagatatcattatcttcttccaggcagtatgccgcggttacctggcccgcaaagcgtttgctaaaaaacagcagcagttgagcgctttaaaagtgctacaacggaattgtgccgcctatttgaagcttagacattggcaatggtggagagtatttaccaaagttaaaccactcctgcaggtgacacggcaggaggaggagcttcaggctaaggatgaagagctgctcaaggtgaaggagaagcaaaccaaggtggaaggagaactcgaggaaatggagcggaagcatcagcagctgctggaggagaaaaacatcctggctgagcagttgcaggccgagacagaactatttgccgaggccgaagagatgcgggcccggctagccgcgaagaaacaggaactcgaggagatcttgcacgacctagagtccagggtagaggaagaggaagaacgcaaccagattctacagaacgagaaaaagaagatgcaggcccatatccaagatctcgaggagcaattagacgaagaagaaggagctaggcagaagttgcaactggaaaaagttactgctgaagccaagattaagaaaatggaagaagagatcctgctactggaggatcaaaatagcaagttcattaaagagaaaaaacttatggaagaccgcatagcagagtgctcctcccaactggcagaagaagaggagaaagctaaaaacctggctaagataagaaataagcaggaagtgatgatctccgatcttgaagagcggctaaagaaggaagagaagacaagacaagagctggagaaggctaagcgcaaattggatggcgaaacaacagacctgcaggaccagattgcagagctgcaggcccagatcgacgagttgaaattacagctcgccaagaaagaagaagaacttcagggcgctctggccagaggggacgacgagactcttcataagaataatgccctgaaagttgtccgggaactgcaggcacaaattgccgaactacaggaggatttcgagtcggaaaaggcatcacgaaacaaggccgaaaaacagaagagggacttatctgaggagctagaggctctcaagactgagctggaagacacgctggacacaactgccgctcagcaggagctccgcaccaagcgcgagcaggaggtggcggaacttaaaaaggccttggaagaggagaccaaaaatcacgaagcacagatccaggatatgagacagcgccacgccaccgcactggaagagctcagtgaacagcttgaacaggctaagcgattcaaggccaacctcgagaagaataagcaagggcttgagacggataataaagagctggcctgtgaagtcaaagtccttcaacaggttaaggcagagagcgaacacaaaagaaaaaagcttgacgctcaggtgcaggagttacacgctaaagtcagtgagggcgatcgtcttcgcgtcgaactagcagaaaaggcttcaaagttgcaaaatgagctagacaatgtaagtactctgctggaagaggccgagaaaaagggcattaaattcgccaaggatgccgcctctctggaaagtcagttgcaagatacacaggagctgctgcaggaagaaaccagacaaaaactgaacctttcaagcagaattcgacagcttgaagaggagaagaacagcctccaggagcagcaagaggaggaagaggaggcccggaagaacctggaaaaacaggtgcttgctctccagtcacagcttgccgatactaagaagaaagtggacgatgatctgggtacaatcgagtctctggaggaggcaaagaagaaactgctgaaggacgccgaggctctatcacagcggctggaagaaaaagccctggcatacgataaactcgagaagaccaaaaatcgcctacaacaggagttggatgacttaactgtcgaccttgatcatcaaaggcaagttgcaagcaacttggagaagaaacagaagaagttcgaccagctgttagctgaggaaaagtccatcagcgctaggtatgcagaagaacgtgacagggccgaggccgaagccagggagaaggagaccaaagcactgtcactggcccgcgcacttgaggaagccctcgaggccaaggaagagtttgagaggcagaataagcagcttcgtgccgacatggaggacctgatgtctagcaaggacgacgtggggaaaaatgtgcacgaactcgaaaagtcaaagcgtgcactggaacagcaggtcgaggaaatgcgtacacagctcgaggagctggaagacgagctccaagccaccgaggatgccaaactgagattagaggtgaatatgcaggccatgaaggcccaattcgagagggatctgcaaactcgggacgagcagaacgaagaaaagaagcggctgctgataaagcaggttcgggagctggaagccgagctcgaggatgagaggaaacagcgagccttggccgtggcatccaaaaagaagatggaaatcgatctcaaagatttagaggcccagatagaagccgcgaacaaggcgagagacgaagtgattaagcagctgaggaagctccaggcgcagatgaaagattaccagagggagctcgaggaagcgagagcttcccgggatgaaatatttgcacagtctaaggaatccgaaaagaagttgaagtcactagaagcggagatactccagttgcaagaggagctggcatcaagcgagagggcacgcagacatgcggaacaggagcgggacgagcttgctgacgagatcaccaacagtgcctctggaaaatcagcgttactcgacgagaagcgtaggctcgaggcacgaatagcacagttggaggaggagctcgaggaggagcaaagtaatatggagcttctaaatgacagatttaggaagactaccctgcaggtggataccctgaatgccgaattggccgccgagcgttctgcagctcagaaaagtgataacgcccgacaacagttggagagacagaataaggaactgaaggccaaattacaggagctggaaggagctgttaagtccaagttcaaggcaactataagcgctcttgaggccaagattggtcagttggaggagcaactcgagcaggaagctaaggagagagctgcggccaacaagttggtgcgcagaaccgaaaagaaattaaaagaaatttttatgcaagtggaagacgagaggcggcacgccgatcaatataaagaacagatggagaaggctaatgccagaatgaaacagcttaagcgccagctcgaagaggcagaagaggaagctacccgagccaatgcttccaggagaaaactgcaaagagaactggacgacgctacagaggctaatgaaggactttcacgagaggttagtaccctgaaaaatcgcttgcgcagaggaggcccaatttctttcagctctagccgctctggtaggcgtcagcttcatctggagggagcctctctcgaactgtctgacgacgatactgagagcaaaacaagcgatgttaacgagactcagcctcctcaaagtgaatag

SEQ ID NO: 25170 - DNA, 6024 bp, synthetic construct
  misc_feature 1..6024: note = Description of Artificial Sequence: Synthetic coding sequence
  source 1..6024: mol_type = other DNA
atggcccagcggaccggcctggaggaccccgagcggtacctgttcgtcgatcgcgccgtcatttataaccctgccactcaggcggattggacagccaagaagcttgtttggattcccagtgagagacacggttttgaggccgcaagcattaaagaagaaagaggtgatgaggtgatggttgaactcgctgaaaatgggaaaaaagctatggtcaacaaagacgatatccagaaaatgaatcccccaaagttttccaaggtggaggacatggcggagttaacttgcttgaatgaagccagcgtgttacataatttgaaggatagatattactctggcctgatctatacctatagtgggctgttttgtgtggtgattaacccctataagaacctgcccatttactccgagaatattatagaaatgtaccgcggaaaaaaaagacacgaaatgccccctcatatttatgcgatttcagagtcagcctatcgctgtatgttgcaggatcgggaggatcagtcaatcctgtgcactggcgaatcaggtgcaggtaaaaccgagaataccaaaaaggtgatccaatacttagcacatgtagcatccagtcacaaagggaggaaggaccataacattcctcaggagagtcctaagcctgtgaaacatcagggtgagctggaacgccagctgctccaggctaaccccatactagaatcattcggcaacgctaaaacagtgaagaatgacaactcaagtcgcttcgggaaatttatccggataaatttcgacgtcactgggtatatcgttggcgcaaatatcgagacgtacttgctagagaaatcacgggctgtgcgtcaggccaaagatgagagaacattccacatcttctaccagctcctgtctggagcgggagagcatttgaaaagtgacctgctgttggagggcttcaataactaccgcttcctgtccaacggatatattccaattcccgggcaacaagacaaagacaattttcaggaaacgatggaggccatgcatattatggggttttcccacgaggagatcttaagcatgcttaaagtggtatccagcgtactgcaatttggcaacatctcttttaaaaaggagagaaatacagaccaggccagcatgcctgaaaacaccgtggctcaaaaactgtgccatttacttgggatgaacgtcatggaatttacaagagctatcctgaccccaagaattaaggtcggaagggactacgtccaaaaagctcagaccaaggaacaggctgacttcgccgtggaggccctggcaaaagctacatacgagcgactcttccggtggctggtgcatcgcattaacaaagcgctggataggaccaagcggcagggagcttcgttcattggtattttggatatcgctgggttcgaaatcttcgagctgaactctttcgaacagctctgcattaactataccaacgaaaagttacagcaacttttcaaccacactatgttcatactggagcaggaagagtatcagcgagagggcattgaatggaatttcatcgacttcggacttgatctgcagccgtgtattgacttgattgagaggcccgcaaacccacccggagtcctggcccttttggacgaggagtgttggtttccaaaagctacagataaaaccttcgtggaaaaactggttcaggagcaagggtcacatagcaaattccagaagcctaggcaactgaaggacaaagcggacttttgtatcatccattatgccggcaaagtggattacaaagcagacgaatggctcatgaagaacatggaccctctaaatgacaatgtggctactctgctccatcagagtagtgacagattcgtggccgagctgtggaaagacgaaatacagaacattcagcgggcctcattctacgactccgtcagtggactccacgagccccccgtggatagaattgttgggctcgatcaagtgaccggtatgacagaaactgcctttggctctgcctataagaccaagaaggggatgtttaggacagttgggcaattatacaaggaatctctcacaaaactcatggcaacactccggaataccaaccccaattttgtaaggtgtataataccaaatcatgaaaagcgtgctgggaaactggacccccacctcgtccttgaccagcttaggtgtaatggggttctggaaggtatacgaatttgccgtcaaggattccctaaccgaatcgtttttcaagagtttagacagaggtacgagatactaacgcccaacgcaatccccaaagggttcatggacggcaagcaggcatgcgagcggatgatcagggctttggagctcgacccaaatctttaccgtattggtcagtcaaagattttttttcgcgccggagtgctagctcatctggaagaagaaagagacctgaagattaccgacattatcatttttttccaggccgtgtgtaggggatacctcgccaggaaggccttcgctaaaaaacagcaacaattgtcagctcttaaagttctccagagaaattgtgccgcttacctcaaactgaggcactggcagtggtggcgggtgttcacaaaggtcaagccgttgctccaggtgaccaggcaggaagaggagcttcaggccaaagatgaggaactgttgaaagtgaaggagaagcagaccaaagtggagggtgagctggaggagatggagaggaagcaccagcaactgctagaggaaaagaatattctcgctgagcagttgcaggcagagacagagctgtttgccgaagccgaagagatgcgagccagattggctgcaaaaaagcaggaactggaagaaattctgcacgatttggaaagccgcgtggaggaggaggaggagagaaatcaaatcctccaaaatgagaagaagaagatgcaggcacatattcaggatcttgaagagcagttagacgaagaagaaggcgccaggcaaaagttacaactcgagaaagttactgccgaagctaaaataaagaaaatggaagaggagatcctgctgctggaagatcaaaacagcaagtttattaaggaaaaaaaactcatggaggaccggattgctgagtgttcctctcaactggctgaggaggaagagaaggccaagaatctggccaagattagaaataaacaggaagtcatgatttctgatcttgaggagcgccttaagaaagaagagaaaacccgccaagaacttgagaaagctaagcggaagctcgacggagaaacaacagatctccaggatcagatcgccgagctccaggcccaaattgacgagctcaagctccagctggccaaaaaagaggaggagttgcagggcgccctggcccggggtgacgatgaaacgctgcacaagaacaacgctcttaaagttgtgagagagctacaggcacagattgcagagcttcaagaggactttgaatcggaaaaggctagcagaaataaagccgagaagcagaaacgagatctctccgaggaactggaggccctgaaaaccgagctagaagacactctggacacgacagcagcccaacaggagctgcgaacgaagagggaacaggaagtggccgagttgaagaaagctcttgaggaagaaactaaaaatcacgaagcacagatacaagatatgaggcagcgccacgccacggccctcgaggagctttcagagcagctggaacaggccaagcgattcaaggctaacctggagaagaacaagcaaggactggaaacagacaacaaggagttagcttgcgaggtcaaggtattgcagcaggtaaaagccgaatctgaacacaagaggaagaagctggatgcccaagtacaggagctgcatgcaaaggtgtccgagggggatcgtttgagggtcgagctggcagagaaggccagcaagctgcagaatgaactagacaacgtctcaaccctattggaggaggctgagaaaaagggcatcaaatttgccaaagatgctgcctctctagagagtcagctccaggatacccaagagctgctgcaggaggaaacccggcagaaattgaacctgtcctcccgcataaggcagctggaggaagagaagaacagcttgcaagaacagcaggaagaggaggaggaggcaaggaagaatttggaaaagcaggtgctcgctctgcagagtcagctggccgataccaaaaaaaaagtcgatgatgatctggggacaatcgagtctctggaagaagccaaaaagaagttgctgaaagatgcagaggccttgtcgcagaggttagaggagaaagccctagcatatgacaaattggagaagaccaagaatcggctgcagcaggagctggacgatctgactgtggatctggaccaccagcgacaagtggccagcaacctggaaaagaaacaaaaaaaatttgatcagctcctggccgaggagaaaagcatatcggctaggtacgcagaggagagggatagggccgaggcggaagctcgggagaaagaaacaaaggcgctgagcctcgccagagccctcgaggaggctctagaagctaaggaagagtttgaaagacagaacaaacagctgcgggcggacatggaagatctcatgtcttcaaaggacgacgtgggcaagaacgtgcatgaactggaaaagtcgaagagagctctggagcagcaggtggaagaaatgcgaactcagctggaggaactcgaggatgaactgcaagctactgaggatgcaaaactaagactagaggttaatatgcaggctatgaaggcacagttcgagagagatctgcagaccagggacgagcaaaacgaggaaaagaaaaggctgctgattaaacaggtaagggagctggaagccgagttggaagacgaacgcaagcagagagcactggccgtcgcaagcaagaagaagatggagatcgacctaaaggatttggaggcacagattgaagctgcaaataaggcacgtgacgaagtgatcaaacagttgcgcaaactgcaggcacagatgaaggactatcagagggagcttgaagaagcacgggcttcgcgagatgaaattttcgctcagagtaaagaatctgaaaaaaagctcaagtctctagaagccgagatcctgcagctacaggaggagcttgcatccagcgagcgcgccagaaggcatgccgaacaggaacgcgacgagctggcagacgaaattactaacagcgcatccggtaaatcagccctgttagacgagaagcgtcgacttgaggctagaatagctcagctcgaggaggaattagaggaagagcaatctaacatggagttgctgaacgacaggttcagaaagaccactctgcaggtcgacaccctgaatgccgagttggccgctgagcggagcgctgctcagaagagtgacaacgcacggcagcaacttgaaaggcaaaataaagaactcaaggcaaagctgcaggagctagagggggcagtgaaatccaagttcaaggcaactatctccgcattggaagccaaaatcggacagctggaagaacaattagagcaggaagccaaggaacgtgccgccgcaaacaaactggtgcgcaggacagaaaaaaaacttaaagagatatttatgcaggtcgaagacgagcgccgccacgcggaccagtacaaggagcagatggagaaggccaacgctaggatgaagcagctcaagaggcaactggaagaggcagaagaagaagcgacccgggctaacgcttcccgacgcaagctccaacgagaattggacgacgcaacagaagctaacgaggggttgtcacgcgaagtctcaacgctgaagaatcgcctcaggagaggaggcccaataagcttctcaagctctcgctccgggcgcagacagctgcatctggagggcgcgagtctggagctatccgatgacgatactgagtccaagaccagcgacgtcaacgagacacaacccccacagagtgagtag

SEQ ID NO: 25171 - DNA, 5979 bp, synthetic construct
  misc_feature 1..5979: note = Description of Artificial Sequence: Synthetic coding sequence
  source 1..5979: mol_type = other DNA
atggcccagcggaccggcctggaggaccccgagcggtacctgttcgttgatagagccgtgatttataatccagcaacgcaggcagattggaccgcaaaaaaactggtctggatcccctcggagcgccacggattcgaagcagcttcaattaaagaagagcggggggacgaagtaatggttgagctcgccgagaacggaaagaaggccatggtcaacaaggatgatattcagaagatgaaccctccaaagttctccaaggtggaagacatggcagaacttacatgtctcaatgaagcttccgtactgcacaatctcaaagacaggtactatagcggcttgatttatacttatagtggactgttttgtgtagtcataaatccttataaaaatctacccatctacagtgaaaatattatcgaaatgtaccgcggaaagaaaagacacgagatgccaccacacatatacgcgatcagcgaatctgcatacagatgcatgcttcaagacagagaggatcaaagcatcctttgcactggcgagtccggagccggtaagaccgagaatacaaaaaaggtcattcagtatttggctcatgtggcatcttcccacaaggggcgaaaggatcataatattccccaagaaagccccaagccggtgaagcaccaggcctcagcgttattatacggagaactggaacggcaactgctacaggcaaaccccattttggagagctttggaaatgccaaaaccgttaagaatgacaacagttcccgcttcgggaagttcattcgaatcaatttcgatgtcacaggttatatcgtgggtgcaaacattgagacctatctgctggagaaatcacgagccgtacggcaagccaaagacgaacgaacgttccacattttttaccagctgctgtccggggcaggagaacaccttaaatcagatctattgctggaggggtttaataactacaggtttctctctaacgggtatattccgatcccaggtcagcaggataaagacaactttcaggagaccatggaagctatgcatatcatgggcttttcccatgaagagatcctaagtatgttaaaagttgtgtctagcgtgctacagtttggaaatatctcctttaagaaagaaaggaacaccgaccaggccagcatgccggagaacacagtcgcgcagaaattatgccatctgctcggcatgaatgtgatggaatttacgcgtgcaatccttacgccgcgtatcaaggtgggacgggattacgtgcaaaaagcccaaacgaaggaacaggcagacttcgctgtcgaggccttggccaaggctacttacgagagattgttcagatggttagtgcaccggatcaacaaggcccttgatcgtacaaaaagacagggcgctagcttcatcgggatattggatatcgccggctttgaaatattcgaattgaactcgttcgagcaactctgtatcaattacacaaatgaaaagctgcaacaactttttaaccatacgatgttcattctggaacaggaagagtaccagagggagggtattgaatggaattttattgattttggacttgatctgcaaccatgtatcgatctcattgagaggcctgccaatccccctggagtgctggccttgctggatgaagaatgctggtttcctaaggctactgataagacattcgtggagaaactggtgcaggagcagggatcccactctaagtttcagaaaccgcgccagctcaaggacaaggccgatttttgtattatacactacgccgggaaagtcgattacaaggccgacgaatggctgatgaaaaatatggaccccctgaacgacaacgtagccacactgctgcaccaaagctccgatagattcgtggccgagctgtggaaagacgtggataggatcgtggggttggaccaagtgaccggcatgaccgagacggcattcggatccgcctacaagactaaaaaaggcatgtttagaacagtgggacagctctataaagagtccctcacaaagttaatggccacattgcgaaataccaaccctaactttgtgcgctgtattataccaaatcacgagaaacgagcggggaagttggaccctcatctggtgttggaccagcttcggtgtaatggggtgctcgagggcatcagaatttgcagacagggattcccaaatcgcattgtatttcaagagttcaggcagagatatgagattctgacgccgaacgcaatccccaagggattcatggacggtaaacaggcctgtgaacgaatgatcagggccctggagctcgatcccaatctttaccggattggtcagagcaaaatattctttcgtgctggtgtgcttgcccatttggaggaagagagggaccttaagataacagatatcataatattctttcaggcggtgtgcagggggtacttggctcggaaagcctttgcaaagaaacagcaacaactgtcagccctgaaagttctgcagcggaactgcgcagcttatctgaaattgcgccattggcagtggtggcgcgtgtttacaaaggtgaaaccactgctgcaggtaacaagacaggaagaggaacttcaggcgaaggacgaagagttgctgaaggtgaaggagaaacagaccaaagtggaaggtgagttggaagagatggaaaggaaacaccaacagctgcttgaagagaagaacattcttgctgagcagctccaggcagagacggagctgttcgctgaggctgaagagatgcgtgcaagactcgctgccaaaaagcaggagttggaagaaatcttgcacgatctcgaaagccgtgttgaggaggaagaggagaggaaccaaattcttcagaacgaaaagaagaaaatgcaagcccacattcaggacctggaggagcagctcgacgaagaagagggcgccagacaaaagcttcagctggagaaagtgacagctgaagccaagataaagaagatggaggaagagattttgctgttggaggaccagaactcaaagtttatcaaggagaagaaactaatggaagaccgcatcgccgagtgttccagtcagctggctgaggaggaggagaaggccaagaacctggcaaaaatccgcaacaagcaagaggtcatgatcagcgacttggaggaacggctcaagaaggaggaaaagacaaggcaggaactggaaaaagctaagcggaaattggatggagagacaacggacttacaggatcagatagcggagctccaggcccaaattgacgagctgaagctgcagctggcaaaaaaggaggaagagctgcagggtgctctcgcaagaggcgatgatgaaactctgcacaagaataatgctctcaaagtggtgagagagctccaggcccagatcgccgaactgcaggaggatttcgagtcggagaaagccagccggaacaaagctgaaaagcagaagcgtgacctctctgaagagcttgaggccttgaagacagagctggaagacacccttgataccacggcggcacagcaagagctccgcaccaagagggaacaggaagtggcagaacttaaaaaggccctggaggaggagaccaagaatcacgaggcgcaaattcaggacatgaggcagcggcatgcaactgcactggaagagctcagtgagcagctggaacaggccaaacgcttcaaagctaatctcgagaaaaataagcagggtcttgagaccgacaataaagaactcgcttgtgaggtaaaggtgctgcagcaagtgaaagctgagagcgagcacaagcgcaaaaagctcgatgcgcaggtgcaggaacttcacgccaaagtgtcagaaggcgaccggctgcgcgttgagctcgctgaaaaagcttccaagctccaaaatgagctggacaatgtctctacactgctggaagaagcagagaaaaaggggatcaaatttgctaaagatgccgcgagcctggagtcccagctacaggacacacaggagctcttgcaggaagagacccggcagaaattgaacttatccagcaggatcagacaactggaggaggaaaagaatagcctgcaggagcaacaagaggaagaggaagaggctagaaaaaaccttgagaagcaggtgctggcactccagagccaactggctgataccaagaaaaaggtcgacgacgacctgggtaccattgaaagtctcgaggaggctaagaaaaagctcctgaaggacgctgaagccctgagccagcgcctggaagagaaagccctggcatacgataagctggagaaaacaaagaatcggctgcaacaagagttagacgacttaactgttgatttagaccaccagcggcaggtagcaagtaatcttgaaaaaaagcaaaagaaatttgatcagctgttggcagaagagaagagtatatctgcgcgatacgccgaggagcgtgatagagccgaagcagaagcgagggagaaggagactaaagccctatcactcgccagggccctggaggaggcgttggaagctaaagaggagtttgaaaggcagaataaacagctccgggctgatatggaagatctcatgtctagcaaggatgacgtcgggaaaaatgtacacgagcttgaaaagagcaagcgcgccctcgagcagcaagtggaagagatgcggacccagttggaagagctggaggacgagttacaggccacggaagacgctaagctcagactcgaagtgaacatgcaagccatgaaggcacagtttgaaagagacttgcagactcgcgatgagcagaatgaggagaaaaagcgcctgctcatcaaacaggtgcgggagctagaagctgagctcgaggatgagcggaaacagcgtgcgcttgcagtggcaagcaaaaagaagatggaaattgatctgaaggatctcgaggcccaaattgaggctgcaaataaagcacgcgatgaggtaattaagcagctgagaaagttgcaggcacagatgaaagactaccaaagggagctggaggaagctcgggcaagccgcgatgaaatctttgcccagtcaaaagaaagtgagaaaaaactgaagtctcttgaggctgaaatcttacagctgcaggaggagctcgcgtccagtgaacgggctaggcggcacgcagagcaagagagggatgagctggcggacgaaatcactaacagcgcttccggaaaatctgcattactggacgagaagcgaagactggaggctaggattgcccaactggaggaggagctggaggaggagcagtccaacatggagctgctgaatgatcggtttcggaaaaccacgctacaggtggacaccctcaatgccgaactggctgcagagaggagcgcagcccagaaaagcgataacgcccggcaacagctcgagcgacaaaacaaagaactgaaagcgaagctccaggaattagagggggccgtgaaaagtaagtttaaggcgacaataagcgctctagaggcgaaaattggccaactggaagagcagctggaacaggaggcaaaagaacgggctgccgctaacaagctggtccgtcggacggagaagaaattgaaggagatttttatgcaggttgaagacgaaagacgccacgcggaccagtataaggagcagatggagaaggccaacgcgcgaatgaaacagcttaagcgacaacttgaggaggcagaagaggaagcgactagagctaatgcttcccggaggaagttgcagagggaactcgatgatgccaccgaggcaaacgaggggctatctcgcgaagtctccacccttaaaaacagactgcgcagaggcggtccaatctctttcagctccagtcgtagtggcaggcgccaattgcacctggagggagcatctctggagctgtctgacgacgatacggaatctaaaacctctgatgtcaacgaaacacagccgcctcagagtgaatag

SEQ ID NO: 25172 - DNA, 5994 bp, synthetic construct
  misc_feature 1..5994: note = Description of Artificial Sequence: Synthetic coding sequence
  source 1..5994: mol_type = other DNA
atggcccagcggaccggcctggaggaccccgagcggtacctgttcgtggaccgcgctgttatttacaaccccgcgacccaagccgactggaccgctaaaaaactggtttggatcccatcggaacggcacggatttgaggccgcctccataaaggaggaaagaggagatgaagtgatggttgagctcgcagaaaatgggaaaaaggccatggttaacaaggacgacatccagaaaatgaatcctcctaagttctccaaggttgaggacatggccgaactgacatgtctcaatgaggcctccgttctgcacaaccttaaagaccgctactactcagggctgatttatacgtatagcggattgttttgcgtagtaatcaacccgtataaaaatctgccgatttatagcgaaaatattatcgaaatgtacagaggcaagaaacggcatgaaatgccgcctcatatttatgccatttctgagtctgcgtacagatgtatgttgcaggacagagaagaccaatcaatactgtgcactggggagtcaggcgccggcaagactgagaacactaaaaaggtcattcagtacttggcacacgtggcctcttcccataaaggtagaaaagaccacaatatcccaggagaattagagagacagctgcttcaggcaaacccaattctcgaatcattcggcaacgcaaagactgtcaaaaatgataacagttcccgcttcggtaagttcataagaatcaattttgacgtgacaggatacattgtgggcgctaatatagagacctaccttctagagaaaagtagggccgtaaggcaggctaaggatgaacgtacctttcacatcttctaccagcttctatccggcgcaggggaacacctgaagtccgatctgctgttagaaggatttaataattataggttcctctccaacgggtacatccccattcctggacagcaagacaaggataatttccaggaaacaatggaagccatgcatatcatggggttttcacacgaggaaatcttgtctatgttaaaggtcgtcagtagcgtattgcagtttggcaacattagctttaagaaagagagaaacactgatcaggccagtatgccagagaacaccgtagcccagaagctgtgccatcttcttggaatgaacgtgatggaattcacccgagccattctgacacccaggatcaaagtgggcagggactatgttcagaaggctcaaacaaaagaacaggccgatttcgcagtggaagcactggccaaagcgacatacgaacgcctgttccgatggttggttcatagaattaacaaggcccttgatcggaccaaacgacaaggggccagcttcattggaatcctcgacattgccggcttcgagatcttcgagctgaacagctttgagcagctgtgtatcaactatactaatgagaaactgcagcaactgtttaaccacacaatgtttatacttgagcaagaggagtatcaacgcgagggcatcgaatggaattttatcgattttggcttggacttgcaaccctgcattgatcttattgaacggcccgctaacccaccgggagtgctcgccctgctcgatgaagaatgttggttcccgaaggcaacagacaagactttcgtggagaagctcgtccaggaacagggctcacacagcaaattccagaagcctagacagctcaaggataaagcagacttttgtatcatccactacgccgggaaggtcgattataaggcggatgagtggctgatgaagaatatggatcccctgaacgataatgtcgccacattgctgcatcagtccagtgataggttcgtagccgaactgtggaaggacgaaattcagaatatccagcgcgctagcttctatgacagcgtttcaggattgcatgagccgccagtcgatcgtatcgtaggtctggaccaagtgactggaatgacagagactgcctttggcagtgcttataaaacaaaaaaaggtatgttccgtacggtgggtcagttgtataaagagagtttaacaaagctcatggccacattacgcaacaccaatccaaacttcgtgcggtgcatcattccaaaccacgagaagagagctggaaaacttgacccacacctcgtgctcgaccaactgagatgcaacggcgtgctggaaggaataagaatttgcaggcaaggatttcccaaccgcatagtgtttcaagagttccggcagagatatgaaatcctcaccccaaatgctattccgaaaggctttatggatggcaagcaggcatgcgagagaatgatccgggcacttgagctggatcctaacctttacagaatcggacagtctaagatcttcttcagggctggcgtactggcacacttggaggaggaaagggacttaaaaattacagatattattatcttcttccaagccgtctgccggggatacctcgcccggaaagcgtttgctaagaaacagcagcagcttagcgctttgaaagtgctccagcgcaactgtgcagcctacctgaagctgcggcattggcagtggtggcgggtgtttacaaaagtgaagccgctccttcaggttactcgtcaggaagaagaattacaagctaaagatgaggaactacttaaagtgaaggagaaacagactaaagtcgaaggagagctggaagagatggagcgaaaacatcagcagctgctggaggaaaagaacatactagccgaacagctgcaagcggagacagagttattcgccgaagctgaagaaatgagggcgaggttagctgcaaagaagcaggaactggaggagattctacacgaccttgagtcacgtgtggaggaagaggaagaacggaaccagattttacagaacgagaaaaagaagatgcaggcccacatacaggatctggaggagcagttagacgaggaggagggtgcaaggcaaaagctccagctggaaaaggtcacagccgaagcaaaaattaaaaagatggaagaagagatcttgcttttggaggaccagaatagcaagttcatcaaagagaaaaagttaatggaagatcggatcgccgagtgcagttcccagctggccgaagaggaggagaaggccaagaatctggccaaaattaggaacaaacaagaagtgatgatcagtgacctggaggagaggctgaaaaaggaagagaaaacacgccaggaactggagaaagctaagcgaaagctggatggggaaactaccgacttacaggatcagatcgccgaactgcaggcacagatcgacgaattgaagctccagctggcaaaaaaggaagaggagctgcagggggctttggcccggggggacgacgagacgctgcacaaaaacaatgccttgaaagtcgtaagagaacttcaagcacaaatcgcggagctccaggaagattttgaaagcgagaaggcaagcagaaataaggccgagaagcagaaacgggatttgtccgaagagctcgaagctctaaagaccgagctggaggacacgcttgatactactgccgcccagcaagagcttcggacgaagcgggagcaagaggtggcagaacttaagaaggccctggaagaagaaaccaaaaaccacgaggcgcagattcaggatatgcgccagcgacacgccactgccctggaagaactctccgagcagctcgagcaggcaaaacggtttaaagcaaatttggaaaagaataagcagggactagagacagacaacaaggaactggcctgtgaggtgaaggtcctacagcaggtgaaagcggagtcagagcataagcggaagaagttagatgctcaggtgcaggaactgcacgcaaaagttagcgagggggatcggttgcgagtggaactcgccgaaaaagcgagtaagctgcagaatgaactggataatgtatctaccctgttggaggaggcagagaaaaagggaattaagtttgcaaaggatgccgccagcctcgaatcgcagctgcaggatacacaggagctgctacaggaggaaacccggcagaaactcaatctcagctcccggattagacagttagaggaagagaagaacagcctgcaggagcagcaagaggaagaggaagaggccaggaagaatcttgaaaaacaggtcctggctctccagtcccagctggccgataccaaaaaaaaggtggatgatgatctcggcactattgaatcattggaggaggccaagaaaaaacttctgaaggatgccgaagccttgtcccaacgcttggaagagaaagctttggcttatgacaagttggagaagacaaaaaaccgcctccaacaggagctggacgatttaacagtcgatctcgaccatcaaagacaggttgcctcgaatctcgagaagaagcagaaaaaatttgatcagttgctcgccgaggagaagtccattagcgctaggtacgcagaggagcgcgatcgggctgaggcagaggctcgagaaaaagagactaaggccctcagcttagccagggccttggaggaagcccttgaggccaaagaggaatttgagagacagaacaagcaactgagggcagacatggaagacttaatgtcaagcaaagacgacgtgggcaaaaacgtgcatgagctggaaaagagtaaaagagccttggaacagcaggtggaggagatgcgcactcaacttgaggagctggaagacgagctccaggctaccgaggacgctaaactgagactggaggttaatatgcaggccatgaaggctcagttcgaacgtgacctacagactcgcgatgagcagaatgaagaaaaaaagcggttattaattaaacaggtgagagagctcgaggctgagctcgaagatgagcgcaagcaacgcgctcttgcggtagcctccaagaaaaagatggagattgacttgaaagacctggaagcacaaatagaggcagccaataaggctagggatgaggtgatcaaacagctgcgcaagctgcaggcccagatgaaggactaccaacgcgaactggaagaagcgagagcatcaagagatgaaatcttcgcccagagcaaggaaagcgaaaaaaagcttaaatctctggaggctgagatccttcagttgcaggaagaactggcgagctctgagagagccagacgacacgccgagcaggaacgagacgaactcgccgacgagattactaatagtgcatcaggaaagagcgcattactagatgagaaacgtcggcttgaggcacggatcgcacagcttgaagaggaactcgaggaggagcagagtaatatggaactactcaatgacaggtttcggaaaaccacccttcaggtggacacactgaatgctgaactggcggcagagcgatctgcggctcaaaaaagcgataacgcccgacagcagctagagcgccagaacaaagaactgaaagccaaattgcaggagctcgagggagcagttaagtctaagtttaaagccacaatctcagcactggaggcaaagatcggacagctcgaagagcaacttgagcaggaggctaaggaacgagctgctgctaataagttggtccgacgcaccgagaaaaaactcaaagaaatcttcatgcaggttgaagacgaacggaggcatgctgaccagtataaggaacagatggagaaagccaacgctcggatgaaacaactgaagcgtcagctagaagaggccgaggaggaggccacaagggcgaatgccagccgccgcaagcttcagcgggaattagacgacgctactgaggccaatgagggcctgtctcgagaggtctcaaccctgaagaaccgtctgaggagaggcggtccaatttcattttcatctagtcgaagcgggcgcaggcagttacacctggagggcgcaagtttagaactctctgatgacgacacagagtccaaaacttcagatgtcaacgagacgcagccaccacagagcgaatag

SEQ ID NO: 25173 - DNA, 567 bp, synthetic construct
  misc_feature 1..567: note = Description of Artificial Sequence: Synthetic coding sequence
  source 1..567: mol_type = other DNA
atggcccagcggaccggcctggaggaccccgagcggtacctgttcgtcgaccgcgccgtaatttacaaccccgctacccaggcagactggaccgcgaaaaaactggtttggatccccagtgagaggcacggctttgaggctgccagcattaaagaagagaggggggatgaagtaatggttgaactggcagagaacggtaaaaaggcgatggtaaataaggacgacatccagaagatgaaccccccgaagttctctaaagtagaggatatggcagaactcacctgtctgaatgaggctagtgtgctgcataacctgaaggatcggtactattctgggctaatttatacctattccgggctgttttgtgtggtcatcaacccttacaaaaatctgcccatctactctgagaacatcatcgaaatgtatcggggtaaaaagcgacacgagatgcccccccacatttacgccatcagtgagtctgcatatagatgtatgctgcaggaccgggaagatcagagcatcctgtgtacgggcgagtctggtgcaggtaagaccgaaaatacttag

SEQ ID NO: 25174 - DNA, 1446 bp, synthetic construct
  misc_feature 1..1446: note = Description of Artificial Sequence: Synthetic coding sequence
  source 1..1446: mol_type = other DNA
atgtacgacgccgagcggggctggagcctgagcttcgccggctgcgggttcttgggcttctaccatgtgggagcaacccgatgtttatcggagcacgcgccccacctactacgggatgcgcggatgcttttcggggcctccgccggagccctgcactgcgttggcgtgttaagtggcataccgctcgagcaaaccctgcaagttctttcggatttggtacggaaagcgcgaagccggaacatagggatattccatccaagctttaacctgtcgaaattccttagacagggcctgtgtaaatgcttaccagcaaatgtgcaccagctaatttcaggtaagatcggaatttccctgacaagagttagtgacggtgagaacgtgcttgttagcgactttcggagcaaggatgaagtggtcgacgccctcgtgtgttcttgcttcatccccttctactccggcctaatccctcccagctttcggggagtcagatacgttgatggtggggtgtcagataacgtgccgttcattgatgcaaaaaccaccattactgtgtcacccttctatggcgaatacgacatctgccctaaggttaaatccacaaatttccttcacgttgacattacaaaactgtccctcaggctctgtactggcaacctttatctcctctcaagggcctttgtacctccagatttaaaggtgctgggcgaaatctgcctgcgcgggtatttggatgccttccggttcctggaggaaaagggaatttgcaataggcctcagcccggtcttaagtctagctccgagggaatggatccggaggttgcaatgccgagttgggcaaacatgtctctcgatagctctcctgagagtgccgccctagccgtgagactggaaggagacgagcttttagatcatctcaggctctctattttgccatgggacgagtctatcctcgacacccttagtccacggctcgccaccgcactcagtgaagagatgaaggacaaggggggatatatgagcaaaatttgcaatctgctacccatcaggattatgtcctacgtgatgctcccatgtacactacccgtagagagtgccatcgccatcgtgcagagactagtcacttggctgcctgacatgccagacgatgtgttgtggctgcaatgggttacaagccaagtgtttacgagagttctgatgtgcctgctgccagcatccagatctcagatgcctgttagtagccagcaggcttccccttgcactcctgaacaggactggccctgttggactccttgcagccccaagggttgtcccgcagaaactaaggcagaagcgactccacgatcaattctgagatcctctctgaatttttttctcgggaataaggtgccagctggcgcagaaggtctcagtacatttccttctttcagtctggaaaagtccctttag

SEQ ID NO: 25175 - DNA, 4149 bp, synthetic construct
  misc_feature 1..4149: note = Description of Artificial Sequence: Synthetic coding sequence
  source 1..4149: mol_type = other DNA
atgtacaagggcaagaagcggcacgagatgcccccccacatctacgccatcaccgatacggcttatcgcagtatgatgcaggatagggaagaccagagtatcctgtgcaccggggagagtggggccgggaagaccgagaataccaaaaaggtgatccagtatttggcttatgtcgcctcaagccacaagtctaagaaagatcagggcgaacttgagcgacagctgttacaagctaaccccatactcgaggcatttgggaatgccaagacagtgaaaaacgacaattcatctcgttttgggaagttcatcaggataaatttcgatgtgaatgggtacatagtgggagctaacatcgagacatacctcctggagaagtcacgcgctatcaggcaagccaaggaagaacgcaccttccatatcttttactacctgctgagcggcgctggagaacatttgaaaaccgacttattgctcgaaccctataataaatatcgctttctgtccaacggacacgttactattcctggccagcaagacaaggatatgtttcaagagaccatggaggccatgagaataatggggataccagaagaagaacaaatgggactgcttcgcgtgatctcaggagtgcttcagttgggcaacattgtgtttaaaaaagaacgcaacacagaccaggctagtatgccggacaacactgccgctcagaaggtctcacacctgctgggaatcaacgtgacagacttcacaagaggcattctgacgccacgcatcaaagtgggtcgcgactatgtacagaaggctcagacaaaagaacaggccgattttgctatcgaagcacttgccaaggccacctatgagcggatgtttcggtggctggtcctgagaatcaataaagccttagacaagactaagagacagggcgcctctttcattgggatacttgatatcgctgggtttgagatcttcgatctcaattccttcgagcaactctgtattaattatacgaatgagaagctgcagcagttgttcaatcatactatgtttattctagaacaggaagagtaccagagggagggcatcgagtggaatttcatcgactttggccttgacctccagccttgcatagacctcatcgaaaagcctgcgggccctcccggaatcctggcactcctggacgaagaatgttggttccctaaggcaacggataagagtttcgtcgaaaaagtaatgcaggagcaaggcacccacccgaaattccagaagcctaaacagctgaaggataaagccgacttctgcatcatccactacgcggggaaagtggattataaggccgacgaatggctcatgaaaaacatggaccccctgaatgataatatcgctacattactgcaccaatcgtctgataaattcgtgagcgagttgtggaaagacgtggaccgtataatcggtttggaccaagtcgctggcatgagcgagaccgcccttcccggagctttcaagacacgcaaggggatgtttagaacagttggccagctgtacaaggagcaactggccaagcttatggcaacccttcggaacactaaccccaacttcgtcagatgtattatccctaaccatgaaaaaaaggctggaaagctcgatccccaccttgtgttggaccagctacggtgcaatggagtgttagaagggatcaggatctgtcgccagggctttcccaatcgggttgtgttccaggagtttaggcagagatatgaaatcttgactccaaatagtattcctaagggttttatggacggcaaacaggcttgtgtcctaatgatcaaagctctggaactcgactcaaacctttataggattgggcagtcaaaagtcttctttagagcaggcgtgttagctcatctggaggaggagagagacctgaaaataaccgacgtcatcataggctttcaggcttgctgtcgcggctacctggccagaaaggcctttgctaaacgtcaacaacagttgaccgccatgaaggtgctccaacggaactgtgccgcctaccttaagcttaggaactggcagtggtggagactgtttaccaaagtgaagcctctcctccaggtctcccgccaggaggaggagatgatggcaaaagaggaagaactggtcaaggtccgcgagaagcagctggccgccgaaaacagactcacagaaatggaaacactgcagtcacagctgatggcagagaagttgcagttacaggaacaactgcaggcagaaacagagttgtgtgctgaggccgaagaactacgtgcgaggcttaccgccaagaagcaggagctggaagaaatttgtcacgacctggaagccagagtggaggaagaggaggaacgctgtcagcacctccaggccgaaaagaaaaagatgcagcagaacattcaggagcttgaagaacaactagaagaggaggagtcagcacggcagaaactgcagcttgaaaaggttacaacagaagcaaaactcaagaaactggaagaagaattggacgatctcttggtggatctggaccatcagcgacaatccgcatgtaatctggaaaagaaacaaaagaagtttgatcagctgctggccgaggagaagaccattagtgctaagtacgccgaggaaagagaccgggctgaggccgaagcgagggaaaaggaaacaaaagctcttagcttggcccgggccctggaagaggccatggaacaaaaggctgaactggagcgtctgaacaagcaattcagaaccgagatggaagacctcatgagtagtaaggacgatgtgggcaaaagcgtgcatgagcttgagaagtcaaaaagggccctggagcagcaggtcgaggagatgaaaacacagttggaagaactagaggacgaactgcaggccacggaagacgctaagctgcggctggaggtgaatcttcaggccatgaaggctcaattcgagcgggacttgcaggggagagacgaacaaagcgaagaaaagaagaagcagctggtcagacaagtcagggagatggaagccgaattggaggacgagcgaaaacaacggagcatggccgtggctgctaggaagaagctcgagatggatctgaaggatcttgaagctcatattgactccgccaataaaaaccgcgacgaagccattaagcagttacggaagctacaggcacagatgaaggactgcatgagagaactcgatgatacccgggcctcccgcgaagagattttggctcaggccaaggagaatgagaagaagctgaaatccatggaagccgagatgatccagctccaggaggagttggccgccgctgaaagggcaaagcggcaagcacagcaagagcgggatgaactggctgacgagattgccaactccagcggtaagggagccctggccctggaggaaaagcgaagactggaagccagaatcgcccaacttgaggaagaactagaggaggaacaggggaacacagaactgatcaacgatcgccttaagaaggcaaacttgcaaatcgatcagattaacacggatctgaatttagaacggtcccacgcacaaaagaacgagaacgcgaggcagcagctggagaggcaaaataaggaacttaaggtgaagctgcaggaaatggaagggaccgtaaaatccaaatataaagcatcaattaccgccctggaggctaaaatcgcccagctcgaagagcagctcgacaatgaaacaaaggaaaggcaggccgcgtgtaagcaagtccggaggaccgaaaaaaagctcaaagatgtgctactgcaggttgacgacgaacgaagaaacgctgagcagtataaggaccaggcggataaggcttctaccagattgaagcagctgaaacgccagttggaggaggctgaagaggaggcccagcgggctaacgcctcaaggcgtaagcttcagcgagagctggaggatgcaaccgagactgcggatgcaatgaaccgcgaagtgtcctcactcaaaaacaaactccgccgtggagatttaccgtttgtggtgcctaggagaatggctaggaaaggcgccggtgacggcagtgatgaagaggtggacggaaaggctgatggcgcagaagcaaaacccgcagaatag

SEQ ID NO: 25176 - DNA, 1689 bp, synthetic construct
  misc_feature 1..1689: note = Description of Artificial Sequence: Synthetic coding sequence
  source 1..1689: mol_type = other DNA
gccagcggcacccggcggcggtggccccccaccaccagctggcggcggccacggcgtggctgttcacgatcctggacaacttgctggtggacatggacaaccagtgctcgggcaagggccacttggagaaggagtagaaggagtctgacgagctcctggagaagaagacgtccttctcttccctctatgcaacggagtgccactgggctcaggcgccggcctgagaggcggagaccccgcctctgtcggtggcctgggcccgaggaggccatggagcagaaggccgaactagagagactgaataaacagtttcgaactgaaatggaggacctgatgagctccaaggatgatgtgggcaagagcgttcatgagctggagaaaagcaagagggcgctggagcaacaggttgaggagatgaaaactcagctggaagagttagaggacgagttgcaggcaacagaggatgctaaactccgacttgaagtgaacctgcaggcaatgaaagcacagtttgaacgggacttacagggccgggacgagcaatctgaggagaagaaaaagcagctggttcggcaagtacgcgagatggaggctgaactggaagacgaacggaagcagcggtctatggctgtagccgcccgcaagaagttggaaatggatctgaaagacctcgaggcgcatatagactctgctaacaagaatagagacgaggccatcaagcaactgaggaaactccaggcccagatgaaggactgtatgagagagctggatgacactagggcctctcgcgaagaaatactggcccaggcaaaagaaaatgagaaaaaactgaagtccatggaagctgaaatgatccagctacaggaggaactggccgccgccgagcgagctaaaagacaggcccaacaggaacgagacgagctcgcagatgaaatcgccaattcaagtggaaaaggcgcactcgcgctggaggagaagcgtaggctagaggcacgtattgcccagctggaagaggagctggaggaggaacagggcaatactgaactcataaatgaccgacttaaaaaagcaaacttgcagatcgaccaaattaataccgacttgaacctcgaacgtagccacgcacaaaagaacgagaacgcacggcaacagctcgagaggcagaacaaagaactgaaggtgaaattgcaggaaatggaggggactgtcaaatctaagtataaagctagcattaccgccctggaagcaaagatcgcacagctcgaagaacaattggacaacgagactaaggaacgccaagccgcctgcaaacaggtcagaaggaccgagaagaagcttaaggacgtgttgctgcaggtcgacgacgaaagaaggaacgccgagcagtacaaagatcaggctgacaaagcctccacccggctgaagcaattgaagcgacaactggaggaggctgaggaggaggctcaacgcgcaaatgccagtcgtcgtaaactgcagagggagttggaagacgcaactgagaccgcagatgccatgaaccgtgaggtgagcagcctcaaaaacaagcttcgccgcggagatctgcccttcgtagtgcccaggagaatggcgaggaagggggctggcgatggtagcgacgaagaggtggacgggaaggctgatggggccgaagcgaagcccgcggagtag

SEQ ID NO: 25177 - DNA, 657 bp, synthetic construct
  misc_feature 1..657: note = Description of Artificial Sequence: Synthetic coding sequence
  source 1..657: mol_type = other DNA
atggcccagcaggccgccgacaagtacctgtacgtggacaagaactttattaacaacccacttgctcaggctgactgggccgccaagaaactggtatgggtccccagtgacaagtccggattcgaacccgcgtcactaaaggaggaggtaggagaagaagccattgtggagctggtggaaaacggcaagaaggtcaaggtgaataaagatgatatacaaaagatgaatcctcctaaatttagcaaggtagaagatatggccgagctcacctgcctcaatgaagcctcggtgttacataacctgaaggagcgctactatagtgggctgatttacacatactctgggctgttttgtgtggtgattaatccatacaagaaccttcctatctactccgaggaaattgtggagatgtacaagggcaagaagcggcatgagatgccacctcatatatacgcaattaccgacactgcataccgaagcatgatgcaggatcgggaagaccagagcattttatgtacaggagagtccggagcgggaaagacagaaaatacaaaaaaagtgatccaatatctggcttacgtcgcgtcaagccataagagcaagaaggaccaagaagcttacttcaaaaacagagctgttagactgggcgttctctag

SEQ ID NO: 25178 - DNA, 312 bp, synthetic construct
  misc_feature 1..312: note = Description of Artificial Sequence: Synthetic coding sequence
  source 1..312: mol_type = other DNA
atggcccagcaggccgccgacaagtacctgtacgtggacaagaacttcatcaacaatcccttagcacaggcggactgggccgcaaagaaattggtgtgggtaccctctgataagtccggctttgagccggcctctctcaaggaggaagtaggggaggaggcaattgtggaactggttgaaaacggcaagaaggtgaaggtgaacaaggacgatatccagaaaatgaaccctcccaagttttcgaaagtggaggatatggcggagctgacctgcctgaacgaggccagcgtactccataatctgaaggagtag

SEQ ID NO: 25179 - DNA, 519 bp, synthetic construct
  misc_feature 1..519: note = Description of Artificial Sequence: Synthetic coding sequence
  source 1..519: mol_type = other DNA
atgagcagcaagcgggccaaggccaagaccaccaagaagcggccccaaagggccaccagcaacgtgtttgcgatgttcgaccagtcgcagattcaggagttcaaggaagctttcaacatgatcgatcagaatcgcgatggcttcattgataaagaagacctgcacgatatgctcgcttccctggggaaaaatccgaccgacgaatacctcgagggcatgatgtctgaggcgcctggaccgatcaacttcactatgttcctaaccatgttcggggaaaagctaaacggaactgatccagaggacgtaatcaggaatgcttttgcttgcttcgatgaggaggcctctggatttattcacgaagaccacttgcgtgagctgcttactacgatgggcgatcgctttacagatgaagaggtagacgagatgtatagggaagctcccatagacaagaaaggcaacttcaactacgtggaatttaccagaatcctgaagcacggtgccaaggataaagacgactag

SEQ ID NO: 25180 - DNA, 357 bp, synthetic construct
  misc_feature 1..357: note = Description of Artificial Sequence: Synthetic coding sequence
  source 1..357: mol_type = other DNA
atgagcagcaagcgggccaaggccaagaccaccaagaagcggccccaacgagctacgagcaacgtgtttgctatgtttgatcagtcccagatccaggaatttaaagaagccttcaacatgattgatcaaaatcgcgacggattcattgacaaggaagatctccacgacatgctggccagcttgggatttatccacgaagaccatctgagagagctactcacaaccatgggcgacagatttaccgacgaggaagttgatgaaatgtatagagaagcccccatcgacaaaaaaggaaattttaactacgttgaatttacgcgaatcctcaagcacggggccaaggacaaggatgactag

SEQ ID NO: 25181 - DNA, 927 bp, synthetic construct
  misc_feature 1..927: note = Description of Artificial Sequence: Synthetic coding sequence
  source 1..927: mol_type = other DNA
atgcaggagctgaccctgagccccggccccgccaagctgacccccactcttgatcccacgcaccgcatggagctcatactgtcgactagccctgctgagctgaccctcgatcctgcctgtcaacctaaacttccgctcgatagcacttgtcaaccggaaatgactttcaaccccggacctaccgagctaactctggaccctgaacatcagccagaggaaacccccgcacccagtctggccgaactgacgttggagccagtccatcgtaggcctgagctgttggatgcatgcgcggacctgattaatgaccagtggccgcggagccggacatcccggttgcactccttgggccagtcatcggacgccttccctctttgtctgatgctgctttcaccccaccccaccctcgaggctgcacctgtggtcgtcgggcatgcacgtctcagtcgcgttttgaatcagccgcagtccctgttggtcgagaccgtcgtggtagctcgtgctttacgaggtaggggctttggccgaagattgatggaggggttagaagtatttgctagggctagggggttcagaaaattacatctgactactcacgatcaggttcatttctacacccacctcggatatcagctgggagaacctgtacaggggctagtcttcacgagccgcagactgccagcaacgcttttgaacgccttccccaccgccccatcccccaggccaccaaggaaggcaccaaaccttacggctcaggccgcccctcgaggccccaaaggacccccactccctccacccccgccgctacccgaatgcttaaccatctcccccccagtaccctccggcccacctagcaagtccttacttgagacccagtaccagaatgtgagggggcggccgatattttggatggagaaagatatttag

SEQ ID NO: 25182 - DNA, 861 bp, synthetic construct
  misc_feature 1..861: note = Description of Artificial Sequence: Synthetic coding sequence
  source 1..861: mol_type = other DNA
atggagctgatcctgagcaccagccccgccgagctgaccctggacccggcgtgccaacccaagttacctttagatagtacatgtcagcctgagatgacattcaacccaggcccaacagaactgacactggatcccgagcaccagcctgaggagactccagccccgtcgctcgcagaactgaccctcgaacccgtgcaccgccgccctgagctcctggacgcgtgtgccgatctgattaatgaccagtggcctcgctctcggacctccagactgcactcgctgggccagagtagcgatgccttcccactgtgcctgatgctgctgagcccgcatcctactctggaggcagcacccgtcgtagtcgggcacgctaggctgagccgcgttctgaaccaaccacagtctctgcttgtcgagacagttgtcgtggcgcgcgctctgcgcgggagaggatttggtcgtcgattgatggaaggactggaagtctttgctcgagcccgcggattcaggaagcttcacctgaccactcatgaccaagtccacttttacacacacttgggctaccagctgggtgagccagtacagggtcttgtattcacatcccgccgccttccagccaccctgctaaacgcctttccgaccgcccccagccccaggcctcccaggaaggcccccaatctgactgctcaggccgcccctcgaggccccaagggacccccacttcccccccctccacccttgcctgagtgcctgacaattagtccccctgtgcccagcgggccgccatctaagtccctcttagaaactcagtatcaaaacgtaagggggcgcccaatcttttggatggagaaagatatctag

SEQ ID NO: 25183 - DNA, 174 bp, synthetic construct
  misc_feature 1..174: note = Description of Artificial Sequence: Synthetic coding sequence
  source 1..174: mol_type = other DNA
atggagctgatcctgagcaccagccccgccgagctgaccctggacccagcttgccagcccaagctgcctctggactccacctgtcagcctgagatgacttttaatcctggtcccactgaacttacattggacccagagcatcagccagaggagacgcctgcaccttctctgtag

SEQ ID NO: 25184 - DNA, 861 bp, synthetic construct
  misc_feature 1..861: note = Description of Artificial Sequence: Synthetic coding sequence
  source 1..861: mol_type = other DNA
atggagctgatcctgagcaccagccccgccgagctgaccctggaccctgcatgccagcccaagctcccactggacagtacctgccagcccgaaatgaccttcaacccagggcctactgagttaacccttgaccccgagcaccagccagaagaaaccccagccccgtcactagccgaactaaccttggagcccgtgcatcgccgaccagagcttctcgacgcctgtgctgatctcatcaacgatcaatggccaagatcaaggactagccggttgcattccctgggccaatcatcagacgccttccccctgtgcttgatgctcctatctccacatcctacacttgaggccgccccagttgtcgtcggacatgccagattgagtcgggtgcttaatcaaccccaatccttgctggtggagacggtggttgtggcccgtgctctgcggggacgtggcttcgggcgtaggctgatggaggggctggaggtgtttgcccgggcccgggggttcaggaaacttcacttgactacacatgaccaggttcatttttatactcacctgggctaccagttaggggagcctgtgcaagggcttgtatttacatcaaggcgcctccctgccacgctgctgaatgctttccccaccgccccgagtccgcggccgcccagaaaggcccccaatctgacagcccaggcagcacctaggggccctaaaggtccacccctgccacctccgcctcccctacccgagtgtctaaccattagtccccctgtgcctagcggcccgccaagcaagtccctccttgaaacacagtatcagaacgtgcggggccgacccatattttggatggagaaagatatctag

SEQ ID NO: 25185 - DNA, 861 bp, synthetic construct
  misc_feature 1..861: note = Description of Artificial Sequence: Synthetic coding sequence
  source 1..861: mol_type = other DNA
atggagctgatcctgagcaccagccccgccgagctgaccctggaccctgcgtgccaaccgaaattgcccctagactctacctgtcagccagaaatgacttttaaccctgggcctacggagctaacactggaccctgaacaccagcccgaagaaacgccagcgccaagcctcgccgagttaaccttggaacctgtccatcgccggcctgagctgcttgacgcctgtgccgatttgataaatgatcagtggccgagaagcagaacatcgcggctccactccctcggtcagagcagcgatgcttttcccctgtgcctgatgctcctgtcccctcaccctaccctggaggcagcccccgtcgtggtcgggcacgctcgcctgtcccgggtgctgaaccagccgcagagcttgctggtcgagactgtcgtggtagcccgcgccctccggggccgcggatttggtcggagattaatggaagggttggaagtctttgctcgcgcccgggggtttaggaaattacacctaaccactcacgatcaagtccacttttacacccatcttggctatcagctcggggagcccgtgcagggcctggtgttcacatctcgccgcttgcccgctaccttgctaaacgccttcccaaccgccccctctccacgtccccctcggaaagcccctaacctaaccgcccaagccgctcccaggggtccgaaagggccgcctctgccacctccacccccattgcctgagtgtcttactattagcccacctgtaccttccggccccccgagcaaaagtcttttggagacacaatatcaaaacgtccgcggaagacccatattttggatggagaaagatatatag

SEQ ID NO: 25186 - DNA, 261 bp, synthetic construct
  misc_feature 1..261: note = Description of Artificial Sequence: Synthetic coding sequence
  source 1..261: mol_type = other DNA
atggagctgatcctgagcaccagccccgccgagctgaccctggacccagcctgtcaacctaaattgcctttggactctacttgtcagcctgagatgacctttaacccaggaccaacagagctgaccttggatccagagcatcagcctgaagaaacacccgctccttccttagccgagttgaccctggaacccgtgcaccgacgccccgaattgttagacgcttgcgctgacctgatcaatgatcagtggccacgcagttag

SEQ ID NO: 25187 - DNA, 30 bp, synthetic construct; identical to SEQ ID NO: 11723
  misc_feature 1..30: note = Description of Artificial Sequence: Synthetic coding sequence
  source 1..30: mol_type = other DNA

SEQ ID NO: 25188 - DNA, 987 bp, synthetic construct
  misc_feature 1..987: note = Description of Artificial Sequence: Synthetic coding sequence
  source 1..987: mol_type = other DNA
atggccgagctgcaggaggtgcagatcaccgaggagaagcccctgctgcccggacagactccagaagctgctaaaactcacagcgttgagaccccttacggaagcgtgacttttacggtgtatgggaccccaaaacccaagcgaccggccatcctaacatatcacgacgtgggcctcaattataagtcttgcttccagcctttgtttcagtttgaggacatgcaggagatcattcaaaactttgtgagggtccacgttgacgcccccggcatggaagagggtgcccctgttttccccctcggttatcagtatccctcccttgatcagctggctgacatgatcccttgcgtcctgcaatatctcaattttagcacaatcattggtgtgggggtgggagctggagcctacatcctggccagatacgcactcactggtcttacctccagcatccctgagatgatactaggccatctgttcagccaggaagaactgtcaggcaatagtgagctaatccaaaagtatcgtaacatcataactcacgctcccaatctggacaacattgaattgtactggaattcctataataatcgcagggacctcaacttcgaacgtggtggcgacatcactctccggtgcccagtgatgctagtcgtcggtgatcaagccccacatgaggacgcagtcgtggaatgcaactccaagctggaccctacccaaacatctttcttaaagatggctgacagtgggggacagccccagctgacacagcccgggaagttgactgaagcgtttaaatatttccttcagggaatgggatacatggccagttcttgtatgacgaggctgtctagaagcaggactgcaagtttgactagtgcagcctccgtcgatggtaaccggagtcgatcgcgcacgctctcccagagcagcgagtccggcaccctgagttccggtcctcccggccacactatggaggtttcctgttag

SEQ ID NO: 25189 - DNA, 1116 bp, synthetic construct
  misc_feature 1..1116: note = Description of Artificial Sequence: Synthetic coding sequence
  source 1..1116: mol_type = other DNA
atggccgagctgcaggaggtgcagatcaccgaggagaagcccctgctgcctggtcagacaccggaggctgccaaggaagcggaattggccgcgcggattctgctcgatcaaggtcaaactcacagtgtcgaaaccccctatggttcagtaacttttaccgtgtatggaaccccaaaacctaaaagacccgccatcctgacttaccatgacgtggggttgaactataagagctgcttccagcccctgtttcaatttgaagacatgcaagaaatcattcagaattttgtgcgggttcacgtggatgctcccgggatggaagagggagcccccgtgttcccattgggctatcagtatccctccctcgatcagctggcagacatgatcccgtgcgtactccagtacctgaacttcagcaccatcattggcgtaggtgtcggagcgggggcctatatcctcgctcgctacgctctgaatcaccccgacacagtcgagggacttgtgttaatcaacattgatccaaatgccaagggatggatggactgggccgcccataagctgacgggcctgacgagttccattccggagatgatattgggacatctcttcagtcaggaggagctgagcgggaattccgaactcatccagaaatatagaaacatcataacgcacgcacctaacctggacaacattgagttatactggaattcttacaacaaccgtagggacctgaattttgagcggggtggggatattaccctccgatgccctgttatgttagtagtcggagatcaggctcctcacgaagatgcagtggtggagtgtaacagtaaactagacccaacacagaccagctttttgaaaatggcggacagtggggggcagccccagctcacccagcctggcaaattgaccgaagccttcaaatacttccttcaagggatggggtacatggccagcagttgtatgacaagactctccagaagtcgaacagcttctctgacatccgctgcgtcggttgatggcaatcgctctaggtcgcgcactctgagccaatcctctgaatccggcactctaagttccggtcctcccggacacaccatggaagtatcctgttag

SEQ ID NO: 25190 - DNA, 1074 bp, synthetic construct
  misc_feature 1..1074: note = Description of Artificial Sequence: Synthetic coding sequence
  source 1..1074: mol_type = other DNA
atggccgagctgcaggaggtgcagatcaccgaggagaagcccctgctccccggccagactcccgaggccgcaaaaacacattcggtggagaccccctacgggagtgtcactttcacagtctacggtacgccaaagcctaaaaggccagctatcctcacctaccacgatgttggcctgaactataaaagttgctttcagccactttttcagtttgaggacatgcaggaaatcattcagaactttgtgagagttcatgtcgatgctcctggaatggaagagggcgctcctgtgttccccctcggatatcagtacccctcgctcgatcagcttgcagacatgataccctgcgtcctgcagtacttgaacttttctaccattatcggggtgggtgtcggtgctggcgcctacattcttgccaggtatgctctgaatcaccctgataccgtggagggacttgtgctcatcaacatcgaccccaatgcaaaaggctggatggattgggcagcacataagctgaccggtttaacctcctctattcctgaaatgattctgggccatctgttcagccaggaggagctgtctggaaactccgaactgatccagaaatacaggaacattataacccacgctcccaacctcgacaacatcgagctatactggaactcctataacaatcgccgcgacctgaattttgagaggggaggcgacatcacccttaggtgtccagtgatgctggtggtcggagaccaagcccctcacgaagatgctgttgtcgagtgtaactccaagttggatccaacacaaactagcttccttaaaatggccgattccggcggacaaccccagcttacccagcctgggaagctcaccgaggccttcaagtattttttacagggcatgggctatatggcctcttcctgtatgacacgtctttcccgtagccgcacggcgtctctgacctccgccgcctccgttgatgggaacaggagtcggagtcggacacttagccaatccagcgagtccggtacccttagttccggtccacctgggcatactatggaggtctcctgttag

SEQ ID NO: 25191 - DNA, 1074 bp, synthetic construct
  misc_feature 1..1074: note = Description of Artificial Sequence: Synthetic coding sequence
  source 1..1074: mol_type = other DNA
atggccgagctgcaggaggtgcagatcaccgaggagaagcccctgctccctggtcagactcccgaagcagctaagacacactctgttgaaacgccttacggtagtgtgacttttaccgtatacggcactcccaaaccaaaacgacccgcaattctaacttaccacgatgttggcctcaactataaatcctgcttccaacctctcttccagtttgaagacatgcaggagataatccagaacttcgtgagggtccatgtcgatgcaccaggcatggaagaaggcgcgcccgtgtttcctctgggataccagtatccttccctggaccagttggccgacatgattccctgcgtgcttcagtacctgaatttcagcacaatcataggcgtgggagtaggggcaggggcttatatattggctcgctatgccctgaaccaccccgataccgtcgaggggctcgtgcttatcaatattgaccctaacgccaaaggctggatggactgggctgcacacaaactcacaggcctcacgagttcaatccctgagatgatcttaggacacttattttcccaggaagagctatccggtaacagcgagctgattcagaagtaccggaacatcattacacatgccccgaaccttgataatattgaattgtattggaacagctataacaatagacgggatctgaacttcgagcgggggggcgatatcacactccggtgcccagtgatgctggtcgtaggcgatcaggcaccacatgaggatgctgttgtcgaatgtaactcaaaactggaccccacgcagacctcttttcttaaaatggccgactctggggggcagccacaactgactcagcctgggaagttgacagaagcctttaagtatttcctgcagggcatgggttatatggcctcctcctgcatgactaggttatccaggtctagaacagcttccctgacctcggctgctagcgtcgacggcaacaggtcaagaagtcggaccctttctcaatcttccgaatctgggacattatcatcagggcctccgggacacaccatggaagtgtcttgctag

SEQ ID NO: 25192 - DNA, 1026 bp, synthetic construct
  misc_feature 1..1026: note = Description of Artificial Sequence: Synthetic coding sequence
  source 1..1026: mol_type = other DNA
atggccgagctgcaggaggtgcagatcaccgaggagaagcccctgttaccagggcagacacctgaggccgccaagacacatagcgtcgaaacgccttacgggtctgtgacattcaccgtgtacgggacacctaagcccaaaagacccgctatcctgacctaccacgacgttgggctgaattataagagttgctttcagcccctgttccaattcgaagacatgcaggagattatccaaaacttcgtaagggtgcacgtggatgccccagggatggaggaaggggctcccgtgttcccactcggatatcagtacccgtccctcgatcagctggccgatatgataccttgtgtgttgcagtatttgaacttctctaccatcatcggggtgggcgttggcgcaggggcctacatattagctaggtatgccttgaatcatcctgacactgtcgaaggtctcgttctcattaacatcgaccctaatgctaagggctggatggattgggccgcacacaaattgacaggtctgactagcagcatcccagagatgatcttaggacacttatttagccaggaggagctctccgggaattccgagcttatccagaagtacagaaatattatcacacacgcccctaatctggataatattgagttgtactggaattcatacaataatcgacgcgacctgaactttgaaagaggcggggacatcacactaaggtgcccagttatgctggtggtgggggaccaggcccctcacgaggatgctgtcatggctgatagcggggggcagccccagctgacccagcccggcaagctgacggaggcctttaagtattttctgcagggcatgggttatatggcatcatcatgcatgacccgcctaagtcggtcaagaacagccagcttgacctcagcagcctccgtcgatggcaaccggagtcgttcccgtacactgagccagagcagtgagagcgggactctgagcagcggtcccccaggccatacaatggaggtgagttgttag

SEQ ID NO: 25193 - DNA, 1083 bp, synthetic construct
  misc_feature 1..1083: note = Description of Artificial Sequence: Synthetic coding sequence
  source 1..1083: mol_type = other DNA
atggccgagctgcaggaggtgcagatcaccgaggagaagcccctgcttcccgggcaaacacccgaggccgcgaaggaagccgagctagccgcccgcatcctgttggatcaaggccagactcactccgtagagacaccttatggcagcgtgacttttactgtgtacggaacgcctaaaccgaaaagaccagcaatactaacgtaccacgatgtcggactaaactacaagtcatgtttccagccgttgttccagtttgaagatatgcaggaaatcatccagaacttcgtgagggtgcatgtcgacgcccccggcatggaggaaggagctcccgtgttccctctcgggtatcagtatcccagcctggatcagctcgcagacatgatcccctgcgtcctgcagtatctgaacttttcaactatcattggcgtgggggtgggagctggggcctacatactggcacgttacgccctgaatcatcctgataccgtggaaggcctggtccttatcaacatcgatcccaacgcgaaggggtggatggactgggcagcgcacaaactgacaggactgacttcctccattcctgagatgattttgggacacctgttctcacaggaggagctctcaggtaatagtgaactaattcagaagtacaggaatatcataacccacgcccccaacttagacaatattgaactgtactggaatagctacaacaacaggagagaccttaacttcgaacgcggaggcgatattaccctgcgatgccctgtgatgctggtggtcgaatgcaattccaagctcgaccccacccaaactagcttcctgaaaatggctgactccggcggtcagccccaactcactcagcctggaaaattgacagaagcctttaagtattttctgcagggcatggggtatatggcatcaagctgcatgaccaggctgtcaagaagtcggacggccagcctaacctcagcggcgagcgtggacggtaacagaagtcgaagcagaacgctttctcaatcttcagaatcgggtacactatcctccgggccccccgggcacactatggaggtcagctgctag

SEQ ID NO: 25194 - DNA, 1116 bp, synthetic construct
  misc_feature 1..1116: note = Description of Artificial Sequence: Synthetic coding sequence
  source 1..1116: mol_type = other DNA
atggccgagctgcaggaggtgcagatcaccgaggagaagcccctgctgcctggacagacccctgaggccgctaaggaagccgagcttgcagcgcggattctgctggaccagggccagacccattcagtggaaaccccatatggtagcgtgacattcacagtgtacgggacaccaaagccaaaacgcccggctattttgacctatcatgacgtgggcttgaactataagagctgttttcagcctctgtttcagtttgaagatatgcaggagatcatccagaattttgtccgggtgcacgtcgacgctcccggaatggaagaaggcgctccggtgtttcccttaggttaccaatacccctccctggatcagctagctgatatgatcccgtgtgtccttcagtaccttaacttttctacgattattggagttggtgtcggggcaggcgcttacatcctggcccgctatgcactcaaccaccctgacaccgttgaggggctggtcttgattaatattgaccccaatgccaaggggtggatggactgggccgctcataagctgaccgggctcacatcctccatccctgagatgatactgggacatctcttctcccaggaggagttgtcaggaaattctgaactgatccaaaaataccggaacatcatcacacacgctcccaatctcgataacattgagctgtactggaattcatataataataggcgagatcttaactttgagagaggtggggatatcaccctcaggtgccctgtgatgctggtggttggtgatcaggccccccatgaggatgcagtagtagagtgtaacagcaaactggatcctacccagacctccttcctgaagatggctgactcaggagggcaaccgcagcttacccagccgggtaagctaacagaagcattcaaatacttcctgcaaggtatggggtacatggcctcttcatgcatgaccaggctgagccgcagccggacggcttctctgacatcagcagcctcagtggatggaaatcgctcacgcagtcgcacactttcacaaagttctgaaagcggaaccctatcaagtgggccacccggacacactatggaagtctcttgttag

SEQ ID NO: 25195 - DNA, 1116 bp, synthetic construct
  misc_feature 1..1116: note = Description of Artificial Sequence: Synthetic coding sequence
  source 1..1116: mol_type = other DNA
atggccgagctgcaggaggtgcagatcaccgaggagaagcccctgttgccaggtcaaacccccgaagccgccaaggaagctgagctggccgcacgaatactgctcgatcaggggcagacacatagcgtcgagaccccgtacggcagcgtcaccttcacggtgtatggcaccccaaagccgaagcgcccagccatattaacatatcacgacgttgggctgaactacaagagttgctttcagccgctttttcagtttgaggatatgcaagagataattcagaatttcgtgcgggtgcatgtcgatgcgcctgggatggaggaaggagcacctgtgtttcccctgggctatcagtatccctccttggatcagctggccgacatgatcccctgcgtgttgcagtatctgaacttttccaccatcattggcgtgggagtgggggccggggcctacattctggctcgctacgcactcaaccaccctgacacagtggaaggtctggtgttaatcaatatcgacccaaacgcgaagggctggatggattgggctgcccataaattgacgggactgacctcatcaattccagagatgattttaggccacctcttctcccaagaagaactgtccggcaacagcgagctgatccaaaagtaccggaatatcatcacgcacgctccaaacctcgataacatagaactctattggaactcttataacaataggagggatctgaacttcgaaaggggcggagatattactctgcgttgcccagtcatgctagttgtaggagaccaggcaccacatgaggatgccgtggttgagtgcaattcaaagctagatccaacccagacctcttttctcaaaatggctgatagcggcggacagccccagcttacccagccaggtaaactcacggaggctttcaagtattttttgcagggcatgggctatatggctagtagttgcatgacccgattgtcacgttctcgaacagctagtttgacatccgcagccagtgtagatggcaatcgcagtaggagccggaccctttcccagtcatcggagtcaggaactctgtcttcagggccccccgggcacaccatggaagtgagctgctag

SEQ ID NO: 25196 - DNA, 987 bp, synthetic construct
  misc_feature 1..987: note = Description of Artificial Sequence: Synthetic coding sequence
  source 1..987: mol_type = other DNA
atggccgagctgcaggaggtgcagatcaccgaggagaagcccctgctcccaggccagacacccgaggccgccaaaacccacagcgtcgagactccctatggatcagtgacttttaccgtgtacggcacgcccaagcctaagcggccagcgatactcacctaccatgatgtcggtcttaactataagagctgctttcagcccttattccagttcgaagatatgcaggagatcatacaaaacttcgtgcgggtacacgtggacgccccgggcatggaagagggtgcacccgtctttcctttgggataccaatatccttctctggatcaactcgctgacatgattccatgcgttctccagtacttaaacttttccacgatcatcggtgttggcgtcggcgctggtgcctacatcctggcacgctatgctctgaccggcttgacatccagcattcccgaaatgattctcgggcatctatttagtcaagaggaactttcgggcaacagcgagttgattcagaagtacaggaacattatcacccatgccccaaacttggacaatatagaactgtactggaacagctataataatcggcgagatctgaactttgagcgggggggtgatatcactctaagatgtccggtgatgcttgtggtgggtgaccaggccccccacgaggatgccgtggttgagtgtaactctaagctggaccctactcaaacttcgtttctcaagatggccgatagcggtggtcagcctcagctgacacaacctggaaagttgactgaggctttcaagtattttctgcagggcatgggctacatggctagttcctgcatgacacggctgtctcgttcccggacagcttcacttacctccgcggcctctgttgatggcaaccgctcccgatcccggacgctcagccaatccagcgaatcaggaacactgtctagcggaccaccggggcacacaatggaagttagttgctag

SEQ ID NO: 25197 - DNA, 1026 bp, synthetic construct
  misc_feature 1..1026: note = Description of Artificial Sequence: Synthetic coding sequence
  source 1..1026: mol_type = other DNA
atggccgagctgcaggaggtgcagatcaccgaggagaagcccctgcttccgggccaaacccctgaggctgccaaaacgcactccgtggaaacaccctacgggagcgttacgttcactgtatacggaaccccaaaaccaaaacgccccgccatcttaacctaccacgatgtaggcctgaattataaaagttgctttcaacctctctttcagtttgaagacatgcaggaaattatccagaactttgttcgcgtgcacgttgacgcccccggaatggaggagggcgcccccgttttcccgctcgggtatcagtacccttcgctggatcagttggcagacatgattccatgtgttttacaatacttgaatttttctaccatcatcggtgtgggagtgggcgccggtgcttacattcttgctagatatgctctgaaccacccggatacagttgaagggttagtgcttattaacattgacccaaatgctaaggggtggatggattgggctgctcacaaattaaccggacttacctcatcgattccagagatgattctcgggcacctattttctcaagaggaattgagcggtaacagtgagcttattcaaaaatacaggaacattataactcatgcccctaacctggataatatcgagttgtactggaattcctataataacagacgtgaccttaacttcgaacgagggggggatatcacactgcggtgcccagttatgcttgtggtaggtgaccaagcacctcacgaggatgccgtgatggccgattctggcgggcaaccgcagctgactcagcctggtaaattgaccgaggcctttaagtacttcctgcagggtatggggtatatggcctcctcttgcatgacccgtctcagtagatcccgcactgccagtcttacttctgccgctagcgtcgatgggaatagaagccgctctcgcaccctgagtcagtccagcgagtcgggaaccctgagctcaggccccccaggacacacaatggaagtgagttgttag

SEQ ID NO: 25198 - DNA, 1116 bp, synthetic construct
  misc_feature 1..1116: note = Description of Artificial Sequence: Synthetic coding sequence
  source 1..1116: mol_type = other DNA
atggccgagctgcaggaggtgcagatcaccgaggagaagcccctgctgccggggcagacacccgaagccgccaaggaggcagaattggcagcccggatcttgctcgatcagggtcagacacattccgtggagacaccctatggaagcgtgacctttacggtatacggtacaccaaagcccaagaggcctgccatcctcacctaccatgatgtggggcttaactacaaaagttgctttcaacccctgttccagtttgaggacatgcaggaaattatacagaattttgttcgagttcacgtggacgcccctggcatggaagagggggccccagtttttccattggggtatcagtacccaagcctggaccaactggccgatatgatcccttgcgtgttgcagtatctgaatttctccacaatcattggggtcggtgtgggggccggcgcctacattctcgcccgctatgctctgaatcatcccgacaccgtagagggactcgtgctcataaatatcgaccctaacgctaagggctggatggattgggccgctcacaaactgacaggactgacaagttccattccggaaatgatcttaggacatctgttctcccaggaagaactctcaggcaactccgaactaattcagaagtaccggaacatcatcactcacgcacccaatttggataacattgagctgtactggaattcctacaacaaccggcgcgatttaaatttcgagaggggaggagacatcacactgaggtgccccgttatgctcgtcgtgggtgaccaagcaccccacgaggacgcagtggtggaatgtaattcaaagttggaccctacgcagacatcctttttaaaaatggctgactccggaggccagccgcagctgacacaacccgggaagctaaccgaggcgttcaagtatttcctccaaggcatgggttatatggcttctagctgcatgacaagactgtctcgcagtcggaccgcgagcttgacatcagccgcctctgttgatggcaacaggagccggagcagaaccctttcacaaagttccgaatctgggacactatcctccggaccccccgggcatacaatggaagttagctgctag

SEQ ID NO: 25199 - DNA, 1104 bp, synthetic construct
  misc_feature 1..1104: note = Description of Artificial Sequence: Synthetic coding sequence
  source 1..1104: mol_type = other DNA
atggagaacggcggcagcatgcaggccaccatggccgagctgcaggaggtgcagattactgaagagaaaccacttctgcctggccagacccctgaggctgctaaaacccactccgtggaaaccccatacggatctgttacgttcacggtctacgggacccctaaacctaagcggccagccatcctgacataccacgatgtcgggctaaattacaagagctgcttccagccactgtttcagtttgaagacatgcaagagataattcagaattttgtgagggtgcacgtagatgccccaggcatggaggagggtgcacctgtgttccccttgggatatcaatatccaagtctggatcagctggccgacatgatcccctgcgtgcttcagtacctcaatttttccaccattattggagtcggagtgggtgctggagcctacatccttgcacgatatgctctcaaccaccccgacacagtagaaggattggtgcttataaacatagaccctaatgcgaagggctggatggactgggccgcccataagttaacaggcctgacaagtagtatccctgagatgattttaggccacctgttcagtcaggaggagctctctggcaacagcgagctcatccagaaataccgaaacatcataactcacgctcctaacctcgataatattgagctgtattggaactcctacaataacagaagggacctcaattttgagcggggtggagatatcacattgagatgtcccgtgatgctggtggtgggcgatcaggcgcctcacgaggacgcagtggttgagtgtaactccaaactggatcccactcagactagctttctgaagatggcagactccggaggtcagccccaactgacacagccgggcaaactgaccgaggcgtttaaatactttctgcaggggatggggtatatggcctccagctgcatgacccgcctgagcagatccagaaccgcaagcctcacgtccgccgcatcggtggacgggaaccggagtcggtccaggaccctgtctcagagctccgagtccggcactttatcatcgggacccccgggccatacgatggaagtgagctgctag

SEQ ID NO: 25200 - DNA, 504 bp, synthetic construct
  misc_feature 1..504: note = Description of Artificial Sequence: Synthetic coding sequence
  source 1..504: mol_type = other DNA
atggccgagctgcaggaggtgcagatcaccgaggagaagcccctgctcccaggccagacgccagaggctgccaaaactcactctgtggaaacgccttacggctctgtgaccttcaccgtatacggaactccaaaaccgaagcggccggccatccttacctaccacgacgtgggcctgaactacaagagctgttttcagccccttttccagtttgaagatatgcaggaaatcatccagaattttgtacgtgtccacgtggacgcccctggtatggaggagggagcccccgtcttcccacttggctaccagtacccgtccttagatcaactggctgacatgatcccctgtgtgctgcaatacttgaatttctccactattattggagttggagttggtgcaggagcctatatactggcacggtacgcgttaaatcaccccgatacagtggagggtctggtgctcatcaatatagaccctaatgctaagggatggatggactggtag

SEQ ID NO: 25201 - DNA, 1074 bp, synthetic construct
  misc_feature 1..1074: note = Description of Artificial Sequence: Synthetic coding sequence
  source 1..1074: mol_type = other DNA
atggccgagctgcaggaggtgcagatcaccgaggagaagcccctgctgccagggcagacaccagaggcggctaagactcactccgtagagaccccttacggatctgtgacttttacggtgtatggcacgcccaaacctaagcgaccagctatccttacgtatcatgacgtgggattgaattataaaagttgcttccaacccttgtttcagtttgaagatatgcaggaaatcatccagaattttgttcgtgtacacgtggatgcccctgggatggaggagggcgccccagtcttccctttaggctaccagtaccctagcctagaccaactcgcggatatgattccgtgcgtgctgcagtatttgaattttagtaccattatcggagtcggggtgggagcaggcgcgtatatactggcccgctacgctcttaatcatcccgacacagtcgagggcttagtcttaattaacattgatccaaacgcaaagggctggatggactgggccgcccacaagctgactggccttacttcctctattcctgaaatgattttggggcacttattttcacaagaagagttgagcggaaactccgaactaatacaaaagtatcgaaatataattacccacgctcccaacctggataatattgagctctattggaattcctataataatcgccgagacctgaatttcgagcgcggcggcgatatcaccctgcgttgcccagtcatgctggtcgtcggggaccaggcgccgcatgaggatgctgtggtagagtgcaactctaagttagacccaacacaaaccagttttctgaagatggcagattcagggggccagccccaacttacccagcctggcaaactgaccgaggcgttcaagtatttccttcaggggatgggttacatggccagctcctgcatgacccgactcagtcggtcccggacagcatcgcttacttctgcagccagcgtggacgggaatcggagcaggagccggacactaagtcagtcctcagaatctggtaccctctcaagtggaccacctgggcatactatggaagtcagttgttag

SEQ ID NO: 25202 - DNA, 522 bp, synthetic construct
  misc_feature 1..522: note = Description of Artificial Sequence: Synthetic coding sequence
  source 1..522: mol_type = other DNA
atggccgagctgcaggaggtgcagatcaccgaggagaagcccctgctgccaggacaaactccagaggccgcaaaggaagccgagcttgctgcccggatcctccttgatcagggtcagactcatagcgtggagactccatatggatcagtcacttttaccgtttacgggaccccgaagccaaaacgccccgcaattctcacctaccacgacgtcggcctcaactacaaatcatgctttcaaccgctgttccagttcgaggatatgcaggagattattcaaaactttgtcagagtccatgttgatgcccctggcatggaagagggtgctccagtcttccctcttggctatcagtacccgtccttggaccagctcgctgatatgatcccttgtgtgctccagtacctcaatttttctaccatcattggggtgggagttggtgcgggggcatacatactggctcggtatgctctgaatcaccctgacaccgtagaaggactcgtcctgatcaatatcgacccgtag

SEQ ID NO: 25203 - DNA, 759 bp, synthetic construct
  misc_feature 1..759: note = Description of Artificial Sequence: Synthetic coding sequence
  source 1..759: mol_type = other DNA
atggccgagctgcaggaggtgcagatcaccgaggagaagcccctgctgccaggacaaacaccagaggctgctaaagaagctgagttagcggcgagaattctcctcgaccagggacagacacactcagttgagaccccttatggatccgtgaccttcaccgtgtatggtactccaaaacctaagaggccagcaatactcacctaccatgacgtaggtctcaattataaatcttgctttcaacctttgtttcagtttgaggatatgcaggagatcatccagaatttcgtgcgcgtccacgtcgatgcccccggaatggaggaaggagcccccgtgttcccactagggtaccaatacccttccctcgaccagctcgccgatatgattccttgcgtcctacagtatctgaatttcagtacaataataggcgtcggggtgggcgccggcgcttacatcctggcccgatacgccctcaaccacccggacacagtagagggactagtgctgattaacatcgacccaaacgcaaagggctggatggactgggcggcccacaagctgacgggactgacatcctccatacccgaaatgattctcggtcatctattttcacaagaggagctgagtggaaactctgagctgatccagaagtacagaaatatcatcactcatgcgcctaacctcgacaacatcgaactttactggaacagctacaacaaccgtagagacttgaacttcgaacgggggggagacatcacatag

SEQ ID NO: 25204 - DNA, 525 bp, synthetic construct
  misc_feature 1..525: note = Description of Artificial Sequence: Synthetic coding sequence
  source 1..525: mol_type = other DNA
atggccgagctgcaggaggtgcagatcaccgaggagaagcccctgttgcctggccagaccccggaagccgcaaaaacacacagtgtagagaccccttatggaagtgtcacatttaccgtgtacggaacgcccaagcctaaacgcccggccattttgacataccatgacgtggggctgaactacaaaagctgcttccagcctttatttcaattcgaggacatgcaggaaattattcagaacttcgtgcgtgtgcatgtcgacgcgcctggaatggaagagggcgcccctgtgtttcccctgggataccagtacccatctcttgatcagctggccgatatgattccttgcgtcctgcagtacctgaatttttccacgatcatcggcgtaggagtaggcgctggtgcctatatcctggccaggtatgctctcaaccaccctgatacggtggaagggctcgtgctcatcaacatagatcccaacgcaaaggggtggatggactgggccgcccacaaacttacaggctag

SEQ ID NO: 25205 - DNA, 1074 bp, synthetic construct
  misc_feature 1..1074: note = Description of Artificial Sequence: Synthetic coding sequence
  source 1..1074: mol_type = other DNA
atggccgagctgcaggaggtgcagatcaccgaggagaagcccctgcttccgggacagacacccgaagcggcaaagacccattcagtggaaactccctatggcagcgtgacctttacagtttatgggacacccaagccaaagaggcccgccatcctgacctatcatgatgtggggctgaactacaaaagttgcttccagcctctgttccagtttgaagacatgcaggagatcatccagaactttgttcgggtgcacgtcgacgcccctggaatggaggagggagcaccagtttttccattaggataccaatatccgagcctagaccagttggccgatatgataccttgtgtactgcaatatctaaatttctcaactatcattggcgtcggagttggggccggcgcatatatcctggctaggtatgcccttaatcatcccgatacggtggagggattggtgcttatcaatatcgatcccaatgccaaaggttggatggactgggctgcccacaagctgactggcctcacaagcagtatccctgagatgattttgggccatctcttcagccaagaggaattaagcggcaactcagagcttatacagaaatatcgcaacatcatcactcatgcgcccaatctggataacattgagctgtactggaactcctataataatagaagagacctgaacttcgagcggggtggggacattactctccggtgccctgtaatgttggtggtgggtgaccaagcaccacacgaagacgccgtggtcgagtgcaactcaaagctggatccaacacaaactagtttcttgaaaatggctgattccggggggcagcctcaactgacgcagcccggtaaactgaccgaagcattcaagtattttttacagggtatgggctacatggcctcgtcatgtatgacaagactctcccgctcgaggactgcctccctgacatccgcagcctcggttgacggcaaccgctccagatccagaaccttgtctcagagttctgaatctggcacccttagctccgggccccccggacacacaatggaagtctcctgttag

SEQ ID NO: 25206 - DNA, 450 bp, synthetic construct
  misc_feature 1..450: note = Description of Artificial Sequence: Synthetic coding sequence
  source 1..450: mol_type = other DNA
atggccgagctgcaggaggtgcagatcaccgaggagaagcccctgcttccgggccagacccccgaagccgcaaaggaggccgaactagctgcgcggatcctcctggaccaggggcagacacattcagtcgagactccgtacggtagcgtgacctttacagtgtatggcacccctaagccgaaacggcctgcaatcctcacctatcacgacgttgggttgaactacaagtcctgttttcagcctttgtttcagttcgaagacatgcaggagatcatacagaactttgtgcgggtccatgttgacgcccccggaatggaggaaggcgctcctgtctttcctctcggataccagtacccgtctctggaccagctggccgatatgatcccgtgtgtgttgcagtatttgaatttctccaccatcattggcgtgggtgtgggagccggtgcctag

SEQ ID NO: 25207 - DNA, 261 bp, synthetic construct
  misc_feature 1..261: note = Description of Artificial Sequence: Synthetic coding sequence
  source 1..261: mol_type = other DNA
atggccgagctgcaggaggtgcagatcaccgaggagaagcccctgcttcctgggcaaacaccggaagccgcgaaggaagctgagctggccgcgcgtatcctgcttgatcaaggacaaactcactcagtggagaccccttacgggagcgtcaccttcaccgtttacggaactccaaagccgaagcgacctgctattctgacctatcatgacgtcggactgaactacaaatcctgtttccagcccttgtttcaatttgaatag

SEQ ID NO: 25208 - DNA, 390 bp, synthetic construct
  misc_feature 1..390: note = Description of Artificial Sequence: Synthetic coding sequence
  source 1..390: mol_type = other DNA
atggccgagctgcaggaggtgcagatcaccgaggagaagcccctgttgcctggacagactccagaggccgcaaaagaagcagaactagccgccaggatcctgctggatcagggacaaacgcattctgtggaaaccccctacggatctgttactttcaccgtatatggaacccctaagcccaagagacctgccatactgacatatcacgacgtgggactgaactataagtcctgttttcagcctcttttccagttcgaggacatgcaggagataatccagaactttgtcagggtgcacgtggacgcacctggaatggaagagggggcaccagtcttccccctcgggtatcagtacccctccctagaccagctcgccgacatgatcccgtag

SEQ ID NO: 25209 - DNA, 447 bp, synthetic construct
  misc_feature 1..447: note = Description of Artificial Sequence: Synthetic coding sequence
  source 1..447: mol_type = other DNA
atggccgagctgcaggaggtgcagatcaccgaggagaagcccctgctacctggacagacacccgaggccgctaaggaggcagaactcgccgctcggattttgcttgatcaggggcagacccactctgtcgaaactccatatgggagcgtcacatttaccgtctacgggacccccaagcccaagcggcctgcaattcttacataccatgacgtcgggcttaattataagagttgcttccagcctctgttccagttcgaggatatgcaggagattatccaaaacttcgttcgcgtccacgtggacgccccaggaatggaggagggggcacctgtgtttccactgggataccagtatcccagcctcgaccagctggcagacatgattccttgtgtgctacaatacttgaatttcagtactattatcggcgtcggggttggagccggctag

SEQ ID NO: 25210 - DNA, 405 bp, synthetic construct
  misc_feature 1..405: note = Description of Artificial Sequence: Synthetic coding sequence
  source 1..405: mol_type = other DNA
atggccgagctgcaggaggtgcagatcaccgaggagaagcccctgctgccagggcagacccctgaggctgcaaagactcacagcgtggagacaccttatggctcagtaaccttcaccgtttacggaactcctaaaccaaaaagaccggcaatcttgacctatcatgacgttggcttaaattacaagagttgcttccagcccctgttccagtttgaggacatgcaagagattatccagaatttcgttagagttcatgttgacgctccgggcatggaggaaggggcgccagtgttccctctgggttaccagtacccatccctggatcagcttgctgatatgataccctgcgtgctccagtatctgaacttttccactatcattggagttggggttggggcagggtag

SEQ ID NO: 25211 - DNA, 327 bp, synthetic construct
  misc_feature 1..327: note = Description of Artificial Sequence: Synthetic coding sequence
  source 1..327: mol_type = other DNA
atggccgagctgcaggaggtgcagatcaccgaggagaagcccctgctccccggacagacaccagaagcggcaaaaacccattctgtggagactccatacggcagtgttacctttacggtgtacggtacacctaagcccaagcgtcctgccatcctgacttatcacgacgtagggcttaactataagtcctgcttccaacctctttttcagttcgaagatatgcaagaaatcatacagaactttgtgagagtgcatgtcgacgccccaggcatggaggagggcgctcccgtctttcctctcggatatcagtaccccagcctggactag

SEQ ID NO: 25212 - DNA, 363 bp, synthetic construct
  misc_feature 1..363: note = Description of Artificial Sequence: Synthetic coding sequence
  source 1..363: mol_type = other DNA
atggccgagctgcaggaggtgcagatcaccgaggagaagcccctgctgcccggacagacccctgaggctgctaagacgcattccgtggagaccccctacggttccgtgacatttaccgtgtacggcacccccaagcccaaacggcccgcaatcctgacttaccatgacgtggggctgaactacaagtcttgttttcagcctctcttccaattcgaggacatgcaagaaattattcagaatttcgtaagggttcatgtggacgcccctgggatggaggagggggctcctgtgtttccactcggctaccagtatcccagcttggatcagttggctgatatgattccctgtgtgctccagtattag

SEQ ID NO: 25213 - DNA, 300 bp, synthetic construct
  misc_feature 1..300: note = Description of Artificial Sequence: Synthetic coding sequence
  source 1..300: mol_type = other DNA
atggccgagctgcaggaggtgcagatcaccgaggagaagcccctgctgccaggccaaacccccgaagccgccaaggaagccgagctcgctgccaggattctgctggaccaaggccagactcatagcgtggagaccccctatggcagcgtaacctttacagtgtatgggactcctaagcctaaacggcctgcaatcttgacataccatgatgtcggactgaactataaatcatgctttcagccacttttccagtttgaagatatgcaagaaattatacaaaatttcgtgagggttcattag

SEQ ID NO: 25214 - DNA, 279 bp, synthetic construct
  misc_feature 1..279: note = Description of Artificial Sequence: Synthetic coding sequence
  source 1..279: mol_type = other DNA
atggccgagctgcaggaggtgcagatcaccgaggagaagcccctgctgcccgggcagacacccgaagccgctaaaacacactctgtggaaacaccttacggtagtgtgaccttcaccgtttatggcactccaaagccgaaaaggcccgccatcctgacctatcacgatgtggggcttaattacaaatcttgtttccagcccctgttccaattcgaggatatgcaggagattattcagaattttgtgcgcgtgcatgttgatgcgccagggatggagtag

SEQ ID NO: 25215 - DNA, 462 bp, synthetic construct
  misc_feature 1..462: note = Description of Artificial Sequence: Synthetic coding sequence
  source 1..462: mol_type = other DNA
atggccgagctgcaggaggtgcagatcaccgaggagaagcccctgcttcccggccagacccctgaggccgccaagacccatagtgtcgagacaccctatggctccgtgacattcacagtgtacggcacccctaaaccaaagagacccgctatcctgacgtatcatgatgtcggtttgaactacaagtcctgcttccaacctctctttcagtttgaggatatgcaagagatcatacagaattttgtgagagtacatgtcgacgccccaggcatggaggaaggcgctcctgtttttcccctggggtatcagtacccgagcttggaccagctggccgacatgattccctgtgttctgcagtatttgaatttttccaccataataggcgtgggtgtgggtgccggagcgtatatcctggcccgctatgctctgaatcacccggacactgttgagggtcttgtgtag

SEQ ID NO: 25216 - DNA, 1074 bp, synthetic construct
  misc_feature 1..1074: note = Description of Artificial Sequence: Synthetic coding sequence
  source 1..1074: mol_type = other DNA
atggccgagctgcaggaggtgcagatcaccgaggagaagcccctgctgcctggtcagacgccagaggcagcaaagacacattccgttgaaactccttacggctctgtgacctttactgtctacgggacccccaagcccaagcggcctgccattctgacttatcatgacgttgggctgaactataagtcatgtttccaaccattgtttcaattcgaggacatgcaggagatcatacagaattttgtgcgcgtccacgtggacgcccctggtatggaagaaggcgcaccagtgtttcctttgggctaccagtacccatctctcgatcagctggccgacatgataccatgtgtactccagtacctgaacttttccacgataattggcgtcggtgttggcgctggggcatacatcctggctaggtatgcccttaatcatcctgataccgtggaaggcctggtgctgatcaacattgacccgaacgccaaaggctggatggactgggccgcacacaaactcacaggcctcaccagctcgatacctgagatgatcctggggcatctgttctcacaagaagagctgtctggtaatagtgaactgattcagaagtatagaaatattattacacatgcaccaaatctggacaatattgagctatattggaattcctacaataatcggagagatctgaattttgagcgcggtggagacataactctgcggtgccccgtgatgctggtagtgggagaccaggctccacacgaggacgccgtggtggaatgtaactctaaactcgatcccacacaaacaagttttctgaagatggcagacagcgggggccagccccaacttacgcagccaggtaaactgacggaggcatttaaatattttctgcagggcatgggttacatggctagctcctgtatgacaagactcagccgttcaagaaccgcctccctcactagtgccgccagcgtggatggcaaccgatcccggtcaaggaccttatctcagtcaagcgagtcgggcactctctcctctggccctccgggccatactatggaggtgtcttgctag

SEQ ID NO: 25217 - DNA, 585 bp, synthetic construct
  misc_feature 1..585: note = Description of Artificial Sequence: Synthetic coding sequence
  source 1..585: mol_type = other DNA
atggccgagctgcaggaggtgcagatcaccgaggagaagcccctgctcccaggacagactcccgaggccgcaaaggaagcagaactcgctgcacgaattttgctcgatcagggacagacacattccgtagaaactccgtatggatcagtgaccttcacggtatatggcacacctaagcctaagaggcccgccatccttacctatcacgacgtcggactgaattataaaagctgctttcaacctctcttccaattcgaggatatgcaggagatcatccagaatttcgtccgcgtacatgtagacgcccctggtatggaagaaggcgcgccagtgttccccctgggttatcagtacccatctttagatcagttagccgatatgattccctgcgtactgcaatacttaaatttctccacaatcattggcgtgggagtgggggcgggtgcgtatatcctggctaggtacgcactgaaccaccccgacactgttgagggtctggttcttattaacatagaccccaacgcaaaagggtggatggactgggccgctcataaactgactggccttacttcgagcattccatag

SEQ ID NO: 25218 - DNA, 387 bp, synthetic construct
  misc_feature 1..387: note = Description of Artificial Sequence: Synthetic coding sequence
  source 1..387: mol_type = other DNA
atggccgagctgcaggaggtgcagatcaccgaggagaagcccctgttgcctggacagaccccagaggccgctaaaacacactctgtggagaccccatatggtagcgtgacatttactgtgtacgggacaccaaaacctaagaggcccgctattctcacttaccacgatgtcggattaaattacaaatcttgtttccagccgctgttccagttcgaagatatgcaagagatcattcaaaattttgtccgcgtccatgtggatgcgccaggcatggaagaaggagctccggtgttcccgttgggataccaatacccaagtctggaccaactcgccgacatgatcccatgcgtgttacagtacctcaacttcagcactattattggctag

SEQ ID NO: 25219 - DNA, 660 bp, synthetic construct
  misc_feature 1..660: note = Description of Artificial Sequence: Synthetic coding sequence
  source 1..660: mol_type = other DNA
atggccgagctgcaggaggtgcagatcaccgaggagaagcccctgttgcctggtcagacacctgaagccgccaaggaagctgagctcgcggctcgcattttgctcgatcagggccagacacactcggtcgagactccctatggttccgtaactttcaccgtttatggaacgcctaaacctaagagaccagccattctcacataccatgatgtcggcctaaactacaaatcatgctttcaacccctctttcagttcgaagatatgcaggaaattatccagaatttcgtgcgggtccacgtggacgcgcctgggatggaggagggcgctcccgtgtttcctctcggctatcagtacccttccctggatcagctcgccgacatgattccttgcgtgctgcagtatctgaatttttctactattataggtgtgggtgtgggcgcaggtgcttacatcttagcacgctacgcccttaatcaccccgacacagtagaaggattggtcctaataaatattgatcctaatgccaaaggctggatggattgggcagctcacaaacttactgggttgacctctagcatacccgaaatgatactcggccatctgttcagtcaggaggagctatctggcaattctgagctaattcagaaatatagaaactag

SEQ ID NO: 25220 - DNA, 666 bp, synthetic construct
  misc_feature 1..666: note = Description of Artificial Sequence: Synthetic coding sequence
  source 1..666: mol_type = other DNA
atggccgagctgcaggaggtgcagatcaccgaggagaagcccctgctccctgggcagacacccgaggctgctaagacccacagtgtcgagaccccgtatggatcagtgactttcacagtttatggaacacctaagcccaagcgcccagccatattaacttaccacgacgtgggtctcaactacaagtcctgctttcagcctctcttccagtttgaagatatgcaggaaattatccagaattttgttagagttcacgtggacgctccagggatggaagagggcgcccccgtcttcccattgggctaccagtacccaagcctggaccagctggccgatatgatcccatgcgtgctgcagtacctgaacttctccacgatcatcggggtgggcgtaggagcaggcgcatatatattggcccggtacgctcttaatcatccagataccgtcgaaggactggtgttgattaacattgatcccaacgccaagggttggatggattgggcagctcataagttaacaggtctgacatcaagcatcccggagatgatactgggtcacctgtttagccaagaggaactatcaggaaactccgagctcattcagaagtacaggaatatcataactcacgcacctaatttagacaatatagagctgtactggaactag

SEQ ID NO: 25221 - DNA, 1116 bp, synthetic construct
  misc_feature 1..1116: note = Description of Artificial Sequence: Synthetic coding sequence
  source 1..1116: mol_type = other DNA
atggccgagctgcaggaggtgcagatcaccgaggagaagcccctgctaccaggccagacccctgaagctgccaaagaggccgagctggccgcccgaattttgctggaccagggacagacacacagcgtcgagacaccatatggaagcgtgacattcactgtttacggcactcctaagcctaagcgccccgctatcttgacttaccatgatgtgggactcaattacaagagttgcttccagcccctgttccagttcgaagacatgcaggaaattatccagaactttgttagggtgcacgtcgatgctcctggtatggaggagggtgcaccagtgtttccactgggttaccaatacccttcactcgaccagctggccgacatgatcccctgcgtcttacagtatctcaattttagcaccatcattggtgtgggcgttggcgcaggcgcatacattctggcgcgctacgcactgaatcaccccgacaccgtggagggactggtcctgattaatattgatccgaacgcaaaggggtggatggattgggccgcgcacaagttgaccggactgacatcaagcatcccagaaatgatcctgggccatctctttagccaggaggagctgagcggcaactcagaactgatccaaaagtacaggaatattataacccacgccccaaatctggataatattgaactttattggaattcctataacaatcggcgcgacttgaactttgagaggggaggagacatcaccctacggtgtccagtgatgctggtggtgggggaccaagcccctcacgaagatgctgttgtcgagtgcaacagcaaactcgaccccacacaaacctccttcctaaagatggccgatagcggagggcagccacagctcacccagccgggcaaactcacagaagccttcaagtacttcttacagggcatggggtacatggcatctagctgtatgactcgcctttcgagatctcgtacagccagccttaccagcgcagcctctgtagatgggaatcggtcacggagtcggaccctgtctcagtccagtgagagcggaacactaagctccggtcctcctggccacacaatggaagtttcctgttag

SEQ ID NO: 25222 - DNA, 432 bp, synthetic construct
  misc_feature 1..432: note = Description of Artificial Sequence: Synthetic coding sequence
  source 1..432: mol_type = other DNA
atggccgagctgcaggaggtgcagatcaccgaggagaagcccctgctgccaggccaaacacccgaagcggcgaagactcactccgtggagactccatacggctccgtaacttttacggtatacggaaccccaaagccaaaacgtccagccattcttacctatcatgacgtgggcctgaactacaagtcctgtttccagcccctgtttcaattcgaggatatgcaggagattattcagaattttgtgcgggtacacgtggatgctcctggtatggaagaaggagccccagtgtttcctctgggatatcagtaccccagcttggaccaacttgccgatatgatcccttgcgtgttgcagtacctcaactttagcaccattattggtgtgggggtgggcgccggggcttatatactcgcacgatacgctctttag

SEQ ID NO: 25223 - DNA, 483 bp, synthetic construct
  misc_feature 1..483: note = Description of Artificial Sequence: Synthetic coding sequence
  source 1..483: mol_type = other DNA
atggccgagctgcaggaggtgcagatcaccgaggagaagcccctgctacccggccaaacccctgaagctgccaaaacccactctgtcgagaccccctatggcagcgtgaccttcactgtgtatgggacacccaagcctaagcggcccgccattctgacttaccacgacgtcgggttgaactataaatcatgttttcagccattgtttcagtttgaagatatgcaggagatcattcagaatttcgtgcgcgtccacgttgacgcccccggtatggaggagggagcccccgtatttcctctgggataccaatatccctcccttgaccagttagctgacatgattccgtgtgtgctccaatacctcaacttcagcaccatcattggggtcggcgtgggcgcaggcgcctacattttggctagatatgcattaaaccatcccgatactgtggaagggctcgtgctaatcaacattgaccccaactag

SEQ ID NO: 25224 - DNA, 426 bp, synthetic construct
  misc_feature 1..426: note = Description of Artificial Sequence: Synthetic coding sequence
  source 1..426: mol_type = other DNA
atggccgagctgcaggaggtgcagatcaccgaggagaagcccctgctgcctggccagacccctgaggcagcaaaggaggccgaactggctgcacggatactgctggaccagggacaaacccacagtgttgagacaccttatgggagcgtaacatttaccgtgtacgggactccgaagcccaagcgtccagctatactgacttaccatgatgtcgggctaaactacaagtcctgttttcaaccattatttcagtttgaagacatgcaggagatcatccagaatttcgtcagagtgcatgtggacgctcccggaatggaagagggagccccagtcttccccctcgggtaccagtacccatctctggaccagctggctgacatgataccttgcgtcctacagtatcttaatttctctaccataatctag

SEQ ID NO: 25225 - DNA, 357 bp, synthetic construct
  misc_feature 1..357: note = Description of Artificial Sequence: Synthetic coding sequence
  source 1..357: mol_type = other DNA
atggccgagctgcaggaggtgcagatcaccgaggagaagcccctgctgcccggccagacacctgaggcagctaaggaggcagaacttgccgcgcgcattctcctcgaccagggccagacacatagcgttgagactccctacggatctgtgacgttcacagtctatggtacccccaagcccaaacgcccagctatcctgacttaccacgacgtcgggctgaactataaatcctgcttccagcccttatttcagttcgaagacatgcaggaaattattcagaacttcgttagggtgcatgtcgacgcccctggaatggaagagggggctcctgtcttcccactcgggtaccaatactag

SEQ ID NO: 25226 - DNA, 423 bp, synthetic construct
  misc_feature 1..423: note = Description of Artificial Sequence: Synthetic coding sequence
  source 1..423: mol_type = other DNA
atggccgagctgcaggaggtgcagatcaccgaggagaagcccctgctgccaggacagacccctgaggctgctaaagaggccgaacttgccgcaaggattcttctagatcagggacagacacactctgttgagacaccttatggttctgtcacgtttaccgtgtacggaactcccaagccaaagcggcctgcaatcttgacttaccacgacgtggggctcaactataagtcctgcttccagcctctgtttcagtttgaagacatgcaggagattatacaaaatttcgttagagtgcatgttgacgcccccggtatggaggaaggcgctcctgtgtttccccttggataccaatacccatcacttgatcagctggccgacatgataccctgcgttctacagtaccttaatttttctaccatatag

SEQ ID NO: 25227 - DNA, 435 bp, synthetic construct
  misc_feature 1..435: note = Description of Artificial Sequence: Synthetic coding sequence
  source 1..435: mol_type = other DNA
atggccgagctgcaggaggtgcagatcaccgaggagaagcccctgctgcctgggcagaccccagaggccgctaaaacacactccgtagagacaccttacggatccgtgacctttacagtatatggaacaccgaaaccaaagcggcctgccattcttacttatcatgacgtggggttaaactataagtcatgctttcagcctttgtttcagtttgaggacatgcaggagatcattcaaaactttgtgagagtgcacgttgatgccccaggcatggaagaaggagcccctgtcttccccctcggctaccaatacccttctttggaccaactcgccgatatgatcccttgtgtgctccagtacttaaactttagtactatcatcggagtgggtgtaggagccggcgcttacattctagcccgatatgccctcaactag

SEQ ID NO: 25228 - DNA, 462 bp, synthetic construct
  misc_feature 1..462: note = Description of Artificial Sequence: Synthetic coding sequence
  source 1..462: mol_type = other DNA
atggccgagctgcaggaggtgcagatcaccgaggagaagcccctgctcccggggcagactcctgaggccgcaaaaacacattccgtggagaccccttatggctctgttactttcacagtgtatggtactcctaagcccaaaaggccagctattctcacttaccacgatgtaggcttgaactataaatcctgcttccagcccctgttccagtttgaggatatgcaggagattatccagaatttcgtgagggtgcacgtggacgcccccggaatggaggaaggtgctcctgtcttccccctggggtaccagtatccatctctggaccagctggccgacatgattccctgcgtactgcagtacctcaatttttccactattattggtgtcggagtgggggccggggcctacattttagccaggtatgcactcaatcaccccgatacagttgagggactcgtatag

SEQ ID NO: 25229 - DNA, 675 bp, synthetic construct
  misc_feature 1..675: note = Description of Artificial Sequence: Synthetic coding sequence
  source 1..675: mol_type = other DNA
atggccgagctgcaggaggtgcagatcaccgaggagaagcccctgctccccggccagacccctgaggcagcaaaaacccactcagtggaaactccatacggcagcgttaccttcacagtttatgggactcccaaaccaaagaggccagccatccttacctaccacgatgtcggtctgaattacaaatcatgctttcagccccttttccagtttgaggacatgcaagagattatccagaactttgtcagagtgcacgttgacgcccccggcatggaggagggggcgccagtgttccccttggggtatcaatatccctctctggatcagttggccgacatgatcccttgcgtcctgcagtatttgaacttcagtacaataattggcgttggggtcggagccggcgcctacatcctggctcggtatgctcttaaccaccccgacaccgtggaaggtctcgtcctgattaacattgaccctaacgcaaaggggtggatggactgggcagcccataagctcacaggactcaccagctcaatccccgaaatgattctggggcatctgttttcacaagaagaactttccgggaactctgaactgatacagaaatacagaaacatcattacacatgctcctaatctggataatattgagctgtactggaatagttataactag

SEQ ID NO: 25230 - DNA, 453 bp, synthetic construct
  misc_feature 1..453: note = Description of Artificial Sequence: Synthetic coding sequence
  source 1..453: mol_type = other DNA
atggccgagctgcaggaggtgcagatcaccgaggagaagcccctgctgcctggacaaacgcctgaggccgcaaagacgcactctgtagaaaccccctacggctccgtcactttcaccgtatacggtacgcccaaaccgaaaagacccgcaattctaacttaccatgatgtcggtctgaactacaagagctgtttccagcccttgttccaatttgaagacatgcaggagatcattcagaacttcgtccgggtccacgtggatgcccccggcatggaagaaggcgcccccgtctttccattggggtatcagtacccatcactggaccagttggctgacatgataccttgtgtgctccagtatctgaatttcagcacaattattggggtgggtgtcggggctggcgcttacattctggcccggtacgctctgaaccacccggatactgtggaatag

SEQ ID NO: 25231 - DNA, 384 bp, synthetic construct
  misc_feature 1..384: note = Description of Artificial Sequence: Synthetic coding sequence
  source 1..384: mol_type = other DNA
atggccgagctgcaggaggtgcagatcaccgaggagaagcccctgctccctggccaaactccagaggcagcaaaaactcacagtgtggagactccttacggatctgtgacatttaccgtgtacggtacccccaaaccaaagaggcctgcaattctcacctatcatgacgtaggcctgaactacaaatcttgcttccagcccctttttcaattcgaggatatgcaagaaataatccagaatttcgttagagttcacgtggacgcgccgggcatggaggagggcgccccagtgttccctctggggtaccagtatccgtccttggatcagcttgccgacatgattccctgtgtgctgcagtacttgaatttctccacaattatctag

SEQ ID NO: 25232 - DNA, 450 bp, synthetic construct
  misc_feature 1..450: note = Description of Artificial Sequence: Synthetic coding sequence
  source 1..450: mol_type = other DNA
atggccgagctgcaggaggtgcagatcaccgaggagaagcccctgctgccgggccagacacctgaggctgcgaagactcacagtgtggagaccccgtatggctccgtgaccttcaccgtgtatggcactccaaagcccaaacgccctgcaatcctcacatatcatgatgtcggtctgaactataaatcatgttttcagcctctcttccaatttgaggatatgcaagagatcatccaaaactttgtgcgcgtccacgtggatgccccaggcatggaagagggagctcccgtgttcccacttggctaccagtacccctcgctcgaccagctggcagatatgattccttgtgttctccagtatttgaacttctctactattataggtgtgggtgtgggagctggtgcttacatcctcgcgcgctacgcactgaatcacccggacacagtttag

SEQ ID NO: 25233 - DNA, 1128 bp, synthetic construct
  misc_feature 1..1128: note = Description of Artificial Sequence: Synthetic coding sequence
  source 1..1128: mol_type = other DNA
atggacgagctgcaggacgtgcagctgaccgagatcaagcccctgcttaacgataaaaacgggactcgcaacttccaggactttgattgccaggagcacgacatcgaaactacccatggggtggtacatgttaccatccgtggtttgcctaagggcaatcgtcccgttatcctgacctatcatgatataggtctcaatcacaagtcatgttttaatgcattcttcaattttgaagacatgcaggagataactcaacacttcgccgtgtgccacgtggatgcacctggccaacaggaaggggctccaagcttccccacagggtaccagtatcccacaatggacgagttggccgagatgctacctccagttttgacacaccttagtttgaagagcatcatcggaatcggagttggtgctggggcctatattctgtctcgctttgctctaaatcatcctgagctcgtggaaggactcgttctgatcaatgttgatccttgtgccaagggctggatagattgggctgcaagtaagttatcaggcctaacaacaaacgtggttgacattatcttggcccaccatttcggccaggaggaacttcaggccaacctggatctcatacagacttaccgcatgcacatcgcacaggatattaatcaagacaatcttcagctatttttgaactcatacaacggccggcgggatctggaaattgagcgacccattttggggcagaacgacaacaagtccaaaacattgaagtgtagcaccctgcttgtggttggcgacaactcaccagctgtggaggctgtggtggagtgtaattctaggctgaacccaattaacaccacactcttgaagatggcagactgtggcgggctaccacaagtcgttcaacccggcaaactcaccgaagcctttaagtacttcctccaggggatgggctatattccttctgcatctatgaccaggcttgcccggtccaggactcactccaccagctcaagtctgggctcgggcgaatcccctttcagccgaagtgtcaccagcaaccaatcagatgggacccaggagtcttgtgaatctcccgatgtgctggacaggcatcagacgatggaagtatcctgttag

SEQ ID NO: 25234 - DNA, 1092 bp, synthetic construct
  misc_feature 1..1092: note = Description of Artificial Sequence: Synthetic coding sequence
  source 1..1092: mol_type = other DNA
atggacgagctgcaggacgtgcagctgaccgagatcaagcccctgctaaacgataaggagcacgatatcgaaaccacacatggtgttgtgcacgttacaatcagaggactgcctaaggggaatcgcccagtgatcctgacctatcatgatatcggccttaatcacaagtcgtgctttaacgccttctttaacttcgaagacatgcaggagatcactcaacattttgctgtgtgccacgtggacgccccggggcagcaggagggcgctcccagcttcccgaccggctaccagtaccccacaatggacgaattggcagaaatgctcccacctgtgttgacacatctctctctcaagtctataatcggcataggtgtaggtgccggagcgtacatcctgtcccggtttgcacttaaccatccagagctcgtggaaggcctggtgctgatcaatgttgatccatgcgccaaaggatggattgattgggcagcctctaaactgtccggtctgaccaccaacgtggtggacatcatcctggcccatcacttcgggcaagaggagctgcaagcgaatctggatttaattcagacttaccgcatgcacatcgcccaggatataaaccaggacaatctgcagctgtttctcaactcctataacggcaggcgggacctagaaatcgagcgacccatactgggccagaatgataacaagtccaaaactctcaagtgctcaacgctgctggtggtaggagataactctcccgcagtggaggccgtcgtggagtgcaactccaggctgaatccaatcaacacgaccttgctaaaaatggccgattgtggcggtctgcctcaagtggtccaaccagggaaattaaccgaagccttcaagtattttctgcaggggatgggctacattccgagcgcttccatgacccgactcgcgcgttcccgtacgcacagtacttccagttcactggggtccggggagtctcctttttcaagatctgtcacctcaaatcagagcgatggcacacaagagagttgcgagagccctgacgtcctagataggcaccaaaccatggaggttagctgctag

SEQ ID NO: 25235 - DNA, 843 bp, synthetic construct
  misc_feature 1..843: note = Description of Artificial Sequence: Synthetic coding sequence
  source 1..843: mol_type = other DNA
atggtgcaggagaccagccggaccctgaccgtgcggtaccagtacccaactatggacgaacttgctgaaatgcttccccccgtgctaactcacctgagcttgaaaagcataataggcattggtgtgggggcaggagcctatatcctgagcaggtttgccctgaatcaccctgaactggttgagggtctggttttgatcaacgtggacccttgcgcaaaaggttggatagattgggcagcgagcaaactgagtggcctgaccacgaatgtcgtggacataatcctcgcccatcatttcggacaggaggagctccaggctaacctggacttgatccagacctatcggatgcacatcgcccaggatataaatcaggataatctccaactgttcctgaacagttacaacggccgaagagacctagaaatcgagagaccgattctgggccagaatgacaataagtccaagactctcaaatgctcgacactgctcgtggtgggcgacaactctcctgcagtggaggcagtcgtggaatgtaactctaggctgaatcccattaacacaacgctcctgaaaatggccgattgcggaggactcccacaggtggtacaaccaggcaaactcacagaagccttcaaatattttctccagggcatgggttatatccccagcgcgagcatgactcggctcgcccgctcaaggactcactctacttcctcctcgctgggctctggcgagagtccattctcacgcagcgttacttccaatcagtctgacggcacacaggagagctgtgaatctcctgatgttctggacagacatcagaccatggaagtgtcgtgttag

SEQ ID NO: 25236 - DNA, 816 bp, synthetic construct
  misc_feature 1..816: note = Description of Artificial Sequence: Synthetic coding sequence
  source 1..816: mol_type = other DNA
atgatccggtaccagtaccccaccatggacgagctggccgagatgctgccacccgtcttaacgcatctgtccctgaagtctattatcgggatcggcgttggagcaggagcctatattcttagcagattcgctctgaatcacccagagctggttgaggggctcgttctgatcaatgtcgacccctgcgcgaaggggtggatcgactgggccgccagtaaactctcaggacttaccacaaacgtggtggacatcattctagctcaccatttcggccaggaagagttacaggccaacctagacttgattcagacataccggatgcatattgcacaggatattaatcaggacaacttacagctttttttgaactcttacaatgggcggcgggatctagaaatcgagcgccccattctaggacaaaacgataataaaagtaaaacactcaagtgttctaccttactagtggtcggggataactcccctgcagtagaggcggtagtagaatgtaactcccgcctgaacccaatcaatacgactttgctgaaaatggctgactgcggcgggctgcctcaggtggtccagccgggaaagctaaccgaggcattcaagtatttcctgcagggaatggggtacataccgagcgccagtatgaccagactcgccaggtccaggactcacagcactagcagcagcctgggctctggggaaagccccttcagtagaagcgttacttcgaatcagagtgacggaactcaagagagctgtgagagtccagacgtacttgacagacaccagactatggaggtgagctgctag

SEQ ID NO: 25237 - DNA, 420 bp, synthetic construct
  misc_feature 1..420: note = Description of Artificial Sequence: Synthetic coding sequence
  source 1..420: mol_type = other DNA
atgcccgagggccccgagctgcacctggccagccagttcgtgaacgaagcttgtagagcccttgtttttggtggatgtgtcgagaaaagtagcgtgagccgcaatcctgaagttcccttcgagtcaagtgcctaccgtatttctgcctctgcccgagggaaggagctgcgccttattttgtcaccgctgccgggagcacagccccagcaggagccccgtgctccaaggggagccgcgaccccttgtccccccgctctgcttcacgggcctgcctggccacccgcgaggcccatgtttaggggtcacccacccgttcggccactaggaccctggggcaaggtggccgcaggacctagggccctttgcctggctggcgtccccgccgtgcagggtgagtgtgcgacaaagccgtccggatag

SEQ ID NO: 25238 - DNA, 1173 bp, synthetic construct
  misc_feature 1..1173: note = Description of Artificial Sequence: Synthetic coding sequence
  source 1..1173: mol_type = other DNA
atgcccgagggccccgagctgcacctggccagccagttcgtgaacgaggcatgccgtgcccttgtcttcggggggtgcgttgaaaaaagctcagtttctcgtaacccagaggtgcccttcgaaagtagtgcctaccggatttctgcttcagctagggggaaagaacttcgcctgatcctgagtcctctgccgggggcccagccacagcaggagcccctggccttagtgtttaggtttggaatgagcgggtcgttccagctggtcccgcgagaggaactgccacgacacgcacacttgcgattttacacagctccccctggaccccggctagctctatgctttgtcgatatcaggcggttcggtaggtgggatctgggtgggaagtggcaacctggaaggggaccttgcgtgttgcaagaataccagcagtttagagagaacgttcttcgcaatctcgctgataaggcttttgaccggccaatttgtgaggccctgctggatcagcgcttcttcaacggtatcggaaattacctgcgcgccgaaattctgtacagactcaaaattccacccttcgaaaaggctaggtccgtgctggaggcactgcagcagcataggccctcaccagagctgaccctgtcacaaaaaattaggacgaaactgcagaaccctgacttactggaactttgccactccgtaccaaaggaggtggtgcagctgggcggcaaaggttatggaagtgaatccggagaggaggattttgccgccttcagggcctggctcagatgctacggtatgccaggcatgtccagcttacaagataggcacggacggacaatttggttccagggcgatcccggacctctcgccccaaaaggaagaaaaagccgtaaaaagaagagcaaagcaactcagcttagcccagaagaccgggtggaagatgccctacctccctctaaagcccccagcaggaccagaagagctaagagggatctgccgaagagaacagcaacccagcgaccagagggcaccagcctgcaacaggaccccgaggctcctaccgtgcctaaaaagggcaggaggaaagggaggcaagccgcctccggccactgtcgaccacgcaaggtcaaggccgacataccatctttggaaccagaaggcacctctgcctcttag

SEQ ID NO: 25239 - DNA, 1173 bp, synthetic construct
  misc_feature 1..1173: note = Description of Artificial Sequence: Synthetic coding sequence
  source 1..1173: mol_type = other DNA
atgcccgagggccccgagctgcacctggccagccagttcgtgaacgaggcgtgcagagcattggtcttcggaggatgcgtggaaaagtccagcgtaagccgtaaccccgaagtcccttttgaatcctccgcttatcgaatcagtgcaagcgcgcggggaaaagagctgaggctgattctatctcctctacctggtgcccagccacagcaggagcccctcgcactggtgtttcgattcgggatgagtggatcatttcagctcgtgcctagagaagaacttccccgtcatgcacacctacggttctatactgccccaccaggccctcgactcgccttatgcttcgtggacatccggaggtttggccgctgggacctgggtggcaaatggcagccagggaggggcccctgtgtgcttcaggagtatcaacagttccgcgagaacgtcctgcgcaacttggccgataaggcgttcgaccgccctatttgtgaagccctcctggaccagcgcttttttaatggtatcgggaactatctgagggccgagattctctataggctgaagatcccacctttcgaaaaggccaggagtgtgttagaggctctgcaacaacaccgcccttctcccgaactgactctctctcagaagatcaggaccaagctacagaatcccgatctgttagagctgtgccatagcgtaccgaaagaagtggtacagctcggcgggaaaggttatggttcggaatcaggcgaggaggatttcgccgccttcagggcttggctaagatgttatggaatgcccggaatgagcagtctgcaggaccggcatgggagaacaatttggtttcagggggacccggggcccttggcccccaaaggacgcaaatcacgtaagaagaaatccaaggccacacagctgtcgcctgaagaccgggtggaagatgcccttcctccctccaaggcaccaagtcgcacacggcgtgcaaaaagggaccttcctaaacgcacagccacccagagacctgagggaacatcactgcagcaagaccctgaggcacctactgtgcccaaaaaggggcggcgaaaaggcagacaagcagccagcgggcattgccggccgaggaaagtcaaggccgatatcccttcactcgaacccgaaggcactagcgcaagctag

SEQ ID NO: 25240 - DNA, 999 bp, synthetic construct
  misc_feature 1..999: note = Description of Artificial Sequence: Synthetic coding sequence
  source 1..999: mol_type = other DNA
atgcccgagggccccctggtgcggaagttccaccacctggtgagcccctttgtgggtcagcaggtcgtgaaaacaggaggcagctccaaaaagctgcagcctgcttctttgcaatcgttatggctgcaagatacccaagttcatggtaaaaaactgttcctgcgctttgatctcgacgaggagatgggccccccagggtctagccccaccccagagccaccccagaaggaggttcaaaaagaaggcgcggccgacccaaaacaagtaggtgaaccgtcaggtcaaaagaccctagatgggagttctaggtcagcagaactggtgcctcagggtgaagatgattctgaatacctggaacgcgatgctcctgcaggtgatgccggccggtggttacgggtgtccttcggcctgttcggatccgtgtgggtaaatgacttcagccgggctaaaaaagctaataaacggggagattggagggacccttctcccagactggttctacacttcggcggcggtggattcctggcattctacaattgccagctctcatggtcttcgtccccagtggtcacccccacctgtgacatcctctcagaaaaatttcatcggggacaggctcttgaagccctcggtcaggcgcaaccagtgtgttacactctcctggatcagcggtacttcagcgggctgggtaacatcattaaaaatgaggccctgtaccgagcgggaatccaccccctgagcctgggctctgtcttgtccgcttcgcgaagggaagtcctcgtcgaccatgtggtcgaatttagcactgcatggcttcagggtaaattccagggaaggccccagcacactcaggtctatcagaaagagcagtgccctgccggtcaccaagtgatgaaggaggcatttggcccggaggatggactccaaagattgacctggtggtgcccacagtgtcaaccacagctttccgaagagcctgagcagtgtcagttcagttag

SEQ ID NO: 25241 - DNA, 954 bp, synthetic construct
  misc_feature 1..954: note = Description of Artificial Sequence: Synthetic coding sequence
  source 1..954: mol_type = other DNA
atgcccgagggccccctggtgcggaagttccaccacctggtgagcccttttgtcggccagcaggtggttaagacaggtggcagcagtaaaaagttgcagcccgcctctttgcagtctctgtggttgcaagacactcaagtccatgggaaaaaactgttcctgagattcgacctggatgaggagatgggacctccaggatcatcaccaacccctgagccccctcaaaaagaggtccaaaaaaaaacccttgacgggtcatcgcgctccgcagagttagtgcctcagggggaggatgatagcgagtatctggagcgggacgctcccgcgggcgacgcaggtcgctggctcagggtgagcttcggcctattcgggtccgtgtgggtgaatgacttcagtcgcgccaaaaaagctaacaagcggggcgattggcgggacccctctcctagacttgtgcttcactttgggggaggaggcttcctagctttttacaactgccaactttcatggtcaagctccccagtggttacgccgacctgcgatatcttgagtgaaaagttccataggggacaggcccttgaagcgctaggtcaagcacagcccgtgtgttatacgttactggatcagcggtatttttctggtctggggaatatcattaaaaacgaagcattataccgggcgggaatacacccattgagcctgggctccgtactgagtgcgagcaggcgcgaggtcctggtagatcacgtggtggaattctcaacagcctggctgcagggcaagtttcagggaaggccgcaacacacccaggtttaccagaaagagcaatgccccgcgggacatcaggtgatgaaagaggcattcggccccgaggacgggttgcagagactgacttggtggtgcccgcagtgtcagcctcagctgagcgaggagccagaacagtgtcaattcagctag

SEQ ID NO: 25242 - DNA, 816 bp, synthetic construct
  misc_feature 1..816: note = Description of Artificial Sequence: Synthetic coding sequence
  source 1..816: mol_type = other DNA
atgggcccccccggcagcagccccacccccgagcccccccagaaggaagtgcagaaggaaggcgccgccgacccaaagcaggtcggcgaaccgtctggccagaaaacactggatggaagctcacgctccgcggagctggtccctcagggggaggatgatagcgagtacctcgaacgggacgcccccgccggagacgcaggtcgatggttacgcgttagtttcggactgtttggatcggtgtgggtcaatgatttctcgcgcgctaagaaggccaacaagagaggcgactggagagatccttccccacgcctcgtccttcactttggtggagggggctttctggccttttacaattgccagctctcttggtcgagttcgcctgtggtcacccctacttgtgacatcttatctgagaaatttcatagaggccaagcactggaggccctaggacaggctcaaccagtttgctataccctcctggaccagcgctatttttcaggactgggtaacattataaaaaatgaagctctgtaccgggccggcatccatcccctttccctagggagtgttctgtcagcctcccggagggaggtgctggtggaccacgtcgtggagttctccaccgcctggctccaaggaaagttccaaggaaggccacagcacacacaagtttatcagaaggagcagtgcccagcggggcaccaggtgatgaaagaagcctttgggccggaggacggccttcagagacttacgtggtggtgcccccaatgtcaaccccagctgagcgaagagccagagcagtgccaattttcctag

SEQ ID NO: 25243 - DNA, 999 bp, synthetic construct
  misc_feature 1..999: note = Description of Artificial Sequence: Synthetic coding sequence
  source 1..999: mol_type = other DNA
atgcccgagggccccctggtgcggaagttccaccacctggtgagccctttcgtgggtcagcaggtggttaaaaccgggggctcatctaaaaaactacagcctgcaagcctacagagcttgtggctgcaggatacccaggtgcacggcaagaagctattcctgcggttcgacctggatgaagagatgggcccaccaggatccagtcctacgcccgaacctccacagaaggaagtgcagaaggagggcgcagcagaccctaagcaggtgggcgaaccttccggccagaagacactcgatggcagcagtaggtccgcggagctggtcccacagggggaggacgacagcgagtacctcgagagagacgccccagccggagacgcgggcaggtggctgcgggtctcctttggactgtttgggtcagtgtgggtcaatgacttttcacgcgccaaaaaggcaaataaaagaggtgactggcgagacccatccccgcgcctcgtgctgcattttggcgggggaggcttcctggctttttataactgccagctatcctggagcagctctccagttgtcacgcccacatgtgacatcctctccgagaaatttcaccgtgggcaggccctggaggcactgggccaggcccagcccgtgtgctacacgctgctcgaccagagatacttcagtggcctgggaaatattatcaagaacgaggcactgtaccgcgctggcatccaccccctgagtcttggcagcgtcctgagcgcatctcgccgagaggtgctcgttgaccacgtggtcgagttctcaacagcatggctgcaggggaaattccaggggcggccccagcacacgcaagtataccagaaggagcaatgccctgcgggccaccaagtaatgaaggaagccttcggtcccgaagacggtttgcagcgcctcacatggtggtgcccccagtgtcaaccacagctctcggaggagcccgagcagtgccagttctcgtag

SEQ ID NO: 25244 - DNA, 999 bp, synthetic construct
  misc_feature 1..999: note = Description of Artificial Sequence: Synthetic coding sequence
  source 1..999: mol_type = other DNA
atgcccgagggccccctggtgcggaagttccaccacctggtgagcccatttgttggacagcaagtggtgaagaccggcggcagctctaaaaaattacagcctgcatcccttcagtccttgtggctccaggatactcaggtgcatggcaagaaactgtttctgcggttcgacctagacgaggagatggggcccccgggctcctcccccacacccgagccgccacagaaagaggttcagaaagaaggggctgctgatcccaagcaggtgggggagccctccggccagaagaccctggacggatctagcaggtcggccgaactcgtacctcagggcgaggacgactctgaatatctggagcgcgatgcaccagcaggggatgcgggacgctggttgagagtgtctttcggactgttcggctctgtttgggttaatgatttttctcgagcgaaaaaggcaaacaagagaggggactggcgggatccttcccctcgcctggtgttgcacttcggcggagggggctttttggctttctacaattgccagttatcttggtcttcatccccagtggtgacacccacatgcgatatactctccgagaaatttcacagaggtcaggcgttagaagcactcgggcaggctcaacccgtgtgctacaccctgctcgaccagcgatactttagtgggcttggcaacatcattaaaaatgaagcgctgtatagggcaggtatacaccctctgtccctaggctctgttctatctgcaagccgacgggaagtgctggtggatcatgtcgtggagttttcaacagcatggttgcaaggtaagttccaagggcgtcctcagcacactcaggtctatcagaaggaacaatgccctgcaggacaccaagtcatgaaggaggcatttgggcccgaggatggcttgcaacggctcacatggtggtgcccccagtgccagccccagctttcagaagagcctgaacagtgtcagttttcttag

SEQ ID NO: 25245 - DNA, 651 bp, synthetic construct
  misc_feature 1..651: note = Description of Artificial Sequence: Synthetic coding sequence
  source 1..651: mol_type = other DNA
atgcccgagggccccctggtgcggaagttccaccacctggtgagcccgttcgtgggccaacaggtggtgaagaccggaggtagtagtaaaaagcttcaaccggccagtcttcagtcattatggcttcaagacactcaagtaagactagtgctgcatttcggcggaggaggcttcctggcattctacaattgtcaactaagctggtcttcgtcaccagttgtgactcctacgtgcgacatcctgagcgagaagttccaccgtggacaggcactcgaggcgctcggtcaagcacagcctgtctgctacaccctgctggatcagagatatttctccgggttgggcaatattatcaagaacgaggcactgtaccgggcgggtattcacccgttaagtctagggagtgtgctgtccgcctcacggcgtgaagtgctagtggatcacgtggttgagttcagcacagcgtggctgcagggtaagttccaggggcgcccccagcacacacaggtctatcagaaggaacagtgtcctgctggccatcaagtaatgaaggaggcattcggccccgaggatggacttcagaggctgacctggtggtgtccgcagtgccagccacaattgtcggaagagccggagcaatgtcagttttcctag

SEQ ID NO: 25246 - DNA, 1818 bp, synthetic construct
  misc_feature 1..1818: note = Description of Artificial Sequence: Synthetic coding sequence
  source 1..1818: mol_type = other DNA
atggtggagggccccggctgcaccctgaacggcgagaagatccgggccagagtactacctgggcaggccgtcaccggcgtcagaggctcagcccttcgatccctgcaggggcgggccctaaggctggcggcctcaactgttgtggtcagtccgcaggctgccgctttaaacaacgactccagccagaacgtacttagcttgttcaacggatatgtgtatagcggagtggagacgctgggcaaggaactcttcatgtacttcgggccaaaagccctgaggatacacttcggtatgaaaggttttattatgattaatccgctggaatacaaatataagaatggagctagccccgtgttggaagtgcagctgacgaaagacctgatttgttttttcgacagctcagtagaattgaggaacagcatggagtcccagcagaggattcgcatgatgaaggagctggacgtatgctctcccgaattctccttcctgagagcagaaagcgaggtcaaaaagcaaaagggcaggatgctgggcgacgttcttatggaccaaaatgttctgcccggagtcggcaatatcattaaaaatgaagcactctttgatagcggactgcatccggccgttaaggtgtgtcaactgacagatgagcagatacaccatctaatgaagatgattagagatttttccatccttttctaccggtgccgaaaggccgggctcgcactttctaaacactacaaggtgtataagagacctaactgtggacaatgccattgccgcatcacagtctgtcgcttcggagataacaacaggatgacctacttctgtccccactgccagaaagagaatccacagcatgtggatatatgtaagttacctacccgcaacacaatcatctcgtggacgagttcccgggtagatcatgtgatggattctgtggccaggaaaagcgaggaacactggacatgtgtggtgtgcacccttattaataagccaagcagcaaagcatgcgatgcatgcctgacatcaagacctatcgactcggtgctcaagtcagaagagaactcaaccgtgttctcccatctgatgaaatatccgtgcaatacatttgggaaacctcacactgaggtcaaaatcaacaggaagacagcgttcgggacgacgacgctcgtgctaacagatttcagtaacaagtcctctaccctcgaaagaaagacaaagcagaatcaaattctcgacgaggagtttcagaattcgccccccgccagtgtgtgcctgaatgatatccaacacccttctaaaaagacaaccaacgacataacgcagccttcctccaaagttaatatcagcccgaccatctccagcgaatctaaactgtttagtcccgctcacaaaaaacctaagactgcacagtactctagtcccgagttgaaaagttgcaatcctggctactctaatagtgagctccagatcaacatgaccgacggcccgagaacattgaatcctgattcacctcgctgctccaaacacaatcggctttgcattctcagggtggtgggtaaagacggggaaaacaaggggagacagttttatgcatgtcccctgcctcgggaggcccagtgtggcttcttcgagtgggcagatctcagttttccattctgcaaccacgggaaaaggtctacaatgaagactgtgctcaaaattgggcctaataatgggaaaaatttcttcgtttgtcctctcggaaaagagaagcagtgtaacttctttcagtgggccgaaaatggtcctggaatcaaaataattcccggatgctag

SEQ ID NO: 25247 - DNA, 1743 bp, synthetic construct
  misc_feature 1..1743: note = Description of Artificial Sequence: Synthetic coding sequence
  source 1..1743: mol_type = other DNA
atgcccggctggccctggggcctgctgctgaccgccggcaccctgtttgccgcccttagtcctgggccacccgccccggccgacccatgccacgatgaaggcggggcacctcgcgggtgtgtccccggactagtaaacgctgctttgggccgtgaagttctggcatcatccacctgcggacgcccggccaccagggcatgcgatgcttctgaccctcgcagggcccatagtccagcccttcttactagcccgggtgggactgcaagcccactctgctggagatctgagagtctgcctagagctcctctgaatgttacgctcactgtgccccttggtaaggccttcgagctagtttttgttagcctgcgtttttgctcagcccctcccgcttcagtcgctttactcaagtcccaggatcacggacgcagttgggccccgctgggtttctttagctctcattgcgatcttgattacgggcgtctccctgcgccagcaaacgggccggcaggaccgggcccggaggctctgtgttttcctgcccctctggctcaaccagatgggagtggactgctcgccttcagcatgcaggactcgtcccctcccggtctcgacttggattcctcgccagtgctgcaagactgggtcacggcgacggacgttcgcgtggtgctgactcggccctctaccgcaggagatccgcgcgatatggaggccgtggttccttactcctatgctgcaactgatctccaggtcgggggacgatgcaagtgcaatggacacgcgtctcgatgtcttctcgacacccaaggtcacctgatatgtgattgccggcacggaaccgagggcccagattgcgggaggtgtaaacctttttactgcgacaggccatggcagagggccaccgcccgagagtcgcacgcttgcctggcatgtagctgcaacggtcatgcaaggcggtgccggttcaacatggaactgtaccggttgtcgggacgtcgcagcgggggagtgtgcttaaattgccgccataataccgctgggagacactgtcactactgcagggagggtttttatagggaccctggacgcgcgctgtccgacagacgggcctgtcgggcctgcgactgccatccagtgggcgcagccgggaagacatgtaaccagacaacaggccagtgtccatgtaaggacggagttacaggactcacatgtaataggtgcgctccaggttttcagcagtcacgtagtccagttgcgccctgcgtgaagacacctattcctggcccaactgaggattcatctccagttcagcctcaggattgtgattcccattgcaagcctgctcgtggcagctatcggatatctctcaagaaattctgtaaaaaagattatgccgtgcaggtggccgtcggcgcaaggggtgaagctcgtggcgcctggacaagattccccgtggcggtgctggccgtctttcgatcaggggaagagagggcccggcgcggatcatctgctttgtgggtcccagctggggatgccgcctgtggctgccctaggcttctcccgggccgccggtatctgctgctgggaggcgggcccggagcagcagcaggcggtgcaggcggtaggggacctgggttgatcgccgcccgggggagtctggtgcttccttggcgagacgcgtggactagaaggcttaggcgcctgcaaaggcgggagaggcgaggtaggtgcagcgccgcctag

SEQ ID NO: 25248 - DNA, 2547 bp, synthetic construct
  misc_feature 1..2547: note = Description of Artificial Sequence: Synthetic coding sequence
  source 1..2547: mol_type = other DNA
ctgttctgcttcgtgttcagcgtgagcctgcaggtggacatcgtgcctagtcagggagagatcagcgtgggggagtccaaatttttcctctgtcaggtagccggggacgccaaagataaggatatctcctggttcagccctaatggcgagaagctgacaccaaatcagcaacggatcagcgtcgtgtggaatgatgatagtagttctaccctgacaatctataatgcgaatatcgacgatgcaggcatttataaatgtgttgtgacaggcgaggatggctctgagtcggaagcgactgtgaatgtcaaaatttttcagaagctgatgttcaaaaacgcccctactcctcaggagttccgcgagggagaggacgccgtcatcgtttgcgacgtggtgtccagcctcccacccactattatttggaaacacaagggaagagacgtgatactcaaaaaggacgttcgtttcatcgtcctgagtaataactatttgcagattaggggcattaaaaagaccgacgagggcacatacagatgtgagggtcgaattctggctcgcggtgagattaattttaaggacatccaagtgatcgtgaacgtcccaccaacaatccaggcccgccagaacatagtgaatgcaacggccaatctcggtcagagcgtcacattagtgtgtgatgccgagggattcccagagccaacaatgtcatggacaaaggatggggagcagattgaacaggaggaggatgacgagaaatacattttttctgatgactcttcccaactcacaatcaagaaggttgacaagaatgacgaagcagaatacatctgtattgccgagaacaaggctggggagcaggatgcaacaatccatctgaaagtcttcgccaaacctaaaatcacctacgtggagaatcaaacggccatggagctcgaagaacaggtcacactcacgtgcgaggcaagtggagaccccatcccctcaattacctggcgtacttctaccaggaacatcagcagtgaggagaaagcaagctggacccggcccgagaagcaggagactcttgacggccacatggttgtcaggtcacatgcacgagtgtcatctctcactctgaagtccatccaatatactgatgccggcgaatacatctgcaccgcctctaatacaatcggccaggactcgcaaagcatgtacctggaggtccagtacgcccccaaattgcagggacctgtggctgtgtacacttgggaggggaatcaggtgaacataacctgtgaggtgttcgcgtatcctagcgccactatctcctggtttcgcgacggacagttgttgccctcctccaattactcaaatataaaaatttacaatacaccctctgccagttacctggaggtcactcctgactccgagaacgacttcgggaattacaattgtactgcagtgaataggataggacaagagagtctcgagtttatacttgtgcaggccgacacaccaagcagccccagcatcgatcaggttgaaccttactcctctactgcccaggttcagtttgatgaacccgaggccacgggcggtgtgcctattctaaagtataaggcggaatggagagccgttggtgaagaagtatggcactcaaaatggtatgacgctaaagaggcttcaatggagggtatcgtaaccatcgttggacttaagcccgagacaacctacgcagttcgcttggctgccttgaatggtaaaggcttgggcgagatttcagctgccagcgagtttaaaactcagcccgtgcccggagagccctcggctcccaaactggagggccaaatgggagaagatggaaactccatcaaggtgaaccttattaagcaggacgatggaggcagcccaatccgccactacctggtccggtacagggccctgagctccgaatggaagccagagatccggttgccctccgggagtgaccacgtgatgctcaaaagcctggattggaatgccgaatatgaagtctacgtcgtggccgaaaatcagcagggcaagagcaaagctgctcattttgtctttcgtacctctgcacagccaaccgccatacccgctaacggttctcccactagtggactgtctaccggcgcaattgtcggaatcttaatagtgattttcgtattattgcttgtcgtggttgatattacttgctactttctaaataagtgtggcctgttcatgtgtattgctgtgaacctatgtggcaaagccgggcccggggctaagggtaaggacatggaagaaggcaaagccgctttcagtaaagacgagagtaaggagcccatagtggaggtgcggacggaagaggaaagaacccccaaccatgatggtggcaaacacacagaaccgaatgagacaaccccactgactgaaccagagaagggtcccgtagaagcgaagccagaatgccaggagaccgaaacaaaacccgctccagcggaagtgaagacagtgccaaacgacgcgactcagaccaaagagaatgaatccaaagcgtag

SEQ ID NO: 25249 - DNA, 1995 bp, synthetic construct
  misc_feature 1..1995: note = Description of Artificial Sequence: Synthetic coding sequence
  source 1..1995: mol_type = other DNA
atcaccatccgggacgagatctgggtgctgttctgcttcgtgttctcggtctctctccaagtagacattgttccctctcagggtgaaatctcagtgggcgaatcaaagttcttcttgtgtcaggtcgctggagatgcgaaagacaaagacatttcctggttttctccaaacggcgagaagcttacccccaatcagcagcgcatctcagtggtgtggaatgatgattcatcctctaccctgacaatttacaatgctaatattgatgacgccggcatttacaagtgtgtggttaccggcgaggacgggtccgagtccgaagctactgtaaatgtgaagatattccagaagctgatgttcaagaacgctcccactccccaggaatttagggagggagaggatgccgtgatcgtctgcgatgttgtgtctagtcttcccccaactatcatctggaagcataaaggccgggatgtcattctgaaaaaagatgtcaggttcatcgttctatcgaacaattacctgcagatcagagggattaagaagactgacgagggcacataccgctgcgagggtcgcatcctcgccaggggagaaattaatttcaaggacatccaggttatagtgaatgtgccaccaacaatccaggcaaggcaaaacatcgtcaatgcgaccgctaatttgggccagtcagtcactttggtttgcgacgccgaaggttttcccgagccaaccatgtcatggaccaaagacggggaacagatagaacaagaggaggacgatgaaaagtacatcttttcagacgacagcagccagctgactattaagaaggttgacaaaaatgacgaagcggaatatatctgtatagctgagaataaagctggcgagcaggacgcgacgatccacctgaaagtctttgcaaagccaaagatcacttatgtggagaatcagacagctatggaactggaggagcaggtgactctgacttgtgaggccagcggtgatcccatcccttcaattacgtggcggacgtccactagaaacatctcaagtgaagagaaggccagttggacacggcctgagaaacaagaaacactcgacggtcacatggtggtgaggtcccacgcaagggtctcttcactgaccttaaaatccattcaatatactgacgcgggtgaatatatctgcaccgctagtaatacaatcggtcaagactctcagtcaatgtacctggaggtgcagtacgctcctaaactccagggtcccgtggccgtgtatacttgggaggggaatcaggtcaatattacatgtgaagttttcgcatacccaagcgccaccatttcatggtttagagacggccagctcctgccctcctctaattatagtaacataaaaatttacaacactccgtcggctagctacttagaagtaacccctgacagtgaaaatgatttcggtaactacaactgcacagccgtgaatcgaattgggcaggagtccctggagttcatcctggtgcaggccgatacccccagcagccctagcatcgatcaggtggaaccttactccagtaccgctcaggtgcaatttgacgagcccgaagcaaccggaggcgtccccatcctgaaatacaaagcggagtggagggccgtcggagaagaggtgtggcacagcaaatggtacgatgcaaaagaggcgtctatggagggcatcgtcaccatagtgggacttaagccagagactacctacgcagtacgcctagcggctttaaacggaaagggcctcggagagatctctgccgcaagcgagttcaagacacagcccgtgcaggccccgccaccaacggcctctgcatccagcagcacgccagtgcccctgagccccccagacaccacatggcctctccctgccctcgcaaccaccgaaccagcaaaaaacattgcccagaaccattgttgcaacatgttccaagctggactccataacgcgctgatgaaatag

SEQ ID NO: 25250 - DNA, 942 bp, synthetic construct
  misc_feature 1..942: note = Description of Artificial Sequence: Synthetic coding sequence
  source 1..942: mol_type = other DNA
atggagggcatcgtgaccatcgtgggcctgaagcccgagaccacctatgcggttcgcctagccgcactcaatggaaaaggacttggagaaatcagtgcagcgtctgagtttaaaacccagccagtgcacagtccgccccctccagcatcagcttcctctagtactcccgtgccactctccccacccgatacaggagagccgtctgcccctaaacttgaaggccagatgggtgaagacggcaattcgattaaagttaaccttatcaagcaagacgacggaggatcccctattagacattacctggtgcgttaccgagctctctcctccgagtggaagccagagatccggctgccgagcgggtctgatcatgttatgctcaagagcctcgattggaatgccgaatatgaggtgtacgtggtcgccgagaatcaacagggcaaatctaaggccgcacacttcgtgtttcggacatccgcacagccgactgcgattcccgccaatggatcaccaacaagtggtttgtccacgggcgcaattgttgggatactgatcgtgatctttgtgctgttactagtggttgtcgacattacctgttatttcttgaataaatgtggcttatttatgtgtattgccgtgaatctttgcggcaaagcaggaccgggggccaagggaaaagatatggaagagggcaaagccgccttttccaaggacgaaagcaaggagccaatcgtagaggtccggacagaagaagagcgcacacccaaccacgatggcggaaagcacacagaacctaatgagacaacacccttaaccgagcctgaaaagggtcccgtggaagctaagcccgaatgtcaggagaccgagactaagcctgcccctgctgaggtcaaaactgtccctaatgacgccacccagactaaagagaacgaatctaaggcctag

SEQ ID NO: 25251 - DNA, 570 bp, synthetic construct
  misc_feature 1..570: note = Description of Artificial Sequence: Synthetic coding sequence
  source 1..570: mol_type = other DNA
atgaccgagtacaagctggtggtggtgggcgccggcggcgtgggcaagtccgccctgaccatccaactgattcaaaatcacttcgtggatgaatatgacccgaccattgaggattcttataggaaacaagttgttatcgacggagagacatgtttactcgatattctggatacagcaggtcaggaagaatattctgctatgagggatcagtacatgcgtacgggggagggattcctgtgtgtgttcgctattaacaactctaagtcctttgcggatattaacctctaccgcgagcagatcaagagagttaaagattctgacgacgttcccatggtcttagtaggcaacaagtgcgatctgccaacacgcaccgttgatacaaagcaggcccacgagcttgccaagagctacggcattccctttattgaaacttccgcaaaaacccggcaaggagtcgaggatgcattctatacacttgtgagagagattaggcagtaccgcatgaaaaagctgaatagcagcgacgacggaactcagggatgtatgggccttccctgtgtggtgatgtag

SEQ ID NO: 25252 - DNA, 651 bp, synthetic construct
  misc_feature 1..651: note = Description of Artificial Sequence: Synthetic coding sequence
  source 1..651: mol_type = other DNA
atgcccggcaacctgatgagccagaccagccgggccgtgagcatctggaaatttcccgcaaagctggggaagactcatggtcaccgggcactggaggctaccggcatgatgctcagagtcctggtgggggctgtgttgcctgcaatgctgctggccgctcctcccccaatcaacaaactcgctttattcccagataagagcgcctggtgcgaggcaaaaaatataacccaaatcgtcggtcacagcgggtgtgaagcgaagtcaatacaaaatcgcgcttgcctgggacagtgcttctcttactctgtcccaaacacattcccgcaaagcaccgaaagcttggtccactgtgattcatgcatgcccgcccagtcgatgtgggagattgtgactctagagtgccctggacacgaggaggtgcctcgggtggacaagctggtagagaaaatcctgcactgcagctgccaggcttgtggcaaggagccttctcacgaaggcctcagtgtatacgtgcaaggcgaggatggacctggttcccaacccggcactcacccccatccgcaccctcatccgcatcctgggggccagacaccagaacctgaagacccacctggggccccacatacagaggaggaaggtgccgaggactag

SEQ ID NO: 25253 - DNA, 546 bp, synthetic construct
  misc_feature 1..546: note = Description of Artificial Sequence: Synthetic coding sequence
  source 1..546: mol_type = other DNA
atgatgctgcgggtgctggtgggcgccgtgctgcccgccatgctgctggcagcacccccaccaataaacaaactggctctgttccctgataaatctgcatggtgcgaggcaaaaaacattactcagatcgtggggcattcaggctgcgaggccaaatcaatccaaaacagggcttgtttaggacagtgtttttcctactccgtccccaatacttttccccagtcaacagaatctcttgtgcattgcgattcatgtatgcccgcccagtccatgtgggaaatcgtcacactggaatgtcctgggcacgaggaggtgccgagggtcgacaagctagtcgagaagatcctgcactgctcatgccaggcatgtggtaaggagccctcacacgaaggcctgtctgtgtacgttcagggcgaagatggtccagggagtcagcctggaacccacccccatccccatcctcatccccatccaggggggcagacccccgagcccgaagatccccctggagccccccatacagaagaggagggtgccgaagattag

SEQ ID NO: 25254 - DNA, 351 bp, synthetic construct
  misc_feature 1..351: note = Description of Artificial Sequence: Synthetic coding sequence
  source 1..351: mol_type = other DNA
atgatgctgcgggtgctggtgggcgccgtgctgcccgccatgctgctcgcagcaccccctcccattaacaaattggctctgttccctgacaagtccgcatggtgcgaggctaagaacattacgcagatcgtgggccactcaggatgcgaagctaagagcatacagaatagagcttgtctgggtcagtgttttagctactctgtccctaacaccttcccgcagtcaaccgaatcactcgtccactgcgactcatgcatgcctgctcagagcatgtgggagatcgtgactcttgaatgcccgggccacgaggaagtgccgcgcgtggataaactcgtggagaagattctgtag

SEQ ID NO: 25255 - DNA, 492 bp, synthetic construct
  misc_feature 1..492: note = Description of Artificial Sequence: Synthetic coding sequence
  source 1..492: mol_type = other DNA
atgctgcgggtgctggtgggcgccgtgctgcccgccatgctgctggctgccccaccccccataaacaagttggcgctgtttcccgataagtccgcttggtgtgaagctaagaacattacccagatcgtgggtcactcaggctgcgaggcaaagtctatacaaaacagagcctgcttgggccagtgcttttcttacagcgtgccgaatacattcccgcagagcactgagtccctggtccactgcgactcctgcatgcctgctcagagtatgtgggagatcgtgaccctcgaatgtcccggacacgaggaggtccctagagtcgacaagttggtggaaaaaatcctccactgctcttgccaggcttgcggcaaggagccctcccatgaaggcctgtccgtctacgttcagggagaagacggccccgggtcccagccaggcactcatcctcacccccacccccatcctcaccccggtgggcaaacgcccgaatag

SEQ ID NO: 25256 - DNA, 354 bp, synthetic construct
  misc_feature 1..354: note = Description of Artificial Sequence: Synthetic coding sequence
  source 1..354: mol_type = other DNA
atgatgctgcgggtgctggtgggcgccgtgctgcccgccatgctgctggccgcacctccaccgatcaacaagcttgctttgttccccgacaaaagtgcttggtgcgaggcgaagaacatcacacagatagtgggacactctggttgcgaggccaagtccattcagaacagagcgtgcctgggccagtgcttctcttatagcgtgcccaatacttttccccagtccacagaaagccttgtacactgcgattcttgcatgcctgctcagtccatgtgggagattgttaccctagaatgccctggacatgaagaggtgcccagggttgacaagcttgttgaaaagatactgcattag

SEQ ID NO: 25257 - DNA, 330 bp, synthetic construct
  misc_feature 1..330: note = Description of Artificial Sequence: Synthetic coding sequence
  source 1..330: mol_type = other DNA
atgatgctgcgggtgctggtgggcgccgtgctgcccgccatgctgcttgctgcccctccgccaattaataagcttgcattgttcccagataagtccgcctggtgcgaggcgaaaaatatcacccagatcgtaggccacagcgggtgtgaggccaaatccatccagaacagggcatgcctcgggcagtgtttttcttactcggtgccaaatactttcccccagtccacagagtcactagttcactgtgactcttgtatgcccgcccaaagtatgtgggaaatagtaactctggagtgcccaggacacgaagaggtgccaagagttgactag

SEQ ID NO: 25258 - DNA, 387 bp, synthetic construct
  misc_feature 1..387: note = Description of Artificial Sequence: Synthetic coding sequence
  source 1..387: mol_type = other DNA
atgatgctgcgggtgctggtgggcgccgtgctgcccgccatgctgttagcagccccacctcctatcaacaagctggctcttttccccgataagagcgcgtggtgcgaggctaaaaacataacccagattgtgggtcacagtggctgtgaggcgaaatctatccagaacagggcctgtctgggccaatgtttcagttatagtgtgcccaatacatttcctcagtcgacagagtcactggtccactgtgatagctgcatgcccgcccagagcatgtgggaaatcgttaccttagaatgtccgggacatgaggaagttcctcgagtcgataagctcgttgaaaaaattctccattgttcctgtcaggcctgcggcaaagaaccaagctag

SEQ ID NO: 25259 - DNA, 543 bp, synthetic construct
  misc_feature 1..543: note = Description of Artificial Sequence: Synthetic coding sequence
  source 1..543: mol_type = other DNA
atgctgcgggtgctggtgggcgccgtgctgcccgccatgctgctggcagctccacccccaatcaataaactggctctgtttccagacaagagcgcctggtgcgaggccaagaatatcactcaaatcgtcggacactccggctgtgaggcaaaaagcatacaaaatcgggcttgtctcgggcagtgtttctcctactccgttccaaacacctttccccagagtaccgagagtttggtgcactgtgacagctgtatgccggcccagtccatgtgggagattgtgacactggagtgcccagggcacgaagaagtaccgcgggtagacaaactcgttgaaaagatacttcattgcagctgccaagcttgtggcaaagaaccctcacacgaaggtctatccgtttatgtccagggtgaggatggtccaggttctcaacccgggacccacccacaccctcacccccatcctcaccccggcgggcaaacccccgaacccgaggacccacctggagcaccacacaccgaggaggagggggctgaggattag

SEQ ID NO: 25260 - DNA, 8457 bp, synthetic construct
  misc_feature 1..8457: note = Description of Artificial Sequence: Synthetic coding sequence
  source 1..8457: mol_type = other DNA
atggccgcccaccggcccgtggagtgggtgcaggccgtggtgagccgcttcgatgaacagctgcccatcaaaactggacagcagaacacacacactaaagttagcacggagcataacaaggagtgcctaatcaatatctccaagtataaattttccctcgtcatcagcggcctcaccaccatactgaaaaatgtgaacaatatgcgcatattcggagaggcggccgagaaaaatttgtatctgtcgcagctcataatcttagacaccctcgagaaatgcctggcagggcaacccaaggataccatgcggctggatgaaaccatgttggtcaagcagctgctgcctgaaatatgccacttcctgcacacatgtagggaaggaaaccagcacgcagccgagttgcgcaatagcgctagtggagtcctgttcagtctatcctgcaataactttaatgccgtcttctccagaatatcgacccgccttcaagaactgactgtgtgctcggaggataatgttgatgtccacgatattgagctgctacaatacattaacgtagattgcgcaaagcttaagaggttgctcaaggagaccgcttttaagttcaaagccttgaaaaaagttgcccagctggccgtcataaactccctggagaaagctttctggaattgggtggaaaattatccggacgaatttacaaaactgtaccagatccctcagaccgacatggccgaatgtgctgagaagctgttcgatttagtcgacgggttcgccgaatctacaaagcgaaaagccgcggtttggcccttgcagatcatacttctgattctctgccctgaaatcatccaggatatctccaaagacgtcgttgacgaaaacaatatgaacaaaaaattattcttggattctttgcgcaaggctctggccggccacggaggctcgcgccaactgaccgaatctgctgcgatcgcttgtgtgaaactatgtaaggccagcacatatataaactgggaggataacagtgtcatttttctcctagtgcaatcgatggtggtcgatctgaagaatttactgttcaacccctcaaaacctttctctagggggtcccagccagcagacgtggatctgatgattgattgtctcgtgtcttgctttagaatcagccctcataacaaccagcactttaagatctgtctcgcccagaattctcccagcacctttcactatgttctcgtgaattcgctgcacaggataattaccaacagcgctttggactggtggcccaagatcgatgccgtctattgccactcagtggaattacgcaacatgttcggagagacacttcacaaggcagtacagggatgcggggctcaccctgccatacgaatggctccatctttgacatttaaggagaaggtgacctctctcaaatttaaagaaaagcctaccgacttggagactagaagctacaaatatctcctgttgtcgatggtgaaactaatacacgccgaccccaaactcctgttgtgtaatccccgtaagcagggaccagaaacccagggttcaactgccgaactgattaccggattagtacagctggtgccacagtcccacatgcctgagatcgcacaggaagccatggaagctctcctggtactgcaccagctggactcaatagacttatggaatcccgacgcccctgtggagactttctgggaaatctcaagtcaaatgcttttttacatttgcaaaaaactcaccagccatcagatgctgtcaagcactgagatcctaaagtggctgagagaaatattaatctgtcgaaacaaattcctgctgaagaataaacaggctgatcggtcctcctgccatttcctgttgttttacggcgtcggatgtgatatcccgtcttcaggcaatacctcccagatgtccatggatcacgaggagttattgcgcacacccggggcatctctgcggaagggcaaggggaacagctccatggactccgcagctggatgcagtgggactccccccatttgtaggcaggcccagactaaactcgaggtggctttgtacatgttcttgtggaatcccgataccgaggccgtgctggtcgctatgagttgcttccgccacctgtgcgaagaagccgacatcagatgcggcgtagacgaggttagcgtgcataacctgctgcccaactataacacctttatggaatttgcatccgtgtctaacatgatgtctaccggccgagccgccctccaaaagcgtgttatggccttgcttagaagaatagagcatccaaccgccggaaatacagaggcgtgggaggatacacacgcaaagtgggaacaggcaactaaactcatcctaaactaccccaaagcgaagatggaggacggacaggccgcggaatctctgcacaagaccatcgtaaagcgaagaatgtcacacgtgtctgggggtggatccatcgatctgtcggatacggactccctccaagagtggataaacatgaccggcttcctgtgtgcccttggtggcgtctgtctgcagcagcgaagcaattctgggctcgcaacatacagcccacccatggggcccgtgtcagaacggaaggggtccatgatctccgttatgtcatccgaaggtaatgccgatacgccagtgagcaaatttatggataggctgctgtccctcatggtctgtaaccacgaaaaggtcgggctacaaatcaggactaacgtaaaggatttggtggggctcgaactgtcacccgccctctatcctatgttgttcaataaactaaagaacacaatcagcaagttttttgattcgcaggggcaggtcctgctgacagataccaacactcagtttgtggagcagacaatcgccattatgaagaatctgttggataaccatactgagggatctagtgagcacctgggacaggcctcaatcgagacaatgatgttgaacctcgtgcgatacgtgcgagtcctgggcaatatggttcacgctatccaaatcaagaccaaactatgtcaacttgtcgaggttatgatggccagacgggacgatcttagtttctgtcaagagatgaagtttcggaacaagatggtagaatatctgaccgactgggtgatgggtacatccaaccaggctgctgacgacgatgtgaaatgcctcacaagagacctggatcaggctagtatggaagccgttgtcagccttttggcaggcctgccacttcagcccgaagagggcgatggtgtggaacttatggaagccaaatcccaattgttcctgaagtatttcactctgttcatgaacctgctaaatgactgctctgaagtggaagacgaatccgcgcagacgggcgggagaaagcggggtatgagtaggaggctcgctagcctgcgccattgcaccgttctcgccatgagtaatctcttaaacgccaacgtggactctggcctgatgcactctatcggcctcggatatcataaagacctacagacacgcgcgacattcatggaggtcctgaccaagatcctgcagcaaggaaccgaattcgacaccctcgcggagacagtgctcgccgaccggttcgagcggttggtagagttagtaaccatgatgggggaccagggcgagctacccatcgcgatggccctggctaacgtagtgccttgttcccagtgggacgagctggcccgtgtcttagtgacactcttcgactcacggcacctcctgtaccagctgctgtggaacatgtttagcaaagaggtggagcttgccgacagtatgcagaccttattcagaggtaacagccttgcttcaaagattatgacattctgctttaaggtgtatggagctacctacctccagaagttgctagatcccttacttagaatcgtgataacttcgagcgattggcagcacgtgtcctttgaggtggatccaactagattggagcctagtgaatcccttgaggaaaaccagagaaacttgttgcagatgacagagaagttctttcacgctataatttcatcatcgagcgagttcccaccacagctgagatccgtctgtcactgcctttatcaggtggttagccagaggttcccccagaattctatcggcgctgtaggctccgccatgttcctcagattcattaaccctgcgattgtctcaccttacgaggctggtattttggacaaaaaacctccgccgcgaattgaaaggggcctcaagcttatgtctaagatcttacagagtatcgccaatcatgtgctattcaccaaggaggagcacatgcgtcctttcaacgacttcgtgaagtctaacttcgacgcagccaggagattcttcctggatatagcatccgattgccccacctctgacgcggtaaaccattcactttcattcatttccgatggcaacgttcttgctctgcatcgccttttatggaacaatcaagagaagattgggcagtatctaagctctaaccgggatcacaaagccgtggggcgtcgccctttcgacaaaatggccacactattagcgtacctgggtcccccggaacacaagccagtggcagatacccactggtcctcattgaatctaacttccagtaaatttgaggaatttatgacaagacaccaggtccatgagaaagaagaatttaaggcccttaaaactttgtcaatcttttaccaggccggcactagtaaagctggaaatcctatcttctactatgtcgcacggagattcaagacggggcagataaatggcgatctcctgatctaccatgttctgttgactcttaagccgtattacgctaagccttatgaaatcgtcgtggacctgacccacacgggccccagcaatcggttcaaaacagactttttgagtaagtggttcgtggttttcccgggattcgcctatgacaatgtaagcgccgtctacatctacaattgcaattcttgggtcagagaatacacaaagtaccatgagcggctgctcaccggcctcaagggatccaaaaggctggtgtttatcgactgtccaggtaagttggccgagcacattgaacacgaacagcagaaattgcccgccgcaactctggccctggaagaagatctcaaagtttttcacaatgcactcaagttagcccacaaggacaccaaagtgagtatcaaggtcggatccacggcggtccaagtgacttctgcagagcgcacaaaggtgttgggccagtcggtgttcctaaacgatatctattatgccagcgaaatagaagagatctgcttggtcgacgagaaccagtttaccttaacaatcgccaatcaggggactcccttgactttcatgcatcaggaatgcgaagccatagtccaatcgatcattcacattagaaccagatgggagctgagccagccagattctattccacagcatacaaagatcagaccaaaagacgtaccaggaacgctgctcaacatcgccctattaaacctgggctctagtgatcctagtctgcggagcgcagcttataacctactgtgcgccttaacgtgcaccttcaatctaaagattgagggtcagctgctcgagaccagtggactttgtatcccagctaataacactctctttatcgtgtcaatcagtaagaccctggccgccaatgagccgcatcttacactagagtttctagaggaatgcatctctggtttttcaaaaagcagcatcgaactgaagcacctttgtttggagtacatgacgccttggctaagcaacctcgtccggttctgtaaacataatgatgatgcgaaacgtcagcgtgtcaccgccattctggacaagctgatcactatgaccattaatgaaaagcaaatgtatccatcgatccaggcaaaaatctggggtagcctcggccagatcacagaccttctcgacgttgtgctggacagcttcatcaagacgagtgccactggagggctgggatccatcaaagctgaagtgatggccgataccgctgtagctcttgctagcggaaacgtcaagctggtgtcctctaaagtaatcggccgtatgtgcaaaattatcgataagacctgtctgtcaccaacaccaactctggagcagcaccttatgtgggacgatatcgctatcctggccaggtacatgcttatgctgtcttttaacaactcactggatgttgctgctcacctcccatatctgttccacgtcgtgacctttttggtggctactggaccactaagtttgagagcgtccacacacggactcgtgatcaatatcatccattctctttgcacttgtagccagctccatttcagtgaggagaccaaacaggtgttacggctgtcgcttacagaattttcactgccgaagttctacctgttatttggaattagcaaggtgaagtcagccgccgtcatcgcatttagaagctcctacagggatcgaagtttttcccccggaagttacgaacgcgagacatttgctctcacatcactcgaaacagtaaccgaggccttgctagaaataatggaggcatgcatgagagacatccccacctgcaaatggttagaccagtggactgaacttgcccaacgattcgcattccagtacaatccctctcttcagccccgcgcgttggtggtttttggctgtatcagcaaacgcgtcagccatggccaaatcaagcagatcattcgcattctgagtaaggccctcgagagttgtcttaaagggcctgacacgtataactctcaagtgctcattgaagccacagtgatagctcttaccaagttgcaaccacttcttaacaaggattcccccctccacaaggctctgttttgggtggcggtcgcagtactgcagctggacgaggtgaatctgtactctgctggcaccgccctgcttgaacagaatttgcatacattagactctcttaggattttcaatgacaagagcccagaagaagtgttcatggcaatccggaaccccctggagtggcactgtaagcagatggaccattttgttgggctaaatttcaactctaattttaatttcgcgctggtgggtcatctgctgaaaggttaccgacaccctagcccagccattgtggcccgaactgtacggattcttcacacactgctcacattagtaaacaaacatcggaattgtgataaattcgaggtgaatactcaatctgttgcgtacctggcggcgctgctcactgtttctgaggaagtacgatctcggtgcagcttgaaacataggaagagtctgctcttgaccgatatcagcatggaaaatgttccaatggacacatatcccattcatcacggtgatcctagttataggaccttgaaggaaacacaaccttggtcatcaccaaagggatccgagggatatctggctgccacttatccaaccgtggggcaaaccagccctcgggcaagaaaatctatgagtttggacatggggcagccgtctcaggcgaataccaagaaactgctgggcacgcggaaatctttcgaccatctgatctccgacactaaagccccaaagcggcaggagatggagtcaggaattacaacacctcccaagatgagacgggtggcagagaccgattacgagatggaaactcagagaatctcttcatcccagcagcacccccaccttcgtaaggtctccgtttccgaaagcaacgtgctccttgacgaagaggtcctgacagaccccaagatacaggcgctgcttctgactgtcctcgctacattggtcaaatacaccaccgatgagtttgaccagaggatattgtacgagtatcttgctgaggccagcgtagtgttcccaaaggtgttcccagtggtgcataatttactggactccaagatcaacactctgctttcattgtgccaggaccccaacctgctcaatcccattcatggaatcgtccagagcgtggtttaccacgaagagagcccaccccaataccaaacctcttatctgcagtcctttgggttcaacggattgtggcgcttcgcaggcccctttagtaagcaaacgcagatcccggactatgccgaactgatcgtgaagttcttggacgcgctcattgacacttacctgcctggtatcgacgaggagacatcagaggagtcactactcactcctacttccccatacccccccgctctacagtcccaactgtccattacggccaatcttaacctgtcaaactctatgacgtcactcgccacatctcagcactctccgggcatcgacaaggagaatgtcgagttgagccctactacaggacactgcaattccggcagaactaggcacggctctgcctctcaggtccagaagcagcgctccgctggaagttttaaaaggaattccataaaaaagattgtgtag

SEQ ID NO: 25261 - DNA, 8520 bp, synthetic construct
  misc_feature 1..8520: note = Description of Artificial Sequence: Synthetic coding sequence
  source 1..8520: mol_type = other DNA
atggccgcccaccggcccgtggagtgggtgcaggccgtggtgagcaggttcgacgaacagttacccatcaaaacaggtcagcagaacacacataccaaagtgtcaacagagcacaacaaggaatgcctgatcaatatctccaagtacaagttctctctggtgatcagtggcctcactacgatactgaagaacgtgaataacatgagaatctttggggaggccgccgagaaaaacctgtatctttctcagctcatcatacttgatacactcgagaagtgccttgcagggcagccgaaagacacaatgcggctggacgagactatgctcgtgaagcagctgctgcccgagatctgccactttctgcacacttgtagagaggggaaccagcatgcagccgagctgaggaactcagccagtggagttctattttccctgagttgcaataactttaatgctgtgttttctcggatcagcactagattgcaggaattgaccgtgtgcagcgaggacaacgtggatgtccatgacattgaactcctccagtatatcaacgtggactgcgctaaactaaagcggctgctgaaggaaacagcgtttaaattcaaggccctcaaaaaagtcgcccagctggctgtcatcaactccctggagaaggccttctggaattgggtagagaactacccagatgaattcacaaagctctaccaaattccccagaccgacatggctgaatgcgctgaaaaactcttcgatctggtcgacggattcgcggagtcgaccaaaagaaaggctgctgtctggccattgcaaataatcctgttgatattatgtcccgaaattatacaggacatctctaaggacgttgttgacgagaataatatgaataagaagttatttctcgattccctgagaaaagctcttgccggtcatggcggctctcgccagttgaccgaatctgctgccatagcctgcgtaaagctgtgcaaggcgtctacgtacattaactgggaagataactctgtcatttttttattggtccagagtatggtagttgatctgaaaaacctgttattcaatccctctaagcccttctctagagggtcacagcccgcggacgtggacctgatgatcgattgtctggtgagttgctttcggatctctcctcacaacaatcagcattttaaaatctgtctggcgcaaaattctccgtccactttccactatgttctggtgaatagcctgcataggataatcacaaacagcgcactggattggtggccgaagattgatgccgtgtactgtcatagcgttgagctaaggaacatgttcggcgaaacgctccataaagccgtgcaaggctgcggcgcccatccagcaattcgaatggcaccatccttgacgttcaaagagaaggtcacgagtcttaagtttaaggaaaagcctacggatttggaaacaagaagttataaatacctccttctgtctatggtgaagttgatccacgccgaccctaagctcctgctgtgcaatccgaggaaacagggaccggagacccagggtagcaccgcagaactcattaccggactagtccagttagttcctcagtcccacatgccagaaatcgctcaggaggctatggaagcgctgctggttcttcaccagctcgatagtatagacctgtggaatccagacgcccccgtggaaaccttctgggaaatttcatctcaaatgctgttctacatctgtaaaaaacttacaagtcatcagatgctgtcatctacagaaatcctgaaatggctgcgcgaaatcctgatctgtagaaacaagttcttgcttaagaataaacaggcagatagatcctcttgccactttctccttttttacggggttggatgtgacatcccaagcagtggaaacacatctcagatgtccatggatcatgaagaactactgaggactcccggcgcaagcctacggaagggcaagggcaattcctccatggattctgccgctggctgttctggcacccctcctatctgccggcaagcccagaccaagttagaagtggcgctgtacatgttcctttggaaccccgatactgaggctgtgctcgtggctatgagctgttttcgccacttatgcgaagaggcagacattcggtgcggagtcgacgaggtctctgtccataatctgcttccgaactataatacgtttatggaattcgcctcagtgagcaatatgatgagcaccgggagggccgcactccagaaacgcgtgatggcactgctgcggcgcattgagcaccccaccgccggaaataccgaggcatgggaggacacccatgctaaatgggagcaggctaccaagctgatcctgaactatccaaaagcaaaaatggaagatggacaggcagccgagagcctgcataaaaccatcgttaagagacgcatgtcccacgtatccggcggcggaagtatcgacctttctgatacagacagcctgcaagaatggattaatatgaccgggtttctgtgcgccctcggaggagtatgtctacagcagaggtcaaactctgggctcgctacttactcccctccaatgggtcccgtctctgagaggaagggcagcatgatatcagtgatgagctctgaaggcaatgctgacacccctgtgagcaaatttatggatagactccttagcctgatggtgtgtaaccacgaaaaggtcggcctccagatccgaaccaacgtgaaggacttggtcggactagagctttctccagccctttaccctatgctgtttaacaaacttaagaacactatcagtaaattttttgattcccagggacaggtcctgttaacggatactaacacacagttcgtggaacagacaatagctatcatgaagaacctgctggacaatcacactgaaggcagctcggagcatctaggtcaggcctccatcgagacaatgatgctcaacctggtacggtacgtgagggtcttaggcaatatggtccacgcaattcagatcaaaaccaagctctgccagctggtagaagtgatgatggcgaggagagatgatctgagcttctgtcaggagatgaaattcagaaacaagatggtggaatacctgaccgactgggtgatgggcacatcaaaccaggctgccgatgacgatgtgaagtgtctgacacgggatctggaccaggctagtatggaagctgtggtgtctctcctcgccggtttgccccttcagcctgaggaaggagacggggtagagctcatggaagccaaatcacagctcttcctgaagtacttcaccctctttatgaatcttctcaacgattgctctgaggtggaggacgaatctgcgcaaaccggcggaaggaaacgtgggatgtccaggagactcgcgtcacttaggcactgcaccgtgctagcaatgtccaaccttctgaacgcaaatgtggattcaggcctaatgcacagtattggcctggggtaccacaaagatctccagactcgggccaccttcatggaggtgttaacgaaaattctccagcaggggaccgagttcgacactctcgcagagacagttctggcggatcggttcgaaagacttgtggagctcgtgactatgatgggagaccagggggaattgcccatagctatggctctggctaacgtagtgccatgttcacaatgggacgaactggcccgcgtcctcgtaaccctgttcgacagccgtcatttgctataccaattgctgtggaatatgtttagcaaggaggtcgagctggcagattccatgcagacactctttcgtggaaacagcctagcatccaagatcatgacattttgtttcaaggtgtacggtgccacgtatctgcaaaaactgctggaccctctgttgcgaatcgtgataacctcatccgattggcaacatgtgtctttcgaggtcgatcctactcggctagaacctagcgagagtctagaagagaatcagcgtaacctgctacaaatgactgaaaaattcttccatgccattataagctctagttcggaatttcctccccagttacgttcagtgtgtcactgcctgtaccaggccacatgtcatagcctcctgaacaaagctacagtgaaggaaaaaaaggaaaacaagaaaagcgtggtctctcagcgttttccccagaactcaatcggggctgtgggaagcgcgatgttcctgagattcataaaccccgcgatcgtgtcaccatacgaagcaggcatccttgacaagaagcctccgccccgtatcgaacgcgggctgaaactgatgtccaaaatcctccagtcgattgccaaccatgtgctttttacgaaggaggagcacatgagaccctttaatgattttgttaaaagcaacttcgatgcggctaggcgattttttctcgacatcgcgtccgattgtccgacatctgacgcagtgaaccatagcttgtcatttatttccgacggtaatgtcctggcgctgcataggttactttggaataatcaggagaaaatcgggcagtacttatcctcgaaccgggatcacaaggctgtcggtcgccgtccgtttgataaaatggctacccttctggcttatttaggccctccggaacacaagccggtggctgacactcattggtcaagcctgaatctcacctcgtccaagttcgaggagtttatgaccaggcatcaggtccacgaaaaagaggaattcaaagcactcaagaccctgagcattttctatcaggccggcacgagcaaagcggggaaccccatcttttactacgttgccagaagattcaaaactgggcagattaatggcgatctattgatttatcatgtgctactgactctgaagccttactacgccaagccttacgaaatagttgtggatttgacccacactggcccctctaatcggtttaagacagacttcctgtccaagtggttcgtagtgtttccaggctttgcatatgataatgtctccgccgtctatatctataattgcaatagctgggttcgggagtatacgaagtaccatgagcgcctcttgaccggcctgaagggatcaaaacgcctggtgttcattgactgccccggcaaacttgccgaacatattgagcatgaacagcaaaaactacccgccgcgacactggctctggaagaggatctgaaagtctttcataacgctctgaaattggcgcataaagacacaaaggtaagcatcaaagtgggaagtacggctgtccaggtcacatcagcagagcggactaaggtgctgggtcagagcgtcttccttaacgatatctactacgcctccgagatcgaggagatttgccttgtggatgagaatcagtttactttgaccatcgcgaaccaggggacgcccctgaccttcatgcaccaggagtgtgaggccatcgtgcagtcaatcatccatatccgcacaaggtgggaacttagtcagcccgactccatccctcagcatactaagatccggccgaaagacgtgcctggtactctcctcaatattgccctcttgaatctggggtcctctgatcctagcttgcggtccgccgcgtataatctgttgtgcgccctgacttgcacttttaacttaaaaatcgagggccaactgctggagacatccggattgtgtatacctgcgaataataccctgtttattgtgagtatttctaaaaccctggcagcaaacgaaccccatctgactctggagtttctggaggagtgcatctcagggttctccaagagtagtatcgagctgaagcacttatgtcttgaatacatgacgccctggctgtccaatttggtgcgcttttgcaaacacaacgatgatgctaagcgacaaagggtgaccgccattctggataaattaataacgatgaccatcaatgagaaacagatgtatcctagcatacaggccaagatatggggttcgctcggacaaattacagacctgttggacgtggtgctggatagttttataaaaacgagcgcaaccggcggccttgggtccatcaaggccgaggtcatggctgacactgccgtggctctagccagcggcaacgtaaagctcgtgtcgagcaaggtcatcggccgtatgtgtaagattatcgataagacatgcctctccccaactccaacgcttgaacagcacttgatgtgggacgatatcgctatcttggctcgttacatgctgatgctgtccttcaacaattctcttgacgttgctgcccacctgccatacttattccatgtagtgacttttctcgtagccacagggccattgtcactgagagcatctacccacggcctcgtgataaacatcattcattctctgtgcacctgctcgcagctgcactttagcgaggaaaccaaacaggttctgcggttgtctctcactgaattttcgctacccaaattctatttactcttcggcattagcaaggtaaagtccgccgcggtgatcgccttccgcagttcctacagagatcgctccttttcccccggaagttatgagagagagacatttgccctcacatccctggagacagtgacggaagccttgcttgagataatggaagcatgtatgagagatatccccacgtgcaaatggctcgaccaatggactgaacttgcccagcggttcgcttttcagtacaacccaagcctgcagcccagggctctggtagtgttcggctgcatatccaagcgcgttagtcatggacagataaagcaaatcattagaattctcagcaaagctttagagtcgtgcctcaagggacccgacacctataacagtcaggttctgatcgaggccacagtgatagcactgactaagttacagcccctgttaaacaaggatagccccctgcacaaggccctcttttgggtggccgtggctgtgctgcaactcgacgaggtgaatctctatagcgcaggcacagccttgttggaacaaaacctgcacaccctcgattccttaaggatttttaacgataaaagcccagaagaggtctttatggcaatacgcaaccctcttgagtggcactgtaagcagatggaccacttcgtggggttaaactttaattctaactttaatttcgcactagtcgggcaccttttaaagggctatcggcatccaagccctgcgatcgtagccaggactgttcgcattctgcatacactgttgaccctagtaaacaagcaccgcaattgcgacaaatttgaggtgaacacacagtctgtggcctatctcgcagccctcctcactgtgtctgaggaggtgagaagccgctgctcactgaaacacagaaaatcccttctcctgacagatatttctatggagaatgtcccaatggacacttatccgatacatcatggggatcctagctacagaaccctgaaggagacccagccttggagctcgcctaagggatccgaagggtacctggctgccacctatccaaccgtgggccagaccagtccacgcgcccgaaaatcaatgtcactcgatatgggccagccgagtcaggccaacacgaaaaagttactcggaactcggaaatcttttgaccacctgatatccgataccaaggccccaaaacgtcaggagatggagtcaggcatcaccacccctccaaagatgaggcgggtagcagaaacagactatgagatggaaacacaacgcatcagcagtagtcagcaacacccacacttgcgtaaagtgtcagtgtcggaatctaacgtcttgctagacgaagaggtactgaccgaccctaagattcaggcactgctcttaacagtgctcgcaactctggtgaaatacaccactgatgagttcgatcagcggatactgtacgagtatctggccgaggcgtctgtggttttccccaaggtctttcctgtggttcataatctcttggattccaaaatcaacaccttgctgtcactgtgccaagatcctaacctgctgaatcccattcatgggattgtgcagtctgtggtgtatcatgaggaatctcccccgcagtaccaaacctcgtatctccagagttttggctttaatgggttgtggcgctttgctggtccctttagcaaacagacacagatcccagattatgctgaactcatcgtgaagttccttgatgccctcattgatacttatctcccaggtatcgacgaggaaacctccgaagagtcgctgctcacaccgactagtccatatccacctgccctccagagccagctctctatcactgccaacctgaatctatcaaattctatgacaagcctggcaacctctcaacacagtcctggaatagacaaggagaatgtagaactttctccaaccacaggccactgcaacagcggaaggacacgtcacggatctgcttcgcaggtccagaaacagagaagtgccgggagctttaagagaaattctatcaagaagattgtatag

SEQ ID NO: 25262 - DNA, 615 bp, synthetic construct
  misc_feature 1..615: note = Description of Artificial Sequence: Synthetic coding sequence
  source 1..615: mol_type = other DNA
atgcacgagcggtacagcaacgtgcaggtggccggccccgtggacaggacgtcttccaaagatagcccactgcacaaagcgctattctgggttgccgtcgccgttctccaactcgatgaagtgaacctttactccgctgggactgcgctgctggagcagaatttacacacattggactccttgcgaattttcaatgataaatcacctgaggaggtgtttatggcaattcgcaatcctctggagtggcactgcaaacagatggatcattttgtcgggctcaactttaatagcaatttcaattttgccctagtgggccacctcctgaagggataccggcacccaagtcctgccatcgttgccagaacagttcggatactccacacactcctgacgctggtaaataagcacaggaattgcgataagtttgaggtgaatacacagtcagtagcttacctggccgctctcctcaccgtgtccgaggaggtgcggtcccgatgttcacttaaacacaggaagagtctactgctcacggatattagtatggaaaacgtgcccatggatacgtaccccattcatcacggcgacccctcataccgtaacaaagagaagttctag

SEQ ID NO: 25263 - DNA, 1782 bp, synthetic construct
  misc_feature 1..1782: note = Description of Artificial Sequence: Synthetic coding sequence
  source 1..1782: mol_type = other DNA
atggccgcccaccggcccgtggagtgggtgcaggccgtggtgagccggtttgacgagcaactgcccattaagacaggccagcagaacacgcatacgaaagtgagtaccgagcataacaaagagtgcctgattaatatctctaaatacaaatttagcctcgtcatctccgggttgacaacaattctgaaaaatgtgaacaatatgcgtatcttcggcgaagctgccgaaaagaatctctacttatcacagctcatcatcctcgatacccttgaaaagtgtttggctggccagcctaaggacactatgcggctcgacgaaaccatgctggtaaagcaactgctccctgagatttgccacttcttacatacttgcagagagggcaatcaacacgccgccgagctgagaaacagcgcgtccggggtgctgtttagcctaagctgcaacaacttcaacgcagttttcagccggatatcaacgaggcttcaggaactgacagtatgctcggaggacaacgtggacgttcatgatatagaactgctgcaatatatcaatgttgattgtgccaagctgaagaggctgctgaaggagactgcgtttaaatttaaggcactgaagaaagtcgctcagctcgcagtgatcaatagtctagaaaaggcattctggaattgggtcgaaaattaccctgacgaattcaccaagctctaccaaatcccacagacagacatggcggagtgcgccgaaaaactctttgacctagtagatggcttcgccgagtctactaaacggaaggccgcagtgtggcctctgcaaatcattctattgatcctatgtccagagattattcaggacatatcaaaggacgtcgttgatgagaataatatgaacaagaaactgtttctggattcactgcggaaggcgctggccggacacggaggctccaggcagctgacagagtcggccgccatcgcctgcgttaagctttgcaaggcttccacctatataaactgggaagacaactctgtgatatttctgctcgtgcaatccatggtggtagacctgaagaatctgctgttcaacccctccaagccattttcacgtggctctcagccagccgatgtcgatttgatgatcgattgtcttgtgtcttgcttcagaatctccccccataacaatcagcattttaagatctgtctggctcaaaattctccaagcactttccactatgtgctggtgaattcattgcaccgaatcatcacaaattctgccctggactggtggcctaagattgatgcagtttactgtcattctgtggagctccggaatatgttcggagaaaccctccacaaggccgtccaggggtgcggcgctcatcccgctattcgcatggcgcctagcctcacattcaaggagaaagttacctcgctgaaatttaaggagaaacccactgatctggaaacaagatcatacaaatatcttcttctgtccatggtaaaactcattcacgccgatcctaagcttttgctttgtaatcctcggaaacaaggtcccgagacccagggcagtactgctgaacttattactggtctggtccagctggttccgcaaagtcacatgcccgaaattgctcaggaggccatggaggcactcttggtcctgcaccagttagatagtatcgacctttggaaccccgatgcccctgtggagactttctgggagatccgctatatgtatttctacttcctgaacagcacatttaaattctactttgtttttctgtcatag

SEQ ID NO: 25264 - DNA, 1917 bp, synthetic construct
  misc_feature 1..1917: note = Description of Artificial Sequence: Synthetic coding sequence
  source 1..1917: mol_type = other DNA
atgcacgagcggtacagcaacgtgcaggtggccggccccgtggaccgcacgtcctcgaagttctgtggaagcttcaactgcaggtttgcctttcagtacaacccgagtctgcagcctcgcgccctcgtggtgtttggatgcatttctaagcgtgttagtcatggacaaattaaacaaatcatccggatcctgagcaaggcattagagtcgtgtctgaaaggccctgacacgtacaacagccaggtcctcatcgaggccacagtgattgcccttacaaaactgcaaccactgttaaataaggatagtcctctccacaaagcactgttttgggttgccgttgccgtcctgcagctggacgaggtcaatctgtacagtgctggaaccgctcttctggaacaaaatctgcatactctggattccctcaggatctttaatgataagtctcccgaggaggtctttatggctatacgaaatccactcgaatggcattgtaaacagatggaccacttcgtggggttgaacttcaactctaattttaacttcgcgctggtcggccacctcctcaaaggataccgccaccctagccccgccatagtggccagaaccgtgcgtatactccatacattattgaccctggtcaacaagcaccgcaactgcgacaaattcgaggtgaacacgcagtcagtggcatacctagctgccctgttgacagtgtcagaagaagtgaggtcgcggtgcagcttgaaacacaggaaatctctcctgctgaccgacatctccatggaaaatgtaccaatggatacatatcctattcatcatggggatccatcctacagaactttgaaagagacacagccctggtcgtccccaaaaggctccgagggttatctggcagccacatacccgaccgtgggacagacttcccctagggcccgtaagtccatgagtctggacatgggccaaccttctcaggccaatactaagaagctgctgggcactagaaaatccttcgaccacttgatatccgacacgaaagcgcctaagaggcaggagatggaaagtggcatcaccacccctccaaaaatgcgcagagtggccgagacggattatgagatggagacccagaggatctccagtagccaacagcaccctcatctgaggaaagtctcagtgtctgaatcaaatgtgctgcttgacgaagaagtgttgactgacccaaagattcaggcgctcctgctcacagtgttagccactcttgtcaagtacacaacagatgaatttgatcagcgcatactttacgaatacctggccgaagcgtccgttgtgtttccgaaggtgttccctgttgtgcataacctgctggacagtaagatcaatacgctcctaagcctgtgccaagatccgaatctgctgaacccaattcacggaatcgtgcagagcgtagtgtatcatgaggagagtccccctcaatatcagacttcctacctccaatcatttggcttcaatggactttggaggttcgctggcccctttagcaaacagacccagatccccgactacgccgaactgatcgtcaagttcctcgacgctttgatcgacacatacctgccagggatagatgaggaaacctccgaagaatccttgctgactcccacttctccttaccccccagctctgcaatcacagctcagtattaccgccaatcttaatcttagcaactctatgactagtctggcaacaagccagcattcgccagggattgataaggagaacgtggagctgtctccaacaaccggccactgtaattcgggaagaacgcgtcacggctcagcctcccaagtgcagaaacagcggtcggcggggagctttaaactggccctgttaaatctcctcactgctcaccaaaattcattgtag

SEQ ID NO: 25265 - DNA, 7509 bp, synthetic construct
  misc_feature 1..7509: note = Description of Artificial Sequence: Synthetic coding sequence
  source 1..7509: mol_type = other DNA
aactgggaggacaacagcgtgatcttcctgctggtgcagagcatggtggtagacctgaagaatctacttttcaatccaagcaagccattcagtcggggcagccaaccagctgacgttgatctgatgattgactgtttagtgagttgctttcgtatctcccctcataataatcaacacttcaagatctgtctggcgcaaaattctccgtccacatttcactatgtgctagtaaactcactgcatcgcattattacaaactcggccctcgactggtggcccaagattgacgcagtgtactgtcattctgtcgagctaaggaatatgttcggagaaactctgcacaaagccgtgcagggatgcggggctcaccccgcaattcgaatggctccaagtttaacattcaaggagaaggttacctccctgaaatttaaggaaaaaccaactgacctcgaaaccaggagctataagtacctgttgctgtcaatggttaagttgattcacgccgatcctaagctgctcttgtgtaacccacggaagcagggcccggagactcaggggtctactgccgagctcataactgggctggttcagttagtgccacagagccatatgcctgaaatcgcccaagaggccatggaagcattgctggtgctgcaccagctggatagcattgatctgtggaaccccgatgctcccgtcgaaaccttttgggagatttccagccagatgcttttttatatctgcaaaaagttgacctcccaccagatgttatcttctaccgagatcctgaagtggctgcgggagatcctcatttgcaggaataaattcctgctgaaaaacaagcaagcagatcgctccagttgtcacttcctgctgttctacggagtcgggtgcgatattccgtctagcggaaacacctcacaaatgtcgatggaccacgaggaattgctgagaacaccaggcgcctcactacgaaaaggcaaagggaatagctccatggattcggctgcaggctgctccggcacacctcccatttgccggcaagcgcagaccaaactggaggtcgctctgtatatgttcctttggaacccagatacggaggcggtcttggtcgccatgagctgctttcgacatttgtgcgaagaggccgacattcgctgcggtgtcgacgaggtgagtgtacacaatcttctgccaaactacaacacctttatggaatttgcaagtgtctcaaatatgatgtccaccggccgggccgcattacagaagcgcgtgatggctctgttaagaagaattgagcaccccacagcaggaaataccgaggcctgggaggatacacatgctaagtgggagcaggcaaccaagctgattctcaactacccaaaggccaagatggaggacggccaagccgcagaatcattgcacaaaaccatagttaaacggagaatgtctcatgtgtcagggggcgggagcattgacctctcggataccgattccttgcaggaatggataaatatgactgggttcttgtgtgcattagggggggtatgtttacagcaacggtcaaattccggactggcaacatacagcccaccgatgggtcctgtgtcagagagaaaaggatccatgatatctgtcatgagttcagagggcaacgcggacaccccagtgagcaagttcatggaccgtctgctttccctgatggtttgcaatcatgagaaggtagggttacagatccggaccaatgtgaaggatctggtcggcctggaattgtctcctgccctgtatcccatgctctttaacaagctcaaaaacaccatatctaagtttttcgactcccaaggccaagtgctgttgacagacaccaatacacagtttgttgagcaaaccatcgcgatcatgaagaatctcctcgacaatcacacagagggcagctcagagcacctcgggcaggcaagcatcgaaaccatgatgctgaaccttgttcggtatgttcgcgtgctgggtaatatggtccatgcaatccagattaaaactaaactctgtcagctggtcgaggtgatgatggcccggagagacgatctctcattttgccaggaaatgaagttccgcaacaagatggtggagtacctgacagactgggtgatggggacctctaaccaggcggccgacgacgatgttaagtgtctgactagagacttggaccaggcgtctatggaggccgtcgttagtctgctggcgggtctccccctccagccagaggaaggggacggcgttgaactcatggaggccaaaagccaattgtttctgaaatatttcaccctgttcatgaacttgctcaacgattgctccgaggtagaagatgagagcgcccaaactggaggacggaagagaggaatgtccaggaggctcgcctctctccgccattgcacggtcctcgccatgtctaacctcctgaacgccaatgttgactctgggctgatgcactctataggccttgggtaccataaggatctccagacgcgcgcgacttttatggaagtgctgacgaagatcttgcagcagggtacagagttcgacaccttagctgagacggtgctggctgaccggtttgagaggctagttgagctggttactatgatgggcgatcagggagagctccccatagctatggcactggcgaacgtggtgccctgctctcagtgggatgagctggcccgggttcttgtgaccctgttcgattcacgtcacctgttgtatcagctgctctggaacatgttttcaaaggaagttgagctggccgactctatgcagactctgttcaggggaaatagcctagcatctaagatcatgacattctgttttaaggtgtatggtgcaacatatttacagaaattgctggatccactgctcaggatcgtgattaccagtagcgactggcagcacgtgagcttcgaggtggaccccacaagacttgaaccctcagaaagcctcgaggagaatcagagaaacctgctacaaatgaccgagaagtttttccatgcgattatctcaagttcctccgagttcccgccccagttacgcagcgtttgtcattgtttgtatcaggtggtctctcaaaggttccctcagaatagcattggggcggttgggtcagccatgtttctgaggttcatcaaccccgccattgtaagtccatatgaagctgggatccttgataaaaagcctccaccaagaatcgagaggggactgaagcttatgtctaaaatcctgcagtcaattgctaaccatgtgttgttcaccaaagaggagcatatgcggccttttaacgatttcgttaagtctaattttgacgcggccaggagattctttctggacatagcctcagactgtccgacatcagatgcggttaatcactcattatcctttattagcgatggtaatgtcttggcgcttcatcgactgctgtggaacaaccaggaaaaaattgggcagtacctgtcttctaacagggaccacaaggccgtgggaaggcgaccgtttgataagatggccacactcctcgcatacctgggacctccagagcacaagcctgttgctgacacccactggtcatcactgaatctgaccagtagtaaatttgaagagttcatgacacgccaccaggttcacgaaaaggaagaatttaaggccctgaagactctttctatcttctaccaggcaggtacaagcaaggccgggaatccaattttctactacgtagctcggcgattcaagacgggtcagattaacggagatctcctgatatatcatgtgttactgaccctgaaaccctattacgccaagccatacgagatcgttgtcgatcttacgcacacaggccccagcaatcgattcaaaaccgattttctgtccaaatggttcgtagttttccctgggtttgcttacgataacgtgtccgccgtatacatttataactgtaactcgtgggtgcgcgaatatacaaagtaccatgagagactgctcaccgggcttaagggatctaagaggttggtgtttatagattgtccaggaaaattagcggaacatatcgaacacgagcagcagaagctgcctgcagccacactggcccttgaggaagacctcaaagtcttccataatgctctgaagctagcccacaaggacactaaagtgtcaattaaagtgggatcaacagctgtacaggtcacgagcgccgagcgcacaaaagtgctgggacagtcggtttttctcaatgacatttattacgccagcgagatagaggagatctgtttggtggatgagaatcagtttacgctgactattgccaaccaagggacgccactcacatttatgcaccaagagtgtgaagccatcgttcagtcaatcatccatatccggaccaggtgggagctctctcagccggacagtatacctcagcacactaaaatccgaccaaaagacgtgccagggacacttctgaatatagctttgctcaatctgggaagtagcgacccctccctgagaagcgccgcttacaatctgctgtgtgccctcacctgcacctttaatcttaaaatcgagggccagctactggagaccagtggtttatgtattcccgcgaacaacactctgtttatcgtcagcatctccaaaacactagcagcaaacgagccacacctcacgcttgagttccttgaggaatgcataagcgggttttccaaaagtagtatcgagctgaagcatctttgtctcgagtacatgaccccgtggctaagcaacctcgtccggttttgtaagcacaacgatgacgccaagaggcagagggtgacagcaattcttgacaagctcataacaatgacaatcaacgaaaagcagatgtatccttctattcaggcaaaaatttgggggagccttgggcagataacagacttgctcgatgtcgtccttgattcatttatcaagacctcagctacaggcggcctgggttcgatcaaggctgaggtgatggctgacactgccgtagcactggcgtccggcaacgtgaagctcgtgagctctaaggtgattgggcgtatgtgcaagattattgataagacttgtctttctcccaccccaaccctagagcagcatttgatgtgggacgacatagctatcctggcacgctatatgctcatgctctcttttaataatagtttagacgttgcagcacacctcccttacttgttccatgttgtgacttttctggtggctaccggcccactaagtcttcgggcctccacgcatggcctcgtgataaatattattcacagcctgtgtacctgcagccagctgcacttctccgaggaaaccaaacaggtcctgaggttgtcgctgaccgaattttccctgcctaagttctatctgctatttggaatatcgaaagtgaagtccgcggccgtgatagcattcagatcgagttacagggataggtctttctcacctggttcctacgagcgggagactttcgctttgacgagcctggagactgttacagaggccctcctggaaataatggaagcgtgtatgagggacatcccaacgtgcaagtggctagaccaatggacggagctcgcgcagaggttcgccttccagtacaaccccagtttacagccgagggctctggtcgttttcggatgtatctctaagagagtttctcatggccagatcaaacaaattattcgtatcctatccaaggccctcgagtcatgcctgaaaggacctgatacttataatagccaagtgctgatagaagctactgtcatcgccttaacaaaactgcaacccttactgaacaaggacagccccctccataaggcactcttctgggtcgccgttgccgttctccaactggacgaggtgaacctctactcagccggaaccgcattactcgagcagaatttgcacacccttgattctttaaggatcttcaacgataaaagcccagaggaagtatttatggctattagaaaccctctggagtggcattgtaaacagatggatcacttcgtgggccttaactttaactccaactttaactttgctctggtcggacacttgctcaaagggtaccggcaccctagtccagcaatcgtagcaaggacagtgcgcatcctgcatacactcctgaccctggtaaacaagcacagaaactgcgacaaattcgaggtgaatacccagtctgtggcctaccttgcagcacttctgactgtctcagaagaggttagaagccgttgttcgcttaagcatcggaagtcactgctgctgactgacatctcaatggagaatgtcccaatggatacatacccaatacatcatggtgaccccagttatcggactctgaaagagacgcagccatggagttctcctaagggaagcgagggttatctcgcagcgacctatcccaccgtgggacagacaagtcccagggccagaaagagtatgagtttggacatgggccaacctagtcaagccaatacgaaaaagctcttaggcactcgtaaatctttcgatcacctcatatcagacactaaagcacccaagcgtcaagagatggagtctggcatcacaaccccccccaagatgcgacgcgtggcggagacagattatgagatggagacacagagaattagctcaagccagcagcatccacaccttaggaaagtttcagtgagcgagtccaacgtgctgttggatgaagaagtgttgactgaccctaagatacaagccctcctcctgacagtcctggccactctagtcaaatatactacagatgagtttgaccagaggatactgtatgagtacttggccgaggcctccgtggtatttcccaaagtgttccccgtagttcacaacttactggacagcaagatcaacacacttctgtctctctgccaagatcctaaccttctcaatcccattcatggaatcgttcagagtgtagtgtaccatgaagagagtccgccccagtatcagacctcctatctgcaaagctttggctttaacggactttggaggttcgcagggcccttcagcaagcaaactcagatcccagactatgctgagcttattgtgaagtttctggatgctctcatcgatacttatttgccaggaattgatgaagaaacctcagaggagagtcttctcaccccgacaagcccatatcctcccgctctccaatctcagctgtcaatcaccgccaacctgaacctgagcaattctatgacctcactggccactagccagcattcacccgcgtccctgccatgctccaaatcagccgtgtttatgcaactcttccctcaccaggggatagataaagaaaatgtggaattgagtcctactaccggtcactgcaattccggacgcactcggcacggaagcgccagtcaggtccagaagcagaggtccgctggatcattcaaacgcaatagcataaaaaagatcgtatag

SEQ ID NO: 25266 - DNA, 1524 bp, synthetic construct
  misc_feature 1..1524: note = Description of Artificial Sequence: Synthetic coding sequence
  source 1..1524: mol_type = other DNA
atggccggcgccatcgccagccggatgagcttcagcagcctgaagcgaaagcagcctaagacttttacagtcagaattgtgaccatggatgctgaaatggagttcaattgtgaggtcaagaagcagatccttgacgagaagatctattgtccacctgaggcctcagtgttactcgctagctacgctgttcaagccaaatatggagactacgacccttctgtgcacaaaaggggtttcctcgcacaagaggagttgttacctaagcgcgttataaacctataccaaatgacgccagagatgtgggaggagcgcatcaccgcctggtacgcagagcaccggggacgagccagagatgaggctgagatggagtatcttaagatcgcccaggacctggagatgtacggcgtcaactacttcgcaattcgaaataaaaaagggacagagttgctcctgggagtggatgcgctagggctgcacatctatgacccagaaaatcgcctcacccctaagatctccttcccatggaatgagattagaaatatttcatacagtgacaaggagtttaccatcaagcctctcgacaagaaaattgatgtgttcaagttcaacagcagcaagctgcgcgtaaataaactcatcttacagctctgcatcgggaatcatgacctcttcatgcgccgtaggaaggcagatagtctcgaggtgcaacagatgaaggcccaggctcgcgaagaaaaggctcgtaagcagatggagcgccagcggttggcccgtgaaaaacagatgagggaggaggctgaaaggacacgagacgagctggagcgacggctgttgcagatgaaggaagaagccaccatggccaacgaggctctcatgcgcagcgaagaaaccgccgatctgcttgcagaaaaagctcagattacagaagaggaggccaagttgctggctcagaaagccgctgaggccgaacaggagatgcagagaataaaagctaccgccataagaacagaggaggagaaacgcctgatggagcagaaagttttggaggccgaggtcctagctctgaaaatggcggaggagagtgagcggcgcgcaaaagaagctgaccagctcaagcaggacctccaggaagcccgggaagcagaacgcagagctaaacagaaattgctagagatcgcaaccaagcctacatacccccctatgaatccaatacccgcccctttgccccccgatattccctctttcaacctgatcggagatagcttaagtttcgactttaaagatacggatatgaaacggctgtccatggaaatagaaaaggagaaggttgaatatatggaaaaaagtaaacacctgcaggagcagctgaacgagctgaagaccgaaatcgaggcattgaagctgaaagagcgggaaaccgctctggacattctccataacgaaaattcagacaggggagggtccagcaagcacaatactataaagaagccacaggcccaaggaaggcgtccgatatgtatctag

SEQ ID NO: 25267 - DNA, 1788 bp, synthetic construct
  misc_feature 1..1788: note = Description of Artificial Sequence: Synthetic coding sequence
  source 1..1788: mol_type = other DNA
atggccggcgccatcgccagccggatgagcttcagcagcctgaagagaaagcagcccaagacatttactgtcagaatcgtgactatggatgcagagatggagttcaactgcgaaatgaagtggaaagggaaggacttgtttgaccttgtatgtagaaccctcggactgagggaaacctggttctttggcctgcagtacaccatcaaggataccgtcgcctggctaaaaatggacaagaaggtgctcgaccacgacgtgagcaaggaggagccggtcacgttccactttcttgctaaattttatcctgagaacgccgaagaagagctggtgcaggagatcactcagcacctgttcttcctgcaggtaaaaaaacaaatccttgatgagaagatttattgcccaccagaagccagtgttttattggcctcttacgcggttcaggcaaagtatggcgattatgatccatccgtccataagagaggcttcctcgcgcaagaggagctgttgcctaaacgcgttatcaatctgtaccagatgaccccagaaatgtgggaggagcgaattacagcctggtacgccgaacacagaggaagggctagggatgaagcggagatggagtatctgaagattgcccaggacctggagatgtacggggtgaattattttgccatccgtaacaaaaagggcacggaattgttattaggcgtggacgctctcggccttcatatctatgatcccgagaaccggctcactcctaaaatttcgttcccctggaacgagattcggaatatatcctactctgataaagaattcacgattaagccccttgataaaaaaattgacgttttcaaattcaacagttccaaactgcgggtgaacaaactgattttgcagttgtgcatcggaaaccacgatctatttatgaggaggagaaaggccgattctctagaggtgcaacagatgaaggcgcaggcccgcgaggagaaggctcgcaaacagatggagcggcaaagattggcccgagaaaaacagatgagagaggaagctgaacggacccgggatgaactggaacgcagactgctgcagatgaaggaagaggccacaatggccaatgaagccttgatgagatccgaagaaaccgccgatctgcttgcggaaaaggcccagattaccgaggaggaggctaagctcttggcgcaaaaggctgccgaagctgagcaggagatgcaaagaatcaaagcaactgctattcgcacagaagaagagaaacgcctgatggagcaaaaagtgttagaggctgaagtgctggctttaaagatggcggaggagtctgaacggagggccaaagaagccgaccagctcaagcaggacctgcaagaggctagagaagctgaacggagggcaaagcagaaactcctggaaatcgctaccaagcctacctacccgcccatgaacccaattccagcccctttgcctcctgatattccttcctttaacctgattggcgatagcctcagcttcgatttcaaagacactgacatgaagcgcctcagtatggagatcgaaaaagaaaaagtagaatatatggaaaaaagcaagcacctacaggaacagttgaatgagctgaaaactgagatcgaggcactgaaattgaaggagcgtgagacggctctggatatcctccataatgagaactctgaccgtgggggatcctccaagcataacactatcaagaaactgaccttacaatccgccaagtctagggtggcttttttcgaagaactctag

SEQ ID NO: 25268 - DNA, 663 bp, synthetic construct
  misc_feature 1..663: note = Description of Artificial Sequence: Synthetic coding sequence
  source 1..663: mol_type = other DNA
atggccggcgccatcgccagccggatgagcttcagcagcctgaagagaaaacagccgaagaccttcactgttcgcattgttactatggatgccgagatggagtttaattgtgaagttaagaaacagatcctggatgaaaagatatactgccctcctgaggcttctgttctgctggcaagctatgccgtgcaggccaagaacaagaaaggcacagaacttctgctgggcgtggacgcactcggcctgcacatttatgatcccgagaacagattgacccccaaaattagcttcccttggaatgaaataagaaatatcagttacagtgataaagaatttactattaaaccattagataaaaaaatagatgtcttcaagttcaactcgagtaagcttagagtcaataagctgatattacagctgtgcatcgggaaccacgatctgtttatgagacgacgcaaagcagactctctggaggtgcagcaaatgaaggcccaggccagagaggagaaagctagaaagcaggggcagcggggaagatccgccgaagccggtcctgcaggatctacaagaggcggggctaagtcccaggcggaggcacccggggactgtcaccaggctcatgttccggcacacgaacctaattcctccaccgttgcgagttag

SEQ ID NO: 25269 - DNA, 1524 bp, synthetic construct
  misc_feature 1..1524: note = Description of Artificial Sequence: Synthetic coding sequence
  source 1..1524: mol_type = other DNA
atggccggcgccatcgccagccggatgagcttcagcagcctgaagagaaagcaaccaaaaacctttaccgtgcgaattgtgaccatggacgccgagatggaatttaattgcgaggtcaagaagcagattcttgatgaaaagatctattgccctcccgaagcctctgtcctgctggcgtcctatgcagttcaggccaagtatggggactacgaccccagtgtccacaagagaggctttcttgcccaggaagaattactgccgaagcgagtgattaatttatatcagatgacgccagaaatgtgggaagagcgcattaccgcgtggtatgcggagcacagggggcgtgcccgcgatgaggcggagatggaatacctcaagatagcacaggatctagagatgtatggggtaaactatttcgccatccgtaataaaaaaggaaccgaactcctcctgggcgttgatgccctcggcctgcatatttatgaccccgagaaccgcttaacaccgaaaatttcctttccttggaatgaaattcgcaatatctcttactccgacaaggagttcacaattaagccgctggataagaagatcgatgtcttcaagttcaatagcagcaagcttcgcgtaaacaaactgattctccagctctgcattggtaaccacgatctgttcatgagacgtcgaaaggcagactccttagaggtgcagcagatgaaagctcaagcgagagaagagaaagcccggaagcagatggagaggcagcgcctggccagagagaagcagatgagggaggaagctgagagaacaagggacgagcttgagagaaggctgttgcagatgaaggaagaagccacaatggctaacgaggctctaatgcgctcagaagagactgcagacctgttagcagagaaggctcaaattactgaagaggaggcaaaacttcttgcacagaaagccgcagaggcagagcaggagatgcagcgcatcaaggcaacagccatcaggacagaggaagagaagcggctgatggagcagaaggtgcttgaggccgaagtactggcgctgaagatggccgaggagtctgaacggcgagcaaaggaagcagaccagctgaagcaggatctgcaggaggcacgtgaggccgagcgaagggcgaagcagaagttactggagatcgccaccaaacccacatacccccccatgaatccgatcccagcccctctcccgccggatatcccatcattcaacctcatcggggattctctcagttttgattttaaggacaccgacatgaagcgactctctatggaaatcgaaaaagaaaaagtcgagtatatggaaaaatccaaacacctccaagagcagctgaacgagcttaagacagagatagaagcattgaagcttaaggaaagggagactgcacttgatatactgcataatgagaattccgaccgtggcggcagttcaaagcataacaccattaaaaagcctcaggcgcaggggagaagacccatctgcatttag

SEQ ID NO: 25270 - DNA, 1773 bp, synthetic construct
  misc_feature 1..1773: note = Description of Artificial Sequence: Synthetic coding sequence
  source 1..1773: mol_type = other DNA
atggccggcgccatcgccagccggatgagcttcagcagcctgaagcggaagcaacctaagactttcactgttcgcatagttaccatggacgcggagatggaattcaattgtgaaatgaaatggaagggaaaagacctcttcgatctcgtgtgcagaacgctggggctgcgcgagacctggtttttcgggctccaatacacaatcaaagacacagtggcctggctcaagatggacaagaaggtgctggaccacgacgtgagcaaggaagagcctgtcactttccattttttagctaagttctatcctgagaatgctgaagaggagctcgtccaagagataacccaacaccttttttttctacaggtcaaaaagcagatccttgatgagaagatctattgtccaccagaggcttcggtactcctcgcttcatacgcggtacaggcaaaatatggggattatgaccccagtgtccataagcggggtttcttagcccaagaggagctgctgccaaaaagggtgatcaacctgtaccagatgacacctgaaatgtgggaagagagaattaccgcgtggtatgccgaacatagaggtagggccagagacgaagctgagatggagtatttgaagatcgcccaggacttagagatgtatggtgtgaactacttcgccataagaaacaagaaaggtaccgagcttctactcggggtcgacgctcttgggctgcacatatatgacccagagaatcgccttactcccaaaatcagtttcccctggaacgagataaggaatattagctactccgataaggaattcaccatcaagccacttgacaaaaaaatcgacgtgttcaaattcaattcatcaaagctccgtgtcaataagttgatcctgcagctgtgtattgggaaccatgatctgttcatgcgcaggcggaaggcggattctctggaagtgcagcaaatgaaggcgcaagctcgggaggaaaaagctaggaagcaaatggaaaggcagcgcctcgctcgtgagaaacagatgagggaggaagctgagaggaccagggatgagttagaacgccgactgttacagatgaaggaggaggcaacaatggctaatgaggctctcatgcgcagtgaggagacagctgacctgcttgctgagaaggcacaaatcactgaagaagaagccaaactgctagcccagaaggcagctgaagcagaacaggaaatgcagcggattaaggcaacagcaatccgaactgaggaagagaagcgtttgatggagcagaaggtgctagaggccgaggttctggcgttgaaaatggctgaggaaagcgagcgtcgcgcaaaggaagctgatcaactgaagcaggacttgcaggaagccagggaagccgagagacgggccaagcagaagctgctggaaattgcgacaaaacccacttacccacccatgaatcctatcccggctcctttgccccctgacatcccctctttcaacctgatcggcgacagtttatcatttgattttaaggatacagacatgaagagactgtccatggagattgaaaaagaaaaggttgaatacatggagaagtccaaacacctgcaggaacaactaaatgaactgaaaacagagattgaggcacttaagttgaaggaacgtgaaactgccttggacatcctccataatgagaattcggatcgaggcgggtctagcaagcacaataccatcaagaaaccacaggcacaaggcagacggcctatctgcatctag

SEQ ID NO: 25271 - DNA, 1650 bp, synthetic construct
  misc_feature 1..1650: note = Description of Artificial Sequence: Synthetic coding sequence
  source 1..1650: mol_type = other DNA
atggccggcgccatcgccagccggatgagcttcagcagcctgaagagaaaacaacccaaaactttcactgtgaggattgtcaccatggatgctgagatggagttcaactgtgagatgaaatggaaaggcaaagacctgtttgatttagtgtgccggaccctcggcctccgtgagacgtggtttttcggtctccagtacacaatcaaagacactgttgcatggctgaagatggataaaaaggtcaaaaagcagattctcgacgagaaaatctattgtcctccagaggcttctgtgcttctggcctcctatgcagtgcaagctaaatatggtgattatgatccaagcgtgcacaaacggggcttccttgcccaggaagaactgctgcccaagcgcgtgatcaacttataccagatgaccccagaaatgtgggaagaaaggatcacggcatggtacgccgagcatcgcgggcgggccagagacgaagccgagatggagtatttgaagattgctcaggatctagagatgtacggtgtcaactactttgcaattcggaacaaaaaagggactgaactcctgctcggcgtcgatgcgttaggcctgcacatctacgatccggagaaccggctcacacccaaaatctcattcccatggaatgaaattaggaacatcagctattctgacaaggaatttaccattaagcccttggataaaaaaatcgacgttttcaaattcaattcgtcgaagctccgagtgaacaagcttatcctgcagctctgcataggaaaccacgatctgttcatgaggcggcgaaaggctgactcattggaagttcagcaaatgaaggctcaggccagggaagagaaagcaaggaagcagatggaaaggcaacggctcgctagggagaagcaaatgagggaggaggctgaacgaaccagagatgaactggagcggcggctcctgcaaatgaaggaagaggcaaccatggctaatgaggccctgatgcgcagcgaggaaacggcagaccttctggctgagaaagcgcagatcaccgaagaagaagccaagctgctagctcaaaaggccgccgaggctgaacaggagatgcaacggattaaggctacggccattcgaacggaagaggagaagcgacttatggagcaaaaggttctggaggcagaagtgctcgctcttaaaatggccgaagaatcagagcggagggccaaggaagcagaccagcttaagcaggacctccaggaagcacgggaggccgaacgccgcgccaaacagaaactcctcgagattgccaccaaaccaacgtatccaccgatgaatcctattccagctccccttcctccagatatacccagtttcaacctcatcggagactccttatcttttgactttaaggatactgacatgaaacggctgtctatggaaattgaaaaagagaaggtcgaatacatggaaaagtcgaaacacctgcaggagcagctgaatgagctcaagacagagattgaggccctgaagcttaaagagagggaaaccgccctagatatcttacacaacgagaatagtgataggggggggagtagcaaacacaacactattaaaaagccacaggcccaaggcaggcgccctatctgtatttag

SEQ ID NO: 25272 - DNA, 1647 bp, synthetic construct
  misc_feature 1..1647: note = Description of Artificial Sequence: Synthetic coding sequence
  source 1..1647: mol_type = other DNA
atggccggcgccatcgccagccggatgagcttcagcagcctgaagcgcaaacagccaaaaactttcacagtcaggatcgtaactatggacgctgaaatggagtttaattgtgaggtgctcgaccatgacgtctccaaggaagagccagttaccttccacttcttggccaaattctatcccgagaatgctgaggaagagctggtgcaagagataactcagcacctattcttcctacaggtgaagaaacaaatactagacgagaaaatctactgcccccctgaggcctcagtcttgctggcctcatatgctgtccaggccaagtacggtgattatgatcccagcgttcacaaacgcggctttctagctcaagaggaactgctgcccaagcgggtgatcaacctgtatcaaatgacccccgagatgtgggaagagcgaattacggcctggtacgcagaacaccgaggtagggcacgggacgaagcagagatggaatatctgaagatcgcccaggatctcgagatgtatggtgtcaactacttcgccatcaggaacaagaaaggcaccgagctcttgctcggcgtggacgcactgggactgcacatttatgaccccgaaaacagactgacccctaagatcagttttccatggaatgagatccgtaacatcagttattcagacaaagaattcacaatcaagcctttagataaaaaaatcgatgtatttaaattcaattcttctaaactgcgggtgaacaaactgatcctacagctgtgtataggcaaccacgacctatttatgcggaggcgcaaagctgacagccttgaggtacaacagatgaaagcccaggctagagaagaaaaggccagaaaacagatggaacgccagcgccttgcaagggaaaagcagatgagggaagaagcggagcggacccgcgatgagcttgagcggcggctgttacagatgaaggaggaggcaacaatggccaatgaggctctcatgcgatccgaggaaacagctgatctgctggcagaaaaggcccagatcaccgaggaggaagctaagctcctcgctcagaaagccgctgaggcagagcaagaaatgcagcgcattaaggcgacagctattcgtacagaagaagaaaagcggctaatggagcagaaggttctggaggcagaggtgctcgcactgaagatggcggaagagagcgaaagaagagcaaaggaggccgatcagctgaaacaggacctgcaagaagctcgagaagctgaacggcgggctaaacagaagctcctggagatagccacaaagcctacctatccacccatgaaccctatcccagctcccttaccccctgatataccttcctttaatttaattggtgacagcctctcttttgatttcaaagatacagatatgaagagactctccatggagattgaaaaagagaaagtggaatacatggagaagagcaagcacctgcaggaacaactaaacgaattgaagaccgaaatagaggctctgaaactgaaagagagggagaccgccctggacatcttgcataatgagaacagtgatagagggggctcaagtaaacataacacaatcaagaagcctcaggcccaagggcggagacccatatgcatttag

SEQ ID NO: 25273 - DNA, 1773 bp, synthetic construct
  misc_feature 1..1773: note = Description of Artificial Sequence: Synthetic coding sequence
  source 1..1773: mol_type = other DNA
atggccggcgccatcgccagccggatgagcttcagcagcctgaagaggaagcagccgaagacgtttactgtgaggatcgtgacgatggacgccgagatggaatttaactgtgagatgaagtggaagggcaaggacttatttgacctggtgtgtcgtactctggggctgcgagaaacttggttcttcgggctccagtatacgataaaagacactgttgcctggcttaagatggacaagaaagtactagatcacgatgttagtaaagaagagccggtgacatttcatttcctggccaagttctatcccgaaaatgcagaggaagagttggtgcaagagataacacagcatctattcttcctgcaggttaaaaagcagatcttggatgaaaagatttactgtccacctgaggctagtgttctccttgcaagctatgccgtccaggccaagtacggcgactatgacccttcagttcacaagcgtggtttccttgcccaggaggaactgttgccaaaacgtgtgatcaatctgtaccagatgacccccgaaatgtgggaggagcgaataacagcctggtacgcagagcatagaggtcgtgcccgcgatgaagccgaaatggaatatctgaagatagcacaggaccttgaaatgtacggcgtgaattattttgcaattaggaacaagaaagggacagagcttctgctcggagtggacgccttaggcttgcacatctacgatcccgaaaaccgtctgaccccgaagatttctttcccctggaatgagataaggaacatctcctactccgacaaagagttcaccattaaacctctggataagaagattgacgtgtttaagtttaactcctcaaagctgagggtgaataagttgattctgcagctgtgtattggtaaccacgatttattcatgaggagacggaaagcagacagcctggaggtgcagcagatgaaagcacaagcacgggaagagaaagcaagaaagcagatggaaagacagcgattagctagagaaaagcaaatgagagaggaagctgagcgcactagagatgagctagaaagaaggctgctgcaaatgaaagaggaagcaaccatggccaacgaggccctgatgaggtcagaggagacagccgacctcctcgcagaaaaagcccagatcactgaggaagaggccaaattgctcgcccagaaagctgccgaagcagagcaggaaatgcagaggattaaggcgactgcaatccgaaccgaagaggaaaaaaggcttatggagcagaaagtcttggaagcggaagtgcttgccctaaagatggctgaagaatccgagcggagagccaaggaggccgatcagctcaaacaggacctgcaggaagctcgcgaggccgagaggcgggcaaagcagaaacttctggagatagcaaccaagcctacttaccctcccatgaacccgatacccgcccccctccctcccgacatccctagctttaacctcatcggcgattccctgtcattcgacttcaaagacaccgatatgaagagactgtcaatggagatcgaaaaagagaaggttgagtatatggagaaatctaaacatctgcaggagcagttaaacgagctgaaaaccgaaatcgaagcactcaagcttaaagagagagaaaccgccctggatatactgcacaacgagaactctgatagaggggggagctcaaagcacaacaccatcaaaaaacctcaggcccagggccgtcgcccgatctgcatatag

SEQ ID NO: 25274 - DNA, 1806 bp, synthetic construct
  misc_feature 1..1806: note = Description of Artificial Sequence: Synthetic coding sequence
  source 1..1806: mol_type = other DNA
atggccggcgccatcgccagccggatgagcttcagcagcctgaagagaaagcaacccaagaccttcaccgtcaggatagtgaccatggatgccgagatggagtttaattgtgaaatgaaatggaaagggaaagacctttttgacctcgtctgccgcactctaggtttgcgcgagacctggttcttcggcttacaatacacaattaaggacaccgtggcatggctgaagatggacaaaaaggtgctggatcacgacgttagcaaggaagagcctgttactttccatttcctggcgaaattctatcctgaaaacgccgaagaggagctagtgcaggagatcacacagcacctgtttttccttcaagtgaagaagcagattctggatgagaagatttattgcccgcccgaggcctctgttctgctggctagttatgccgtgcaggctaaatacggcgattatgacccatccgtgcacaaaagaggctttctggctcaggaagagctactcccaaaaagggtcatcaacctgtatcagatgacacccgagatgtgggaagaacgcatcaccgcttggtatgcagaacacagaggacgtgcgcgcgatgaagcagagatggaatacttgaagatcgcacaggatctggagatgtacggtgttaattacttcgcgattaggaataagaagggcaccgagctcctcttgggcgtggatgctttagggttgcacatctatgaccccgagaatcgcttgactcccaaaatatcctttccctggaacgagatccggaatatctcctactccgacaaggagtttactattaagcccctggacaagaagattgacgtgtttaaatttaactcctcaaagctacgggtgaacaaactgatccttcagctgtgcataggaaaccacgatttatttatgcggcgccgtaaagccgactccctggaggtgcagcagatgaaggctcaggcaagggaagagaaggcacgcaagcagatggagcggcagcggcttgctagggagaaacaaatgagagaagaagcagaaagaaccagggatgaacttgagaggcggctactgcagatgaaggaggaggcaaccatggcaaacgaggctcttatgcgctctgaagaggccgaacaagaaatgcagaggattaaggccacagccattcgcaccgaagaggaaaaacgactcatggaacagaaggtgctcgaggccgaggttctggcattaaaaatggccgaggagtcagagcgacgggcaaaagaggcagaccaactcaagcaggatctgcaagaggctcgcgaggcagaaaggcgggcaaaacagaaactgttagagattgccacaaagcccacatacccaccaatgaatcccatccccgcaccgctgcctccggatatcccctcttttaatctgatcggagactctctctcgtttgatttcaaagacactgacatgaaaaggctctcaatggagatcgagaaagagaaggtggagtatatggagaagagcaagcacctgcaggaacaattaaatgagcttaagactgaaatagaagctttgaaattaaaggagcgagagacggctctcgatattttgcacaatgagaattccgatcgtggcggcagcagtaaacataacacgatcaaaaaaggcatgttcttgttcttcttcatactgttctgctggttctccctgaagcctaaggccgaggatctatcggccttcgaacctagcaactcgccctgtcgcgcccccagtcccgaatggcccagcctgaaatcctcatcacgatag

SEQ ID NO: 25275 - DNA, 1686 bp, synthetic construct
  misc_feature 1..1686: note = Description of Artificial Sequence: Synthetic coding sequence
  source 1..1686: mol_type = other DNA
atggccggcgccatcgccagccggatgagcttcagcagcctgaagcggaaacaacctaagacattcactgtccgaatcgtaaccatggacgctgaaatggaatttaattgtgagatgaagtggaagggaaaagatctgttcgatctggtctgccgcaccctgggcttgcgggagacatggttctttggactacagtacacaatcaaggacaccgtggcatggctcaagatggataagaaagtgctcgatcatgatgtttccaaagaggagcctgttacttttcactttttggcaaagttctatcctgagaatgccgaagaggaactggttcaagagatcacgcagcacttgtttttcctgcaggtgaaaaaacagattctcgatgagaagatttactgtcctccagaggcatcagtactgctggcctcctatgccgtccaggccaaatatggagactacgatccctcagtgcacaaaaggggattcctggcccaggaggagctgttgcctaaacgagtcatcaacctatatcagatgactcccgaaatgtgggaggagcgcattactgcctggtacgccgagcaccggggcagggcccgcgacgaggctgagatggagtatctgaaaatcgcccaggatttagaaatgtacggcgtgaactattttgcaatacgaaacaagaagggcaccgagttgctgctgggtgttgatgcccttgggctccatatctatgacccagagaatagattgaccccaaaaataagttttccttggaacgagatcagaaacatttcctactccgacaaggaatttacaatcaaacctttggataaaaaaatagacgtgttcaaattcaactcgagtaagctgcgggtgaataaactcatcctgcagctttgtatcggtaatcacgatttatttatgagacgccgcaaggccgacagtttggaggtccagcaaatgaaggcacaggccagggaagaaaaagccaggaagcagatgaaggaggaagcgacgatggccaacgaggctctgatgaggagcgaagagacagctgaccttctggctgagaaagcgcaaattactgaagaggaggccaaactgctggctcaaaaagcagcagaggcagagcaagaaatgcagaggattaaagccacagctattagaacggaagaggagaagaggctgatggagcagaaggttctggaagcggaagtcctcgcactcaaaatggccgaagaatccgaacgccgggccaaggaggccgaccagttaaagcaagatctgcaagaagcacgcgaagctgagcgaagggccaaacagaaactgctggagattgcaaccaaaccaacgtaccctccaatgaatccaattcctgccccactccctcctgacatcccctcatttaatctgatcggcgattcactgtcattcgactttaaagacacagatatgaagcgcctaagcatggaaatcgagaaggagaaggtggagtatatggaaaagtcaaaacaccttcaagagcagctcaacgaactgaaaaccgaaattgaggctcttaagttaaaggagcgggagacggctttggacattttacacaatgagaactccgatcgaggcggttccagcaagcacaacacaatcaaaaagcctcaagcacagggtagaagaccgatttgcatctag

SEQ ID NO: 25276 - DNA, 1773 bp, synthetic construct
  misc_feature 1..1773: note = Description of Artificial Sequence: Synthetic coding sequence
  source 1..1773: mol_type = other DNA
atggccggcgccatcgccagccggatgagcttcagcagcctgaagcgcaagcaaccgaagactttcactgtgagaattgtgaccatggacgcagagatggagttcaattgtgaaatgaagtggaaggggaaggacctcttcgacctggtgtgccgtacactcggattgcgcgagacctggttcttcgggctccagtatactatcaaggacaccgttgcatggttgaaaatggacaaaaaagttctcgatcacgatgtatctaaggaggaaccagttacctttcactttctggcgaaattctacccagagaatgccgaggaggagctagtgcaagagattacccagcacctgttctttttacaggtgaaaaagcagatcctggacgaaaagatttattgtcctcccgaagcctccgtgcttttagccagctacgcagtccaggccaagtatggcgactacgatcccagcgtgcataaacggggttttcttgcgcaggaagaactgctacccaagcgcgtgataaatttgtaccagatgactccggagatgtgggaggagcggatcaccgcctggtatgccgagcatagagggagagcacgggacgaggcagaaatggagtacctgaaaatcgctcaggacctagaaatgtatggggtgaactactttgctatccgaaacaaaaaagggactgaacttctcctcggtgtcgacgccctgggcctacatatttatgatccagaaaatcgcctgacacccaagatctcattcccatggaacgaaatcaggaacatcagttacagtgataaggaatttacgataaagccactggataagaaaattgacgtcttcaaattcaattccagcaagctccgcgtcaacaagctgatccttcagttgtgcattgggaaccacgacctattcatgagaagacgcaaggctgactcgctagaggtgcagcaaatgaaggctcaggcgcgcgaggagaaggcacgaaagcagatggagaggcagaggcttgctagggagaaacagatgcgcgaggaggcagagcggaccagggatgagctcgaaaggcgccttctgcagatgaaggaagaagcgaccatggccaatgaagccttaatgcggagcgaggagactgcagacctgttggcagagaaggctcagatcaccgaagaagaggctaaattgttggcgcagaaagcagcagaagctgagcaggagatgcagcgcattaaggcaacggcaattcgcacagaggaggagaagaggctgatggagcagaaggtgctcgaagccgaagtcctggctcttaagatggcggaagagagcgaacgcagagccaaagaggcggaccagctgaaacaggatttgcaggaagccagagaagcggaacgcagggctaagcagaaattactggagatcgctactaagccaacgtacccaccaatgaatccaattccggctccactcccacccgacataccgagcttcaacctcatcggggattcactgtctttcgattttaaggacaccgacatgaaacgcctttctatggagatcgagaaggagaaggttgagtacatggagaaatccaaacacttacaggagcagcttaatgagttgaagaccgaaattgaagcgctgaaactgaaggaaagggagactgccttggatatattacataacgaaaattcagaccgcggcggctctagcaagcataacacaatcaaaaagccacaagcccaggggcgtcgccccatctgcatttag

SEQ ID NO: 25277 - DNA, 498 bp, synthetic construct
  misc_feature 1..498: note = Description of Artificial Sequence: Synthetic coding sequence
  source 1..498: mol_type = other DNA
atggccggcgccatcgccagccggatgagcttcagcagcctgaagcgaaagcaacccaaaaccttcacagtccggattgttacaatggatgcagaaatggaatttaattgtgagatgaagtggaagggcaaggatctgtttgacctggtgtgtaggacactgggcctgagagagacatggtttttcgggctgcagtatacgatcaaggacaccgtggcctggcttaaaatggacaagaaagtcctggatcacgatgtgtcgaaggaagagcctgtgacattccactttctggcaaaattttatcccgagaacgccgaggaggagttggtccaggagatcacacaacatctttttttcctgcaggtaaagaaacagatcctggacgaaaaaatctattgtcccccagaagcttccgttctcctcgccagctatgcagtccaggccaagcttaccctgcaaagcgccaaatctcgcgtcgccttctttgaggagctttag

SEQ ID NO: 25278 - DNA, 663 bp, synthetic construct
  misc_feature 1..663: note = Description of Artificial Sequence: Synthetic coding sequence
  source 1..663: mol_type = other DNA
atggccggcgccatcgccagccggatgagcttcagcagcctgaagaggaaacagcccaaaaccttcacagtacggatagtgacgatggatgctgagatggagttcaactgtgaggtgaaaaagcaaatcttggatgaaaagatctactgccctcccgaagcatccgttctgttagcctcctacgccgtccaggccaagaataagaaaggcactgagctcttgctcggagtggatgcgctgggcttacacatatacgatccagaaaatagattaactcccaagatatcatttccctggaatgagatcaggaacatctcctactctgataaggagtttacaattaagccactggataagaagattgatgtgttcaagttcaatagttcaaagctcagagtgaataaacttatccttcagctctgcatcggcaaccacgatttattcatgcgccgccgcaaagctgactccctggaagtgcagcagatgaaagcccaagcaagggaggagaaagcaaggaagcaaggccaacgcggaagatccgcagaggcaggacctgcaggatcaacacggggcggagcaaaatcccaagcagaggcacctggtgattgtcatcaggcgcacgtcccagctcacgagcccaattctagtacagtggcgtcgtag

SEQ ID NO: 25279 - DNA, 2772 bp, synthetic construct
  misc_feature 1..2772: note = Description of Artificial Sequence: Synthetic coding sequence
  source 1..2772: mol_type = other DNA
atggagcggggcctgcccctgctgtgcgccgtgctggccctggtgctggctccggctggagccttccgcaacgacaaatgcggagacaccataaaaattgagagccccggatacctgactagtcctggatacccccacagctaccacccctcggagaaatgtgaatggttaatccaggctcctgacccctaccaaagaataatgatcaatttcaatccacacttcgatctcgaggatcgggattgcaagtacgactacgttgaagtgtttgatggcgagaatgagaacggccacttcagagggaaattctgcgggaaaatcgctccaccgcccgtggtctccagcggccccttcctcttcattaagttcgtgtcagactacgagacacatggcgccggtttcagtatcaggtatgagattttcaagcgggggcccgagtgttcccagaattacactaccccttctggtgtcatcaagtcccctggcttcccagagaaatatcccaattccctcgagtgtacttacatcgtgttcgtgcctaagatgtctgagatcatactagagtttgaatcctttgacctggagccagacagcaaccctcccggcgggatgttttgtcggtacgaccggctggaaatctgggatggcttcccagacgtcgggccccatataggtagatactgcggacagaagacacctggaaggattcggtcgtcctccggaatcctgtctatggtattctatactgactccgccatcgcaaaggaaggcttttcggccaactacagcgtgttgcagtcctccgtgagcgaagattttaagtgcatggaagccctgggaatggaatccggtgagatacatagcgaccagataactgcaagctcccagtacagcacaaattggtctgcggagcggtcgagactgaattaccctgaaaatgggtggacccctggagaggactcctaccgggagtggatccaggtcgacctggggctgcttaggttcgttaccgccgtgggaacgcagggcgctattagcaaggagaccaaaaagaagtactatgttaagacatacaaaattgacgtttcttccaacggcgaagactggatcaccataaaagagggcaataagccagtgctattccagggcaatacaaaccctactgatgtggtcgtggcggtctttccaaagcccttgatcacaaggttcgtgcggatcaagcctgctacctgggagactggaatctcaatgcgattcgaggtgtacggctgcaagatcactgactacccctgctctgggatgcttggaatggtgagtgggttgattagcgattcccagattacctcttctaaccagggtgataggaactggatgcccgaaaacatcaggcttgtgacttctaggagcggatgggccctccctcctgctccccactcctacataaatgaatggctccagatagacctgggagaagagaagatcgtgcggggaatcattatacaaggcggtaagcaccgcgagaacaaggtctttatgcggaaattcaaaattgggtattccaacaacggcagcgattggaaaatgattatggacgatagcaaaaggaaggctaagtcatttgagggcaacaacaactatgatacccccgaactgagaacgttcccagcattgagcaccaggtttattcgcatttaccccgagagggctacacacggcggcctaggccttcgtatggaattgttagggtgcgaggtggaggctccgaccgcaggacccacaacccctaatggaaacttggtggatgagtgcgatgacgatcaggctaattgccacagtggaacaggtgatgacttccagctaaccggagggacgaccgtgctcgctaccgaaaagcccactgtcatcgactcgaccatccagagcgaatttccaacctacggcttcaattgtgagtttggatgggggagccacaaaacattttgtcattgggagcacgacaaccatgtgcagttgaaatggagcgtcctgacaagcaagactggcccaatccaggaccacacaggagatggtaacttcatttattcccaggctgatgagaaccagaagggtaaggtagcccgcctggtgtcgcctgtagtgtattcacagaactctgcccactgtatgactttctggtaccacatgagtggcagccatgttggcacactgcgcgtcaaattgagataccaaaaaccagaagagtacgaccaattagtctggatggctatcggacatcagggagatcactggaaagagggtcgagtcttactgcataaatctctgaaactctatcaagtcatctttgagggcgaaataggtaaaggaaacttggggggcattgcagtcgacgacatctctataaacaatcatatatcccaggaggattgcgccaaaccggccgacctggacaaaaaaaatcctgaaattaagattgacgagacaggaagcacccctggctacgagggggagggggagggcgataagaatattagtagaaaaccgggcaacgtgctcaagactctggatcccatcttgatcacaatcatcgctatgagtgccctgggggtcctgctgggtgcagtgtgtggggttgtgttgtactgtgcctgctggcataatggcatgagcgagcgcaacctgagtgctttggagaactataactttgagctcgtggacggcgtaaagctcaagaaggataagttgaatacccaatctacttattcggaagcatag

SEQ ID NO: 25280 - DNA, 420 bp, synthetic construct
  misc_feature 1..420: note = Description of Artificial Sequence: Synthetic coding sequence
  source 1..420: mol_type = other DNA
atggacgacagcaagcggaaggccaagagcttcgagggcaacaacaattacgacacaccagagctgaggaccttccccgctctcagcacacggtttatccggatctacccggagagagcaacacacggcggtctggggctgagaatggaacttcttggctgcgaagtcgaagccccaactgcaggccccaccactcccaacgggaatctggttgacgagtgcgatgacgatcaggctaactgccatagtggcaccggcgacgatttccagcttacaggtggcaccacagtcctggctactgagaaaccaactgtgattgatagcacgattcaatcaggatcccggttttttaagcaccaccacaaacaacaaagtatgcgcccacaaaacctgcatcataattccattctcctcctctag

SEQ ID NO: 25281 - DNA, 1926 bp, synthetic construct
  misc_feature 1..1926: note = Description of Artificial Sequence: Synthetic coding sequence
  source 1..1926: mol_type = other DNA
atggagcggggcctgcccctgctgtgcgccgtgctggccctggtgcttgcccctgcgggggctttccgaaacgacaagtgcggcgacaccatcaagatcgaaagtcctggatacctaacatcccccgggtacccccatagttatcatccctccgagaaatgtgaatggcttatccaggcaccagatccttaccagaggatcatgatcaatttcaacccccacttcgatctcgaggaccgagattgcaagtacgactacgtagaggtcttcgatggagaaaatgaaaatgggcacttccgggggaagttttgcgggaagatcgcccctccccctgtggttagttcaggtccctttctctttatcaagttcgtatccgattatgaaacacacggcgctgggttctccatcaggtatgagatcttcaagcggggcccagaatgcagtcagaattatactactcctagcggggtgattaagtcccccggctttccggaaaaatatcctaactctcttgaatgcacgtacatcgtgttcgtgcccaaaatgtcagaaattatcctggagtttgaatcctttgacctggaacccgacagcaatcctccaggcggcatgttttgtaggtatgaccgtctggagatttgggacggattcccagatgtggggccacacattgggcggtattgtggtcaaaagacccccggtcgcattagatcttcgtccggtatcctgtcaatggtgttttacactgactctgctatcgctaaggaggggttctcagctaattattccgtacttcagtccagtgtaagtgaggattttaagtgtatggaggccctcggaatggagagtggtgagattcactccgatcaaatcaccgcaagcagtcagtattcaaccaattggagtgccgaacggtcgcgactgaattatccggaaaacggctggacccctggcgaggacagctatcgcgagtggatccaggtcgacctggggctgctgagatttgtaacggccgtgggaacacagggcgctattagcaaggagactaaaaagaaatattacgtcaagacttacaaaattgacgtgtcctccaatggtgaggattggatcactatcaaagagggaaataagccggtgctgttccaaggcaacaccaatcccacggacgtggtggtggccgtattccctaagcccctaattaccaggtttgtgcgaatcaagcccgccacctgggaaaccgggatctcaatgcgctttgaggtctacggctgtaagataactgattatccctgttccggcatgctaggcatggttagcggcctgatttcagactcacaaatcacctcttctaatcagggcgatcggaactggatgccggagaacattagattggttacctctagatcagggtgggctctgccccctgcaccgcattcttatataaatgagtggctacaaatcgatctgggagaggagaagattgtgcgtgggatcataatccagggtggtaagcatcgggagaacaaggtgtttatgcgcaagtttaagatcggctacagtaacaacggatccgactggaagatgattatggatgacagcaagcggaaggcaaaatcatttgaaggaaacaacaattacgacaccccagagctcagaacatttcctgctctgtccacccgtttcatccgaatttaccccgaaagggccacacacggaggtcttgggctccggatggagctattgggctgtgaggtcgaggggaccattaacaccgatcaagaatgcccctgcgctcgtgccctcgccaaagacgcgaagaagaagaagagatgggcagatagcacccattgtcgctgcgtgagaagcatccacggagagatgtggtcttctggcaaaggcgtttgttccctggacgcaaacctgtag

SEQ ID NO: 25282 - DNA, 567 bp, synthetic construct
  misc_feature 1..567: note = Description of Artificial Sequence: Synthetic coding sequence
  source 1..567: mol_type = other DNA
atgagcgagatcatcctggagttcgagagcttcgacctggagcccgatagcaatccgcccgggggaatgttttgccgatatgacagacttgagatctgggatggctttcctgacgttggccctcacattggacggtattgtgggcaaaaaacacctggaaggatccgcagcagtagcggcatcctgtcaatggtattctacacagattccgcaatagctaaggagggattctccgccaattatagtgtactgcagagttccgtatctgaagacttcaagtgcatggaggccctaggaatggagagcggcgagattcactcagatcaaattactgcgtcatcacagtactccactaactggagcgcagaacgctctcggctgaattaccctgagaacggatggacccccggcgaagactcttacagggagtggatccaggacgccaaataccggctgcgggtgtccgtcgttagatcgaagtcatcttcctcgtctacatcccttgagccccgccccctctcttcactgaagctctcatttttctcttacaaaatcaagattacctag

SEQ ID NO: 25283 - DNA, 1830 bp, synthetic construct
  misc_feature 1..1830: note = Description of Artificial Sequence: Synthetic coding sequence
  source 1..1830: mol_type = other DNA
atggagcggggcctgcccctgctgtgcgccgtgctggccctggtgcttgctcctgcaggagcttttcggaatgacaaatgtggtgacacaattaaaatagagagtccggggtacctgacgagtcctggctatccacattcctatcacccatccgagaagtgtgaatggcttatccaggcgcctgacccctaccagcggatcatgataaattttaatcctcatttcgatctcgaagatcgcgattgtaaatatgattatgtagaagtgtttgacggcgagaacgagaacgggcattttagggggaagttttgcggaaagatcgcacctccgcccgtagtttcaagcggaccatttcttttcattaaattcgtgagcgattatgaaacccacggcgcaggatttagcatccggtacgagatcttcaagcgagggccggagtgcagccaaaattacaccaccccatccggcgttattaagagccctggctttccagaaaaataccccaactcgttggaatgtacatatatcgttttcgtgccgaaaatgtccgaaattattctagagttcgaatcattcgacttagaaccggactcaaacccacccggcgggatgttttgcaggtatgatcgcctggagatctgggacggatttcccgacgtaggtccccatattggtcgctattgcggtcagaagacccctggcagaatccgaagctcgtctggcatcctcagcatggttttctacactgacagcgcaatcgcgaaggagggcttcagcgctaactactctgtacttcaatcctccgttagcgaggatttcaaatgcatggaggcccttggaatggaatccggagagatacattccgaccagatcaccgcctcaagccagtattccacaaactggagcgccgagcgatctcgcctgaactatccagagaatggttggacccccggagaggattcttatagagaatggatacaggtggatcttggattgctgaggttcgtcacagccgtgggcacccaaggtgccatcagcaaggagacgaagaaaaagtactacgtgaaaacatacaaaattgatgtgagctcaaatggagaagactggattacgattaaagagggaaacaagccagtcttgtttcaggggaacaccaacccaacagatgtcgtagtcgccgtgttccccaaaccccttattacaagattcgttcggatcaagcccgcgacttgggagaccggcatttcaatgcgcttcgaagtttatgggtgtaagattactgattatccatgctccggcatgctgggcatggtctctggactcatcagcgattcccaaattacctcttccaaccagggagacaggaactggatgcccgagaatattcggcttgtgacatccagatccggctgggccctcccgccagctcctcacagctacatcaacgaatggctgcaaattgatctgggcgaagagaaaattgtgagaggcatcattatacaaggagggaaacatagggagaacaaagtctttatgcgcaaatttaaaatcggctattcgaataacgggtcagactggaaaatgatcatggacgactctaaacggaaagcgaaatcttttgagggcaataacaattacgatacaccggaattgagaacttttcctgccctaagcacaagattcattcggatttaccccgagcgagcaacccacggaggtttgggattgcgtatggagctgctgggctgtgaagtggaggggggcaccactgtcctcgctactgagaaacccacagtcatcgatagtactatccagtcgggcataaaatag

SEQ ID NO: 25284 - DNA, 1935 bp, synthetic construct
  misc_feature 1..1935: note = Description of Artificial Sequence: Synthetic coding sequence
  source 1..1935: mol_type = other DNA
atggagcggggcctgcccctgctgtgcgccgtgctggccctggtgctggcaccggctggcgccttccggaatgataaatgtggcgacaccataaaaattgagtccccaggatacctgacatctcccggttatccccactcttatcacccctctgagaagtgcgaatggctgatccaagcacctgacccctaccagagaattatgattaacttcaatccacatttcgatttagaagatcgggattgtaagtatgattacgtcgaagtcttcgacggcgagaatgaaaacggacacttccgaggcaagttctgtggcaagattgcccccccacccgtggtctcgtccgggcccttcctttttatcaagtttgtgagcgactatgaaactcatggcgccggtttttccatccgatacgagatcttcaaacgcgggccagaatgctcacagaattacaccaccccgagtggagtgatcaagtcacctggatttcctgagaagtacccaaattctctggagtgtacatacatcgtgttcgttcccaagatgtccgaaatcatcctcgagttcgagtcttttgacctggagccagatagcaatccgccaggcggaatgttctgcagatatgaccgcttggaaatttgggacggctttccagatgtgggaccccatataggacgttactgtggacagaaaaccccgggccggatccgatcgtccagcggaatactgtcaatggtgttttataccgacagcgcaatcgccaaggaggggttttctgccaattactcagtgctacagtcttccgtgtctgaagatttcaagtgtatggaggcgctgggaatggagagtggcgagattcatagtgaccagataactgcatccagtcagtattctacaaattggtcagcagagcggtcgcgtctgaattatcctgaaaacggttggactccaggtgaggactcttatcgcgagtggatccaggtcgacctgggtctgctcaggttcgtgaccgccgtgggcacacagggtgctatatcgaaggagactaagaagaagtactatgtcaagacttataaaatcgatgtttcatcaaatggagaagattggattacaattaaggaggggaataaacctgtcctcttccagggaaacacaaaccccactgacgtcgtggtcgctgtgtttccaaagcctctgataacccggttcgtccgcatcaagccggccacgtgggaaaccggtatcagcatgcgattcgaagtgtacggatgcaagatcactgattacccatgcagcggcatgctcggcatggtgagtggcctcatttccgacagccagataaccagctctaaccagggggacagaaattggatgcccgagaacatccggctggttacatctaggagtggttgggcgcttcccccagctcctcactcatatattaacgagtggctccaaattgacctcggagaggaaaagatcgtcagaggaatcataatccagggtggtaagcatagggaaaacaaggtgttcatgcgcaaattcaagatcgggtactcgaataacggctccgactggaagatgataatggatgactctaagcgtaaggcgaagagtttcgagggaaacaataattacgacaccccagaacttagaacgttcccagccctcagcactagattcatccgcatctaccctgagagagctactcatggaggccttggactgcggatggaactgttgggttgcgaagttgaagccccaaccgccggtccgaccactccaaatggcaacctcgtcgacgagtgtgatgacgatcaggccaactgtcattcggggacaggagatgatttccaactgaccggaggcactacagtgctcgccaccgagaaaccaacagtcattgatagtacaattcagtccggcattaaatag

SEQ ID NO: 25285 - DNA, 2115 bp, synthetic construct
  misc_feature 1..2115: note = Description of Artificial Sequence: Synthetic coding sequence
  source 1..2115: mol_type = other DNA
atggagcggggcctgcccctgctgtgcgccgtgctggccctggtgctggcccctgccggcgccttccgcaatgacaaatgtggggacacgatcaagatcgaaagtcctggatacttaacttctcctggatatccccattcttaccaccccagcgagaagtgtgagtggctgatacaggctccggacccctaccaaagaatcatgataaacttcaatccgcattttgatttggaggacagggactgtaagtacgattatgtcgaagtcttcgacggcgaaaatgaaaacggtcacttccgcggaaagttctgtgggaaaatcgcaccaccgcccgttgtctctagtggtcccttccttttcatcaagttcgtcagcgattatgagactcacggagccgggttctctattcgttacgaaatatttaagcggggacccgagtgttcgcagaattacacaaccccatctggcgtgattaaatcgcctgggttcccggaaaagtacccgaacagcctggagtgtacatatattgttttcgtgcctaagatgagtgaaatcattctggaattcgaatcatttgatctcgaacctgattctaatcctcccggtgggatgttttgcaggtacgaccgccttgaaatctgggacggatttcctgacgtgggcccacacataggacgctattgcggccaaaaaacacctggccgaattcgaagcagtagcggcatcctgtccatggtcttctacaccgactctgctatcgctaaggaaggattttccgctaactattcagtgctgcagtccagtgtctcagaagactttaaatgtatggaggctctcggtatggagagcggagaaatacattcagaccaaatcaccgccagtagtcagtactcaaccaactggagtgccgagcgatcccggctcaactatcccgaaaacggctggactcccggtgaggatagttaccgagaatggatacaggtcgacctgggccttctgaggttcgtaactgccgtgggaactcagggggcaatcagtaaggagactaagaaaaaatattatgtgaagacctacaagatcgacgttagctcaaacggtgaggactggatcactataaaggagggtaataaacccgtgctgttccagggaaacactaatccaaccgacgtcgttgtggctgtgtttccaaagcctctgatcacgcggttcgtccgtataaagcccgctacctgggaaacaggcatctccatgcgctttgaggtatatggatgcaaaatcactgattatccgtgctcagggatgctgggtatggttagtggcctcatcagcgattcacagatcacttctagcaatcaaggggacaggaactggatgcctgaaaatatcaggctcgtgacgtcacgcagtggctgggcactccccccagcacctcacagctacatcaatgagtggctgcaaatcgatctgggagaagaaaaaatcgtccgtggcattattatacagggtggtaagcaccgcgaaaacaaagtctttatgaggaagttcaagatagggtacagcaacaatggtagtgactggaaaatgattatggacgactccaagcggaaggcgaaatccttcgaaggaaataacaactacgatacccctgagctgcgtacttttcccgcactgagtacccgcttcatacggatctatccagagcgggcgacccacggcggtttgggcctgaggatggagctcctgggctgcgaggtggaggcacctactgctggcccaacaacccccaatggtaaccttgtggacgaatgcgatgatgaccaggccaactgccattccggcaccggagacgactttcagcttaccggagccgagacaatattcattcccttgttatatcatttttccagttgcttgagctgggaccagcttacgcccgtgtgcgtgcttgtcaccccacacggccgggaactccctaggaaccggtcctgcttagctcggacccgcgcatcatcattcccccatgtcatatggattgatgagcttttccttatcgccaccaccatctgcaataacaacctctcccactttgaatcgcagcggctcgggttatcctag

SEQ ID NO: 25286 - DNA, 261 bp, synthetic construct
  misc_feature 1..261: note = Description of Artificial Sequence: Synthetic coding sequence
  source 1..261: mol_type = other DNA
atggagctgctgggctgcgaggtggaggcccccaccgccggccccaccaccccgaatggcaacctagtggacgagtgcgacgatgaccaagctaactgtcactccggtactggtgacgactttcaattgaccggcgggaccacagtgctggctaccgagaaaccaacagtgattgactctactatccaaagtgcccggttagaggtatcaacactaaacctatctttgcataatccccctcagcagaaggccctgatatag

SEQ ID NO: 25287 - DNA, 2772 bp, synthetic construct
  misc_feature 1..2772: note = Description of Artificial Sequence: Synthetic coding sequence
  source 1..2772: mol_type = other DNA
atggagcggggcctgcccctgctgtgcgccgtgctggccctggtgttagctcctgcaggtgcgttcaggaatgataagtgtggggatactatcaaaattgagtcgccgggctatttaacaagtccagggtatccccattcttaccatccctcggagaaatgtgaatggctgattcaagccccagatccatatcaacgcattatgatcaactttaaccctcacttcgatctggaagatcgcgactgtaagtatgattacgtggaggtgttcgatggagagaacgagaacggacactttcgcggaaagttctgtgggaagattgcaccccctcctgtagtctcatctgggccttttttgttcatcaaattcgtatcagattacgagacgcatggcgccgggttttccattcggtacgaaatttttaaaagaggcccagaatgctcccaaaattacaccacaccctctggagtcatcaagtcacctggcttcccagaaaaatacccaaatagtcttgaatgcacttacattgtgtttgtgcccaaaatgtcagagatcatcctagagtttgagtcctttgacctggaaccagacagcaatccccccggcggaatgttttgtcggtatgacagactggagatctgggatggcttccccgacgtgggcccacacattggaagatattgcgggcagaagacgcccgggaggattcggtctagctcaggaatactgtcaatggtgttttacacagactcagccattgctaaggagggtttctcagcaaattatagtgtccttcaatcttccgtgagcgaagacttcaagtgcatggaagctctggggatggaatccggcgaaattcattcagatcagattaccgctagcagtcagtactcgacaaactggtctgccgaaagatctcgactgaattaccctgagaatggatggacgcccggggaagatagttaccgtgaatggatccaagtggacctcggacttctccggttcgtcaccgcggtcgggacccagggagccatttctaaggaaacaaagaagaaatattatgttaagacatacaaaatagatgtctcctcaaatggcgaggactggatcaccattaaggaaggaaacaaacccgtgctgttccagggcaatactaatcctacggatgtggtggtggctgtctttcctaaaccactaataaccaggtttgtcaggatcaagccagccacctgggagacaggtatttctatgcgcttcgaggtatacggttgcaagattacagattatccttgttccgggatgctgggaatggtgagtggcctaatctcagacagccaaatcaccagctccaaccaaggagacagaaactggatgcccgagaatattcggttggtgacctcgcgctccgggtgggcactgccaccggccccgcacagctacatcaatgaatggttacaaatcgatcttggggaagaaaaaatagtgagagggataatcatccaggggggaaagcatcgcgagaacaaagtgtttatgcgaaaattcaaaatcgggtattcaaataacggctccgactggaagatgattatggacgacagcaaacggaaagctaagagcttcgagggtaacaataattacgacacccccgaattgaggacattcccagccctttctactcggtttattcggatttatcctgagcgcgctactcacgggggacttgggctcaggatggaattgctaggatgtgaggtggaagcccccacggcaggacccactacacccaacggcaacttggttgatgagtgtgacgatgaccaggcaaactgccactccggcaccggcgacgattttcagttgactggaggtactactgtcctcgccaccgagaaacctacagttatagacagcacaatacagtccgagtttccaacatacggatttaattgtgagtttggatggggatcccataaaacattctgtcactgggagcacgacaaccacgtccagctcaagtggtcagtccttacaagcaagacaggaccaatccaggatcacactggagacggtaacttcatctactcacaagccgacgaaaaccagaaggggaaagtcgcgagactggtgagtcctgttgtgtactctcaaaattccgcccactgtatgactttttggtaccatatgtcaggaagtcacgttgggaccttgagggtgaagctacggtaccagaagcctgaggagtacgatcagctcgtctggatggccattggccaccagggggaccattggaaagaaggacgggtactgctccacaagagtttaaagctgtatcaagtgatcttcgaaggagagattggcaaagggaatctagggggcatcgctgttgacgacatcagcatcaataaccatatctcacaagaggattgtgccaaaccagccgatttagacaagaaaaaccctgagattaaaattgacgagacagggtcaaccccgggctatgagggcgagggcgaaggcgacaagaatattagtaggaaaccaggtaacgtccttaagaccttagaccccatcttgatcaccataattgcaatgagcgctttgggtgtcttactgggggcagtttgcggtgtggtactctactgtgcatgctggcacaacggcatgagtgaacgcaatttgagtgctctggagaattataactttgaactggtagacggagtgaaattgaagaaggacaaattgaatacacagtccacttactccgaggcttag

SEQ ID NO: 25288 - DNA, 2208 bp, synthetic construct
  misc_feature 1..2208: note = Description of Artificial Sequence: Synthetic coding sequence
  source 1..2208: mol_type = other DNA
atgagcgagatcatcctggagttcgagagcttcgacctggagcccgattcaaatccaccaggaggtatgttttgccggtacgaccggctggagatttgggacgggtttcctgatgtcggaccccatattggaagatactgcggccagaaaacaccaggaaggattcgatctagttcaggcatcttatccatggtcttttacaccgacagcgccatagccaaggagggttttagcgcgaattatagtgtactgcagagctcagtgtccgaggactttaaatgcatggaagctctgggcatggaatccggcgaaatccactccgatcaaatcacagcctctagtcagtactccaccaattggagtgccgagagaagccgactgaattatcccgaaaacggctggacccctggggaggactcctaccgagagtggatccaggtcgatctgggacttcttcgttttgtcactgccgttgggacacagggggctatctcaaaagaaactaaaaagaaatactacgtaaaaacatataaaattgacgtgtccagtaacggcgaggactggatcacaattaaggaggggaacaaacctgtgctcttccagggaaataccaaccccactgatgttgtagtggctgtgttccctaagcccctgataacaaggttcgtgcgaatcaagcccgctacttgggaaaccggcatcagcatgcggtttgaagtctacggatgcaaaattacagattacccctgtagtggtatgctgggtatggttagcggcctcattagcgactctcagataacaagcagcaatcagggagaccggaactggatgcccgaaaacattagactcgtgacctcccggtcaggttgggcccttcccccagctcctcactcatatattaatgagtggcttcagatagacctaggggaggaaaaaattgtgagaggcattatcatccagggaggaaaacacagggaaaacaaagttttcatgcgaaagtttaaaattggttattccaacaacggctccgactggaaaatgattatggatgactcaaaacggaaggctaagagttttgaaggtaacaacaattatgacactcccgaactgaggacattccccgccctgtccacccgattcatccgcatctatcctgaaagggccacccacggagggctgggactgagaatggagctgctgggatgtgaggtggaagctcctaccgccggacccactaccccaaacggcaatttagtcgacgagtgcgacgatgaccaagccaactgccatagcggcacagggggaaccaccgtcctggccactgagaaacccaccgtaattgattccaccatccaatctgagtttcccacttatgggttcaattgcgagtttggatggggatcgcacaaaactttctgtcattgggagcacgataatcacgtacagctaaaatggagcgtcctgacaagtaaaaccggaccgatccaagaccacactggagatggcaactttatatactctcaagcagatgaaaatcaaaaggggaaagtggccagattggtctcacccgtggtctactcacaaaattctgcacactgcatgactttttggtatcatatgagtggttcccacgtggggactctccgcgtgaaactgagatatcagaagcctgaggaatatgatcagctcgtgtggatggcgatcggacaccagggggatcattggaaggagggccgggtgctactccacaagtcactgaaactatatcaagtcatctttgagggagaaataggcaagggcaacctgggaggtattgctgtggatgacatctccattaataatcacatatctcaggaggactgcgctaagcctgccgatcttgataaaaagaaccccgagattaaaatagatgagaccggcagcacacccggatacgaaggagaaggtgaaggcgacaagaatatctcccggaagccagggaatgtgctcaaaacgctggatcccatactaatcaccattatcgcaatgtcagcgctgggagtcttgctgggagccgtttgcggcgttgtgttgtactgcgcttgttggcataatggcatgagcgagcgcaatctgagcgcactcgaaaactacaactttgaactggttgatggagtcaagctgaaaaaggataagcttaatacccaaagtacttattctgaggcatag

SEQ ID NO: 25289 - DNA, 2721 bp, synthetic construct
  misc_feature 1..2721: note = Description of Artificial Sequence: Synthetic coding sequence
  source 1..2721: mol_type = other DNA
atggagcggggcctgcccctgctgtgcgccgtgctggccctggtgctagctccagcgggggcgttcaggaatgataaatgtggggacacaatcaaaatagagtcgccgggctacctgactagtcctggttatccccacagttaccatccctcagagaagtgtgagtggctgatccaggcgcctgatccttaccagcgtatcatgatcaatttcaatccacacttcgatttggaggatcgcgactgcaagtatgattacgtggaggtgttcgatggtgagaacgagaatggtcactttcgcggaaagttctgcgggaagatagctcccccaccggtggtctcatcaggtcctttcctgttcataaagttcgtgagcgactatgaaactcacggcgccggcttcagtataagatatgaaattttcaagagagggccagagtgcagtcagaattataccacccccagtggcgtcatcaaatcgccgggtttccctgaaaaatacccgaattctcttgaatgcacgtatattgtcttcgtgcctaagatgtcagaaatcatcctagagttcgagagctttgacctggagccagatagcaatcccccaggaggcatgttctgcaggtatgatcgactggagatttgggatgggtttccagatgtgggtccccacatagggcggtactgcgggcaaaagactcccggtaggatccgatcatcctccggaatcctgtccatggtcttttacacagattccgcaattgccaaagagggttttagtgctaattattcagtccttcagtcttccgtgtccgaggactttaagtgcatggaggccttaggtatggaatccggggagattcacagtgaccagatcactgcatcttcacaatattccactaactggagtgcagagaggtctaggctgaactaccctgaaaacgggtggacccccggtgaagatagttatagagaatggattcaagtcgacttgggcttgcttcgctttgttactgcagtgggtacccagggagctatctctaaagagaccaagaagaagtattatgtgaaaacatacaagatcgacgtgtcttccaatggggaagactggatcaccatcaaagagggaaacaagccagtgctgtttcaaggtaacacaaacccgactgacgtcgtggtggctgtgtttcctaaaccactaatcactcggtttgtgcgcatcaagcctgcgacgtgggaaacaggcatttccatgcgtttcgaagtctatggatgcaagatcacggactacccctgcagtggcatgttaggaatggtgtctggtctcatcagtgattcccagattacctcatccaatcagggcgaccggaattggatgcctgaaaacattagacttgtgacctcccggagtgggtgggccctccctcccgctcctcattcctatatcaatgaatggcttcagatcgacttgggcgaggagaagattgtgagaggaatcattattcaaggcggaaaacatcgtgaaaataaggtgtttatgaggaagtttaagattggttactccaacaacggcagcgattggaaaatgatcatggatgattcaaaaaggaaagcaaagagctttgaagggaataataattacgacacccccgagctgaggacttttcccgccctctctacgcgtttcatccgcatttacccagagagggcaactcatggcgggctgggtttgcggatggagctacttggatgcgaggttgaggcacccacagctggacctactacccccaacggcaatctggtggacgaatgtgatgatgatcaagccaactgtcacagcggcaccggcgatgattttcagcttaccggagggacaacagttctcgccactgagaaacccactgttatcgactcaacaatccagagtgaatttcccacatacggatttaactgcgagttcggttggggtagccacaagacgttttgtcactgggaacacgacaaccatgtgcagttaaaatggtcagtgttgacctctaagactggccccatacaggatcacaccggcgacgggaacttcatttacagccaggctgacgagaatcagaaagggaaagtggctaggctcgtgtcccccgtggtttactctcagaacagcgcccattgtatgaccttctggtaccacatgtcgggtagccatgtgggtactctgcgagttaagctgaggtatcagaaacccgaagaatatgatcagttagtatggatggccatcggacaccagggcgatcactggaaagagggccgcgttctcctgcataagagtctaaagttatatcaggttattttcgagggtgagatcgggaaaggaaatctcggaggcatcgctgtggatgacataagcattaataaccacatatcccaggaagattgtgctagatcaacgcctggttatgagggggaaggcgagggcgacaagaatatttccaggaaacccggcaacgttcttaaaactcttgacccgatactaataactatcatcgctatgtctgctctaggagtgctgctaggggccgtgtgcggcgtcgtcctctattgcgcctgctggcacaatgggatgtcggaacgcaacttgagcgctctcgagaactacaattttgaactggtagacggcgtgaagctaaagaaggataagctcaatacccagtccacgtatagcgaggcctag

SEQ ID NO: 25290 - DNA, 318 bp, synthetic construct
  misc_feature 1..318: note = Description of Artificial Sequence: Synthetic coding sequence
  source 1..318: mol_type = other DNA
aaccacatcagccaggaggactgcgcccggagcacccccggctacgagggggagggcgaaggggacaagaacatcagcaggaaacctggcaacgtgctcaagacattggaccctattctgatcaccattatcgctatgagcgccttgggcgtcctgttgggcgcggtgtgcggcgttgtgttgtactgtgcatgctggcacaacggcatgtccgaacggaacttgagtgctttggagaactacaattttgagctcgtagacggagtcaagctgaaaaaagataaactgaatactcagagcacgtactcggaagcttag

SEQ ID NO: 25291 - DNA, 234 bp, synthetic construct
  misc_feature 1..234: note = Description of Artificial Sequence: Synthetic coding sequence
  source 1..234: mol_type = other DNA
tgacccaccgccggccccaccacccccaacggcaacctggtggacgagtgcgatgatgaccaggccaactgtcacagcggaaccggggatgattttcagttaaccggcggcactacagtcttagcaacagagaaaccgaccgtgatcgattccaccattcagtccgcccgactggaggtgagcaccctcaacctgtctctccacaacccacctcagcaaaaggcactgatctag

SEQ ID NO: 25292 - DNA, 303 bp, synthetic construct
  misc_feature 1..303: note = Description of Artificial Sequence: Synthetic coding sequence
  source 1..303: mol_type = other DNA
tgaacccacggcggcctgggcctgcggatggagctgctgggctgcgaagtagaagccccaaccgctggacccactacacccaatgggaatctcgtggacgagtgcgatgacgatcaggccaactgccatagcggaactggagacgacttccagcttaccgggggaaccaccgtgctggccaccgagaaacctactgtgattgactccacaatccaaagtggcagcagattttttaaacaccaccataaacagcagtccatgcggcctcagaacttgcaccataactcaatcctgctgctctag

SEQ ID NO: 25293 - DNA, 711 bp, synthetic construct
  misc_feature 1..711: note = Description of Artificial Sequence: Synthetic coding sequence
  source 1..711: mol_type = other DNA
gtggacctgggcctgctgcggttcgtgaccgccgtgggcacccagggcgccatctctaaggagaccaagaagaagtactacgtcaaaacttacaagatagacgtgtcttctaacggagaggactggattaccattaaggaaggtaataaaccggtactgtttcagggaaacactaaccccaccgacgttgtggtggcagtcttcccaaaacccctgataactagatttgtgcgaataaaacccgccacctgggagaccgggatttctatgagatttgaagtgtatggctgtaaaatcactgattacccctgtagcgggatgttgggtatggtcagtggactgatctcggacagtcagatcactagttcaaatcaaggggataggaactggatgcctgagaacataaggctcgtgacctctcggtcaggatgggctctgccccccgcaccccattcttacattaacgaatggttacagatagatcttggcgaagaaaaaatcgtgaggggtatcattatccagggaggaaaacatcgggaaaataaagtgttcatgcggaagtttaaaataggctatagtaataatggaagcgactggaagatgatcatggacgacagtaagcgcaaggcaaaggttagagcaggggattgggaggaagtgatcccatatgttttggactttaaccagggccccctggccttctcccgctag

SEQ ID NO: 25294 - DNA, 513 bp, synthetic construct
  misc_feature 1..513: note = Description of Artificial Sequence: Synthetic coding sequence
  source 1..513: mol_type = other DNA
tgacccggcggcatgttctgccggtacgaccggctggagatctgggacggctttccagatgtggggcctcacattggccgctactgtggccaaaagaccccaggacggatccggagctcatcaggtatcctgtctatggtcttctatacagattctgcgatcgctaaggaggggttttctgcaaattacagcgtgcttcagtcatctgtctcagaggatttcaagtgtatggaggcattaggcatggaatcaggagagatacattcagatcagataacggcgtcctctcagtactcaaccaactggagcgctgagcggtcgaggctgaattaccccgagaatggatggacgcccggagaggactcctacagagagtggattcaagatgccaagtatagactcagagtatctgtggtgcgaagcaagtcaagctcatcaagtacctctctggagccacgcccactatcatccttgaaattgtcctttttttcttataaaattaagattacatag

SEQ ID NO: 25295 - DNA, 2721 bp, synthetic construct
  misc_feature 1..2721: note = Description of Artificial Sequence: Synthetic coding sequence
  source 1..2721: mol_type = other DNA
atggacatgttccccctgacctgggtgttcctggccctgtacttctcccggcatcaggtgagaggacagcctgatcccccctgcggcggccgcctcaattccaaggacgccggctatattacatcaccaggctaccctcaggactacccttctcaccagaactgtgagtggatcgtctacgcgccagagcccaatcagaagattgtgttaaatttcaacccccattttgagatcgagaaacacgattgtaaatacgatttcatcgagatcagagatggcgatagcgagtctgccgacttacttggtaagcactgcggaaacatcgccccgccaaccattatcagctcgggctcaatgctctacattaggtttacaagcgattatgcgaggcagggtgctggctttagtttgcgctacgagatcttcaagaccggctccgaggattgtagtaagaactttacttctccaaacgggacaatcgaaagtccaggcttccccgagaaatacccccataatttagactgcacgttcacaattctggctaagccaaaaatggaaataatattacaatttctgatctttgacctagagcacgacccccttcaggtaggcgaaggtgattgtaagtacgattggctcgacatctgggatggtatcccccatgtgggcccactgatcgggaagtattgcggtacgaaaactcccagtgaactgagatccagcactggaatcctgtcgctaacctttcatacagatatggcagtggccaaagacggattttctgccagatactacctagttcaccaagagccgctcgaaaatttccagtgcaacgttccgctgggcatggagagtggccggattgcaaatgagcagatctcggcgagttcaacatactccgatgggaggtggacacctcagcagagcagactgcacggcgacgacaatggttggaccccgaacctcgacagtaacaaagagtatctgcaggtggatttgagatttctgacaatgctcacagcaatcgccactcagggcgctatctcgagggagacgcagaacggatattatgtaaagtcatataagttagaggtgagtactaacggcgaagattggatggtgtatcgccacggtaagaatcacaaagtctttcaggcaaataatgacgcaacggaagtggtgttgaataagttgcatgcccccttactaacaaggtttgtgcgcattcgacctcagacttggcactctgggatagcgctgcggctcgaactcttcgggtgtagagttactgacgcaccatgttccaatatgcttggcatgctgagcgggttgatagccgactcccagatctctgcatcttccactcaggagtacctgtggagtccctccgcggcccggctggttagctcccgcagcgggtggttcccccggatcccacaagcccagcctggcgaggaatggttacaggttgatctcggcacaccaaagaccgttaagggcgtaattattcagggagcacggggcggagacagcatcacagccgtagaggcgcgagccttcgtgcgcaaattcaaggttagttatagcttaaatggaaaggactgggagtacattcaggatcccaggacacagcagccaaagctattcgagggtaacatgcattacgacactcctgacattcgaaggtttgacccaatcccagcccagtatgtgcgggtctaccctgaaaggtggagccccgcaggaataggtatgaggctcgaggtcctgggatgcgactggaccgactcaaagcccacagtggaaacactcggccccaccgttaagtccgaagaaactactactccctatcccacagaagaagaagccaccgagtgcggcgagaactgttccttcgaggatgataaggacctgcagcttcctagcggcttcaactgtaacttcgatttcctggaggagccttgtggatggatgtatgaccacgcaaaatggctgcgaactacgtgggcaagtagctccagcccgaatgataggacttttcctgatgatagaaactttttaagactgcagtctgacagtcaaagggagggccagtacgcccgactcatatccccgcccgtgcacttaccccgatcaccagtttgcatggagtttcagtaccaggccactgggggtaggggcgttgcactgcaggtggtgagggaggcttcccaggagtctaaactgctttgggtgattagggaggatcagggaggagagtggaagcacggacgcattatcctgcccagctatgacatggaataccaaatcgtttttgagggggtgatcgggaagggaaggtccggggaaatagccattgatgacattagaattagcactgacgttccactcgagaattgtatggaaccaatttcagctttcgccggcgaaaacttcaaagggggtacgctgcttcctgggacagaaccaaccgtagatacggtgcctatgcagcccataccagcctattggtattatgtcatggcggccggtggtgccgtgctcgtcctagtatcggtggcactggcactggtgttacactaccaccgcttccggtatgcagccaaaaagaccgatcattcaattacctacaagacaagccactatactaacggcgcacccctcgcagttgaacccactttaacaattaagctggagcaggaccgtggctcccattgttag

SEQ ID NO: 25296 - DNA, 300 bp, synthetic construct
  misc_feature 1..300: note = Description of Artificial Sequence: Synthetic coding sequence
  source 1..300: mol_type = other DNA
atggacatgttccccctgacctgggtgttcctggccctgtacttctcccgacatcaggtacgcgggcagccagatcctccctgcggcggccggttaaatagcaaggacgctggctacataacatcacccggctatccccaggactatccctcccatcagaattgtgaatggattgtgtacgcacccgagccaaatcagaagattgtactgaatttcaatcctcattttgagatcgaaaaacatgattgtaacttgctgtccgcatggaagatctccctgacgtcacgcagctttgcttag

SEQ ID NO: 25297 - DNA, 1668 bp, synthetic construct
  misc_feature 1..1668: note = Description of Artificial Sequence: Synthetic coding sequence
  source 1..1668: mol_type = other DNA
atggacatgttccccctgacctgggtgttcctggccctgtacttctccagacaccaggtgcgaggtcagcctgatccaccctgcggagggcgcctcaactctaaggatgccggctatataacctcacccggctatccacaggattacccaagtcaccagaattgcgaatggattgtgtatgcccccgaaccgaatcaaaagattgtcctgaactttaatccccacttcgagattgagaagcatgattgtaagtacgattttattgaaattagggatggggactccgaaagtgctgatctactgggcaagcattgcggcaatattgctcctcccaccatcatctccagtgggagtatgctgtacattcgtttcaccagcgactatgctcggcagggcgctggcttttcactccgctacgagattttcaagactggttctgaggattgctctaagaacttcacctccccaaacggtaccatcgagagccccggatttcctgagaagtacccacacaatttagattgcacttttactatccttgccaaaccaaaaatggagatcatcctgcagtttctcatctttgatctggagcatgaccctctgcaggtgggagagggcgactgtaaatacgattggcttgatatatgggacggaatcccacatgtgggccccctcatagggaagtattgtgggaccaagacgccttctgagctacgctcctccaccggaatattgagcctgacctttcatacggacatggcagtggccaaggacggcttctctgcacgctactacctcgttcaccaagagccccttgaaaatttccagtgcaacgttcctctcggcatggaaagcggtaggatcgctaatgaacaaattagtgcaagctcaacatattctgatgggcgttggaccccccagcaaagtaggctacacggcgacgataatggctggacccccaatttggattccaacaaagagtacctacaggtggatctaaggtttcttaccatgctgactgccatcgctactcagggcgcaatttctcgggagacacagaacggatactatgtcaagtcctacaagctcgaggtttccactaacggcgaagattggatggtgtatcggcatggcaaaaaccataaggtgtttcaggccaataacgatgccactgaagtggtgctaaacaagctgcatgcccctctgctgacccgcttcgtgcgaattcgcccacagacgtggcacagtggtattgccttgcgcctggagttgtttgggtgcagggtgacagacgctccgtgtagtaacatgctgggaatgctttcaggacttatcgccgacagtcagatctctgctagctccacccaggaatacctttggagtccatccgccgccaggttggtgtccagccgcagcgggtggttccctcggatcccacaagcacagcctggggaggagtggctgcaggttgacctggggacgcctaagactgttaaaggggtcatcattcagggcgccagagggggggatagcatcacagcagtggaagcccgagctttcgtaagaaaattcaaagtgtcttactcccttaacgggaaagattgggagtacattcaagaccccaggactcagcagcctaaagtggggtgcagctggcgcccactgtag

SEQ ID NO: 25298 - DNA, 2706 bp, synthetic construct
  misc_feature 1..2706: note = Description of Artificial Sequence: Synthetic coding sequence
  source 1..2706: mol_type = other DNA
atggacatgttccccctgacctgggtgttcctggccctgtacttcagtaggcatcaggtacgggggcagccagaccctccctgcgggggccgcctcaactccaaggacgctggttacattacatctccaggctacccacaggattatccatcccaccaaaattgcgagtggatcgtctatgcccccgaaccgaatcagaaaattgtgctgaattttaaccctcatttcgaaatagagaaacatgattgcaaatacgacttcatcgagatccgggacggcgattcagagtctgccgacctgcttggcaaacattgcggcaatatcgccccacctaccatcatatcctctggatccatgctctatatcaggtttacgagcgattacgcgcgccagggagccggattctcactgcgttacgagatattcaagactggctctgaagattgttctaagaactttaccagccctaacggcacgatcgaatccccaggatttccggaaaagtacccccacaatcttgactgtacattcaccatcctggctaagcccaaaatggagattatactgcagtttctgattttcgacctggagcacgatccactgcaggtgggcgagggggattgtaaatacgactggctggacatctgggacggcattccacatgtgggacctctgatcggaaaatattgtggaaccaagacccccagcgagttacgaagttccacaggcatcctatctttgacgttccataccgacatggcggttgcaaaggatggtttctccgcacgctattacttggtccatcaggagccactagaaaattttcagtgtaatgtcccgcttgggatggagtctgggcgcatcgccaatgagcagatctccgcctcatcaacgtactccgatgggcgctggaccccacagcagtcacggctccacggtgacgataatggctggacacctaacctggacagcaataaggagtacttgcaagtcgatctccgctttctgaccatgcttacagcaatagctactcagggggcaataagccgggagactcaaaacggatattatgtcaaatcttacaagctcgaggttagcactaatggagaggattggatggtttaccgtcatggaaaaaatcacaaggtgttccaagcaaataatgacgctacggaagttgtgctgaacaaactgcacgctccactgttaacaaggtttgtgcgtatccggcctcagacctggcatagcggtatagccctccgcctggagttgttcggctgtagggtgaccgacgccccctgctccaatatgctggggatgctaagcggacttatagccgacagccagatctcagcctcttctactcaggagtatctgtggtctccgtcggctgcccggctggttagctctcggtccggctggttccctcgcattccccaggcgcagccaggggaggagtggcttcaggtggacctgggtacacctaagacagtgaagggggttattatacagggcgccaggggtggggactccatcactgctgtggaggcccgagcattcgtgagaaagtttaaggtttcctatagtttgaacgggaaagattgggagtacatccaggaccctaggactcagcagccgaaactctttgagggcaatatgcactacgacacccctgatatcaggaggtttgatccaatccctgcacaatatgtcagagtgtatccagaacgctggagcccagctgggattggaatgcgcctcgaggttttaggttgtgattggacagacagcaaacccacggtggaaacactgggacccactgtgaaatccgaagagactacaaccccctatccgactgaggaggaagcaacagagtgcggagagaactgctctttcgaggatgacaaggatttgcagctgccatccggctttaactgcaattttgactttctagaagagccctgcggctggatgtacgaccacgccaagtggctacgcacaacctgggcaagctcctcttcgccaaatgatcgaacatttccagatgatcgcaactttttgcgtcttcagagcgattctcagagggaaggtcagtacgccagattgatcagtccacccgtccacttgccaaggtctcctgtctgtatggagtttcagtatcaggcgaccggggggcggggcgttgctctccaagttgtgcgggaggcatcacaggaatccaagctcctatgggtgattcgtgaagatcagggcggggagtggaaacacggccgtattattctgcctagctacgatatggagtatcagattgtgtttgaaggcgtcatcggaaaaggtcgatcaggcgagattgccattgacgacatcaggattagtactgacgtccccctggagaactgcatggagccaattagcgccttcgcaggcgggacacttctacccgggacggagcccacagttgacacggtgcccatgcagccaattcctgcatattggtactacgttatggctgccggaggtgccgtgcttgtcctagtgtccgtcgcacttgcgctcgtgctgcactatcaccgcttccggtatgccgcaaaaaagaccgatcactccattacatacaagacctctcattatacgaatggcgctcccctggccgtggagcctacactcacaattaaactggaacaggatagagggagccactgttag

SEQ ID NO: 25299 - DNA, 2781 bp, synthetic construct
  misc_feature 1..2781: note = Description of Artificial Sequence: Synthetic coding sequence
  source 1..2781: mol_type = other DNA
atggacatgttccccctgacctgggtgttcctggccctgtacttcagtcggcaccaagtgagagggcaacccgacccaccctgcgggggtcgacttaactccaaggacgctggatatatcacttcccccgggtaccctcaggactatcccagtcatcaaaattgtgaatggattgtctatgcccccgaacctaaccaaaagatcgttctgaacttcaatccacacttcgagatagaaaaacatgactgcaagtacgactttatcgagattcgggacggggattccgagagtgccgacctgttggggaagcattgcggcaacattgctcctcccacaatcatcagcagtggatccatgctgtatatccgttttacctccgattacgccagacagggagccggcttctcactgcggtacgaaattttcaagactggtagtgaggactgctccaaaaatttcacaagtccaaacggtacgatcgaaagtcctggcttccctgaaaagtacccacataacctggactgcacattcaccattttagcaaaaccaaagatggaaatcatcttgcagtttctaattttcgacctggagcacgatcctctccaggtaggcgaaggcgattgcaagtatgactggttggacatttgggacgggatccctcacgttggccctctaattggcaaatattgtggtactaagacaccgagcgagttgcggagctcaactgggatcttaagcctcacattccatacagatatggctgtggccaaagacgggttcagcgctcgttactatctcgtccaccaagagccactcgagaattttcagtgcaacgtgcccttagggatggagagcggccgcatcgcaaatgagcagatctcagcatcaagtacgtattcagacggaagatggaccccacagcagtcacgtttacatggggacgataacggctggactcccaaccttgattcaaataaagagtatctgcaggtcgacctccgatttttgaccatgctcactgcgatcgcaacccagggagccatcagtcgcgagacacaaaacggctactacgtcaagagctacaagctcgaagttagtaccaacggggaggactggatggtgtatagacacggaaaaaatcacaaggtgttccaggctaacaacgatgctactgaggtcgttctcaataagctccacgctccattgctgaccaggtttgtgcggattcgcccccagacttggcactcaggtatagcactccgtttggagctgtttggctgtcgggtaaccgacgccccctgttctaacatgttagggatgctctctgggctgatcgcagactcccagatcagcgctagttccacccaggagtatctgtggagccccagcgctgcgcgccttgtgagttcacgctctggatggttcccaaggattcctcaagcacagcctggggaagagtggctgcaagtcgatttgggaacgcccaaaacagtgaaaggcgtgattatacagggcgctcggggtggcgactctataactgcagtcgaagccagagcctttgttcgcaagttcaaggttagctatagcttgaatggaaaggactgggagtatatccaggaccctcgcacacaacaacctaagctgtttgagggcaacatgcattacgataccccagatatccgccggttcgatcctatacccgcacaatatgtgagagtgtatccggagagatggagcccggcaggcatcgggatgcgcctggaggtgctcggatgtgattggaccgacagcaagccgaccgtggagacgctcggccccaccgtgaaatctgaagagactaccacaccttatcctacggaggaggaagctacagagtgcggggagaattgcagctttgaggacgacaaggacctgcagctgcctagcggctttaactgcaatttcgacttcttggaggaaccctgcggctggatgtatgatcatgcgaagtggctgagaaccacctgggcttctagttcttctccaaatgatcgtacctttcccgacgatcgaaactttttgaggttgcaaagtgattcacagagagagggacaatacgcacgtctgatttcccccccagtccacttgccgcgatcaccagtgtgtatggaattccagtaccaggccactggaggtcggggagtggctctccaggtcgtacgtgaggcgagccaagagtcaaaactgctgtgggttatccgcgaggaccaaggaggtgaatggaaacacggcaggatcattctccccagttatgacatggaataccagatcgtgtttgaaggggtgattgggaaaggcagatcaggtgaaattgcaatagatgacattcggatttctacagacgttccgttggaaaactgcatggagcctataagcgccttcgcagtggatataccagagatccatgaacgggaaggctacgaagatgagatcgatgacgaatacgaagttgactggtctaattcttcctcggcgactagtggatctggcgccccatccaccgataaggagaaatcatggctgtacactttggacccaatactcattaccatcatcgcgatgtcatccttgggcgtgctgctcggcgccacctgtgctggtctattactgtactgcacatgctcctacagtggactatcatcacggtcatgtactacactggagaattataactttgagctgtatgacggactcaagcacaaagtgaaaatgaaccatcagaagtgctgtagcgaggcgtag

SEQ ID NO: 25300 - DNA, 2796 bp, synthetic construct
  misc_feature 1..2796: note = Description of Artificial Sequence: Synthetic coding sequence
  source 1..2796: mol_type = other DNA
atggacatgttccccctgacctgggtgttcctggccctgtacttcagccgacaccaggttcgaggccagcccgatcccccttgtggagggcgcttgaattcgaaggatgctgggtacattacatccccgggatacccacaggattatccaagccatcaaaactgtgagtggattgtatacgcaccagagcccaaccagaaaattgttcttaattttaacccgcattttgagattgaaaaacacgactgtaaatacgactttattgaaatccgcgacggcgactccgaatccgctgatctgctgggaaaacattgtggcaatatagccccaccaaccattatttcctccgggagtatgctgtacatccgctttaccagcgactacgctcgacagggagctggcttctcccttagatacgaaatcttcaaaaccggaagcgaggattgcagcaagaacttcacgtcaccaaacggaaccattgaatccccaggattccccgagaaatatccgcataatctagactgtacattcacaatactggctaaaccaaagatggaaattattcttcagttcctgatctttgacctggaacacgaccctttgcaagtgggcgagggggactgcaaatacgactggctagacatttgggacggtatcccgcacgtggggcctttgatcggcaagtattgcggcacaaagacaccatcagaactcagatctagtactggaatcctttcactaacttttcacactgatatggcggtcgctaaggacgggttttctgctaggtattatctcgtgcaccaggaacccctggagaatttccagtgtaacgtgcccctcggcatggaaagtggacgcattgccaacgagcaaatcagtgcttcatcgacttactccgatggtcgctggaccccccaacagagcaggctacacggggatgataacggatggactccaaatctggattcaaacaaagagtatttacaggtagacctgaggttcctcaccatgctgacggcaatagcaacgcagggagccatcagccgtgagacacaaaacggctactatgtgaaatcatacaagcttgaggtatccacgaatggggaagattggatggtttaccgtcatggtaaaaaccacaaggtgttccaagccaataacgacgccactgaggtggtcctgaacaaactccatgctcctctcctgacaaggtttgttaggattaggccccagacatggcactccggaatcgccctgagactggagctttttggctgccgggtaaccgatgcgccatgtagcaatatgctcggaatgctcagcgggctgatagcagatagccagatttccgcctccagcacgcaggagtacctctggagcccctctgccgccagactggtcagttcccgatcagggtggttcccgcgcatcccccaagcgcaacccggggaggagtggttgcaggtggatctgggaacgcccaaaaccgtgaaaggcgtaatcatacagggggcacggggaggcgatagcatcaccgccgtcgaggcaagggctttcgtcagaaagttcaaggtgagctatagcctgaatgggaaggactgggaatacattcaggaccctcgcactcagcagcctaaactttttgaggggaacatgcactacgacacaccagatattcgcagatttgatcctattcccgcccaatacgtccgggtgtatccggagagatggtccccagcaggcatcggcatgcgactcgaagtgctgggctgcgattggacagactcaaaacctacagtagaaactcttggccctactgtaaaatcagaagagaccactactccataccctacagaggaggaagcgacagagtgcggcgagaactgctcttttgaggatgataaagacctgcagctaccctctggatttaactgcaatttcgatttccttgaagaaccgtgtgggtggatgtacgatcatgcgaagtggctacgcacaacgtgggcatcctcttccagcccaaatgatcgcacctttccagacgatagaaattttctgcgcttacagagtgacagtcagagagagggccaatatgccaggctcatatccccgccagtgcaccttcctagatctccggtgtgcatggaattccagtatcaggcaactggcggcaggggtgtggccttgcaggtagtgagggaagcttctcaggagtctaagctcctatgggtgatcagggaagatcaggggggcgagtggaagcacggccggatcatactgcctagctatgatatggagtaccagattgtgtttgagggtgtcattggcaagggccgctccggggagattgctatcgacgatatccggatttctactgacgtgcccctcgagaactgcatggaacctatatccgcctttgcaggagagaattttaaggtggacatccccgagattcacgaaagggaaggttatgaagacgagatcgacgacgagtatgaggtagattggagtaactcatcgagtgctaccagtggctctggcgcaccttcaacagacaaggagaagtcatggctctacaccctcgaccccatccttattactatcatcgccatgagctcccttggcgtgttactcggcgctacctgcgctggactgcttttatattgtacttgtagctattccggcttgtcaagccgcagctgcacaaccttggagaactacaatttcgagctgtatgatggattgaaacataaagttaagatgaatcaccaaaagtgctgttccgaagcctag

SEQ ID NO: 25301 - DNA, 2730 bp, synthetic construct
  misc_feature 1..2730: note = Description of Artificial Sequence: Synthetic coding sequence
  source 1..2730: mol_type = other DNA
atggacatgttccccctgacctgggtgttcctggccctgtacttcagccggcatcaggtgcgggggcaaccggacccgccttgtggtggacgtttgaactctaaggacgccggttacattacctctcccgggtaccctcaggattatccttcccaccagaattgcgagtggattgtctacgccccagaaccgaaccaaaagatcgtcctcaatttcaatccacatttcgagatcgagaaacatgattgtaagtatgacttcattgagatcagggatggggactcggaatctgccgatcttctcgggaagcattgcgggaacatcgctccaccaactataatctctagtggaagcatgctgtatattaggttcacatcagattatgctaggcagggagcaggcttctctttaagatacgagattttcaagaccggttctgaagactgcagtaagaactttacatctcccaacggtacaattgaaagccctggatttcccgagaagtacccacacaatcttgactgcaccttcaccattctggccaagccaaaaatggagattatcctgcagttcctaatttttgacctggaacacgatcctctgcaggtgggagaaggcgattgcaagtacgattggctcgacatctgggatggaatcccccatgttggacccctcattgggaaatactgcggaaccaagacaccatccgagctgagaagctcaacgggtatactatcactaactttccatacagacatggccgtggcaaaggacggctttagtgccaggtactacttagtgcatcaggagcctctcgagaatttccagtgtaatgtgcccctcggcatggagtccggaagaattgccaacgaacaaatctctgccagctctacttattcggacggccggtggacaccgcaacagagcaggttgcatggggatgacaacgggtggactccaaacctggattcgaacaaggaataccttcaggtagatctgagattcctgaccatgctgaccgccattgccactcaaggcgccatttctcgggaaactcagaacggctactatgtgaagtcttacaaactggaggtgtccactaacggcgaagactggatggtgtataggcatggcaagaaccataaggttttccaagcaaacaatgacgctacagaggtggttcttaataagttacacgcaccactgctaacccggttcgtaaggatcaggcctcagacatggcactcaggtattgccctgcggctggaactgttcggatgccgtgtcaccgacgctccatgctccaacatgctcggcatgctgagcggattaattgcagacagccagatctctgccagcagcactcaagagtatctgtggagcccttccgctgcaaggctcgtgtccagccggtcaggatggtttcctaggattccacaggctcagccaggggaagagtggctccaggttgacctgggtaccccaaaaaccgtaaagggggtgattattcaaggtgctcgcggaggcgacagtattacagcagtcgaagcaagagcgtttgtccgcaagtttaaagtgagctactccctgaacgggaaagactgggaatacatccaagatccgcgaacgcagcagcccaagctgtttgagggaaacatgcactatgacacaccggatatcagacggtttgatcccataccggcccagtacgttcgtgtataccctgaaagatggtccccggcaggaatcggcatgagattggaggtgctggggtgtgactggacagattcaaaaccaaccgtagagactctcggccccacagtgaagtctgaggaaactaccaccccttatcccaccgaagaagaagcaacggagtgcggagagaattgcagtttcgaggacgacaaggacttacagctgcctagcggcttcaattgcaactttgactttctcgaggagccatgcgggtggatgtacgaccacgcaaaatggttgcgaaccacatgggccagttcgagcagccctaatgaccggacatttcctgacgaccgcaacttcctgcgcctccagtcagactcccagagagagggacagtacgctcgtttaatctcaccgcctgtgcacttgcctcgtagtccagtgtgtatggagttccagtatcaggccacaggaggcagaggagtggctctgcaagtggtccgagaagcgagtcaggaatcaaaactgctgtgggttatcagggaagaccagggaggcgagtggaaacatgggaggattatacttccctcatacgacatggagtatcagattgtgtttgagggcgtcattgggaagggacggagcggtgagatcgccatcgacgatattcggatcagtacagatgtccctcttgagaactgtatggaaccaatctccgcctttgccgatgaatatgaggtcgattggtccaattcctcgtctgccacgtctggctccggtgctccctccactgataaagagaaaagttggctttacacgcttgaccctatcctcataactatcatcgccatgagtagcctaggagtgctattgggcgctacatgcgccggattgttgctctattgcacctgttcatattccggactatcctctcgcagctgtaccactttagagaactacaatttcgaactgtacgacggattaaaacacaaggttaagatgaaccaccagaagtgttgttccgaagcatag

SEQ ID NO: 25302 - DNA, 1668 bp, synthetic construct
  misc_feature 1..1668: note = Description of Artificial Sequence: Synthetic coding sequence
  source 1..1668: mol_type = other DNA
atggacatgttccccctgacctgggtgttcctggccctgtacttctccaggcatcaggtgagaggacagccagatccaccctgcggtggtagactgaatagcaaggatgctggatatataacatctccaggctatccccaggattaccccagccaccagaactgtgaatggatcgtgtacgcacctgaaccgaatcagaaaatcgtcttgaattttaatccccacttcgagatcgaaaaacacgattgtaagtatgacttcatagagattcgtgatggcgacagcgaatcggccgatctgctcgggaagcattgtggcaacatcgctccacccaccattatatcaagcggctctatgctatatattcgatttacctccgactatgcgaggcagggcgccggttttagtctacgctacgagatctttaagacaggtagcgaggattgcagcaaaaactttacttcccctaatggaacaatcgagtctcccggctttcccgagaagtaccctcacaatcttgattgtacattcactatcctcgcgaagccaaagatggagataatcctccagtttctcatattcgatctcgaacacgatcctcttcaagtcggggaaggggattgtaaatatgattggctggatatctgggatgggatccctcatgttggaccacttattgggaaatactgtgggactaaaactccctctgaacttcgatccagtaccggcatcctgtcactcacctttcacacggatatggccgtggccaaagacgggttttctgccagatattaccttgtgcaccaggaaccactggaaaattttcagtgcaacgtgcccctggggatggaatccggaagaatcgccaatgaacagatcagcgcctcaagtacctactctgacgggaggtggaccccacagcagagtcggttgcacggggatgataacgggtggactccaaacctcgacagcaataaggagtacctgcaggtggatttaagatttttgacaatgctgacagccatcgcaacccaaggtgctatcagtagagagacacaaaacggctactacgtcaaatcctataagctggaggtttcaactaacggtgaagactggatggtatacagacatggaaaaaatcacaaggtttttcaggccaacaacgacgctactgaagtggtccttaataagctgcatgcaccacttttgacccgctttgtgcggattcggcctcagacttggcattcaggaatcgccctaaggcttgagctgtttgggtgtcgggtcacagacgcaccctgttccaatatgttaggaatgctgtcagggcttatcgcggacagccagatttccgcctctagtactcaggaatacttatggtctccctctgccgctcgcttagtaagctcccgaagcggctggttcccgcgtatcccccaggcgcaaccgggcgaggaatggcttcaagtggacctggggacacccaagactgtgaagggtgtgattatacagggtgcccgcggtggggattctatcactgcagtagaagcccgggcctttgtgcgcaaattcaaggtgagttattcgctaaatggcaaagactgggagtatattcaggacccccggacacagcagcctaaagttggctgtagttggagaccactgtag

SEQ ID NO: 25303 - DNA, 309 bp, synthetic construct
  misc_feature 1..309: note = Description of Artificial Sequence: Synthetic coding sequence
  source 1..309: mol_type = other DNA
atggacatgttccccctgacctgggtgttcctggccctgtacttcagcagacatcaggtgcgaggccaaccggaccctccgtgcggcggacggctgaattccaaagacgctggctatattactagccctggctacccccaggactatccctcacatcagaattgtgagtggatcgtatatgccccggaacccaatcagaagattgtgctgaactttaaccctcatttcgaaatagaaaagcatgactgcaagtacgactttatcgagattagggatggtgatagtgagtcagcagatctgctcgggtag

SEQ ID NO: 25304 - DNA, 2781 bp, synthetic construct
  misc_feature 1..2781: note = Description of Artificial Sequence: Synthetic coding sequence
  source 1..2781: mol_type = other DNA
atggacatgttccccctgacctgggtgttcctggccctgtacttctcgagacaccaagtgagaggccagccagatcctccatgcggtggacgactcaattcgaaggacgcgggatatataacatcgcccggctatccacaggactatccctcccatcagaattgcgaatggatagtttacgctcccgagcccaaccaaaaaatcgtgctgaatttcaatccgcattttgaaatcgaaaaacacgattgtaaatacgattttatcgaaatcagagacggcgactcagagagtgcggacttactcggtaaacactgtgggaacatcgcacctcctacaattatctcatcaggatcgatgctgtacatcaggttcacaagcgattatgctcggcaaggcgctggcttctccctccgctacgaaattttcaagaccggaagcgaggactgttcaaagaactttacctcccctaatggtacaatcgagagcccaggatttcccgaaaaatacccccacaatctggattgtacattcactatcttggcaaaacccaaaatggaaatcattctccagtttcttatattcgacctcgagcacgacccactacaggtgggcgaaggagattgcaaatacgactggcttgatatctgggacggtatccctcacgtgggaccccttattggaaagtactgtggaaccaagaccccctccgaactcagatcgagcacagggatactgtctcttaccttccataccgatatggccgtcgctaaggatggtttttccgccagatattatttagtccaccaggaaccgcttgaaaacttccagtgcaacgtgcccttgggaatggagtccggaagaattgccaacgagcagatttctgcgtcctctacttactccgacgggagatggacacctcagcaatcaaggctgcacggcgatgacaatggctggacacccaatttagactccaataaagagtacctgcaggttgatctgcggttccttacaatgttaacagccatcgccacccagggggcaataagccgggagactcaaaatggctactacgttaagtcttataaactcgaggtttccactaatggcgaagactggatggtgtatagacatggaaagaatcacaaagtatttcaagccaataatgacgcaactgaagtggtgctgaacaagctgcatgcaccactgctcacaagatttgtaaggattcgacctcagacgtggcatagcggcatcgccttacggctcgagctatttggctgtcgcgtgaccgatgccccctgttccaacatgctgggcatgttgtccggccttatagccgatagccagatctcagccagttctacacaggagtacctctggtccccatcagccgcccggctggtgtcttctagaagcggttggttcccgcgaataccacaggctcaaccaggagaggaatggctccaggtggatctcggaacacctaaaactgttaaaggcgtgattatacagggagcgaggggcggagacagcattaccgccgttgaagcgcgggcctttgtccgaaaattcaaggtttcatatagcctgaatggtaaggactgggagtacattcaggatccccggactcagcagcccaaactatttgagggcaacatgcattatgatacccctgacatccgacgatttgaccccatacccgctcaatatgtgcgcgtctatcccgaaaggtggtcccccgctggaatcggtatgcgactggaagtattgggctgcgattggacagactcaaagcccaccgttgagacgctggggccgacggtcaaaagcgaagaaactacaactccgtatcccactgaagaagaggccaccgaatgtggggagaattgctctttcgaggatgacaaagacctgcagttgcctagtggcttcaactgtaattttgacttcctagaagaaccttgtggctggatgtatgaccacgcaaagtggctgcgtacaacttgggccagtagctcatcacctaacgaccggacattccccgacgataggaatttcctgcggctccaaagtgactcccagcgggagggtcagtacgctcgcctcatctcccctccagtccatctgccaagatcaccagtgtgtatggagtttcaataccaggccaccggcggacggggggttgccttgcaggtcgtccgtgaagccagccaagaaagcaaactgctttgggtaattagggaggatcaagggggtgagtggaagcacggcagaattatactgccttcctacgacatggagtaccaaattgttttcgaaggcgtcattggaaaggggaggtccggggagatagctatcgatgatatcagaatttccaccgatgttccgttagaaaattgcatggccactgtaagcgcgtctatcgttgatattccggagatacacgagagggaggggtacgaggacgaaattgatgatgaatatgaggtcgactggtctaactcatctagtgccaccagcggctctggagccccatctacagacaaggaaaaatcatggctttacaccctggaccctattctgataacaattatcgccatgtcctcattgggagtgctgctcggggctacatgcgcaggccttctcctgtactgcacttgcagctactcgggcctaagttccaggagctgtactacactggaaaactataattttgagctctacgatgggttaaaacataaagttaaaatgaatcaccaaaagtgctgttcagaggcctag

SEQ ID NO: 25305 - DNA, 2730 bp, synthetic construct
  misc_feature 1..2730: note = Description of Artificial Sequence: Synthetic coding sequence
  source 1..2730: mol_type = other DNA
atggacatgttccccctgacctgggtgttcctggccctgtacttctcccgccaccaagtcaggggtcagcccgatccaccatgtggcggccgattgaattctaaagatgccggctacatcactagccccggctatcctcaggactaccccagccatcagaactgcgaatggattgtttatgcccccgaacctaaccagaaaattgtactgaacttcaacccacacttcgaaattgaaaaacacgactgcaagtacgattttatagaaattcgagacggagatagtgagtcagctgatctgctcgggaagcattgtggtaacatcgcaccaccaacaataatttcatctggctccatgctctacatcagatttactagcgactacgcgcgccaaggggccgggttcagtctgcgctacgagatctttaagacaggatcagaggactgctccaaaaattttacttcacccaacggaactatcgaaagcccaggctttcctgaaaagtatccccacaatctcgactgtaccttcacaatcctggcaaagcccaagatggaaattatcctacagtttctgatctttgaccttgaacacgaccccttacaagtgggcgagggcgactgcaagtacgactggttagatatttgggatgggatacctcacgtcggccctctgattggaaagtactgtggcactaaaacaccatctgagcttcggtcgtccactgggatcttatccctcacattccatactgacatggctgtcgccaaagacggtttctcagccaggtattatctggttcatcaggagcccctcgaaaactttcagtgtaacgtgcccttaggtatggagagcggaaggatcgctaatgagcagataagcgcatcttccacttactccgacggtaggtggactccacagcagtctcggctgcacggcgacgataacgggtggacccccaatctcgactcaaacaaggaatatctgcaggtggatctcaggttcttaaccatgttgactgcaatagcaacgcaaggtgctatcagtcgggagacccaaaacggctattacgtgaaaagctacaaactcgaggtgtcaacaaacggcgaggactggatggtttataggcacggaaagaatcacaaggtgtttcaggccaacaacgatgccacagaggtggttctgaataagctccacgcccctttgctcacccgcttcgtacgtattagaccacagacgtggcactctgggatcgcactgcgtttagaattattcggttgtagggtgacagacgctccatgtagtaacatgctgggcatgctctccggcctgatcgctgacagccagatctctgcaagcagtactcaagaatacctgtggtctccctccgccgcccgtttggtgtccagtagaagcgggtggtttcctcgaatacctcaggcccagccaggggaagagtggctgcaggtagacctgggaactcctaaaaccgtgaagggtgtcataatccaaggggctcgggggggcgattcaatcaccgccgtggaggcccgggcctttgtaaggaagtttaaggtcagctacagcctaaacggaaaggactgggagtatatccaggatcctaggacacagcagcccaagctatttgaaggaaatatgcactatgatactcccgacataaggagattcgatcccattcccgcacaatacgtccgagtctacccagagcggtggtcgccagctggtatagggatgaggctcgaagtgctgggctgcgattggacagattcaaagccaacagtcgaaaccctcggccctacggtcaaaagtgaggaaacaaccacaccatatccaacagaggaggaggcaactgaatgcggcgagaattgctcattcgaggatgacaaggacctgcagctcccaagtggtttcaactgcaattttgatttcctcgaggaaccttgtggatggatgtacgatcacgccaagtggctgagaactacctgggccagtagcagctctccaaacgaccgcacctttcctgacgatcggaatttcctgcggctgcagagcgattcgcagcgtgagggccagtacgcacggctgatcagccctccagtgcacctgcccagatctcctgtgtgcatggagttccagtatcaggcgactggaggtcggggtgtcgcgctgcaggtggtgagagaggcctcccaggagagtaagttactgtgggttattcgggaggatcagggaggcgaatggaaacacggccgaatcatcttgccctcctatgatatggagtatcagattgtcttcgaaggtgtgatcggtaaaggtagatctggggagattgctatagacgacatccgcatctccaccgacgtacccctcgaaaactgtatgggcccaaaggcttgtatcgcagatgagtatgaggtggattggtctaattcctctagcgccacatcagggtccggggctccgtccacagataaggagaaatcctggctgtacaccctggatccgattttaatcaccattattgcaatgagcagtctgggtgtgttactgggcgccacttgtgctggccttctgctctactgcacctgtagctatagtgggctctcttccagatcctgtacaactctcgagaactataactttgaactgtatgacggattgaagcataaggtcaagatgaatcaccaaaaatgctgtagtgaggcatag

SEQ ID NO: 25306 - DNA, 462 bp, synthetic construct
  misc_feature 1..462: note = Description of Artificial Sequence: Synthetic coding sequence
  source 1..462: mol_type = other DNA
atgaccaagatcaaggccgaccccgacggccccgaggcccaggccgaagcctgctccggggaaaggacgtatcaagagctgttagttaatcagaaccccatcgctcagcccctggcttcgcgcagactgacccggaagctgtacaagtgcattaaaaaggctgtaaaacagaagcagatcaggcgaggcgtcaaagaggtgcagaagtttgttaataaaggcgagaagggcatcatggtgctggcaggagacacacttcccatcgaggtgtactgtcacctgcctgtcatgtgcgaggatcgtaatttaccctatgtatatatcccatcgaaaacggatcttggggccgcggctgggtctaaaaggccaacctgtgtgattatggtaaagcctcacgaggagtaccaggaggcctatgacgagtgcctggaagaggttcagtcccttcccctccccttatag

SEQ ID NO: 25307 - DNA, 273 bp, synthetic construct
  misc_feature 1..273: note = Description of Artificial Sequence: Synthetic coding sequence
  source 1..273: mol_type = other DNA
atgaccaagatcaaggccgaccccgacggccccgaggcccaggccgaggcttgctccggtgagcgaacatatcaggagctgctggtgaaccagaaccccatcgcacagcctctggccagccggaggctgaccagaaaactctataaatgcattaaaaaggctgttaagcagaagcaaatccgccgaggtgtgaaagaagtgcagaaattcgtgaacaagggtgagaaaggcacatgggtccaaccacaggccccatcagccccaccagtgtag

SEQ ID NO: 25308 - DNA, 2265 bp, synthetic construct
  misc_feature 1..2265: note = Description of Artificial Sequence: Synthetic coding sequence
  source 1..2265: mol_type = other DNA
atgtggaagctgctgcccgccgccggccccgccggcggcgagccctatagactgctgaccggcgttgagtatgtggtaggtcggaagaactgcgcgattcttattgaaaatgatcagtccataagccgtaaccacgcggtcctgactgccaacttctccgtaaccaatcttagccaaacagacgaaatccccgtgctaacactgaaggacaattctaagtatggtacattcgtgaatgaggagaagatgcagaacgggttttcaaggacccttaagtctggcgacggaatcacctttggtgtgttcggatcaaagtttcgcattgaatacgaacctctcgttgcctgctcaagctgcctcgacgtatccggcaagacggcacttaatcaggccatcctgcagctgggggggtttacagtcaataactggactgaggagtgcacacatctggtcatggtgtcggtgaaggtgaccatcaagacgatctgcgcccttatctgtggccggcccatagtaaagccagagtattttaccgagttcttaaaagctgttgaatccaagaaacagcccccacagatcgagtccttctatcctccactggacgagccctccatcgggagtaagaacgtcgacttgtcagggcgccaggaacgaaaacagatcttcaagggcaaaacgttcatttttctaaacgctaaacagcacaagaaactgtcaagtgctgtggtgtttggtggcggagaggcacgactgattacggaagagaacgaagaagagcataacttttttctagcccccggcacctgcgttgttgacacggggattaccaactcacagacccttataccggattgtcagaagaaatggattcagtctattatggatatgctgcagcgccagggcctaagaccaatccctgaggctgagatcggactcgccgtgatcttcatgaccaccaagaattattgcgatcctcaaggacatccatccaccggtcttaaaactacaacaccgggcccatccctgtcacagggcgtttctgtagatgagaaactcatgccttccgctcccgtgaataccacgacatatgttgctgacacagagtccgaacaggcagatacctgggacctatccgagagacccaaagaaattaaggtgtcaaagatggaacagaaattccggatgctgtctcaggacgcacccaccgttaaggagagctgcaaaacttcttccaacaataattctatggtgtcaaacacgctggctaaaatgcggattcccaactatcagctgagtcctaccaaactcccatcgatcaacaaatccaaagatcgggctagtcaacagcaacaaaccaattcaattcggaactatttccagccgagtacgaaaaagagagagagggatgaggaaaaccaagagatgtcctcctgcaaaagtgctaggattgagacctcctgcagtcttctggagcaaacacaacccgcgaccccatccttgtggaagaacaaggagcagcatctcagcgagaacgagcctgttgatacaaattccgacaacaacctatttaccgacactgatctgaaatcaattgtcaagaactcagcctccaagtcccacgcagccgagaagctcagaagcaataaaaagcgggagatggatgacgtcgccatcgaagacgaggttcttgagcagctctttaaggacacaaagcctgagctggagattgacgtcaaagtgcaaaagcaagaggaggacgttaacgtgcggaaacggcctcgtatggacattgagaccaatgatacatttagtgacgaggcagtgccagagagctccaaaatcagccaggaaaatgagattggcaagaaacgcgaactgaaggaagactctctctggtcggctaaggagatttctaacaatgacaaactgcaggatgattctgaaatgctccccaaaaaattgcttctgaccgagtttcggtctctcgttatcaaaaacagcacgtctagaaacccgtccggcattaacgatgactatggtcagctgaagaattttaaaaagttcaagaaagtgacatatcctggagccggtaagctcccccatatcattggcggaagcgatctcatagcacaccacgctcggaagaacaccgagttagaggagtggttgcgccaggagatggaggttcagaaccagcacgcgaaagaagagtctttagctgatgacctattcagatacaatccctatctgaagagaagacgttag

SEQ ID NO: 25309 - DNA, 1437 bp, synthetic construct
  misc_feature 1..1437: note = Description of Artificial Sequence: Synthetic coding sequence
  source 1..1437: mol_type = other DNA
atgtggaagctgctgcccgccgccggccccgccggcggcgagccctaccgcctgctgacaggcgtggaatacgttgtggggcgcaagaactgcgccattctgatcgagaatgaccagagtatatcccgcaaccacgcagtcctcacagcgaacttcagcgtgactaatctctcacaaacagatgagattccagtgctgacattgaaggacaattctaagtacggcacattcgtcaacgaggagaaaatgcagaatggtttcagtcggactttgaaatctggggacggcatcacatttggagtatttggctcgaagtttagaattgaatacgagcccttggtcgcatgtagcagctgtttggatgtcagcgggaagactgctctgaaccaggctatacttcaattgggaggtttcactgtgaacaactggacggaggaatgcacgcacctggtgatggtttcagttaaggtcacgattaaaacaatctgtgccctgatctgcggccgtcctattgtgaaacccgagtactttacagagtttctgaaagccgtcgaatcaaagaagcagccaccccagattgagtccttctatccacctctagatgagccatccattggcagtaagaatgtcgacctgtcaggcaggcaggagagaaagcaaatcttcaagggaaaaacgttcatttttctgaacgccaagcagcataaaaagctgagctcagccgtggtcttcggtgggggcgaggccagactcatcaccgaagagaacgaggaggaacacaacttctttctagcccccggcacttgcgttgtggatacaggtatcacgaattctcagactctgatcccggattgtcagaagaagtggatacagagcatcatggacatgcttcagcggcaggggctgcgacctattccagaggctgagatcgggttggccgtgattttcatgaccacgaagaattactgcgaccctcaagggcaccccagcacgggcctgaaaactaccacaccagggccctccttatcccagggagtaagcgtggacgaaaaattgatgccctccgctccagtcaacactacaacctatgtcgccgacactgagtccgagcaggctgatacgtgggatctgagcgaacggccaaaggagattaaggtgtccaagatggagcagaagtttaggatgctgtcccaggacgcacctactgtgaaagaatcctgtaaaacaagttctaacaacaactcaatggtgtcaaacactcttgccaaaatgcggatcccaaactatcagctatcccctacgaagcttccaagcattaacaagagtaaggaccgagcgtctcagcaacaacagactaatagtatcagaaactactttcagccatcaacaaagaagcgggagaggttgcatcttaagaaaaaaaagaagaagaagtag

SEQ ID NO: 25310 - DNA, 333 bp, synthetic construct
  misc_feature 1..333: note = Description of Artificial Sequence: Synthetic coding sequence
  source 1..333: mol_type = other DNA
atgggcgccagcggcagcaaggcccggggcctgtggcccttcgccagcgctgcagggggaggaggctccgaggccgctggagccgaacaagcgctggtccgcccaaggggcagagccgtccccccctttgtcttcactcgccgggggtcgatgttctacgatgaggatggcgacttggcccacgaattctatgaggagactatcgtcaccaaaaacggacagaagcgggctaagttgcgccgtgtgcataaaaacctcataccgcagggcatagtgaagcttgaccaccctcgcatccacgtcgattttcctgtcattttgtatgaggtatag

SEQ ID NO: 25311 - DNA, 1206 bp, synthetic construct
  misc_feature 1..1206: note = Description of Artificial Sequence: Synthetic coding sequence
  source 1..1206: mol_type = other DNA
atgtggagcggcggcagcggcaaggcccggggctgggaggccgccgccggggggcgatccagcccgggacgcttgagtcgccgcagaataatgtcaatgagccccaaacatacgacacccttttcagtgtctgatatcctgtcccctcttgaggaaagttataaaaaggtaggaatggagggaggtgggctgggggctcctctcgctgcctatcgccaggggcaggccgccccccccactgcagctatgcaacagcatgccgtcggccaccacggggccgtgacagctgcgtatcatatgactgcggccggagtgccacagttatcccattcagcagtgggcggatattgtaacggcaatctcggcaatatgtccgagctgccaccataccaggatacaatgcgtaattcggccagcggtcctgggtggtatggcgcaaaccccgaccctagatttcccgctatctcacgtttcatggggcccgcctccggtatgaatatgagcggtatgggcggtttgggctcattaggagacgtgagtaagaacatggcccctcttccatcagcgcccagaagaaaaaggcgggtcctgttcagccaggcacaagtctatgagctagagcgtaggtttaagcagcaaaaatatttaagcgctcctgaacgggagcatctagcctcgatgatccacctcacaccaacccaggtgaaaatctggttccagaatcacaggtataaaatgaagcggcaggccaaggacaaggctgctcagcagcagctgcagcaagatagcggtggcggcggaggtggtggtggcacaggatgtccgcagcagcaacaggcccagcaacagtctcctcgaagagtagccgtgcccgtgctggtgaaggacggtaaaccctgtcaggccggcgcccccgcaccaggcgcagcctctttgcagggacatgcccaacagcaagctcaacatcaagcacaggcggcccaagcggccgctgcagcgatttctgttggcagcggcggcgctggacttggagcacatccaggtcaccagcctggtagcgccggacagtctccggaccttgcccaccatgctgccagccctgcggcactccaaggccaggtgtcatccttatcccacctcaactcctccggctccgactacggcacaatgtcttgctccacactgctgtacgggaggacttggtag

SEQ ID NO: 25312 - DNA, 1116 bp, synthetic construct
  misc_feature 1..1116: note = Description of Artificial Sequence: Synthetic coding sequence
  source 1..1116: mol_type = other DNA
atgagcatgagccccaagcacaccacccccttcagcgtgagcgacatactgagccccctcgaggagtcctacaaaaaggttgggatggaaggcggcggtctcggcgcacccctcgccgcatacaggcaggggcaggcggccccacctaccgccgctatgcagcagcatgcagtcggacatcacggggcagtaacggccgcctaccacatgacagccgccggggtgccccagctgagccactcagccgtgggcggttactgcaacggcaatctggggaacatgagcgaactgccaccctaccaggatactatgaggaatagtgccagtggccctggatggtacggcgctaatccagacccccggttccctgcaatttctcggtttatggggcccgctagcggcatgaatatgtctggcatgggagggctcgggtccctcggggacgtgtccaagaacatggcacctctcccctcggccccaagaaggaaacgacgggtgctgtttagccaagcccaagtgtacgagctagaaagaagattcaaacagcagaaatacctgtccgcaccagaacgggaacacctcgccagcatgatacatcttacgccgacccaagtgaagatctggtttcaaaatcatcgctataagatgaagagacaagctaaggataaggcggcgcagcagcagctgcagcaagatagcgggggaggggggggtggtggggggacgggttgcccacaacagcaacaggcccaacagcagtcacccaggcgtgtcgccgtgcctgtgctcgtgaaggacgggaagccctgccaggccggagctcctgcccccggagcagcaagtctgcaaggccacgcacagcaacaggcacagcatcaggcccaggcggcacaggcggcagccgctgccattagcgtaggcagcggaggggccggcttgggcgcccacccaggacaccagcctggttctgccgggcagtccccagacttggctcaccatgcggctagccctgctgccctacagggtcaagtgtcatcactctcacatcttaatagtagtggctccgattacgggaccatgtcatgttcaaccctgttatatggtcgaacatggtag

SEQ ID NO: 25313 - DNA, 1116 bp, synthetic construct
  misc_feature 1..1116: note = Description of Artificial Sequence: Synthetic coding sequence
  source 1..1116: mol_type = other DNA
atgagcatgagccccaagcacaccacccccttcagcgtgagcgacattctgtcaccacttgaggaatcgtataagaaggtgggtatggagggggggggactgggcgctcctttagctgcataccggcagggtcaagccgccccgccaaccgctgccatgcagcagcacgccgtgggacatcatggagccgttaccgctgcctaccacatgaccgcagctggagtcccacagttgagtcattctgccgtcggcggttactgtaatgggaatcttggaaacatgtcagaactgcccccataccaggacacaatgaggaacagtgcctccggtcccggttggtacggtgcaaatccggaccctagatttcccgccattagccgttttatggggcctgcgagtgggatgaacatgagcgggatgggcggacttggcagtctgggggatgtcagcaaaaacatggctcctctcccttccgcgcctcgcagaaaaaggcgagttcttttttcacaggcccaggtctatgaactggagcgccgcttcaagcagcagaagtatctcagcgcccccgagcgcgaacacttggcttccatgattcacctcacacccacacaggttaaaatctggttccagaaccaccgctacaaaatgaagcgacaggcgaaggataaagcagctcagcagcagctccagcaggacagcggaggaggggggggcgggggcgggaccggatgcccacagcagcagcaggcccaacagcagtcgccacggagagtggccgtccccgttctggtcaaggatgggaagccttgtcaggccggcgcaccggcccccggcgccgcatcacttcagggtcacgctcagcaacaggcgcagcaccaagcacaggcggcacaagccgcggccgcggccatttcggtggggagtggcggcgccggtttgggcgcccatcccggacatcagccagggagcgccggacagtccccagacctagctcatcacgccgcttcaccggccgccctccaaggccaggtgtccagcctatcacacctaaactcctctggtagcgattatgggaccatgtcctgttccacccttctctatgggagaacatggtag

SEQ ID NO: 25314 - DNA, 1116 bp, synthetic construct
  misc_feature 1..1116: note = Description of Artificial Sequence: Synthetic coding sequence
  source 1..1116: mol_type = other DNA
atgagcatgagccccaagcacaccacccccttcagcgtgagcgacatcctttctccgctggaagagtcctataagaaggtgggaatggagggcggtgggctcggcgcaccgctggcagcataccgacagggacaggccgcccctcctaccgcggccatgcagcagcatgccgtaggtcaccacggcgctgttacagcagcgtaccacatgactgcagctggcgtgccacagctcagccattcagccgtgggaggttactgtaatggaaaccttgggaacatgtcagaactgcctccttaccaggatactatgcggaactctgccagcggccctgggtggtacggggcgaatcccgaccctcgctttcccgctatctccagattcatggggcccgcctcagggatgaacatgtctggaatgggaggccttggatctctcggcgatgtgtcaaaaaacatggcccccctcccatccgctccacgcaggaagaggcgagtactctttagccaggcccaggtttacgaattggagaggcggtttaaacagcaaaagtatcttagcgcgccagagcgcgagcaccttgcgtctatgattcacctgacaccgacccaagtcaaaatttggttccagaatcaccggtacaagatgaagcgccaggctaaggacaaggcagcccagcagcagctgcagcaagattctggcggcggcgggggtggagggggtacaggatgcccgcagcagcagcaggcgcaacaacagtccccacgaagggtggccgtgcctgtgcttgtcaaggacgggaagccatgccaggccggcgcccccgccccgggcgccgcctctctccaaggccacgctcagcaacaggctcagcaccaggcacaagccgcccaggccgcagcagccgccatctccgtcggctctggaggcgctggcctaggagcgcacccaggccatcagcctggcagtgccggacagtcccccgatctcgcccaccacgccgcttctcccgcggccctgcaaggccaggtttcttcactgtctcacctgaattctagtggctctgactacggaacgatgagctgtagcactcttctgtatggacgcacctggtag

SEQ ID NO: 25315 - DNA, 105 bp, synthetic construct
  misc_feature 1..105: note = Description of Artificial Sequence: Synthetic coding sequence
  source 1..105: mol_type = other DNA
atgtggagcggcggcagcggcaaggcccggggctgggaggccgccgccggtggtcgtagttcacccggccgtctatctgcatacgcccctcctttggttgcttag

SEQ ID NO: 25316 - DNA, 573 bp, synthetic construct
  misc_feature 1..573: note = Description of Artificial Sequence: Synthetic coding sequence
  source 1..573: mol_type = other DNA
atgctgcgggtgcccgagccccggcccggcgaggccaaggccgagggtgcggcacctcccacccccagcaaaccattgacttccttccttatacaggacatcctgcgcgacggtgctccagaagaggcggaaacactcgcggagacggagcccgagagacaccttggctcttatcttctggattcagagaatacttctggagccctcccacgattgcctcagactcccaaacaaccacaaaagaggtcaagagctgctttctcccatacacaggtgatagagttggaacggaagtttagtcaccaaaaatatctgagtgcccccgaaagggcccacctggcaaaaaaccttaagctgaccgaaactcaggtcaaaatctggtttcagaacaggagatacaagaccaaacgcaagcagttgtctagtgagctgggcgatttagaaaaacacagctccttgccggctttgaaagaagaagccttcagcagggcaagtttggtgagcgtctacaacagctacccttattacccctacttgtactgtgtgggatcatggtctcctgctttttggtag

SEQ ID NO: 25317 - DNA, 705 bp, synthetic construct
  misc_feature 1..705: note = Description of Artificial Sequence: Synthetic coding sequence
  source 1..705: mol_type = other DNA
atgctgcgggtgcccgagccccggcccggcgaggccaaggccgagggagccgccccacccaccccgagcaagcctttgacctcattcctcatccaggatatcctgcgggatggcgcccagaggcagggtgggcgcacttcctcccaaagacagcgggacccagaaccagaacccgagcctgagcccgaagggggccgctcccgagcaggcgcccagaatgaccaactaagcactggtccacgagcagctcccgaggaagcagagaccttggccgaaaccgaaccggagcgccatcttggcagctatttgcttgactccgagaatacatcgggggccctcccacgcctgcctcagaccccaaagcagccacagaagaggagccgcgcagccttctcgcatacccaggtgatcgaattggagcgtaagttttctcaccagaaatatctgtccgccccagagcgggctcatctggcaaaaaatctgaagctcacggaaacccaggtaaaaatatggtttcagaatcgccgctacaaaacgaagcgcaaacaactttcatccgagcttggcgacctcgaaaaacactccagtctacccgctcttaaggaggaagcattcagtcgcgcctcattagtcagcgtttacaactcttatccttactatccttatctatactgcgtgggatcatggagcccagctttttggtag

SEQ ID NO: 25318 - DNA, 480 bp, synthetic construct
  misc_feature 1..480: note = Description of Artificial Sequence: Synthetic coding sequence
  source 1..480: mol_type = other DNA
atgctgcgggtgcccgagccccggcccggcgaggccgagaccctggccgaaaccgagccagagcggcacctcggctcgtatctgctggatagcgagaatacatcaggtgcacttcccaggcttccccagacacctaagcagccccagaagaggagtagggctgctttctcccatacgcaggtgatcgaattggagaggaaattttctcaccaaaaatacctgagcgctcctgaacgagcccacttagctaaaaacctgaaacttactgagactcaagtgaaaatttggtttcagaataggcgatacaaaactaagcgtaagcagctgagctctgaactgggcgacctggagaaacattctagtctaccagccttaaaagaagaggcattctcaagggctagcctcgtatcagtgtataattcgtacccctactacccctacctctattgcgtagggtcttggtcccccgccttctggtag

SEQ ID NO: 25319 - DNA, 4212 bp, synthetic construct
  misc_feature 1..4212: note = Description of Artificial Sequence: Synthetic coding sequence
  source 1..4212: mol_type = other DNA
atggccacccagcagaaggccagcgacgagcggatcagccagttcgaccataatctgctgccggaactgtccgcccttctcggacttgatgccgtgcagcttgcaaaggaactggaggaggaggagcagaaagaaagggccaagatgcagaagggttacaacagccagatgcggtccgaggccaagcgccttaagacctttgttacttatgaaccttattctagctggattccacaggaaatggctgcagctgggttttactttaccggtgtcaagtccgggattcagtgtttttgctgcagcctaatcctttttggcgcaggacttacgcggctacctatcgaagatcataagcggttccacccagattgtgggttccttctgaacaaggatgtcggtaacattgctaagtacgacattcgggttaaaaatttgaaatctagattacgtggggggaaaatgcgataccaggaggaggaggctagactggcctctttcaggaactggccgttttatgtgcagggaatttccccttgcgtgctgtctgaagccggatttgtgtttacagggaagcaagacaccgtacagtgcttttcctgtggaggatgtctgggtaactgggaggagggtgacgatccatggaaggaacacgccaaatggttccccaagtgcgagtttttgcggagtaaaaaaagtagtgaggaaattacgcagtacatccagtcgtacaaggggtttgtggacattacgggagagcattttgtgaattcatgggtccagcgggagctacctatggcttcagcctactgcaatgatagcatttttgcctatgaggagctcaggctggactcattcaaggattggccccgcgaaagcgctgttggcgtcgcagctctcgccaaggctgggctgttctatacgggaatcaaagatatcgtgcagtgcttttcatgcggcgggtgcctcgaaaaatggcaggaaggtgacgaccccctggatgatcacacacgctgttttcctaattgcccgttcctccagaacatgaaatcctctgccgaagtgacgcctgacctgcagtctaggggagagctctgtgaacttctggaaaccacctcggagagtaacctggaagatagcattgccgtaggaccaattgtgcctgagatggcccagggcgaggcccaatggttccaggaggctaagaatctgaatgaacagttacgcgccgcctacacgtctgcgagttttcggcacatgtcactcctcgacataagctctgatctggcaactgaccatctgttggggtgcgatttgagtattgcatcaaagcacattagcaagcccgtccaagagcctcttgtgcttcctgaggtgttcggtaatctgaactctgtgatgtgcgttgagggggaagccggcagcgggaaaactgtcttgttgaaaaagattgcatttctctgggcctccggatgttgcccccttcttaatcgctttcaacttgtgttctacttgagcctgagttcgactcgccctgacgagggtcttgcatccataatctgcgaccagttgcttgagaaggaggggtctgtgacagagatgtgcgtcaggaatatcatccaacaactgaagaatcaggtgctgtttcttctagatgactataaagaaatatgttcaattccccaggttatcggaaaactgatacagaaaaatcatctatctaggacttgtctgcttattgcagtgagaactaatcgagcgcgcgacatccgcagatatctcgaaaccatcctcgagattaaggcttttccattctacaacaccgtgtgtattctccgtaagttattcagccacaacatgaccaggctgcgcaagttcatggtgtacttcgggaagaaccagtccttgcagaagatccagaagacacctctctttgtcgctgctatatgcgcccactggttccagtacccattcgacccgtctttcgacgacgtggctgtctttaaaagttacatggaaagactttctctccggaacaaagctacagcagaaattctcaaagccaccgtgagtagttgcggcgaacttgcgctgaaggggttcttttcatgttgcttcgagtttaatgatgacgacctggcagaagcaggggtcgacgaagatgaggatttgaccatgtgcctcatgtcaaagttcacggctcagcggctgcgccccttctatcggttcctgtcacccgccttccaggaatttctcgctggcatgcggttaattgagctcctcgacagcgaccgccaggagcaccaagatctaggtttgtaccacctcaagcagatcaactcgccaatgatgactgtcagtgcctacaataattttctgaattacgtgtcatcactaccgagtactaaagccggcccaaagattgttagccatctgctgcatctagtagacaacaaagagagcctggaaaacatctccgagaacgacgattatttgaagcaccagcccgagatctcactccagatgcagctgctccgagggttgtggcagatatgtccccaggcctattttagtatggttagcgagcatcttctcgtcctggcactgaaaacagcttatcagtcaaataccgtggccgcctgtagtccctttgtcttgcagttcctgcaggggaggaccctgaccctgggggccttgaacctgcagtatttttttgatcacccagagagtttgtcgctattgaggtcaatccactttccaatcaggggcaacaagacaagccctagggctcattttagcgtgcttgagacttgctttgacaaaagccaggtccctaccatcgaccaagattacgcctcggcctttgagcctatgaatgagtgggagcggaacctagctgaaaaggaggataacgtgaaaagctatatggatatgcagcgccgagccagcccagacctgagcacaggatactggaaactatccccgaagcagtataaaattccctgtctcgaggtagatgttaacgacatagatgtggtggggcaggacatgctggagattctgatgactgttttctcggcttcccaacggattgaactacacctgaatcactctcggggctttattgaatcaatccggcccgcccttgaactgtccaaagctagcgtgacaaaatgttccatttcgaaacttgaactcagtgctgctgagcaggagctgttactgactctcccctccctcgaatctctcgaggtgtccggaaccattcagtcccaggatcaaatattcccaaacttggataagtttctgtgcctcaaggaattgtcagttgacctagaagggaacataaatgtgttctcagtgatccccgaggagtttccgaattttcatcacatggagaaattactcattcagattagtgctgagtatgacccaagtaagctggtcaaattaatccagaactccccgaatctgcatgtctttcatcttaaatgtaacttcttttccgacttcgggtccctgatgacaatgttggtgagttgtaagaagttaactgaaatcaagtttagcgactccttttttcaagctgtgccatttgtggcctcattacccaattttatctccctgaaaatcctcaatctagaaggccagcagttccctgatgaggaaacgagcgaaaagttcgcttacatactgggatcgttgtcgaacctagaggaacttatccttcccacaggagacggcatctatcgtgtggctaaactcattattcagcagtgtcagcaactgcactgccttagggtgctgtctttcttcaagactctgaacgacgactctgtggtggagattgctaaggtagctatctcaggtggtttccaaaagcttgagaacctcaagctcagtataaaccataagattactgaggaaggttaccgaaattttttccaggctttggacaacatgccaaatctgcaagagttagatattagccgccactttaccgagtgcatcaaggctcaagcaaccacggtaaaatctttgtcccagtgtgtacttcggctaccaagactgattaggttgaacatgctgagttggctgctggacgcggatgacattgctcttctgaacgtaatgaaggagagacatcctcagtctaaatacctgactatcctacaaaagtggatccttccattctctccaatcatccagaagtag

SEQ ID NO: 25320 - DNA, 3726 bp, synthetic construct
  misc_feature 1..3726: note = Description of Artificial Sequence: Synthetic coding sequence
  source 1..3726: mol_type = other DNA
atgcccctgcacatcggcgacttcgtgtgggacagcaaggtgcacagtctgcagtccagccttaatatcttttcattgctgcccacaaaagggagaacggagcatctgtttttctcacacatactctcttttcactggcctgcattttcttccattcgtttagagctgtggataaacctacggtgtgaatttctcaggtccaaaaagtcctccgaagagataacccagtacatccaaagttataaagggttcgtcgatataactggcgagcactttgtaaactcatgggtgcagagggaactgccaatggcctctgcgtactgcaatgatagtatctttgcctatgaggaactgcgcctggactcattcaaggattggcccagggagtctgccgtgggggtggcagcactagctaaggctggcctgttttacaccggcatcaaggacatcgttcagtgcttctcctgcgggggctgcttagagaaatggcaagagggtgatgatcccctggacgaccataccaggtgcttcccaaattgtcctttcctgcaaaatatgaagagctctgccgaggtaactccagacctgcagtcccgtggtgagctgtgtgagcttctagagacaaccagtgagagcaatctggaggactcgattgcagtcgggcctattgtgccagagatggcccaaggggaagctcagtggtttcaggaggctaagaatctgaacgagcagctccgggcggcatacacatcagcctccttcagacacatgtcgctcctcgatatcagcagcgatctggccacagaccacctactgggttgcgacctttcgattgcttccaagcacatcagcaaaccagttcaggaacccctggtcctcccagaagtctttgggaacctgaatagcgtgatgtgcgtagagggggaagccggatcaggcaagacagtgctgctgaaaaagatcgctttcctgtgggcatccggatgttgccccctgcttaaccgcttccagctggtattctatctgagcctgtctagcacgcgtccggatgaaggactcgccagtattatctgtgaccagctgctcgaaaaggaaggttcggtcaccgagatgtgtgttagaaatatcattcagcagctgaaaaatcaggtgctcttcttgctggatgactataaggaaatctgtagcattccacaggtgatcgggaaactgattcaaaagaatcatttatcaagaacctgcttattgatcgcagtgagaaccaatcgggctcgcgacatccggcgctatctcgagactatcctcgagattaaagccttcccattttataacaccgtctgcatattgagaaaactattctcacataacatgaccaggcttagaaaattcatggtctattttggtaaaaaccagtcactacagaagattcagaagactccacttttcgtcgcagccatctgcgcccattggtttcagtacccgttcgacccctcatttgacgacgtggctgtctttaagtcgtacatggagcggctgtccttaagaaacaaggccactgcggaaatactgaaagcaaccgttagtagttgtggggaactggcactgaaaggattcttctcttgctgtttcgaatttaacgacgacgatttagcagaggccggtgtcgacgaagacgaagacctgaccatgtgcctgatgtcaaagtttactgctcagagactccgaccgttctatcgattccttagccctgcgttccaagagtttcttgccggaatgcgactgatcgaactccttgacagcgatcgccaagagcaccaggacttgggactgtaccacctcaagcagatcaacagccccatgatgacagtttctgcatacaataactttttaaactacgtgagctctctcccctccactaaagctgggccgaagatagtgtcgcatttattacatctagtggacaataaggagtctcttgaaaatatttctgagaatgacgactatctgaaacatcagccggagataagtctccagatgcagcttcttcgagggttgtggcaaatctgcccacaggcctatttcagcatggtgtctgaacatctgctggtgctagctctgaaaacagcctaccagagtaatactgtggccgcctgtagtccttttgtgctgcaatttcttcaaggaaggactttgacattgggggcactgaacctccagtatttcttcgaccatcccgaaagcctgtcactcctacgttctatccattttcccatacggggtaataaaactagtccccgcgctcacttctcggtcctggagacttgcttcgataaaagccaggttccaaccattgatcaggactatgctagcgcctttgagccaatgaacgaatgggaaaggaatctggccgaaaaagaagacaacgtgaagtcgtatatggacatgcagcggagggcgtcgcctgacctcagcaccgggtattggaaattgagtcctaaacaatataagattccctgccttgaagtggacgtgaacgatatcgacgtagtgggccaggacatgctcgagatcctcatgactgtgttctcagctagccagcgcattgaactgcatcttaatcactccaggggttttatagagtccattagacctgccttagaactttcaaaggcttccgtgaccaagtgttcaatcagtaaacttgagcttagcgctgcagagcaggagctactgcttaccctgccatccctcgagtctttggaagtaagcggcacaatccagtcacaggatcaaatattccctaatctggacaagttcctctgcctgaaagaactgagcgtagaccttgaggggaacatcaacgtgttttcggtaatccccgaggagtttcctaatttccaccacatggagaaattactcatccagattagtgcagagtacgacccaagtaagttagtgaaattaatccagaactctcccaatctccatgtgttccatctcaagtgcaactttttctcggattttggttccctgatgaccatgctggtctcctgcaagaagctgaccgagatcaaattctccgactcattttttcaggccgtgccatttgtcgcgtcactgcccaacttcatttctctaaaaatcctgaacctcgagggccagcagtttccggatgaggaaacatccgagaaattcgcctacatattagggagcctgtcgaatctcgaggaactaatactgccaacgggcgacggcatatacagagtggctaaactgattatccaacagtgtcagcagttgcactgtctcagggtgctgagtttctttaagaccctgaacgacgacagcgtcgtggagattgctaaagtcgccatttccgggggctttcaaaaactagagaatttgaagctcagcataaaccataagataacagaagaaggctacagaaacttcttccaggccctggataacatgccgaacttgcaggaactggatatcagccgacattttactgaatgtatcaaagcacaggctaccacagtgaagagcttgtcacagtgtgtgctgcggctcccacgactgatcaggctcaacatgttaagttggcttctcgatgccgatgacattgccctgctcaacgtgatgaaggaaagacatccacagagtaaatatttaacaattcttcagaagtggattctccccttttctccaattatccaaaagtag

SEQ ID NO: 25321 - DNA, 4212 bp, synthetic construct
  misc_feature 1..4212: note = Description of Artificial Sequence: Synthetic coding sequence
  source 1..4212: mol_type = other DNA
atggccacccagcagaaggccagcgacgagcggatcagccagttcgaccacaacctgctgcctgaactttctgcccttttgggtttagacgccgtccagctcgccaaagagcttgaggaggaggagcaaaaggagcgagccaaaatgcagaaaggatacaattcccagatgcgaagcgaggccaaacggcttaaaacctttgtaacgtacgagccatactccagttggatcccgcaggagatggctgcggccgggttctactttacaggcgtcaaatcgggcattcaatgcttctgttgctcgttgatcctttttggcgccggcctgaccaggcttcctatcgaggatcataaacgcttccatcctgattgtgggttcctgcttaataaggacgtcggcaacattgcaaaatatgacatccgggtcaaaaacttaaaatctcgtttgaggggcggcaagatgcgttatcaggaggaagaagcaaggctagcatctttcaggaactggccattttacgtacagggcatctccccttgtgtactgagtgaggctggctttgtgtttacagggaaacaggacactgtgcagtgtttcagctgtggtggttgcctgggcaactgggaggaaggggatgacccttggaaagaacatgccaaatggttcccaaaatgtgagttcttaaggtctaagaaatccagtgaagagattactcagtacatccagagctacaaaggctttgtagacattacaggcgagcactttgtaaactcatgggtacagcgagaactgcctatggcaagcgcgtactgtaacgattcgatcttcgcttacgaagagttacggctggacagcttcaaagattggccaagagagtctgccgttggagtggctgccctcgccaaggcaggattattctatactggaattaaggacatcgtacaatgtttctcctgtggaggctgcctggaaaaatggcaagaaggggacgacccactggatgaccatactagatgtttccctaattgtccatttctacaaaacatgaagagcagcgccgaggtgacacccgacttgcaatccaggggagaactgtgtgagttgttggaaaccacatctgagtcgaatctggaagactcaatcgccgtaggaccaattgtccccgagatggcgcagggtgaggcacagtggtttcaggaggctaagaatttaaacgagcagttaagggccgcttacacttcagccagcttccgccacatgagtttactcgatattagctccgatctcgccactgaccatctcttgggttgcgacctcagtattgcttcaaaacacataagtaaaccagtgcaggagcccctggtccttcctgaggtcttcggcaatttgaattccgtgatgtgtgtagaaggggaggctggatccggcaaaactgtgctactaaagaaaattgcttttttatgggcttcgggttgttgtccactgcttaaccgttttcaattggttttttatctgagtctgagcagcacacgcccggacgagggcctggcttccatcatatgcgaccagctgctggaaaaggaaggctctgtgactgaaatgtgcgtgagaaacattattcagcagctgaaaaaccaagtactctttcttttggacgattataaggaaatttgttctatccctcaggttatcggaaagctcattcagaaaaatcatctgagccggacatgcctgctgattgcagtgcgcacaaaccgtgcgcgggacatccggagatatctggaaaccattctcgaaatcaaggctttccccttttacaataccgtatgtattttgcgaaaactattttcccacaatatgacccgactccgaaaatttatggtgtattttgggaaaaaccaatccctccagaagatccagaaaacaccactgttcgtggctgccatctgtgctcattggtttcagtacccctttgatcctagttttgatgatgtggccgtcttcaaaagttacatggaaaggctttcactaaggaataaagccactgccgagattttgaaggccaccgtgtcaagctgtggtgagctagccctgaaagggtttttctcctgttgtttcgaattcaacgatgacgacttggccgaagctggagtagacgaggatgaagacctgacaatgtgcctcatgagcaagtttaccgcccaacgcctccggcctttctatcgcttcctgagccccgcctttcaggagttcctcgccggtatgagactcatcgagctgttggactctgataggcaagaacaccaagatttgggcctgtaccaccttaagcagatcaactcacctatgatgactgtttccgcttataacaattttctgaactacgttagcagcttgccgtctaccaaagcagggcctaagatcgttagccatctgctgcaccttgtcgataataaggagagcctggaaaacatcagcgagaatgatgattacctaaaacatcagcctgagattagtcttcagatgcagctgttaaggggcctgtggcaaatctgtccccaggcttatttcagcatggtttctgagcatttgctcgttcttgctctcaagaccgcttaccagtcaaacactgtggccgcttgctctccatttgtgcttcagtttctgcaaggcagaactctcaccctgggagcgctcaatttacagtacttttttgatcacccggaaagcctttcactactgagatcgattcattttccaattaggggcaataaaactagtccaagagcgcactttagcgtattggaaacctgtttcgacaagagccaagtcccaaccatcgatcaggactatgcgtctgcctttgaacccatgaacgaatgggaaagaaacttggccgagaaagaagataatgtgaaatcttacatggacatgcagcgtcgagcatcccccgacctcagcacaggctactggaaactcagccctaagcagtataaaataccttgtctagaagtggatgtgaatgacatcgacgtggtgggccaagacatgctggaaattctgatgacagtgtttagtgcaagccagcggatcgaactgcacctaaatcactccaggggatttattgagtcgatcaggccagccctcgagttatccaaggcttccgttacaaagtgttcaatctcgaaacttgaattgagcgctgcagaacaggagctgctgctgacgctccctagcctggagtctttggaggtgtctggcacaatccagagtcaggatcagatatttccgaatttggacaagttcttgtgtctgaaagagctttccgtggacctggagggaaacatcaacgttttttctgtgattcctgaagaattccctaacttccaccacatggagaaactgttgatccagatcagcgctgagtacgacccgagtaaactggttaaattaatacagaatagtccaaacctgcatgtgtttcaccttaaatgcaacttcttctccgactttggctcactgatgacgatgctcgtaagttgtaagaagctgaccgaaattaagttcagcgacagctttttccaagccgttccattcgtggctagtttgcccaacttcatctctctcaagattttaaacctggaagggcagcaatttccagacgaggaaacgagtgagaagtttgcctatattcttggctcactttcaaacttggaggaactcatcttgcccaccggggatgggatttatagggtggcaaaactgatcatccaacagtgccaacagcttcattgccttagggtactaagcttcttcaaaacgttgaatgatgacagcgtggttgagattgccaaggtggctatttcaggggggtttcagaaattggagaacctgaagctctctatcaatcacaagattaccgaggagggctatcgcaatttctttcaagccctggataacatgccgaacttgcaggagctggatatctcacgacacttcactgagtgcatcaaggcccaagcaaccaccgtgaaaagcctgagccagtgtgttctcaggctccctcgcttgattaggcttaatatgctgagctggctcctggacgcggacgatatcgctctccttaatgtgatgaaagagcggcacccacaaagcaagtatctcacaatcctgcaaaaatggatcctcccattctcacccatcattcagaaatag

SEQ ID NO: 25322 - DNA, 3726 bp, synthetic construct
  misc_feature 1..3726: note = Description of Artificial Sequence: Synthetic coding sequence
  source 1..3726: mol_type = other DNA
atgcccctgcacatcggcgacttcgtgtgggacagcaaggtgcactcattgcagtcttcgctcaacattttctccctgctgccaacaaagggtcgcacagagcacctcttcttttctcacatcctgagcttccactggccagcctttagctccatccggttggaactctggattaatctgcgctgcgaatttttgcggtctaagaagtctagcgaagaaatcacgcagtatatccagagctacaaaggattcgtcgatatcactggtgaacatttcgtcaattcctgggtgcagagagagttacccatggccagtgcctactgcaatgattcaatcttcgcttatgaggagctgcgccttgatagctttaaagattggcctcgggaatccgcagtgggcgtggctgccttggccaaggctggtctgttttatactggcattaaagatatcgtgcagtgcttctcatgtggcggctgcttagagaagtggcaggagggagatgaccctttggatgaccacacccggtgttttccgaactgcccgtttcttcagaacatgaagtccagcgctgaagtgactcccgaccttcagagccgaggagagttgtgtgaacttctggagacaaccagtgaatccaatttagaggattcaattgccgtcgggccgatcgtccccgaaatggcccaaggagaggctcagtggtttcaagaggctaaaaacctcaacgaacagcttcgggcagcttacaccagcgcctcatttcggcacatgagtctgctcgacatcagctctgacctcgctacggaccacctactcgggtgcgacctgtctatagcgagtaagcatatcagcaagccagttcaggagcctctggtcctccccgaggttttcggcaatcttaactctgtgatgtgcgttgagggcgaggcagggtccggtaagacagtcctgctgaagaaaattgctttcctctgggcctccgggtgttgtccactcctcaatcggtttcaactggtgttttatcttagcctttctagcacgcggcctgatgaaggactcgcgagcattatatgtgatcagctgctggagaaagaagggtccgtgactgagatgtgtgtcagaaacattattcaacagctgaagaatcaggttctgtttctgcttgacgactataaggaaatctgttcgatccctcaagtaatcggaaaactcattcagaagaatcatttaagcaggacctgtctgctgatagctgtacgaacaaatcgagcaagagacattaggcgatacctggaaactatcctggaaatcaaggccttccccttctacaacacagtttgcatactgagaaagttgttctcacacaacatgacgcgactgagaaaattcatggtctatttcggcaaaaaccagtccttacagaaaatccagaagacaccgctcttcgtagccgctatctgtgcccattggtttcagtatcccttcgacccttcttttgatgacgtggcagtgttcaaatcctacatggaaagactgtcccttcgcaataaagctacagctgagatattgaaagccaccgtgtcttcctgtggggaactggccctgaagggcttcttttcttgttgttttgagtttaacgatgacgatctggcagaggcaggggtggatgaagacgaagatttgactatgtgcctgatgtccaaatttacagcacagagactcaggcccttctaccggttcctgtcccctgctttccaggagttcctggccgggatgcgtttaatcgagctgttggactctgataggcaggaacaccaggatctgggactctaccacctgaaacagatcaacagccctatgatgacagtttctgcttacaataactttctcaattatgtgtcatccctgcctagcacgaaagctggccctaaaatcgtgtctcaccttcttcacctcgttgacaataaagagagtctcgaaaacatttcagaaaatgacgattacctgaaacatcagccggaaatctccctgcagatgcagctactccgaggtttgtggcagatctgccctcaggcctatttttcaatggtgtcagagcacctcctcgtcctggccctgaaaactgcctaccagagcaacaccgtagccgcatgctccccattcgtgctgcagttcttacaagggcggaccctcaccctcggagctctgaatctccaatactttttcgaccaccccgaatcattgtctctgctcagaagcatccatttccccattagggggaacaaaacgtccccccgcgcacacttttctgtcctggaaacatgcttcgataagtcgcaagtccctacaatcgaccaggattatgcatcagcctttgagccaatgaatgaatgggaaaggaacctcgccgagaaagaggacaacgtgaagtcatacatggacatgcagcgacgcgcatcacctgacctgtccacaggctactggaaactttccccaaagcagtataaaattccttgtctcgaggtggacgtaaatgacattgacgtcgtgggccaggatatgctggagatcttgatgacggtgttttccgcctcccagcggattgaactgcacctgaatcattccaggggattcatagagtcgatcaggcccgcccttgagttgtccaaagccagcgttacgaaatgttctattagtaagctagaactgtcagccgccgagcaggagcttttgctgaccctcccgtcgctggaatccttagaagtcagcggcacaatccagtctcaggatcagatatttccaaacttggataaatttctttgtctgaaagaactctcagtggacttggagggcaatatcaatgtattttcggttatcccagaggaattccctaactttcaccacatggagaagctgctgatacaaattagtgctgaatatgatccatctaagctggtaaaattaatacaaaattccccaaacctccacgtgttccatctcaaatgcaatttcttctccgatttcggatctcttatgacaatgctggtgagttgcaaaaaactcaccgaaatcaagtttagcgattcttttttccaggccgtcccctttgtcgcaagcctcccaaattttatctcacttaaaatcctgaatttggagggccagcagttcccagatgaagaaaccagtgaaaagttcgcatatatcttaggcagtctttcaaacctcgaggaactgatactccctacaggggatggcatctaccgggtggctaaactaatcatccaacagtgtcagcagctccattgcttgagggttcttagtttcttcaagacgctaaacgacgactctgttgtggaaatcgcaaaggttgcaatatcgggagggtttcagaaactggaaaatctgaagctttccatcaaccacaaaataacagaggaggggtatcgcaattttttccaggcccttgacaacatgcccaatctgcaggagctcgacatcagcagacacttcaccgagtgcattaaagcccaggcaacgaccgtgaagtccctgagccagtgtgtcctacggctaccacggctcatcagacttaatatgctgtcgtggttacttgacgcggacgatatagcactgttgaatgtcatgaaggagaggcaccctcaatctaaataccttactatcctacagaagtggatactgcccttttccccaatcatccagaagtag

SEQ ID NO: 25323 - DNA, 678 bp, synthetic construct
  misc_feature 1..678: note = Description of Artificial Sequence: Synthetic coding sequence
  source 1..678: mol_type = other DNA
atgctgggcctggacgcctgcgagctgggcgcccagctgctggagctgctgaggctagcactctgcgcgagagtcctcttagctgataaggaagggggccctcccgcagtggacgaagtactggatgaagcagttcctgaatatagagcccccgggcgcaagtccctccttgagatccgacagttggatccagatgatcggagcctcgccaagtataaaagggttctcctcggaccgctgccccctgcagtggatccaagtctccccaatgtgcaggtcacccggctcactttgctgtctgagcaagctccaggacccgtagtgatggatttaacgggtgacctggccgtactgaaagatcaagtctttgtgttaaaggaaggggtggattatcgcgtgaagatctctttcaaggtgcaccgggaaatcgtgagcggcctaaagtgcctgcatcacacatatcggagagggctccgggttgacaagactgtgtacatggttggaagctatggccccagtgctcaggaatacgagttcgtaacccctgtcgaagaagccccaagaggcgctctcgttagaggtccatatttagtggtgtctctattcacagacgacgataggacgcaccatctcagttgggaatggggcctgtgcatctgccaggactggaaggattag

SEQ ID NO: 25324 - DNA, 882 bp, synthetic construct
  misc_feature 1..882: note = Description of Artificial Sequence: Synthetic coding sequence
  source 1..882: mol_type = other DNA
atgcccgcccggagcggcgcccagttctgccggcggatgggccagaagaaacaaaggcctgcacgagccgggcagccccattcctcaagtgatgccgcccaggctcctgcagaacagcctcatagcagcagtgacgccgctcaagctccctgccctcgggaaaggtgcctgggacctcccactactcccggcccgtaccggtctatctatttcagctcacctaaagggcacctcacaagactggggttggagtttttcgaccagcccgcagttcccctggctcgtgccttcctggggcaagtgctcgtgagacggttgccgaatggaaccgaactcagaggccggattgtggaaaccgaggcatacctcggtcccgaggacgaggcggcacattcccgcggtggacggcagacacccagaaataggggcatgtttatgaagccaggcacactctatgtctatataatatacggtatgtacttctgcatgaatattagctcccaaggcgacggtgcttgtgtgctgctgagggccctggaacccctggagggcctggaaactatgaggcagctgcgatccactcttcggaagggcacagcctcaagggtgcttaaggacagggaactatgctctgggccaagcaaactctgtcaggccctggctataaataagtccttcgatcaaagggatctggcacaagatgaggctgtgtggctcgagagaggacctttagagccatccgaaccagcagttgtagcagccgcgcgagtcggggttggacatgctggtgagtgggcgaggaaaccattgaggttttatgtgcgggggtccccttgggtttcagtcgtagacagagtggccgaacaggatacccaggcctag

SEQ ID NO: 25325 - DNA, 846 bp, synthetic construct
  misc_feature 1..846: note = Description of Artificial Sequence: Synthetic coding sequence
  source 1..846: mol_type = other DNA
atgggccagaagaagcagcggcccgcccgggccggccagccccacagctcatcagacgcagcacaggccccagctgagcagcctcatagcagctcagacgccgcacaggccccctgccccagggagcggtgtttaggaccccctaccacacccggcccctaccgctccatatattttagttctcccaaaggccacctcaccaggctggggcttgagttcttcgaccagcccgccgtcccattggccagggcattcctcgggcaggtattggtccggcgcctgcccaacggaactgagcttcggggacgcattgtcgagacagaagcctatctagggccagaggacgaggctgctcactcccgcggcggtagacagacaccacgcaatagagggatgttcatgaagcccgggaccttgtacgtttacatcatttatggcatgtatttttgtatgaacattagctcgcagggagatggtgcatgtgttctgctccgagcgctcgagcccctcgaggggctggagactatgagacaactgcgcagcacactcagaaagggaactgctagtagagtgctgaaagaccgtgagttatgttccggtcccagcaaactgtgtcaagcactggcaatcaataagagtttcgatcagagggacttggcacaggatgaggcagtctggttagagcggggcccgctcgagccatccgagccagcagtggtggccgccgccagagttggggttgggcacgccggggagtgggcgcggaaaccattacgcttctatgtgcgcgggagcccttgggtaagcgttgttgaccgtgttgcggagcaggatacgcaagcgtag

SEQ ID NO: 25326 - DNA, 756 bp, synthetic construct
  misc_feature 1..756: note = Description of Artificial Sequence: Synthetic coding sequence
  source 1..756: mol_type = other DNA
atgggccagaagaagcagcggcccgcccgggccggccagccccacagctcttcggacgctgcacaggctcctgcagaacaaccacactcaagttcggatgcagcacaggcaccctgccctagagaaagatgcctgggaccgcccacaacccctggcccatacaggtctatctatttttccagtcctaagggccacctgacacggctgggtctggagttcttcgaccagcctgcagtcccattggcgagagcattcctggggcaagttctcgtacgacgcctccccaacggaacggaactgagaggccggatcgtggagacagaagcctacctcggacctgaggacgaagccgctcactctcgcggtggccggcagacgccccgcaaccgcggcatgttcatgaagcctggcactctttatgtgtacataatctacggaatgtatttttgcatgaacattagtagccagggcgatggcgcatgcgtactcctacgagcgctggaaccgcttgaaggactggagactatgcggcagctcaggagcacactccgaaaaggcaccgcttccagggtactgaaagaccgtgaactatgttccggaccgagtaagctgtgccaggcactcgccattaataagtcgtttgaccagagagatcttgcacaggatgaggccgtgtggcttgaacgtggaccacttgagccctccgagccggcggtagtggccgctgctcgggtgggagtgggccacgctggctag

SEQ ID NO: 25327 - DNA, 1044 bp, synthetic construct
  misc_feature 1..1044: note = Description of Artificial Sequence: Synthetic coding sequence
  source 1..1044: mol_type = other DNA
atgcacgcccactgcctgcccttcctgctgcacgcctggtgggccctgttgcaggctggggccgccacagttgccaccgccctgctccgtacaaggggccagccgtcttccccatcaccgctcgcctacatgctgtcgctgtatagggatcccttgcctagggccgacatcattcgttccctgcaggccgaggatgtggcggtggatggtcagaactggactttcgctttcgatttcagcttccttagccagcaggaagatttagcttgggccgagcttcgactccagctctcatcacccgtcgacttgcctacagaaggctctctggccattgaaatattccaccaacctaagcccgacacagagcaggctagcgactcttgtctcgagcgatttcagatggatctgtttacggtgactctaagccaagtgacatttagtctggggagcatggtgttggaagtaactaggcccctttccaagtggctcaagcacccgggcgcccttgagaaacagatgtccagagtggccggcgagtgctggcccagaccacctaccccgcccgcaactaatgtgttgctgatgctttattccaatctgtcacaggaacagcggcaattgggcggatctactcttctgtgggaagccgagtcttcatggagggcccaagaagggcagctaagctgggagtggggtaagcgccataggcgacaccacctcccggatcgctctcaattgtgcaggaaagtgaagttccaggtggacttcaacctgatcggatggggttcatggataatttaccccaaacagtataacgcttatagatgcgagggggaatgtcccaatccagttggagaagaattccaccctacaaatcacgcctatatccaatcgttgcttaaaagatatcagccacacagagtaccctccacttgttgtgccccagtgaaaaccaaacccctttctatgctctacgtcgacaatggacgcgtgctgctggaccaccacaaagatatgatcgtggaggagtgtggatgcctgtag

SEQ ID NO: 25328 - DNA, 879 bp, synthetic construct
  misc_feature 1..879: note = Description of Artificial Sequence: Synthetic coding sequence
  source 1..879: mol_type = other DNA
gaccagcagctgggcatccagaccaaggacgtggccgtggacggccagaactggacatttgcgtttgacttctcctttctgagccaacaggaagatctggcctgggcggagctgcgtctgcagctgagttcgccagtggatctgccaaccgaaggctcactggccattgaaatctttcaccagccaaagccagatactgagcaggcttctgacagctgcctcgaaaggttccagatggatctatttacggtcaccctttcacaggtgaccttctctctgggttccatggtcttagaagtaacccgccctctgtcaaaatggctcaaacaccccggggccttggagaagcaaatgtcccgagtcgcaggggagtgttggccacgccccccaactccccccgctacaaacgtgcttttgatgctgtattcgaatctctcacaggagcagcggcagctcggtggatccacattgctgtgggaggcggagagctcatggagggcgcaggaaggtcagcttagttgggaatgggggaagagacaccgtaggcaccatctccccgataggagccaattgtgtagaaaggtgaagttccaagtggacttcaatctcatcggctggggatcttggattatttatcctaaacagtacaatgcttataggtgcgagggtgagtgcccaaaccctgtcggtgaagagttccacccaacaaaccatgcatatatccagtccctgctgaagcgatatcaaccccatcgagttcccagcacttgctgtgctcccgtcaagacaaaacctctgtccatgctatacgttgacaacggcagagtactgctagaccatcataaagacatgatcgtggaggaatgtggatgcctgtag

SEQ ID NO: 25329 - DNA, 534 bp, synthetic construct
  misc_feature 1..534: note = Description of Artificial Sequence: Synthetic coding sequence
  source 1..534: mol_type = other DNA
atggtgctgctgagcaccctgggcatcgtgttccagggcgagggccctcctattagttcatgtgataccggcaccatggctaactgcgagagaacttttatcgctatcaaacctgatggtgttcaacgcggcttagtaggcgaaatcattaagaggttcgagcagaaaggcttccgattggtaggtctcaaatttatgcaggcgagtgaggatttattaaaagaacattatgtggatttgaaggataggcctttcttcgcaggtctggtcaaatatatgcactccggtcccgtcgtcgctatggtctgggaaggcctgaacgtcgtaaaaactggtagggtgatgctgggtgaaactaaccctgcagactccaagcctggaacaatcagaggagacttttgcattcaggtgggcaggaacatcattcatggatcagacagtgtcgaatccgctgagaaagagattgggctgtggttccatcccgaggagttagtggattatactagttgcgcccaaaattggatttacgaatag

SEQ ID NO: 25330 - DNA, 534 bp, synthetic construct
  misc_feature 1..534: note = Description of Artificial Sequence: Synthetic coding sequence
  source 1..534: mol_type = other DNA
atggtgctgctgagcaccctgggcatcgtgttccagggcgagggccctcctatatctagttgtgatacaggaacaatggctaactgcgaacggacctttatcgccataaagcccgatggtgtccagagagggcttgttggagaaattatcaagcgattcgaacaaaaaggattcagactcgtcggactgaaattcatgcaagctagtgaagatcttcttaaagagcattacgtcgacttgaaagacagaccattttttgccggccttgtgaaatacatgcattccgggccagtggttgccatggtttgggagggactcaacgtggtgaaaacgggcagggtaatgctcggagaaacgaatccagcggactcaaagcccggtaccattaggggagatttttgcatccaggtcgggagaaacatcatccacgggagtgattccgtggagtctgcagagaaagagattggactctggtttcaccccgaagaactggtggattacactagttgtgctcagaactggatctatgagtag

SEQ ID NO: 25331 - DNA, 459 bp, synthetic construct
  misc_feature 1..459: note = Description of Artificial Sequence: Synthetic coding sequence
  source 1..459: mol_type = other DNA
atggccaactgcgagcggaccttcatcgccatcaagcccgacggcgtgcaacgcgggctagtgggggagattatcaagcgctttgagcaaaaaggcttcagattagtgggtttgaagttcatgcaggctagcgaagatctactcaaggaacattacgtggatctgaaagataggccattttttgctggtctcgtgaaatatatgcattctggacccgtcgtcgccatggtatgggaaggcttgaacgtggtcaagaccgggagggttatgctaggcgaaacaaaccctgctgatagcaaaccagggacaatacgtggtgatttctgcattcaggtcgggcgcaatatcatccatggtagcgactctgtggaaagcgcagaaaaggagatcggactctggtttcaccctgaggagctggtggactatacgagctgtgcacagaactggatctacgagtag

SEQ ID NO: 25332 - DNA, 183 bp, synthetic construct
  misc_feature 1..183: note = Description of Artificial Sequence: Synthetic coding sequence
  source 1..183: mol_type = other DNA
atggtgctgctgagcaccctgggcatcgtgttccagggcgagggcccgcctattagtagttgcgatactggcacaatggctaattgcgaacggacctttatagccatcaagcctgacggcgtgcagcgaggcttggtaggagaaatcataaaacgatttgagcagaaaggcttccggttatag

SEQ ID NO: 25333 - DNA, 1443 bp, synthetic construct
  misc_feature 1..1443: note = Description of Artificial Sequence: Synthetic coding sequence
  source 1..1443: mol_type = other DNA
atggccaccgtgcccggcctgcagcccctgcccaccctggagcaggacctggagcaagaagagatactgattgtgaaggtcgaagaagatttctgcttagaggaggaacccagtgtcgaaactgaagatccaagtcctgagacattccggcagctgttcagactgttctgctaccaggaagtcgctggacccagagaagccttatctaggttatgggagctctgttgtagatggctccggcccgaactgcggaccaaagagcagattctcgagttactggttctggagcagtttttgaccgtacttcctggcgagattcaagcgagggtacgtgaacagcagccagagagtggcgaagaggcggtggttcttgttgagggcctgcaacggaaaccgcgtaaacacaggcagcgcggaagcgagttactcagtgacgacgaggtccctctaggcattggggggcagttcctcaaacatcaagcagaggcacagccagaggaccttagtctggaggaggaggccagattttccagtcaacagccgcccgctcaactgtcccatcggccccagcgagggccattgctgtggcctgagcggggacctccagccccgcgacaccaggagatggcaagcgcctcaccatttctgtctgcttggagccaggtgccagttaaccttgaggacgtggcagtttaccttagtggcgaggagccacggtgtatggatcctgcgcagcgagatgcacctctggaaaatgaaggcccgggaatccaactggaggacggcggggacgggcgggaggatgcccctcttagaatggagtggtaccgcgtgcttagtgctagatgtcagggacctggacacccattgcctggacagcgccccgccccagtgaggggcctagtgaggcctgatcagcctaggggcggtcctccgcctggcagacgcgccagccacggggcagataagccctatacatgcccagaatgcggcaagggcttctctaagacaagtcatcttaccaaacatcaacgtactcatacaggtgaacggccttataagtgcttagtgtgcggcaaggggttttcagatagatcaaacttctcaacccaccagcgggtgcacactggcgaaaaaccgtacccctgtcccgagtgtggaaaaagattctcacagagcagctccctcgtgatccatcggcgtacgcattccggcgagaggccatatgcttgcacgcaatgcggtaaaagattcaacaattctagccacttcagtgcacatagaaggacacatacaggagaaaagccatacacctgtccagcgtgtggccgagggttcagacgaggcactgacttgcataaacaccagcgtacccatatgggggctggcagcctcccgacacttcagcccgtggcacccggcggccccggtgcgaaggcctag

SEQ ID NO: 25334 - DNA, 588 bp, synthetic construct
  misc_feature 1..588: note = Description of Artificial Sequence: Synthetic coding sequence
  source 1..588: mol_type = other DNA
atgggcggcctgttctggcggagcgccctgcggggcctgcggtgcgggcccagggcaccaggaccatctctgctagtgcggcacggtagtgggctgcctccaagcgccctgaagcgaggtccgagttggacaagggagcggactctggtggcagtgaaaccagacggtgtgcagcgtaggctagtcggggacgtaatccaaaggttcgagcggcggggcttcactcttgtgggaatgaaaatgctccaggcacccgaatccgtgttggccgaacattaccaggacctccgacggaagccattttatcccgcactgataaggtatatgtcatcgggtcctgtggtggcaatggtttgggagggatataacgtggtccgagcgtcaagggcaatgataggtcacacggactccgctgaggccgcccctggaactataaggggcgacttctccgtccacatttcccgaaacgtcatacatgccagtgattccgtcgaaggtgcccaaagagagatccaactttggtttcagtcctcagagctggtgtcctgggctgacggcgggcagcacagcagcattcaccccgcctag

SEQ ID NO: 25335 - DNA, 354 bp, synthetic construct
  misc_feature 1..354: note = Description of Artificial Sequence: Synthetic coding sequence
  source 1..354: mol_type = other DNA
atgaagatgctgcaggcccccgagagcgtgctggccgagcactaccaggatctgaggcggaagcctttctacccagccctgatcagatacatgtctagcgggccagtggtggcgatggtgtgggaggggtataacgttgtccgggccagccgagcaatgatcggacacacagatagtgcagaggccgccccaggtaccatcaggggcgatttctctgtccacattagccgcaatgtgatccacgccagcgactcggttgagggagcccagcgcgaaatccagttgtggttccagagctccgaactcgtttcctgggcagacggtggtcagcattcatccatacaccctgcctag

SEQ ID NO: 25336 - DNA, 510 bp, synthetic construct
  misc_feature 1..510: note = Description of Artificial Sequence: Synthetic coding sequence
  source 1..510: mol_type = other DNA
tgatggcggagcgccctgcggggcctgcggtgcggcccccgggccccaggtccctcactcctcgtgcggcacggcagtggcgggcctagttggacacgagaacgcacactggtcgccgtcaagccagacggcgtgcagaggcggctggtcggagatgtgattcagcgattcgaaaggcggggatttacgcttgttggtatgaaaatgttgcaggcacccgagtccgtactcgccgagcattatcaagacctccggaggaagccgttctatcctgcactgatcagatacatgagttctggacctgtggttgccatggtgtgggaaggctataacgtcgtcagagccagtagagccatgatcggacacactgatagcgctgaggccgccccgggaacaatcagaggtgattttagtgttcatattagtagtcacagactggccccactcgatagaggccagcgtgagcagcagatggtacctggaatccctcagggggcccacgaagcctag

SEQ ID NO: 25337 - DNA, 702 bp, synthetic construct
  misc_feature 1..702: note = Description of Artificial Sequence: Synthetic coding sequence
  source 1..702: mol_type = other DNA
atgggcggcctgttctggcggagcgccctgcggggcctgcggtgcggcccccgggcccctggaccctctcttcttgtgaggcacggcagtggcgggccaagctggactcgggaaagaactttagtggctgtcaagccagatggtgttcagcgacgcctcgtgggtgatgtaatccagcggttcgagcgccggggcttcaccctggtcgggatgaaaatgctgcaagctcccgagagtgtgttggcagaacactatcaggacctgagaagaaaacccttctaccccgctctcattagatatatgtcttctggtccagttgtggccatggtttgggaaggttacaacgttgtccgtgctagtagggccatgattgggcacactgactcggccgaggccgcccccgggactattagaggggatttctctgtccacatttcaagaaatgtcattcatgcgtccgatagcgtggaaggggcgcagcgggagatccagctgtggtttcaaagcagcgaacttagtcccaccggcgctccatggccatccagaagacccacctggagaggcacgactgtttctccacgtactgccacctcttctgcacggacatgttgtggaactaagtggccttcctcacaagaggctgcacttggcctgggaagcggcttgcttcgcttctcctgtgggaccgctgctattcgttag

SEQ ID NO: 25338 - DNA, 354 bp, synthetic construct
  misc_feature 1..354: note = Description of Artificial Sequence: Synthetic coding sequence
  source 1..354: mol_type = other DNA
atgaagatgctgcaggcccccgagagcgtgctggccgagcactaccaggacctcagacgcaaacctttctaccccgctctgatccgatatatgtcctccggccctgtcgtcgcgatggtctgggaaggctacaatgtcgtccgggcatcccgtgccatgattggacacacggactcagccgaggctgctcccggcacaattcgcggcgatttctccgtgcatataagccgcaacgtgatacatgcgtcggactctgtggaaggcgctcagcgtgagatacagctctggttccagagtagcgaacttgtctcgtgggctgatggtggccagcactctagtattcacccagcctag

SEQ ID NO: 25339 - DNA, 114 bp, synthetic construct
  misc_feature 1..114: note = Description of Artificial Sequence: Synthetic coding sequence
  source 1..114: mol_type = other DNA
atgaagatgctgcaggcccccgagagcgtgctggccgagcactaccaggacctgcgtcgcaaacctttctatcccgctctaattcggtatatgtctagcggcccagttgtgtag

SEQ ID NO: 25340 - DNA, 195 bp, synthetic construct
  misc_feature 1..195: note = Description of Artificial Sequence: Synthetic coding sequence
  source 1..195: mol_type = other DNA
atgttcctgcagtactacctgaacgagcagggcgaccgggtgtacacgctgaaaaagttcgaccccatggggcagcagacatgtagcgctcaccctgcccgatttagccccgatgacaagtactcacgacaccgaattaccatcaagaaacgattcaaggtcttaatgacgcagcagcctagacccgtattatag

SEQ ID NO: 25341 - DNA, 7668 bp, synthetic construct
  misc_feature 1..7668: note = Description of Artificial Sequence: Synthetic coding sequence
  source 1..7668: mol_type = other DNA
atgccccccctgctggcccccctgctgtgcctggccctgctgcccgccctagcagctcgcggtccaagatgttcccagccaggcgagacgtgtttaaacggaggtaaatgtgaggccgcaaatgggacagaggcctgtgtgtgcggcggtgcgttcgtcggaccacggtgccaggacccaaacccctgtttaagcacaccatgtaaaaacgccggtacctgtcacgtggtggataggcgcggggtcgccgattatgcatgtagctgtgctctcggcttctccggaccattatgccttactccacttgataacgcctgcctgacgaatccgtgcaggaatggaggtacttgcgacctccttacactgacggagtataagtgccgatgtccacctggctggtccggcaaatcctgccagcaggcagatccctgtgctagcaacccgtgcgctaacggtgggcagtgtctcccctttgaggcctcatatatctgccactgtcctccaagttttcatggcccaacgtgtaggcaagatgttaacgagtgtggccagaaaccgggactgtgtagacatggcgggacctgccacaacgaagtagggtcttaccgctgcgtgtgccgggcaactcacacaggtcctaactgtgaaaggccctacgtgccgtgcagcccgtccccttgtcagaatggcggaacctgcaggccgaccggggatgtaactcacgaatgcgcatgcctaccgggctttacaggccagaactgtgaggaaaatatagatgattgtcctggcaacaattgtaaaaacgggggcgcctgcgttgacggcgtgaacacatataattgcagatgcccacccgagtggactggacagtattgtaccgaagacgttgacgagtgccagctgatgccaaatgcttgccagaatggagggacttgtcacaatacccatgggggttacaattgtgtatgcgtcaacggatggaccggggaagattgtagcgaaaatatcgacgactgtgcaagcgccgcctgctttcacggggccacatgccacgacagagtggctagcttttattgtgagtgcccgcatggacggaccgggctcctctgtcatctgaatgatgcgtgcatttcaaacccttgcaacgaaggatccaattgtgacacaaaccccgtgaacggtaaggctatttgtacctgtccctctgggtacacggggccagcgtgcagccaagacgtagatgagtgctccctgggcgcgaatccttgtgagcacgctggcaagtgtataaatacactggggtcatttgagtgccaatgcctccaggggtacacaggacctcggtgtgaaattgatgtaaacgaatgtgtaagtaacccctgccaaaacgatgctacctgtctcgaccagatcggcgaattccaatgtatttgtatgccaggatatgaaggcgtgcactgcgaagtgaacactgacgaatgcgcctcaagcccttgccttcataacggaaggtgcctagataagatcaatgagtttcaatgtgagtgtcctacaggcttcaccggacacctatgtcagtacgatgtggatgaatgtgccagcacaccatgtaaaaatggagcgaagtgtctggacgggccgaatacttatacatgtgtctgcaccgagggatacacagggacacattgcgaagtggacattgatgaatgtgatcctgacccgtgccactatggttcttgcaaggacggagtcgctacttttacttgcctgtgtcggccagggtacacaggacaccactgcgagacaaatataaacgagtgctcaagccaaccatgccggcacggagggacatgtcaagatcgggacaacgcttacctgtgcttttgtcttaaagggaccactgggcctaattgcgaaattaaccttgacgactgcgcatcttcgccatgtgatagcgggacgtgcctggacaagatagatggctatgagtgtgcctgcgagccaggttacacagggagtatgtgcaacatcaatatcgacgaatgtgctggaaacccgtgtcacaatggggggacatgcgaggacggcatcaacggctttacgtgcagatgccccgagggataccacgatcccacctgtctaagcgaggtcaacgaatgtaactctaatccctgcgttcacggggcttgtcgtgatagtctgaacggatacaaatgtgattgtgatcccggatggtctggaactaactgtgacatcaacaataacgaatgcgagagtaatccctgtgtgaatgggggaacatgcaaggacatgacgagcgggtatgtgtgcacatgccgcgagggattctctggcccaaattgccaaaccaatataaatgagtgcgccagtaatccctgtctcaatcagggcacatgcattgacgatgtcgccggatacaagtgtaactgccttcttccgtatactggcgcaacgtgcgaggtggtgctcgctccttgcgcgccctctccctgccgaaacggaggagagtgtcgtcaatcagaagattatgagtctttctcttgtgtgtgccccacaggctggcaaggccagacctgcgaggttgatatcaatgaatgcgtgcttagcccctgcagacatggcgcctcatgccaaaacacccatggagggtacaggtgccactgccaagctggttactcaggacggaattgtgaaacggacatcgacgattgcagacccaacccctgtcataacggcggaagttgtaccgacggcatcaatacggccttttgcgattgcctgcctgggttccgaggcactttctgtgaggaggatatcaacgaatgcgccagcgatccttgtaggaatggagcgaattgcaccgattgcgtagactcttacacatgcacctgtcctgcgggctttagtgggatccactgtgagaataacactccggactgtactgagtccagttgttttaacgggggaacatgcgttgatgggatcaactcattcacctgtctttgcccacctggtttcacaggctcctattgtcagcatgatgtgaacgaatgtgactctcagccctgcctacatgggggcacgtgtcaagatggttgcggcagctacagatgcacttgcccacagggctacacgggcccaaactgccagaacctagtgcactggtgtgatagctctccatgcaagaatggtggaaaatgctggcagacacacactcagtaccgttgcgagtgccccagcggctggaccgggctgtactgtgatgtgcccagcgtgtcctgtgaggtggccgcccaaaggcagggtgtggacgtcgcccggctgtgtcagcatggaggcctctgcgtggacgccgggaatacacaccactgcagatgtcaggccggctacaccggctcctactgtgaagacttggttgatgagtgttccccatccccatgccagaatggtgccacctgtaccgattatctggggggatattcctgtaagtgcgtggcagggtatcacggggttaattgcagtgaggagattgatgaatgtcttagtcatccctgccagaatggaggaacttgcttggatctgccaaacacatacaagtgtagttgtccacgcggaacccagggagtgcattgcgaaattaatgtggatgactgcaatcccccggtggaccccgttagccgctcgcctaagtgctttaataacggtacttgcgtcgatcaggttggtggttactcatgtacttgtccccccggtttcgtgggggagaggtgcgagggcgacgtgaacgagtgcctgtcgaatccgtgcgatgccagggggactcagaactgtgtgcagcgggtcaatgattttcattgtgaatgcagagccggacacactgggcgccgttgcgagtctgtgatcaacgggtgcaaggggaaaccttgcaagaatggcggcacttgcgctgtggccagtaacacggcccggggttttatttgtaagtgcccagctggctttgaaggagccacttgtgaaaacgacgcgcgcacctgtggctccctaaggtgcctaaacggcggaacatgcatcagcgggccccgcagtcccacatgtttatgcctgggaccgtttaccggaccggagtgtcaattcccagccagtagcccttgtctggggggcaatccctgttataaccagggaacatgcgagcccactagcgaatcccccttttaccgatgcttgtgtcctgctaagtttaacgggttgctgtgtcacatcctggactactcatttggaggtggcgcaggaagggatatacccccaccgctcatcgaggaggcttgcgaactcccggaatgccaggaggatgctggcaataaagtgtgttccctgcagtgtaacaaccacgcttgcggttgggacggcggcgactgttccctgaacttcaatgatccctggaagaattgcacccaatccctacagtgctggaagtactttagcgatggtcactgtgacagccagtgcaactcggccgggtgtctattcgatggcttcgattgtcagcgggcggaggggcagtgcaatccactctacgaccagtactgcaaggaccacttcagtgatggccattgcgatcaagggtgcaattcagctgagtgcgagtgggacggcttagactgcgctgagcacgtgccagagcgtctagcagcaggaacccttgttgttgtggtcttgatgcccccagaacagctgcggaactcaagctttcatttcctcagagagttgagcagggtcctgcatactaacgtcgtatttaagcgggacgctcacgggcagcagatgattttcccttactacgggcgtgaggaggagctccggaaacatcccatcaagagagctgctgagggatgggctgccccagatgcattattggggcaggttaaagctagtctcctaccaggtggcagtgagggcggccgtagacgtcgcgagctcgatcctatggacgttcgtggctccatcgtttatctggagattgacaatcgccaatgtgttcaggccagcagccagtgctttcagtctgccactgatgtggccgctttcctgggtgcactggcctctttaggttctcttaatatcccctataaaatagaggccgtgcaaagcgagacagttgaaccaccccctcctgcccagttgcatttcatgtacgttgccgctgctgcctttgttctattatttttcgttggctgtggcgtacttctatctcgcaaaagaagacggcagcacgggcagctctggtttcctgagggctttaaagtgtccgaggcatcaaagaaaaagagacgcgaacccctaggcgaggattccgttgggctgaagccactgaaaaacgcatctgatggtgccttgatggacgacaatcaaaatgagtggggcgatgaggacttagagaccaagaagtttcggtttgaggaaccagtagtccttccggacctagatgatcaaactgaccacaggcagtggacccagcagcacctcgatgccgccgacctgaggatgtctgctatggctcctacccctccacaaggcgaagtggacgcagactgtatggatgtgaatgtgaggggtcccgatgggttcacccccctgatgatagcttcatgcagcggggggggactcgagaccggcaactccgaagaggaagaagatgctcccgctgtaatctcagactttatctaccagggcgcctctctgcacaatcaaaccgatcgtaccggggagacggccttgcatctggccgctcgatatagtagaagcgatgctgccaagcggcttttggaagcgtcggccgacgccaacatacaggacaatatgggacgaacaccgctgcatgccgctgtctcagccgacgcacagggagtcttccagatcctcatccgtaaccgggctactgacctagatgctaggatgcatgacggaaccaccccactgatcttggccgcaagacttgcagtagagggcatgctggaagacctcatcaattcccatgcggacgtcaacgcagtcgatgatcttggcaaatcagcgctgcactgggccgccgcggttaacaacgtggacgctgcagtggtcttactgaaaaatggagctaacaaggatatgcagaacaacagggaagaaaccccactgtttttggccgcacgagaaggctcttatgagactgccaaagtgctgctggatcacttcgctaatagagatatcactgaccacatggacaggctcccacgcgatatcgcgcaggaacggatgcatcatgatattgtgagacttcttgacgagtataatcttgtccggtcaccacagctccatggagcccccttgggcggaactccaaccttgtcacccccactgtgctctcccaacggctatctcggcagtctgaagcctggggttcagggtaagaaggtccgcaagccatctagtaaaggtctggcgtgtggtagcaaggaagctaaagatctcaaggcccgcaggaaaaagagccaggacggtaaaggctgcctcctagattctagcggcatgctgtctccagtcgattctctcgagtctccacatggttatctgtcagatgtcgcatccccacccttgcttccatcaccttttcagcagagcccttcagtcccacttaatcacctcccaggtatgcctgatacgcatttagggatcggacacctgaacgttgccgccaagcctgagatggctgcactagggggggggggacgcttagcgtttgagacaggccctccaaggttgtcacacttaccagtggcttctggaacatctaccgtcctcggctcatcttcgggcggagccctgaatttcacggtcggcgggtctaccagcctgaacggccagtgtgagtggctgtctcgcttacagtcaggaatggttccgaatcagtataatccccttcgcgggtcagtggcccccggacctctatcaacacaggctccatctctgcaacacggcatggtggggcctttacattcctcactggctgcaagcgccctatcacagatgatgtcctaccagggcctgcccagcacgagactggccacacaaccacatctggtccagacccaacaggtacagccgcagaatctgcagatgcagcagcagaacctgcagccagctaacatccagcagcagcagtccctgcaaccacccccaccaccgccacagcctcatctgggagtttcgtctgctgccagcggtcatttgggtcggtcgtttctctccggggaaccctcacaagcggacgtccagcctctcggacccagctccctagctgtacatactatcctcccgcaggagtctcctgccctaccgacctccctcccaagctccctggtcccgcctgttacggctgcacaattcctcacgccacccagtcaacattcgtactcttcacccgtggataataccccttcacatcagttgcaggttccagaacaccctttcctcacgccttccccagagagcccagatcaatggagtagttcctcaccacactctaacgtctcggactggagcgagggtgtctcttcccctcctacatctatgcagtcacagatagcacgaatccccgaggcctttaagtag

SEQ ID NO: 25342 - DNA, 6012 bp, synthetic construct
  misc_feature 1..6012: note = Description of Artificial Sequence: Synthetic coding sequence
  source 1..6012: mol_type = other DNA
atgcagccccccagcctgctgctgctgctgctgctgctgctgctgctttgtgtcagcgttgtgagaccacgcgggcttctgtgcggatcattccctgagccatgtgccaacggcggcacctgcctgagtctcagcctcggtcagggtacttgtcagtgcgccccaggctttctgggggagacatgtcagtttccagacccgtgccaaaacgcccaattatgccaaaatggcggaagctgtcaagccctgctgcctgcccccctggggctccctagcagcccaagcccgctgacaccttcttttctgtgcacctgtctccccgggtttacaggagaacgctgccaggccaagcttgaggacccatgcccgcccagcttctgcagtaagcgcgggagatgccacattcaggccagtggaaggccccagtgcagctgtatgcccggctggacaggtgagcagtgccagcttagggacttttgctctgccaatccttgtgtgaacggtggggtgtgtctcgcaacctacccacagatacagtgccattgccccccggggtttgaggggcatgcttgtgagagagatgtgaatgagtgcttccaggaccctggaccctgccccaagggaacttcctgtcacaatactctgggctcttttcagtgtttatgtccagtggggcaagagggaccccggtgcgaattgagagctggtccgtgccccccaaggggctgctcgaacggtgggacctgtcagctgatgcccgagaaagattccacatttcacctgtgcctgtgccctcccggattcatcggccccgactgcgaagtgaacccagataattgcgtgtctcaccaatgccaaaacggcggaacctgtcaggacggtcttgatacctatacatgcctctgcccagaaacatggacagggtgggattgttctgaagatgtggatgagtgcgagactcagggcccaccacattgccgaaatggaggtacctgccagaacagcgccggctccttccattgcgtctgcgtgagcgggtggggaggaacctcctgcgaagaaaatctcgacgactgtattgccgcaacttgtgcccccggctccacatgcattgatagagtcggcagcttctcttgtctttgtcctcctgggagaactggcttgctgtgtcacctggaggacatgtgcctaagccagccttgtcacggtgacgcccagtgctctacgaacccgctaacaggctctacactgtgtctgtgccagccgggttactctggccccacttgtcatcaagacctggatgaatgtctgatggcgcagcagggcccctccccgtgcgagcatggcggatcgtgtctcaacacaccaggttcatttaattgtctgtgcccacctggttacacaggcagccgttgtgaagccgaccacaatgagtgcctttcacaaccatgtcacccagggtccacctgtctagaccttctggctacctttcactgtttgtgtccccctggcctcgaaggtcagctctgtgaagtggaaaccaatgagtgcgcttcagccccatgtctcaaccatgccgactgtcacgatcttctgaatggctttcagtgtatctgtctgcctggtttcagcggaactagatgcgaagaagacatcgatgaatgtagaagctcaccatgcgcgaatgggggccaatgccaggaccagccgggtgcttttcactgtaaatgcctgccagggttcgaaggcccccgctgtcagaccgaggtggacgagtgcctgagcgacccgtgccccgtgggtgcttcatgtctcgatctgcccggagcctttttttgcttgtgcccatccggatttactggacaactctgtgaggtccctctgtgtgcgcccaacttgtgccagcctaaacagatttgcaaggaccagaaagacaaagcaaactgcttatgccccgatgggtcccccggctgcgctcctcctgaggataattgtacttgtcaccacgggcattgtcagagatcgtcatgcgtctgtgacgtgggctggacaggtcccgagtgtgaagccgaactgggcgggtgtatcagcgcaccatgcgcgcacggcggaacttgctacccacagccgagcggatacaactgcacttgtccgacaggatacacaggacccacatgctcggaagaaatgacggcttgtcactctggaccatgtctcaatggcggttcctgtaacccaagccccggaggttattactgcacctgcccaccaagccacaccggccctcagtgtcaaacaagtaccgattattgcgtgagcgcaccttgcttcaacggaggaacatgcgtgaatcgcccaggtactttctcatgtctgtgtgccatgggctttcaggggccccggtgtgagggtaagttaagacctagttgcgccgattccccttgtagaaaccgcgccacttgccaggatagtccccaggggcccaggtgtctctgtccgacagtgtacactggggggtcatgtcagactttgatggacctctgcgcccagaagccatgcccaagaaactctcactgcctccagacagggccgagtttccattgtttatgcctgcaagggtggaccggtccgctgtgcaatttacccctttcctcctgccaaaaagccgccctctcccaagggattgatgtgtcatcactgtgccacaacgggggactctgtgtggactcggggccatcctacttttgtcactgccctcctggctttcaagggagtctgtgccaagatcatgtcaatccttgtgaatcaaggccctgtcagaatggagccacctgcatggcacaaccctcaggctacctgtgccagtgcgccccaggctacgatgggcagaattgttccaaggagctggatgcctgccagtcccaaccttgccacaatcatggaacttgtactcccaagccaggtggttttcattgtgcttgccctcctggttttgtagggctgcggtgtgaaggagatgttgacgagtgcttagaccaaccttgtcaccccactgggactgcagcttgtcacagcttggccaatgccttctattgccaatgcctgccagggcatacaggtcagtggtgcgaagtggagattgacccttgtcattctcagccctgcttccatggaggtacctgcgaggcgacagccggctctccactcggattcatctgtcattgccccaagggattcgagggtccgacctgtagccaccgcgctcctagctgtggctttcatcactgccaccatggagggttatgtctcccatctcctaagcctggattccccccacgttgcgcatgtctgagtgggtacggggggcctgattgcctcacacccccagcgccaaagggttgcgggccaccaagcccttgcctgtacaacgggagctgttccgagaccacaggcctgggcggcccagggtttaggtgctcgtgccctcattcgagtcctggcccccgatgtcagaagccaggcgctaagggctgcgagggccggtcaggggacggagcctgcgatgcgggttgctccggtccaggcggcaactgggacggaggcgattgcagccttggcgtgcctgacccctggaaggggtgcccatctcactcaagatgctggctcctctttcgcgacggccagtgccacccccagtgcgattcagaggagtgcctctttgatgggtatgactgcgagacccctcccgcttgtaccccagcctatgatcagtactgccacgatcattttcacaacggacactgtgagaaaggctgtaataccgctgagtgcggctgggatggcggagattgtcgccccgaggacggcgaccctgaatgggggcccagcttggccctgcttgtagtgctttctccacccgcgctggaccaacagttgtttgccctcgcccgcgtcctaagtctaactctgcgcgtaggcctgtgggtccgcaaagacagagacggacgcgatatggtgtatccttacccgggggctcgggcagaggaaaaactagggggaaccagggaccccacctaccaggagagggctgccccacagacccagcccctgggcaaggaaactgattccttgtcagccggttttgtggttgtgatgggcgtggacctttctagatgcggcccagatcacccagcttcaagatgtccatgggatccaggcctcctgctgcgttttctcgctgcaatggccgcagtcggcgccctcgaacctttactgccagggcctctcctagccgtgcatccccacgcaggaaccgctccacccgctaaccagcttccttggccagtcctttgttcaccggtggctggggttattttgcttgcgttaggtgccttgctggtgctgcaactgattcgaagacggcggagggagcacggggctctttggctgcctcccggattcactcggcgtccccgcacacagtctgcccctcacaggaggaggcctcccctgggcgaagattccatcgggttaaaggccctgaagcctaaggcggaggtggacgaggacggagtggtgatgtgcagcggacctgaagagggcgaggaggtggggcaggccgaagagacaggccctccttcaacctgccagctttggtcactgtcggggggatgtggagctctccctcaagcagccatgttgactccgccacaggagagcgaaatggaggccccggacttagacacccgaggtcctgacggcgtcacgcctctgatgagcgcagtgtgctgtggggaagtccagtcaggcacctttcagggcgcctggttggggtgccctgagccttgggagcccctccttgacggcggtgcctgtcctcaggcacacaccgtcggaaccggcgaaacccccctccacctggcagctcgcttctcacggccaacggccgctcgaagactcctggaagctggcgcaaatccaaatcagcccgatcgagccggacggaccccactgcacgccgcagtcgcagcagacgcaagagaagtgtgtcagctgctgttgcgatccaggcagacagccgtagatgcccggacagaggacggaacaacaccactgatgctggctgctaggctcgccgtcgaagatttggtcgaggaattgatagccgctcaggccgatgtgggcgccagagacaaatggggaaagacagccctccactgggccgcagctgtcaataatgcacgagcagctagaagcctactgcaggcaggtgctgacaaggacgctcaggataacagagagcagacgcctcttttcttggccgcgcgcgagggcgccgtggaggtcgcccagctcctgctgggcctgggcgcggccagggagctacgcgaccaggctggtctggcacctgcagacgtcgctcatcagaggaaccactgggacctgctgactctcttggaaggcgccggcccccctgaggcccgtcacaaggcaactcccggtagagaggctggccctttcccccgagcccgaaccgtctcagtgtcggtccccccccacggtggaggtgccttacccaggtgcagaactctctctgcaggggcgggacctaggggtgggggggcgtgcctgcaagcacgaacgtggagcgtcgacctggctgcccgcggggggggggcatatagccactgtcgctcgctcagcggcgtgggggccggaggaggaccaacaccacgcggaaggaggttctccgctggcatgcgtggcccacggcccaaccccgccattatgaggggaagatatggcgttgccgccgggcggggaggaagagtctccaccgatgattggccatgcgactgggtggcactgggcgcctgcgggtccgcttctaatatacccatccctcctccctgtctcacgccatcccccgaacgaggaagtccacaactagattgcgggccgccggctttgcaggaaatgccaattaatcagggcggcgaggggaagaaatag

SEQ ID NO: 25343 - DNA, 561 bp, synthetic construct
  misc_feature 1..561: note = Description of Artificial Sequence: Synthetic coding sequence
  source 1..561: mol_type = other DNA
atgagcgccgtgtgctgcggcgaggtgcagagcggcaccttccagggggcatggctgggatgtcctgagccatgggagcccctgctggatggcggggcctgcccgcaggctcacaccgtcggcactggagagacccctctgcaccttgctgcccggttttctcggcccaccgctgcacggcggctgctggaagccggagccaatcccaatcaaccagaccgtgcgggtcgcacacctctacacgctgccgtcgcggcagacgctagggaggtgtgtcagttattactgcgatctcgtcagacagctgtggatgccaggacagaagacggcactaccccactgatgctcgccgccagactggccgttgaagacttagtagaggagctgatagctgcccaggccgatgtgggcgcgcgggacaagtggggcgcagacgcggccatccctggaggcgcggggagaagtggggggtcctcaccagccacagcaggcgcaggtgggtccccacgagcagccggacccggctgggcctcagcaggtgggagaagaagcccaacttag

SEQ ID NO: 25344 - DNA, 1734 bp, synthetic construct
  misc_feature 1..1734: note = Description of Artificial Sequence: Synthetic coding sequence
  source 1..1734: mol_type = other DNA
atgcactggctgcggaaggtgcagggcctgtgcaccctgtggggcacacaaatgagtagtcgcactctttacatcaatagccgccagctggtatcgctccagtggggacatcaggaggtccccgcgaagttcaatttcgctagcgatgttctggaccactgggcggacatggagaaggccgggaagcgcttgccttcgccagctctgtggtgggtgaacggtaaagggaaggagctgatgtggaactttagagagctctcagaaaacagccagcaggccgctaacgtactgagcggtgcctgcggactgcagcgcggagatcgtgtcgccgtggtactaccacgagtgccagaatggtggctagtcattctggggtgtattcgggcaggattgatctttatgccaggcactatacagatgaagtctacggacatcctgtacaggctgcagatgagcaaagcaaaggctatagtggccggcgacgaggtcatacaagaggttgatacggtggcctcggagtgtccctccctacggattaagttgctcgtgtcagagaaatcttgcgatggctggctgaactttaaaaagctgttgaacgaggcaagtactactcaccattgcgtggagactggctcacaggaagcgagtgccatctactttacatcagggacctctggcctgcctaaaatggccgaacacagctactcatcactgggactcaaggcaaagatggatgcggggtggaccggtctgcaggccagtgacataatgtggaccatctcagataccgggtggatactgaacatcttgtgttctctcatggagccatgggccctgggtgcatgtacttttgtgcaccttctcccaaaatttgatcccctagtcatcctcaaaaccctgagctcctatccaattaaaagtatgatgggagcaccgatcgtgtacaggatgctcttgcagcaggaccttagctcttacaaatttccgcacctgcagaactgtgttaccgtcggggaatcactgctgcctgaaacactggaaaattggagggcacagactggcctggatatacgcgagtcttacggacagacagaaactggtctgacgtgtatggtgtccaagacaatgaagattaaacccggatacatgggaactgcggcatcctgttacgatgtgcaaatcatcgacgataagggtaatgtgctccctccagggacagaaggggatattgggatccgggtgaaacctatcaggccaatcggtatattctcagggtacgtggacaaccccgataaaaccgcagccaacatacgcggagatttctggctactgggcgatagaggaatcaaggacgaagacgggtatttccaattcatgggcagggccaatgatatcattaactcttcagggtatcgcattgggccttccgaagtggaaaatgctctcatggagcaccccgccgtcgttgaaacggccgtcattagctcccccgaccccgttaggggagaggtggtcaaggcattcgtggtgttggcgagtcagttcctctctcacgaccccgagcagctcactaaagaactacagcaacatgtcaaatcggttaccgccccgtacaagtatccccgtaaaatcgagttcgtccttaacctcccaaaaactgttaccggtaagatccagcgagcgaaattaagggacaaagagtggaaaatgagcggaaaggcccgggctcaatag

SEQ ID NO: 25345 - DNA, 4368 bp, synthetic construct
  misc_feature 1..4368: note = Description of Artificial Sequence: Synthetic coding sequence
  source 1..4368: mol_type = other DNA
atgggcggcgcctgcagcagcttcaccaccagcagcagccccaccatttactccacctctgtaaccgatagcaaagcgatgcaggttgagtcttgctcaagcgccgtaggagtaagtaaccgtggagtcagtgaaaaacaactgacctcgaatacagtgcagcagcatccctccacacccaagaggcatactgtgctgtatatctcccccccccccgaagacctcttagataactcccgaatgagttgtcaggacgaaggctgtggactcgagagcgagcagagttgtagcatgtggatggaagactcacccagcaatttttctaatatgtccactagttcctacaacgataatacagaggttcctaggaaatcgcggaagcgtaaccccaaacagaggcctggagttaaaagaagagactgcgaggagagtaatatggacatctttgacgcagattccgctaaagcacctcattatgtcctctctcagctgaccactgacaacaagggaaactcaaaggccgggaacggaaccctggaaaaccaaaagggtacaggggttaagaagagcccaatgctgtgtggtcagtatccagtgaagtcggagggtaaagagcttaaaattgtggtgcaacctgaaactcagcatagggctagatacctgactgagggaagtcgcggttctgtcaaggatagaacccaacagggctttcccacagttaaactcgaaggccacaacgaacctgtggtccttcaggttttcgttggaaacgactctggcagagttaagccccatggtttttatcaggcctgcagggtcaccggaagaaataccacaccctgtaaggaagtggacattgaagggacaactgttattgaggttggcttggaccccagtaacaacatgactctggccgtggactgcgtgggcattcttaagctgaggaacgctgacgtcgaagcacgtatcgggatcgcaggctccaaaaagaaaagtactcgcgcccgcctcgtctttagagtaaacataatgcggaaagacggatcaacactgaccttgcagacccctagctctccaatcctgtgcactcagcctgccggggtacctgaaattctcaaaaagtctctgcatagctgctcagtcaaaggtgaggaggaggtgtttctgataggaaagaacttccttaagggaaccaaggttattttccaagaaaatgtctccgatgaaaattcctggaagagcgaggccgaaattgatatggagttattccatcagaaccacctaatcgtgaaagttccaccttaccacgaccaacacatcactctgcctgtctcagttggcatttacgttgtcaccaacgccggtagaagccatgatgtgcagccattcacctacacacctgatcctgccgcagccggggccctaaatgtgaacgtaaagaaggaaatttccagccctgctagaccttgctctttcgaggaggcaatgaaggccatgaagaccaccgggtgcaacctggacaaagtgaacattatcccaaatgctctgatgacacccttaattccctcgtcaatgatcaagagtgaggatgtcaccccgatggaagtcacggcggagaaacggtcttcgactattttcaagactaccaagtcggtcgggtcaactcagcaaacgctggagaacatatccaatattgccggtaacggcagcttctcatctccgtctagttcacaccttccctcagagaacgagaagcagcagcagatccaacctaaagcttacaatcctgagactctgacaactatccagacacaggacatatctcagcccggcacttttccggctgttagtgccagcagccagctccccaactcagacgcactacttcagcaggccacccagtttcaaactagagagacgcagtcacgggaaatactacagtcagacggtacagtggtgaatttatcccaactgacggaggcgtcccaacagcaacaacagtcgccacttcaggagcaggcccagaccctacagcagcagatcagctcaaacatttttccgagccccaactcagtgtcccagctccaaaatactattcagcagctccaggctggctcttttactggcagtaccgcctcaggctctagcgggagcgtagaccttgtgcaacaggtacttgaggctcaacagcaactgtctagcgttctcttcagtgctcctgacggaaacgagaacgtccaggaacagctttccgctgacattttccagcaggttagtcaaatccaatctggcgtgtctccaggaatgttcagcagtaccgagccgactgtgcacactcggcctgacaacttactgcccgggcgtgctgagagtgtgcacccccagtctgagaacaccttgagcaatcagcagcagcagcagcagcagcagcagcaagtgatggagtcatcagcggcaatggtgatggaaatgcagcaatctatatgtcaagctgcggcccagattcagtccgagctgtttccctcaactgcatcagcgaatggaaacttacagcagtcccccgtgtatcagcagacttcgcacatgatgtctgctctgagtacaaacgaagatatgcagatgcagtgcgagctgttctcctccccaccagctgtctccggcaatgaaacaagcacaactacaacccagcaggtggcaacccccggaacaaccatgtttcagacatcaagctctggcgatggcgaggagacagggacacaggcgaagcagatccagaacagcgtttttcagaccatggtccagatgcagcacagtggcgacaaccaacctcaagtgaatctgttttcttctactaaatcgatgatgtcggtgcagaattcagggacacagcagcaggggaacggactcttccagcagggtaacgaaatgatgtccctgcaatctgggaactttctgcaacaatcatctcacagccaggcacagctgttccacccgcaaaaccctattgctgacgcacagaacctatctcaggaaacacagggtagtctgttccatagtccaaatccaattgtccacagccagacctctaccaccagcagcgaacagatgcaaccacctatgtttcatagccagtcaacaatcgctgtgctccaggggagcagtgttccccaagatcagcagtccacaaacatcttcctctcacaatcacctatgaacaacctacagacgaataccgtcgcccaggaagccttcttcgcagctccaaactctatatccccgctgcagtccacctccaactctgagcaacaggctgcctttcagcagcaggcacccatttctcacattcagacccctatgctttcccaggagcaagcgcagcccccccagcagggtttattccagccccaagtggcactcggctccctgccccctaatcccatgcctcagagccaacaaggaacaatgttccagagtcaacacagcatcgttgctatgcagtcaaacagtccgagtcaagaacaacagcaacagcagcagcaacagcagcagcagcagcaacagcagcaacagagcatccttttcagtaatcagaacacaatggcgacgatggcatctccaaagcagccccctccgaacatgattttcaaccccaatcagaaccccatggccaatcaggagcagcagaatcagagcatcttccaccagcagtcaaatatggctccgatgaatcaggagcaacaaccaatgcaattccagtctcagtctaccgtgtcatcccttcagaatcccggaccaacccagagcgagtctagccagactccgctcttccattctagccctcaaattcagctggtgcaggggagtcctagcagtcaagagcagcaggttactctgttcctaagcccagccagcatgtccgctttacagacttccatcaaccagcaggacatgcagcagtcccccctgtatagtccccagaacaatatgccaggaatacagggtgccacgagcagcccgcaaccccaagctacactttttcacaacactgcaggcgggactatgaaccagctgcagaattccccaggatctagccaacagaccagtggtatgttcttgttcggcatccagaacaattgcagccagctgttaacttcggggcccgccacactcccagaccagctcatggccattagccagcccggccagccccagaacgaaggccagcctcctgttacaaccctgctctctcagcagatgcccgagaatagtcctttagccagtagtatcaacactaatcagaatatcgaaaaaatagacctgctggtgtcactccagaaccaaggtaacaatctgaccggctccttctag

SEQ ID NO: 25346 - DNA, 4647 bp, synthetic construct
  misc_feature 1..4647: note = Description of Artificial Sequence: Synthetic coding sequence
  source 1..4647: mol_type = other DNA
atgcccagcgacttcatcagcctgctgagcgccgacctggacctggagagcccaaaatcactctattctagggacagcctgaagctgcacccaagccagaatttccacagagctggcctgttggaagagtctgtgtacgacctcctgcctaaggagttacagctgccccccagccgagaaactagcgtggcctcaatgagccagacgtctggcggcgaagccggttcgcctccacccgctgtagtggcagccgatgcatctagtgcaccaagctcatcctctatgggtggcgcatgttcctctttcactacaagctcatcccccaccatatacagtacatcagtcacggacagcaaagcaatgcaagtagagtcgtgctccagtgcagtcggggtgtcaaatcgtggagtttcggagaaacagctaacttctaatacagttcaacagcacccttcaacgcctaagaggcatactgtgctgtacatcagtccacctcctgaggatctgctggataattcccgcatgagctgtcaagatgagggatgcggtcttgaaagtgaacaatcatgcagcatgtggatggaagactctccctctaatttcagcaatatgtcaactagctcctacaatgacaacacagaagtacccaggaagagtcgaaaacggaaccccaaacagaggcccggggtgaagcggcgcgactgtgaagaatcaaatatggatattttcgacgcagatagtgcaaaggctcctcactatgtgctgtctcaactgacaactgataacaaggggaattctaaggcgggcaacggcactctggaaaaccagaagggcaccggtgtcaaaaaatctccaatgctgtgtggacaatatcccgtgaagagcgaagggaaagaactgaagattgtggtccagcctgaaacccagcatcgtgctcgctacctcacagagggctcacgtgggtcagtgaaagacaggacccagcagggctttcctacagttaagcttgaaggtcacaacgagcctgtagtgctccaagtgttcgtgggcaacgattccggtcgggtgaagcctcacggtttttatcaggcctgtcgcgttactggtcggaataccacaccatgcaaagaggtggacatcgaaggcactaccgtgattgaggttggactggatccatctaacaacatgactttggcggtggattgcgtcggaattttaaaacttagaaatgcagatgtcgaagctcgcataggcatcgccggctccaagaagaaatccacccgcgcccgcctggtgtttagagtgaacatcatgaggaaagatggctctaccctcacgcttcagacgccgtcttctcccattttgtgtacccaacccgcaggggtacctgagatcttgaaaaagtctctacacagttgctcggtgaagggcgaagaagaggtgtttttgattgggaagaacttcctcaagggcacaaaggttatattccaggagaacgtcagcgatgaaaatagttggaagagtgaagctgaaattgatatggagctcttccaccagaaccacctgatcgtaaaggtgcccccataccacgaccagcacattacccttccggtgtcagtgggtatttatgtagttacaaatgcaggcagaagtcacgacgtgcaacctttcacatacacccctgatccagccgcaggggcccttaacgtgaacgtgaagaaggaaatatcttctcccgcgagaccttgctccttcgaggaggccatgaaagctatgaagaccaccggctgtaacctggacaaggtcaatatcattccaaacgcactgatgactccgctcatcccgtcctccatgatcaaaagtgaggacgtgacccctatggaagtcaccgccgaaaaacggtcttctactattttcaaaaccaccaagtcagtggggtctactcagcagactcttgaaaatattagcaatatagccggtaacggatccttctcatccccctcaagttctcacttgccgtcagagaatgaaaagcagcagcaaatccagcccaaggcctataacccagagactctaactactatccagacccaggacatatcacagcccggcactttccccgccgtgagcgcatccagccagctgcctaattccgacgccttgctgcagcaggccactcagtttcaaacacgcgaaacgcaaagcagagagattctgcagtccgacggcaccgtcgtgaatctttcccagctcacggaagcaagccagcagcagcagcagtctccgctccaggagcaggcacagactttgcaacaacagatcagtagcaatattttcccaagtcctaactcagtgtcacaactgcagaataccatacaacagttgcaggccggaagctttactggcagtacagcctctggtagtagcgggagtgtggacctagtccagcaggtactggaagctcagcagcagctttcttctgtgttgttttcagctccagacggtaacgagaacgtccaggagcagctgtcagcagatatcttccagcaggtctcacagatccaaagtggtgtcagtcctgggatgttctcctcgacggagccgacagtgcacactcggcccgataatctcctgccgggacgcgccgagagcgtccaccctcagtctgaaaacaccctgagcaaccaacaacagcagcaacagcagcagcagcaagttatggaaagcagcgcggctatggtgatggagatgcaacagagtatatgtcaagccgctgcgcagattcagagcgaactgttccccagtacagcctccgctaacggaaatttgcagcagtctcccgtttatcagcagacctcacatatgatgtcagccctgagtacaaatgaggatatgcagatgcaatgtgagcttttctctagtcctcctgccgtatccgggaacgagacatcaacaacaacgacacaacaggtggcgacacccggcaccactatgttccaaacatctagctcgggggacggagaggaaactggcacacaggcaaaacagattcagaactccgtctttcagacgatggttcagatgcaacatagcggagataaccaaccacaggtgaacctcttttcttctaccaaaagcatgatgtctgtgcaaaatagcggcactcagcagcagggtaacgggcttttccagcagggaaatgaaatgatgtccctgcagtccggtaactttctgcaacagtcctctcattcccaggctcagctttttcacccccagaacccaatagctgatgctcagaacctgtctcaggagactcagggttccttgtttcacagcccaaatcccatagttcattcccagaccagcactacttcttctgaacaaatgcagccgccaatgttccacagccagtccaccatagccgtgctgcaggggtctagcgtgccacaggaccagcaatctactaatatctttctgtcacaaagcccgatgaataacttacagacgaatactgtggcccaggaagccttttttgccgctcccaactccatcagccccttacagtctacatctaactctgaacagcaagccgcatttcagcagcaggcacccatcagtcacatccagacgcctatgctatcacaagagcaagcacaaccaccacaacagggactgttccagccgcaggtcgcccttggatcactgccaccgaatcccatgccccagtcccaacaaggaaccatgttccaatcccagcactctattgtagctatgcaaagcaatagccccagccaagagcagcaacagcagcagcagcaacagcagcagcagcaacagcagcaacaacagtccattcttttcagcaaccagaacacgatggcaactatggcttctcctaaacaacccccaccgaacatgattttcaacccaaatcaaaatccaatggcaaatcaagagcagcagaaccagagcatttttcatcaacagagcaatatggcaccaatgaaccaggaacagcagccaatgcaattccagagtcagtcgaccgtttcaagcctgcagaatcctggacccacgcagtctgaaagcagtcagacacctctgtttcatagctcccctcaaatccagctggtgcagggtagccctagcagccaggaacagcaagtgactctgttcctgtcgccggccagcatgtccgcgctgcagacttccattaaccagcaggacatgcagcagagccccctgtatagcccgcaaaataacatgccagggattcaaggtgccacgtccagcccccagccccaggccactctatttcataatacagccggtggaacaatgaaccagctgcagaacagccccggctcgtcccagcagacatcagggatgttcttattcggcatccaaaacaattgtagtcagctgttgaccagtgggccagccactctcccagatcaacttatggccattagtcagcccggacagccgcagaatgaggggcagcctcccgtgacaactctcttgtcccagcagatgcccgaaaatagcccccttgcgtcttctattaataccaatcaaaacattgaaaagattgacctgttggtctcattacaaaaccagggcaataatctgactgggtcattctag

SEQ ID NO: 25347 - DNA, 4368 bp, synthetic construct
  misc_feature 1..4368: note = Description of Artificial Sequence: Synthetic coding sequence
  source 1..4368: mol_type = other DNA
atgggcggcgcctgcagcagcttcaccaccagcagcagccccaccatttactctactagcgtgacagactcaaaggctatgcaggtagagtcatgctcgtcagcagtcggtgtgtccaaccggggtgtgtccgaaaagcagcttactagtaataccgtgcaacagcatccatcaaccccgaaacgccacaccgtcctgtacatctcccctccccctgaggacctgctggataactcaaggatgagttgccaagacgaaggctgtggactggagagcgagcaatcttgctccatgtggatggaggactcaccgtcaaacttctccaacatgtcaacttcttcatacaacgacaacacagaggttccaagaaagtcccgcaagagaaaccccaagcagcgccctggagtgaaacgtagggattgtgaagagtctaatatggacatctttgacgcggatagtgcaaaagcaccccactacgtgctgtctcagctgacaactgataataagggaaactccaaggccgggaatggaaccttggagaatcagaagggaacaggtgtgaaaaaaagcccaatgttgtgtggacagtacccagtgaaaagcgagggtaaggaactgaagattgtggtccagccagaaacccaacatcgcgcccgctatttgaccgaagggagtagaggctccgtgaaagaccgtacgcagcagggttttccaacggtcaaactggaaggccacaacgagcctgtcgtgttacaggtctttgtgggaaatgatagtggaagggtgaaaccccacggcttttatcaggcctgtcgcgttaccggtcgcaatactaccccatgcaaggaagtcgatattgagggtaccaccgtgatcgaggtaggcctggatccttctaacaatatgaccctggctgtggactgtgttggaattcttaaactcagaaacgcagacgttgaggctcggattgggatcgcgggatctaagaaaaaaagtacccgagcacggcttgtcttccgcgtcaacattatgagaaaggatggctccacgctgacactccagaccccctctagtcccatcttgtgtacccaaccggccggcgtccccgaaatcttgaagaagtccctgcacagttgctcagtcaagggggaagaagaggtttttcttatcggtaaaaactttctgaaaggaactaaggtcatcttccaggagaatgtgagtgatgagaatagctggaagtcagaggccgagatcgatatggaactcttccaccagaaccatctaattgtgaaggtgcccccataccacgatcagcatatcaccttgccagtgagtgtcggaatatacgtcgtaacaaacgcaggacgtagtcacgacgtgcagccattcacttataccccggacccagccgccgccggagctctcaatgttaatgtgaagaaggaaatttccagtcccgctcggccctgctcatttgaggaggcgatgaaggcaatgaaaactaccggctgcaatctggataaagttaacataatacccaatgctctgatgacacctctgattccatcgtccatgatcaagtcagaggatgtgacccccatggaggtgacggcagagaagaggtcgagcactatctttaagaccaccaagagtgttggctccacacagcagaccttagagaatatttctaatatagccggaaatggctcatttagctcccccagcagttctcatttaccatcagaaaacgaaaaacagcagcaaatccagccaaaggcctacaatcctgaaacactcacaaccatccaaacccaggacatcagtcagcccggcacatttccagctgtctcagccagttcacaactgccaaactctgacgccttgctgcagcaggcaactcagtttcagacaagagagacccagagccgggagatcctccaatcagacggcaccgtggtgaacctgtcacagctgacagaggctagccaacagcagcagcagtcacccttacaggaacaagcgcagaccctgcagcaacagatcagcagtaacatttttcctagtcccaattcagtgtctcagcttcagaatacgatccagcaactgcaggccgggtcttttaccggtagcacagcatctggtagtagcggaagcgttgatctagtgcagcaggtgctagaagcgcagcagcagctttcttctgtcctgttctccgctcctgatgggaatgaaaacgttcaagagcagctgagcgccgacattttccaacaggtgtcccagatccagtccggtgtctcaccgggaatgttttcaagcaccgaacctacagtccacacaaggcctgataacctcctcccaggccgtgcagagtcagtacatccacagagcgaaaacaccctgtctaatcagcaacagcaacagcagcagcagcagcaggtgatggagagctcagccgccatggtaatggagatgcaacaatccatctgtcaggccgcagcacagatccagtcagaattatttccgtctacagcaagtgcgaatggaaacctccaacagtcaccggtatatcaacagacctcgcatatgatgagcgccctctccacgaacgaggacatgcagatgcagtgcgaattatttagcagccccccggcagtgagcggaaatgaaacaagtaccactactacccagcaggttgccacacccggcaccaccatgtttcagacatcttcaagtggggacggagaggagactgggactcaagcaaaacagatacagaacagtgtctttcagaccatggttcagatgcagcactccggggataaccaaccacaagtgaacctcttctcttcaactaagtcaatgatgagcgtgcaaaattctgggactcagcagcaaggaaacgggcttttccagcaaggcaatgagatgatgagccttcaatcaggaaattttttacagcagtcttcccatagccaagcccagctctttcatcctcagaaccccattgccgacgcacagaatctttctcaggaaacgcaggggtctctattccattctcctaatccaattgttcattcacaaaccagcaccacttcctcagagcagatgcaaccaccaatgttccatagccagtctactatagctgtgctccagggttcgtcagtcccccaggaccagcagagtacaaatattttcctgagccagagtcctatgaataatctgcaaactaacacagtggcacaagaggccttctttgctgcaccaaatagcatcagccctctacagagcacgtcgaacagcgagcagcaggccgcatttcagcagcaagcaccaatatcccacatacagacccccatgctgtctcaggaacaggcacagcccccccagcaggggctgttccagccacaggtggcactgggcagcttgccgcccaaccccatgcctcagtcgcagcaggggaccatgtttcagagtcagcactccatcgttgcgatgcagagcaattccccttcccaggagcagcagcagcaacaacagcagcaacagcagcagcagcaacaacaacaacaatccatcctcttcagtaaccaaaacaccatggccactatggcaagtccaaagcagcctcccccaaacatgattttcaatccgaatcagaaccccatggccaaccaagagcagcagaaccagagcattttccatcaacagtcaaacatggctccaatgaaccaagaacaacagcccatgcagttccagtctcagtctaccgtctcctccttgcagaaccctggtccgacacagtctgagtcaagccaaacaccactgtttcacagctccccacagattcaactcgtccagggttccccttcatcacaggaacagcaggtgaccctattcctctcacccgcatctatgtctgcactccagacaagcattaatcagcaagacatgcagcagtcccccttatacagcccccagaacaatatgcccgggatccagggcgctacttcatctccccaaccacaggctactctgttccacaacaccgcgggggggaccatgaatcagctgcaaaattcaccgggttcgtcccagcagaccagtggcatgtttctgtttggcattcagaataactgctcacagcttctgacttcaggtccagccactcttccggatcagctgatggcaatatctcagccaggccagccacagaatgaggggcaacctcccgtgacaactctcctgagccagcagatgccagagaacagccccctcgcctcttcaataaatacgaaccagaatatagagaagatcgatttgctggtgtcactgcaaaaccaaggaaataacctgactggaagcttctag

SEQ ID NO: 25348 - DNA, 4596 bp, synthetic construct
  misc_feature 1..4596: note = Description of Artificial Sequence: Synthetic coding sequence
  source 1..4596: mol_type = other DNA
atgcccagcgacttcatcagcctgctgagcgccgacctggacctggagagccccaagtccctgtattcacgagagtccgtgtatgacctacttcccaaagagctccagctgccaccttctagagagaccagcgtggcatctatgtcccagacaagtgggggagaggctggcagtcctcctcccgcggtggtcgccgccgatgcaagcagcgccccctctagtagctccatgggaggggcttgtagttcctttaccacctcctcttctccgaccatttattcaacctctgttacagattcaaaagcaatgcaggtagaatcttgctccagcgcagtgggcgtttctaacaggggggtcagcgagaagcagcttacttctaacacagtgcagcaacaccccagcacccccaagcgccacacggtgctgtatatctcacccccgcccgaggacttgctggataattcacgcatgagttgtcaggatgagggatgtggactggagagcgaacagtcttgctccatgtggatggaggattctccctctaattttagcaacatgtctacttcgagttacaatgacaacacagaggtgcccaggaagtcccgtaagcgaaatccaaagcagcggccgggtgtcaagaggcgagactgcgaggagagtaacatggatatcttcgacgctgattcagccaaagctccccattatgtcttaagccagctgaccacggataataaagggaattcaaaagccggcaacggcacattggaaaatcagaaaggtaccggcgtgaagaaaagtccaatgctctgcggacagtaccctgtcaagtctgagggtaaggaacttaagatcgtggtccagcccgaaacacaacaccgcgcaagatacctcactgaagggagccgcggatctgttaaggatagaacccaacagggctttcccaccgtgaaactggaaggacacaatgagcccgtagtgcttcaggtgttcgtgggcaatgactctgggcgggttaaaccacacgggttctatcaggcgtgtagggtgaccggacggaacactacaccttgcaaggaggtggacatcgaggggaccactgtgatagaagtggggctcgaccctagtaacaatatgacactcgctgtcgactgtgtcggcatcttgaagctaaggaacgcagacgtggaagcaagaattggtatagccgggtcaaagaaaaagtcgacccgcgcacggttagtgtttcgggtcaatattatgaggaaagacgggagcacgctgactcttcagacaccgtcgagtccaatcctgtgcactcagcccgctggggtgcccgagatccttaaaaagtctttgcactcgtgctcagttaaaggcgaagaagaagtctttttgatcgggaaaaacttcctgaagggcacgaaagtcatattccaggaaaacgtgtccgacgagaacagttggaaaagtgaagcagagatagacatggaattgtttcaccagaaccacctgatcgtgaaagtccccccctaccacgatcagcatatcacgctccccgtcagtgtgggcatctacgtggtcaccaatgcgggcagatcacacgacgtacagccatttacgtatacacccgacccggcagcggcaggggccctcaacgtcaatgtcaagaaggaaatctccagtccggctaggccatgcagcttcgaggaagccatgaaggctatgaaaactaccggctgcaacttggataaggtcaatattataccaaatgcacttatgaccccacttattcccagctctatgatcaaaagcgaggatgtcacccctatggaagtcactgccgaaaagaggtcttccaccatatttaagacaactaaaagtgttggctctacccaacagacattggaaaatatctctaacatagccggcaacggatccttttcaagtcccagcagttcacatttaccctccgagaacgaaaaacaacagcagatccagccgaaggcttataatccagaaactcttacaacaattcagacacaggacattagccagcccggaacctttcctgcagtcagtgcctctagtcaactgcccaacagcgatgcacttttacagcaagccacccagttccagactcgcgaaacgcaaagtcgggaaatcttacagagcgatggcacggtggtcaatctgtcgcaactgacagaggcctctcagcagcaacagcagagtcctctccaagaacaggcccagaccctgcagcagcagataagctcgaatattttcccctcaccaaatagcgtcagtcagctgcaaaacactatccaacaactgcaggctggctcttttaccggatcaaccgcctctggaagcagcggttcggttgacctggtgcagcaggtgctggaagctcaacagcaactctcttccgtgctgtttagcgcacctgacggtaacgagaatgtgcaagagcagctgtcagccgatattttccagcaggtgagtcagattcaatcaggggtgtcacccggaatgttttcatccacggagcccaccgtccacactcgtcccgataaccttctgcctggtcgcgcagagtccgtgcatccacagtccgagaatacactatctaaccagcagcagcagcagcaacaacaacagcaagtgatggaatcttcggccgcgatggtgatggagatgcagcagtcaatttgccaggccgcagcccaaattcagagcgagttgttccctagcaccgcttctgcaaacggcaatctccagcagtccccggtctaccagcaaacgtctcacatgatgagcgctctttcgaccaacgaggatatgcagatgcaatgtgagctctttagcagcccaccagcggtgtctggtaacgagacctccactacaacaacccagcaagtagctactcctggcacgacaatgtttcagacttcctctagcggagacggcgaggagacaggcacccaagccaagcagattcagaattccgtgttccagacaatggttcagatgcagcacagtggtgataatcagccacaggtgaatctgttttccagcacaaaatcaatgatgtcagtgcagaattcggggacccagcagcagggcaatggtctgtttcagcaaggcaacgagatgatgagcttacagtccggaaatttcctacaacagtctagtcatagccaggctcagctctttcacccccaaaatcctattgccgacgcccagaatcttagccaggagactcagggaagtctttttcacagccctaatcctatcgtgcactcccagacttcaaccaccagttcagagcagatgcaacccccgatgtttcactctcagtcgaccatcgcggttttgcaaggctcttcagtgccccaggatcagcaatccacaaacattttcctttcccagagtcctatgaataatctccagaccaatacggttgcccaggaggcctttttcgctgcaccaaacagtattagtcccctccaaagcacttccaactcagagcagcaggctgctttccagcaacaggctcccatttcacacattcaaacaccaatgcttagtcaagagcaggctcagccccctcaacagggtctgtttcagccacaagtggccctaggttcactgccaccgaacccaatgcctcagtctcaacagggaactatgttccagtcacagcatagcatcgtggcgatgcagtctaactccccatcccaagagcagcagcaacaacaacaacagcagcagcagcagcagcagcagcagcagcaaagtattttgttctccaaccagaacaccatggctaccatggccagccctaaacagcctcccccaaatatgatcttcaaccccaatcagaaccccatggcaaaccaagagcagcagaaccaatccatttttcatcaacagagcaacatggctccaatgaaccaggaacaacagcctatgcagtttcagtcccagtccacagtcagcagcctgcaaaaccccggccctacccagtcagagtctagtcagactcccctgttccactcatctccgcagatccaactggtacaaggatctccatccagtcaggaacaacaggtgacactgttcctgtctcccgcctcaatgtctgccttgcagacttccatcaaccagcaggacatgcaacagagccccctgtattctcctcagaacaacatgcccggcatccagggagccacatcctcaccccaaccacaggccaccttattccacaacacggcgggcggaacaatgaatcagctgcaaaactcccccgggagtagccagcaaacgtcaggcatgtttttgttcggcatacaaaacaattgtagccagctgcttacttccggtccagcgaccctgcccgaccagcttatggccattagtcaacccggtcaaccccagaacgaaggacaaccccctgttactaccctgttaagccagcagatgcctgaaaattcaccactggcatctagcatcaatacgaatcagaacatagagaaaattgacctgcttgtgagcctgcagaatcaaggcaataatcttacagggtcattctag

SEQ ID NO: 25349 - DNA, 4368 bp, synthetic construct
  misc_feature 1..4368: note = Description of Artificial Sequence: Synthetic coding sequence
  source 1..4368: mol_type = other DNA
atgggcggcgcctgcagcagcttcaccaccagcagcagccccaccatttacagtacaagcgtaacagatagcaaagcaatgcaggtggaatcatgttccagcgctgtaggggtgagtaaccgaggagtgtccgaaaaacagctcacgagcaacacagtgcagcagcacccctcaacacctaagagacacacagttctgtatatctccccaccacccgaggatctgttagacaacagcaggatgtcttgccaggacgagggatgcggcttggaaagtgagcaaagctgcagcatgtggatggaggatagcccatcaaattttagtaatatgtccacctcaagttataacgacaatactgaggtgccgcggaaatcaaggaaacggaatcccaaacaacgtcccggcgtgaaacgacgggattgtgaggaaagtaacatggatatttttgatgctgacagcgccaaggcaccacactacgtcctctcccaattgacaactgacaataagggaaatagtaaggctggcaacggcacccttgaaaaccaaaaagggacgggtgtgaagaaatcccctatgctctgtgggcaatatcctgtcaagtctgagggtaaggagctgaaaatcgttgtacagcctgagacacagcaccgagctcggtatcttacggagggcagcagggggtctgtgaaggacagaacccagcaggggtttcccactgttaagctagaaggacataacgagccagtcgtgttacaggtgtttgttgggaatgatagcgggagagtgaaaccacacggcttctaccaggcgtgccgagtgactggccggaacacaaccccttgcaaggaagtagacatagagggcacgaccgtgatagaggtgggcttagacccttccaataacatgacactggctgtggattgcgtaggaattttaaaactgaggaatgccgatgttgaagcccgcattggcatagccggaagtaaaaagaagtccacgcgggcccgtctggtctttcgagtgaacattatgaggaaggatggctcaaccttgacattgcaaactccgagctcccctatcttgtgtacacaaccagcaggagtgcccgaaatcctaaagaagtccttgcattcctgctctgtcaaaggcgaggaggaagtgtttctgatcggcaaaaatttcctgaaaggcacaaaagtgatcttccaggagaacgtctcagacgaaaacagctggaaatcagaagccgagattgatatggaactgtttcaccagaaccacctgatcgtgaaagttccaccctaccatgaccagcatatcaccttgcccgtatccgtgggcatttatgtcgtcaccaatgcaggtaggagccatgacgtgcagccatttacatatacccccgatccagccgctgctggggctttgaacgttaatgtcaagaaggagatctctagtccagcacgcccatgcagcttcgaggaggcgatgaaggccatgaaaacgactggttgcaacctggataaggtgaatatcataccaaatgcccttatgactcctttaatccctagttcgatgattaagtccgaggatgtcactcctatggaagtgactgccgaaaagagaagttccactattttcaaaacaacgaagagtgtggggagcacacagcaaactctcgagaatattagcaatattgccggaaatggcagcttctctagcccctcctctagccatttgccaagcgagaacgaaaagcagcagcagatacagcctaaggcctataatcccgagaccctgaccactatccagacacaggacatctctcagccaggcacttttccagcagtctcagccagcagccaactgccgaacagtgacgctttactccagcaggcaactcagttccaaaccagggaaactcagtcgcgcgagattttgcaatcagacggtactgtggtgaatttgtcccagctgactgaagctagccagcagcagcaacaaagccctctccaagagcaggctcagactctgcagcaacagattagttctaacattttcccttctccaaatagtgtgagccagttacagaacactattcaacagctgcaagcaggctcctttacggggtcaacagcatccggctcctctgggagtgtggacctggttcagcaggttctcgaggcgcaacagcagctaagttccgttctgtttagcgcacccgatggtaacgaaaatgtgcaagagcagctgagcgccgatatattccagcaggtgagccagatacagtccggcgtttcgcccggtatgtttagcagtacggaaccaaccgttcacactcgcccagacaacctcttgcccgggcgagccgagagcgtgcatccgcaaagcgagaatactctgtccaatcagcagcagcagcagcagcagcaacagcaggtaatggagtccagtgccgccatggtcatggagatgcagcagtcaatctgtcaggccgctgcgcaaatccagagtgagctgttcccatcaactgcctccgcaaatggaaacctgcagcagtcgccagtctaccagcagaccagccacatgatgtcagcattgtctacaaatgaagatatgcaaatgcagtgtgagcttttcagctcgccgcctgcagtgagtggcaacgaaacatcaacaaccaccacacagcaggtggccacccccgggaccaccatgttccaaacatcttcttcaggggacggcgaagaaaccggtacccaggctaagcaaatccagaactctgtgtttcaaacaatggtacagatgcagcactccggtgacaatcagcctcaggtgaacctcttctcaagtactaagtcaatgatgtctgtgcagaatagcgggacccagcaacagggtaacggcctttttcagcagggcaacgagatgatgtctttacagagcgggaactttctacagcagagctcgcactctcaggcccaactgttccaccctcaaaacccaattgctgatgcgcaaaacctttctcaagagacacaagggtcactattccacagtcccaacccaatcgtgcacagccagactagcacaaccagctcagaacaaatgcagcccccaatgttccactcccagtcaaccatcgccgtcctacagggatctagcgttccacaggatcaacagtctacaaacatttttttgtcgcaatctccgatgaataatctacagacgaacacggttgctcaagaggcttttttcgcagcaccaaatagcatatcacccttacaatccacctctaacagtgagcagcaggccgccttccagcagcaggctcctatctctcatatccagacccccatgctgtcccaagagcaggctcagcccccccagcaggggttatttcagccgcaggttgcactgggatccctgccgcctaatcccatgccacaatcacagcagggaacgatgtttcagtcccagcattctattgtggcaatgcagagcaacagccccagccaggaacagcaacagcagcaacagcagcagcaacagcagcagcagcaacagcagcagtcaattttgttctcgaatcagaacacaatggccacaatggctagcccaaagcagcccccaccaaacatgatattcaaccccaatcagaatcccatggcgaatcaggagcagcagaaccagagcatcttccaccagcagagcaacatggccccaatgaatcaggagcagcagccgatgcagtttcagagtcaatctacagtgagctctctgcagaaccccgggccgacccagtccgagagtagccagacacccctgtttcatagttcccctcagatccagctagtgcaggggtcaccgtcaagccaagaacagcaggtgactttgtttctatcccccgcttcaatgagcgccctgcaaaccagtatcaaccagcaggatatgcaacagagtcccctgtacagcccacagaataatatgcctggcatacagggggccacgagttcaccccagccccaggcaacccttttccataatacagctgggggcactatgaaccagctccagaactccccagggtccagtcagcaaacaagtgggatgttcttgtttgggatccagaacaactgcagccaactcctgacctccgggcccgcaaccctacctgatcagctgatggcaatctctcagcccggccagccacagaacgagggtcagccacctgtgaccacgttactttctcaacagatgcctgaaaattcccctctggcctcatccatcaacactaaccagaatattgaaaagatcgaccttctcgtttcactgcagaaccaaggaaataacctaaccggatccttctag

SEQ ID NO: 25350 - DNA, 4647 bp, synthetic construct
  misc_feature 1..4647: note = Description of Artificial Sequence: Synthetic coding sequence
  source 1..4647: mol_type = other DNA
atgcccagcgacttcatcagcctgctgagcgccgacctggacctggagagtcccaagtccctgtactctcgcgactcgttgaaacttcacccttcccaaaatttccacagagccggtctcttggaagaaagcgtttatgatctcctgcccaaagagcttcagttgccccccagtcgtgaaacatccgtcgcgtctatgtctcaaaccagcggtggtgaggcaggaagtcccccaccagcagttgtggccgctgacgcctcttccgctcctagttcctcaagcatggggggggcctgttcctctttcacaacttcatcttcacctaccatttactccacgagtgtgaccgacagcaaggcaatgcaggttgagtcttgtagctccgctgtcggagtgagcaacagaggtgtctccgaaaaacagctgaccagcaacaccgtgcagcaacatccttctacaccgaaaaggcacacggtgctatatattagcccaccgccggaggacttattagataactccaggatgtcttgccaagatgaaggttgtggcctcgagagcgaacagtcttgctctatgtggatggaggattcccctagtaacttcagtaatatgtccaccagctcatataacgacaacaccgaggtccctcggaagtcgaggaagaggaatcccaagcagcgacccggggttaaaaggagagactgtgaggagtctaatatggatatctttgatgcggactccgccaaggctccacactacgtcctgagccaactcacgacagataacaaagggaatagcaaggcaggtaatggcacgttagaaaatcagaaggggactggcgtaaagaaatctcctatgttatgcggccagtaccccgtgaagagtgagggcaaagaactgaagatcgtggttcagcctgagacccagcatagggccagatatctgacagaaggaagtcgcggtagcgtaaaagatcgtacacagcagggattcccaaccgtgaaactcgaagggcacaacgaacctgtggttttgcaagtcttcgttggaaacgattccggtagggttaagccgcacgggttctatcaggcttgtagagtaaccggccggaacacaacaccttgtaaggaggttgatatagagggcacgaccgtcatagaagtgggtctggacccgtccaataacatgactcttgctgttgattgcgtaggaattctgaaactgaggaacgccgacgtagaagcaaggattgggattgcaggatcaaaaaagaagagcacgcgggctcgcctcgtgtttcgcgtcaatatcatgcgtaaggacggttctaccctgactctgcaaacaccaagctcccccattctttgcactcagcctgctggcgtgcctgagatattaaaaaagtcactgcactcctgctcggtgaaaggcgaggaagaggtgttccttattggcaagaattttttgaaaggcaccaaagtcatcttccaggagaatgtttctgatgagaacagctggaagagtgaggcagaaatcgacatggagttgtttcaccaaaaccatctgattgtgaaagttcccccctaccacgatcaacacataacgctccccgtttccgtcggcatctatgttgtgacaaacgccggcagaagccacgacgttcaaccctttacatatacccctgaccccgcggccggggctctaaacgtgaacgtgaaaaaggagatcagcagtcctgcacgcccttgctccttcgaggaggcaatgaaggccatgaaaaccaccggttgcaatctggacaaggtgaatataatacccaacgcgctcatgacccctctcataccgtctagcatgatcaagtccgaagatgtgacaccaatggaggtgacagccgagaaaagaagttcaaccatctttaaaacaacaaaaagtgtcggttcgacacaacaaaccctcgaaaatatttctaacatcgcaggcaacggctccttctccagtccctcttcctcccacctccccagtgagaacgaaaagcagcagcagatccaaccaaaagcgtacaaccccgagactctgaccaccatacagactcaagacatctcgcagcctggaaccttccccgctgtttcagcgagcagccaactgcccaattcagacgcactgctccagcaggcaacgcaattccagaccagagaaactcagtccagagaaatcctccagtccgatgggactgtcgttaatttgtctcagctgaccgaagccagccagcagcaacagcaatcacctctgcaggaacaggcccagactctgcagcaacagatctctagcaatatcttcccctcccccaactccgtgtcccagctccagaacacaattcaacagctgcaagctggatcttttacaggctcaacagcgtctggttcttccggctctgtggatctggttcaacaagtactcgaggcgcaacagcaacttagttcagtgttgttttctgccccggatggcaatgagaatgtccaggagcagctctctgcagatattttccagcaggtaagtcaaatccagtctggggtcagtcctggtatgttttcaagtactgagcctaccgtccatactagacccgataacctgcttccgggcagagcagagtcagtgcacccacagtctgagaacacccttagcaatcagcaacagcaacagcagcagcagcagcaagtgatggagtcaagtgcagccatggtgatggagatgcagcaaagcatttgccaagccgccgcacagattcagtccgaattgttcccctcgacggcctccgccaatggcaacctccaacaaagcccggtctaccaacaaaccagtcatatgatgtctgcactgtctactaatgaagatatgcagatgcaatgcgaactcttttctagtccacccgccgtgtcaggaaacgagacctctactacgaccacccagcaggtcgccactcctggtaccaccatgtttcagacctcctccagcggagatggcgaggagaccggaacgcaagcaaaacagatccaaaacagcgtctttcagaccatggtgcagatgcaacactctggcgataatcagccccaagtcaatctgttttctagcactaagagtatgatgtccgttcagaactcaggcacccaacagcagggaaatggtctctttcagcagggtaacgagatgatgtctctccaatccgggaactttcttcagcagtcttctcattctcaagctcagctcttccacccccaaaatcctatcgcagatgctcagaacctgtcccaagaaactcagggcagtctgttccacagtcctaacccaattgtacacagtcagacttctacaacttccagtgaacagatgcagccgcccatgttccactcccagtccaccatcgccgtgctgcaaggcagtagtgtcccccaggaccaacagagtaccaacatctttcttagccaaagccccatgaacaatcttcaaaccaacactgtggcccaggaggccttttttgctgcccctaactctatctcgccgttgcagagcactagtaactctgaacagcaggccgcttttcaacagcaggcaccgatttcacacatccagactcctatgctgagccaagaacaggcccagcctccacagcaggggctgttccaacctcaagtcgccctgggttctctccctcccaacccaatgccccaatctcagcagggcacaatgttccaatcgcagcactccatcgttgccatgcagtcaaattctccctctcaggagcagcagcagcaacaacaacagcagcagcagcagcagcagcaacaacaacaaagcatactcttcagcaaccagaacaccatggctaccatggcctcccctaagcaacccccccccaatatgatattcaatccgaatcagaaccctatggcaaaccaggagcagcaaaaccagagtatattccaccagcaatccaacatggcccctatgaatcaggagcagcagcctatgcagttccagtcccagagcaccgtcagcagtctgcagaacccaggaccaacccagtccgagagcagccagactcccctgttccacagctcccctcagattcaactggttcaggggagcccttcaagccaggaacagcaagttaccctcttcctgtcccccgcttccatgtctgcactacagacatcaatcaatcaacaggacatgcaacaatctcctctctacagccctcagaataatatgcccggcattcagggggcaacaagtagtcctcagccccaggccacgctcttccacaacactgctggagggacaatgaatcagctgcagaattctccgggatcctcccagcaaacctcaggcatgtttttattcggaattcaaaataattgttcccagctattaacttccggtcctgctactctccccgatcagctgatggcaatctcacaacctgggcagccacaaaacgagggccagccacccgtcacaaccctcttgagccagcagatgccagagaattcccccctggccagcagtatcaacactaatcagaatattgagaaaattgatctcctcgtgtctctccagaaccagggtaataacttaacagggagcttttag

SEQ ID NO: 25351 - DNA, 4650 bp, synthetic construct
  misc_feature 1..4650: note = Description of Artificial Sequence: Synthetic coding sequence
  source 1..4650: mol_type = other DNA
atgcccagcgacttcatcagcctgctgagcgccgacctggacctggagagtccaaagagtctttattccagggattctctcaagctgcatccctcacagaatttccacagagcagggttactggaggaaagtgtgtacgacctgctccccaaggaactacagctccccccatctcgggagactagcgtggcgtccatgtctcagacaagcggtggcgaggcgggctcccctccgcctgccgtggtcgcagccgatgcgtcctctgctcctagttccagcagtatgggaggtgcctgctccagcttcaccacctcttcaagtccaactatttactccaccagcgtgacggactctaaggccatgcaagtcgaatcatgcagttcggctgtgggagtttcaaataggggagtgagcgagaagcagctaacttctaacacagtgcagcaacatccctctacccccaaacgccatacggtgttatacataagtcctccccctgaggaccttctggataacagccgtatgtcgtgccaagatgagggctgcggactagagtctgagcagagttgttcgatgtggatggaggactccccgagtaacttttctaacatgagtacctcttcttacaatgataatactgaagtgccccgaaaaagtagaaagagaaatcccaagcagcggcccggagtcaaaaggcgcgactgcgaggagagtaatatggatatcttcgatgctgattccgccaaggcgccacactacgtgctgagccagctcaccactgataataagggtaattcgaaagccggcaacggcacactcgaaaaccagaaggggactggcgtgaagaaatcccctatgctgtgtggacagtacccggtgaagagtgagggcaaggagctaaagatcgtcgtgcagcccgagacccaacaccgggcacgctacttgaccgagggatcaagagggagtgtcaaagacaggacacaacaggggttccccaccgtgaaactcgagggacacaacgagcccgtcgttcttcaggtgttcgtaggaaacgatagtgggagggtgaagcctcacggattctatcaggcctgtcgagtcacagggcgcaacaccaccccgtgtaaggaggtagacatcgaggggaccaccgtgatcgaggtgggtctggaccccagtaacaatatgactctggccgtggattgcgttggcatactcaaattacgcaatgccgacgtcgaagcgaggataggcatcgctggaagcaagaagaagtcaaccagagctaggttagtcttccgtgtcaacatcatgcgaaaagatggctcaacattgaccttgcagacacccagctctccgatactttgtacacagcctgccggtgtcccagaaatccttaaaaagagtttgcattcttgtagtgtgaaaggcgaggaggaagtgttcctgataggtaaaaactttttgaaagggaccaaggtgatttttcaggagaacgtttccgacgagaactcatggaaatctgaggcagaaatcgacatggaactgtttcaccaaaaccatcttatcgttaaggtgcccccatatcatgaccagcatatcaccttgccagtgtccgtgggcatctacgtcgtcactaacgccgggagatctcatgatgtccagccgtttacctacaccccagaccctgccgccgccggagcgctgaatgtaaacgtgaagaaagagataagcagtcctgcgcgaccttgctcatttgaggaagccatgaaagctatgaagacaacgggttgcaatctcgataaggtcaacatcatcccgaatgctcttatgactcccttgattccatctagcatgattaagagtgaagacgtaacgccaatggaagtgacagccgagaagagatcaagtacaattttcaagactactaagagtgtggggtccacgcagcagactcttgagaatatttccaacatcgctgggaacggtagcttcagtagcccaagctcttctcatctgccatctgagaatgagaaacagcagcagatacaacctaaagcttataaccccgagaccctaacaaccatccagacacaggatatttcacagcccggcactttccctgcagtctcagcctcttcccagttgccaaatagcgatgctctgttgcagcaagctactcagttccagacccgcgagactcagtctcgcgagatattacagtccgatggcactgtggtcaatctgagccaattaacagaagcctcccagcagcaacagcagagccccctgcaggaacaagcccagacactccagcaacagatttcctccaacatctttccaagccctaactctgtttcacaattgcaaaacactattcagcagttgcaggccgggtcattcaccgggagcactgcatccggctccagcggatcagtggatctggtgcaacaggttttggaggctcagcagcagttgtcctccgtgctgttcagcgcgcctgacggtaatgagaacgtccaagagcagctctctgcagacatatttcagcaggtttctcagattcagtcaggagtgagccctggcatgttcagtagcacagagccgacagtacatacaaggcccgacaatctgttgccgggccgggctgaatctgtgcaccctcagtccgaaaatactctaagtaatcaacagcagcagcagcaacagcagcaacaggtcatggagtcatctgcagctatggtaatggagatgcagcagagtatctgccaagccgctgcacagatacagagcgaactgtttccatcgactgccagtgccaatggaaacctacaacagtcacccgtctaccagcagactagccacatgatgtcagcactgtccaccaacgaagacatgcaaatgcagtgtgaacttttctccagtccccctgccgtttccgggaacgagacatccaccacaactacccagcaggtggccacccctggcacgactatgttccaaacttcttcttctggtgacggtgaagagactggcacccaagcgaaacaaatccagaattctgtgtttcagaccatggtgcagatgcaacactctggagacaatcagccccaggtcaatctcttctcaagcactaagtcgatgatgtcagtccagaattcaggcacccaacagcaggggaatggcctctttcagcaggggaacgagatgatgagtctgcagagtggtaacttcctccagcagtcaagtcactcgcaggcccagctttttcatccgcaaaatcccatcgctgatgcacagaacctcagtcaggagactcaagggagtcttttccattctccaaatcccatagtgcatagccaaacaagcactacctcatcagagcagatgcaaccgccgatgttccacagtcagtctacaatcgccgtgctgcaggggagttcagtgcctcaggaccagcaatctactaacatcttcctttcacagtctcccatgaacaatctccaaacaaatacggttgctcaggaagccttctttgcggcaccaaactcaatttcgccactgcagtcaacttcgaactccgaacaacaggctgcctttcagcagcaggcccccatttcccatatccaaaccccaatgttaagccaggaacaggcccagcctccccagcaaggcctgtttcagccacaggtggctctgggtagtctgcccccaaatccgatgcctcagagtcagcagggcactatgttccagtcacagcattccatcgtcgccatgcagagtaacagcccatcacaggagcagcagcagcagcagcagcaacagcagcagcagcagcagcagcaacagcaaagcatcttgttttccaatcagaacactatggcgaccatggcctctcctaagcaacccccaccgaacatgatctttaaccccaatcaaaatcccatggcaaaccaggaacagcagaaccaatccattttccatcagcagagcaacatggcccccatgaatcaggaacaacaaccgatgcagtttcaaagccagtccacagtgagctctctccaaaaccctggccccacccagtcagaaagctctcaaaccccactgttccatagttcaccacagatccagcttgtccaaggctcaccctcatcccaggaacaacaagtgaccctattcctcagtccggcatccatgtctgctctccagacctccattaaccagcaagatatgcagcagagccccctgtatagtcctcagaataacatgccaggtattcagggggccacaagttccccacagcctcaggcgacattgttccacaacacagccggtggaaccatgaatcagcttcaaaatagccccggcagctcacagcagacatccggaatgttcttgttcggaatccagaataattgttcccagctgctcactagcggtccggctacgttgcccgatcaactgatggccatcagtcagccagggcaaccacagaacgaaggtcagccaccagttaccaccctgctgtcacagcagatgccagaaaattctccgcttgctagttccatcaataccaaccagaacattgaaaagatagacctgctcgtcagcctgcagaatcaagggaacaatctcactggcagcttctag

SEQ ID NO: 25352 - DNA, 2151 bp, synthetic construct
  misc_feature 1..2151: note = Description of Artificial Sequence: Synthetic coding sequence
  source 1..2151: mol_type = other DNA
atgcccagcaccagcttccccgtgcccagcaagttccccctgggcccagcggctgctgtgtttgggaggggtgagaccctgggcccagcccctcgagctggcgggacaatgaagtctgccgaggaagagcattatggctacgcttcatccaatgtgagcccagccctgcctctcccgacggctcatagcacgctgcctgcaccttgccacaacttacagacgtctacaccaggcatcataccaccagctgatcatccgtctggttacggagccgctttggatggaggtcccgccgggtactttctaagcagtggacacacccggccggacggtgctcccgctctggagtcaccccgcattgaaatcactagctgcctcggcctgtaccataacaataatcagttctttcacgacgtcgaggtagaggatgtgcttccttcaagcaaacgcagcccctcaacggccacgctttcccttccttccttggaggcttatagggatccaagttgcttgtcaccagcctcctccctttctagccgatcctgcaacagtgaagcctcaagctacgagagcaattactcttatccatatgcaagcccacagacatccccatggcagtctccttgcgtgagtccaaagacaacagaccctgaagagggctttcctaggggacttggagcctgcaccttactgggctcaccaagacattccccaagcacatccccacgcgcgtcagtgaccgaagagtcttggcttggagcccgttcgtcaagacccgccagcccttgcaacaagagaaaatactcgctcaatgggcggcaaccaccatactctcctcatcactcacctaccccctcgcctcacgggagtccacgagtcagcgttacggatgacagctggctgggtaatacgacacagtatacaagctctgctatcgtcgctgccatcaatgctttgacaacagacagctcgctcgatctcggggatggcgtcccagtcaagagtcggaagaccaccctcgagcaaccgcccagcgtcgcgttgaaagttgagccagtcggggaggatcttggatcacctccaccaccagcagattttgcacctgaagattacagcagctttcaacacatccggaagggggggttttgtgaccagtacctagctgtccctcagcatccttaccaatgggccaaaccaaagcccctctcccctacatcgtacatgtctcccacccttccagcgctcgattggcagctccctagccactctggaccttacgagctgcgtatcgaggtccagcccaaaagccatcatcgggcacattacgagactgagggctccagaggggcagtgaaggcttctgccggtggccaccccattgtccaactgcacggctatctggagaacgaacccctgatgctccaactcttcataggcaccgccgacgaccgtctgctgagaccccacgctttctaccaggtgcatcggattactgggaaaacagtgagcactacgtcacacgaggcaattttaagtaacaccaaagtcctcgaaattcctcttctgcccgagaatagtatgagggctgttatagattgcgccggcatcctcaaattgcgcaatagcgatattgagctgcgcaagggcgagacagatatcgggagaaagaatacacgcgtacgattggtttttcgggtccacgtccctcaaccctccggtcgcaccttatcactgcaagtagcatcaaaccccattgagtgttctcaacgctcggcccaagaactgccgctggtggagaagcaatctaccgattcataccctgtggtgggcggtaagaaaatggtgttgagcggtcacaatttcctgcaggattcaaaagtaattttcgtcgaaaaggcacccgatggacaccacgtgtgggagatggaagctaaaacggaccgcgatttgtgtaaacccaacagccttgtagtggagatccccccgttccggaaccagcggattaccagcccggtacacgtatccttttacgtttgcaatggaaagcggaaaagaagccagtaccagcgattcacatatctgccagctaacgggaatgccatatttctgaccgtaagtcgagaacatgagcgggtggggtgttttttctag

SEQ ID NO: 25353 - DNA, 2478 bp, synthetic construct
  misc_feature 1..2478: note = Description of Artificial Sequence: Synthetic coding sequence
  source 1..2478: mol_type = other DNA
atgcccagcaccagcttccccgtgcccagcaagttccccctgggccctgctgcagcagttttcggaaggggggagactctgggacccgcccccagggcaggcggtacgatgaaatcggccgaagaggaacactacgggtacgcttctagcaacgtctcacccgcactgccactcccgactgcgcactccaccctcccggccccctgccacaatctgcaaacttctacgcctgggataataccgccggctgaccaccccagcggatacggagccgctctggacggcggacccgctggctactttttgtcatccggccacacaagacccgacggagcaccagcccttgaatctccccggatcgagatcacttcttgtctcggcctctaccacaacaataaccagttcttccatgacgtggaggtggaagatgtcctgccgtccagcaaaaggagcccctccaccgccaccctatcactgccctccttggaagcatatcgcgatccgtcttgtctgagccccgctagctcactatcaagccggagttgcaatagcgaagcgagttcgtacgaatcgaactacagctacccctatgcttccccacaaacctcaccctggcagagcccttgcgtgagccccaaaaccacagatcctgaagaagggttcccccggggactgggtgcctgtacattattagggagccctaggcattcaccttccacatctccgagagcgtccgtaaccgaggaatcctggctgggagcgcggagtagtagacctgcctcaccctgcaataagcggaagtactcacttaatgggaggcaacctccatatagtccacaccatagtccaacacccagcccccacggatcccctagggtgtcggtgacagatgattcgtggctgggaaacaccacccagtacacctctagcgccatcgttgccgcaatcaatgctctgacaaccgattcttccctggacttaggcgacggggtgcctgtgaagagtaggaaaacaaccctggaacagccaccttcagtggcccttaaggtcgaaccagttggggaggatctggggtccccccccccgcccgctgactttgcccccgaagattactcgtccttccagcacatcagaaagggcgggttttgtgaccaatatctggcagtccctcagcacccgtatcagtgggccaaacctaaaccgctctctcctactagttacatgtcccccacgttgccggccctcgactggcagctgccatcgcactccggaccatatgagctgagaatcgaggtccaaccaaaatctcatcatagagcccactatgaaaccgagggatctaggggggcagtgaaggctagtgcaggcgggcatcccatcgtacagttgcacggctacctggagaacgaaccgcttatgttacagttgtttattggtacagccgacgaccgtctactaagaccccatgctttttaccaagtgcacaggatcacagggaaaaccgtatcaacgacatcccacgaagccatcctctcaaacaccaaggttttggaaattccattgctgcctgagaactccatgagggctgtgattgattgcgccggcatacttaagcttcgaaactcagacattgagttacggaagggggaaacggacatcggtcgcaaaaacacccgcgtgcgcttagtgtttcgcgtacatgtgccacaaccatctggcaggacactgagcctgcaggtggctagtaacccgattgaatgcagccagcgctcagcccaggaacttccactcgtcgagaagcagagcacagattcctacccggtggtgggaggtaagaaaatggtacttagcgggcacaactttctgcaggactccaaggtgattttcgtggagaaagctcccgatgggcatcatgtatgggagatggaggctaaaactgaccgggatctgtgtaagccgaattccctagtcgtcgagatccccccatttcggaatcagcggataaccagcccagtacacgtgagcttttatgtgtgtaatggcaaaaggaaaaggagccaatatcagaggtttacctatctccctgctaatgtaccaatcatcaaaacagagcccacagatgactatgagcctgctcccacgtgtggacccgtctcacagggattatccccgctgcctaggccctactactcccagcagctggcgatgcctcctgacccatcttcctgtctggttgctggattccccccgtgtccgcagcgctccacactgatgccggccgcccctggcgttagcccgaaactgcatgacctcagtcctgctgcatataccaagggagtggcgtccccagggcattgccacctgggcctgccccagcctgccggagaagcgccagcagtccaagatgtgccgcgccctgtggccacccacccgggatctccgggtcaacctccacccgcattgctcccgcagcaatag

SEQ ID NO: 25354 - DNA, 2832 bp, synthetic construct
  misc_feature 1..2832: note = Description of Artificial Sequence: Synthetic coding sequence
  source 1..2832: mol_type = other DNA
atgcccagcaccagcttccccgtgcccagcaagttccccctgggccccgctgcagcagtgttcggaagaggcgagacactcggacctgcccctagggccggagggaccatgaaatcggccgaagaagagcattatggttatgctagctctaatgtgagcccagcgctaccattgcctaccgcgcacagtaccttacctgccccctgtcacaatctacagacctctacccccggtatcattccacccgcagaccatccctcaggatacggcgctgccctcgatggagggcctgcaggctatttcttatcctctgggcacacccgaccagatggtgcgcctgctctggagagcccccggatcgaaatcactagctgcttgggtctttatcataataacaaccagttttttcacgatgtggaagtagaggatgtcctcccaagcagcaagcgttccccatccaccgcaacactgtcactcccttcacttgaggcatatagggatccttcctgtctttctcccgcctcgagcctctcctctcggagctgtaattctgaggcctcaagctacgagagcaattactcgtacccttacgcatctccacagacgtctccttggcagagcccttgcgtgtcccctaagactaccgatccagaggaaggcttccctcggggactcggcgcttgcacccttctaggttctccacgtcattcaccctccacgtctcccagagcctccgttaccgaggagtcatggctcggggcccgatcctccagacccgcatctccgtgtaataaaaggaaatacagtctcaacggcagacagccaccctactctcctcaccattccccaactccctctccccatggaagcccaagggtgtcagtgactgacgatagttggctgggcaacacaacccagtacacatcctcagcgattgttgccgctatcaacgcacttaccaccgattcttccctcgacctcggcgacggcgtcccagtaaaaagcaggaagaccactctggaacagcccccaagtgttgctctgaaagtcgagcccgtgggagaggacctgggctcacccccaccacccgccgactttgcacctgaagattattcatctttccagcacattaggaagggtggtttctgtgaccagtacctggcagtcccccagcatccttaccagtgggccaaacccaagcccctgtcgcccacctcttacatgtccccgacactgcctgccttggactggcaactgcccagccactcaggcccctacgaactgagaatagaggtccagcccaaatctcaccatagggcacactacgagacagagggctctaggggggccgtgaaggctagtgcaggcggccatccaatcgtgcagctgcacggatatttagagaacgagcccctgatgctgcaactgttcatcggaaccgccgatgacaggctcttgcgcccacacgcattttaccaggttcataggattaccgggaaaaccgtgtccacaacttcccacgaggcaatcctgtcaaatacaaaggttcttgaaattccgctgttgcccgaaaatagcatgcgtgccgtcattgactgcgccgggatactgaagttacgtaattctgatatcgagctgagaaagggtgaaaccgacatcgggagaaagaataccagagtgaggcttgtctttagagtgcacgtgccacagccaagcggaaggaccctttccctgcaggttgcatccaatcctattgagtgcagccagcgaagtgcccaggaattacctctggttgagaagcaatccacggattcttatccagtcgtgggggggaagaaaatggtgctaagcggccataacttcctccaggattccaaagtcatcttcgtggagaaagctccggatggccaccacgtttgggaaatggaggccaagactgacagagacctgtgcaagccaaatagtctggttgtggagattcccccctttaggaatcagcggatcacaagcccggtccacgtttctttctacgtgtgtaatgggaagaggaagcgaagccagtaccagaggtttacctatctccccgccaacgtgccgattattaagactgaaccaacagacgactatgaaccggctcccacctgtgggccggtgagccaagggctttccccactgccgcggccctactacagtcagcaacttgcaatgccccctgacccatccagttgtctcgtggctggctttccgccatgtccccagagaagcaccttgatgcctgcagcgccgggcgtgagtccaaagcttcacgacctctctcccgccgcctatacaaagggggtggcttcccctggccactgccacctcgggctgccccagcctgcaggagaggcccctgcagttcaagacgtgccacgccccgtggccacccatcctggcagtccaggccagcctccccccgccctactgccccagcaggtcagcgccccaccttctagcagctgcccaccggggttagagcattcactgtgccccagcagcccgtcaccccctctgccacccgccacgcaagagcctacctgcctccagccctgtagcccggcttgcccacccgctacaggacgcccccagcaccttcccagcacagtgcgcagagacgaaagcccaactgcgggtcctcggcttctccctgaggttcatgaagacggaagtccaaacctggcaccaattcccgtcacagtcaaaagagagcctgaagaacttgaccagctgtacctggacgatgtcaatgaaatcataagaaacgatttgagttccacttccacacacagttag

SEQ ID NO: 25355 - DNA, 2793 bp, synthetic construct
  misc_feature 1..2793: note = Description of Artificial Sequence: Synthetic coding sequence
  source 1..2793: mol_type = other DNA
atgaccggcctggaggaccaggagttcgacttcgagttcctgttcgagtttaaccaaagggacgagggcgccgccgcagccgccccagagcattatggctatgcaagctcaaacgttagccccgcactgccccttcctacagcacacagcacgctgcctgcaccctgtcataatctccagacctcaacacctggcattattccccctgccgatcaccccagcggttacggggcagccctggatgggggtccggccggctattttctgagctcggggcacactaggcctgacggggcaccagctctggaaagcccaagaatcgagattacttcttgtctcggcctttaccacaacaacaatcagttttttcacgacgtggaagtcgaggacgtgctaccttcttctaagaggagtccctctacagccacactgtccttgccgagcctggaagcttacagagacccctcgtgcctctcacctgcgtcgtctctgagctccaggagctgtaattcagaagcctcctcttatgagagtaactacagttatccttacgcaagcccccagaccagcccctggcagtccccttgtgtgagcccaaagacaacagaccctgaggaggggtttccacgcggcctaggtgcttgcacgctgctcgggagtcccagacattctccttctacctcccctagagcttcggtcactgaagagtcctggctgggtgcacggtcctcccggcctgcaagcccctgcaacaagagaaagtactctctcaatggcagacagccgccttacagtccccaccattcaccaactccctcccctcatggtagcccccgggtttctgttactgacgactcatggttgggcaacacgactcagtacacatcctcggccattgtagctgcgatcaatgccctcacaacagattcaagtctcgacttgggggacggagtgcccgtgaagagccggaaaacgacacttgaacaacccccctcagtggctctcaaagtcgaacccgttggggaggatttgggaagcccaccaccacctgccgattttgcccctgaggattattcttcctttcagcatattaggaaaggaggcttctgtgaccagtacctcgccgttccccagcacccttatcagtgggccaaaccaaaaccgctgtcccccacatcctacatgtcccccacgcttccagctttggactggcaacttccaagccacagcggaccatacgagttacgcatcgaagtgcagcctaaatcccatcatcgcgcacattacgagaccgagggttctagaggcgcggtgaaggcaagcgccggagggcaccccattgtccagcttcatggctatcttgagaacgagccgctcatgttgcagctttttataggtaccgccgacgatcggctgcttagaccgcacgctttttaccaagttcaccgcatcaccggcaagacagtgagtactacttcccacgaagctattctgagtaacaccaaggtgctggagattcctcttctgcctgaaaattccatgagagccgtaattgattgcgcaggcatcctgaagcttcgaaattctgacatagaattacggaagggagagactgacatcgggcgcaagaatacaagagtcaggctggtgtttcgggtgcatgtgccacagccttccggccggacccttagtcttcaggtcgcttccaatccgattgaatgttcccagaggtcggctcaagaactgccattagttgagaagcaaagcaccgatagctatcccgtggtcggaggtaaaaaaatggttctgagtggccacaattttcttcaagattccaaagtcattttcgtggagaaagcccctgatggccatcacgtatgggaaatggaagcaaagaccgatcgcgacctatgcaagccaaactccctcgtggtcgagatccccccattccgaaaccagcgaatcacgtcacctgtccacgtttccttctatgtttgtaacggaaagaggaaacggtcccagtatcagaggttcacatacttacctgccaatgtcccaataattaaaacagaaccaaccgatgactacgaacctgcacccacctgtggacccgtctcccaaggcttatcacctctccctcgcccttattatagccagcagctcgcaatgccgcctgacccctcatcctgtctcgtcgcgggattcccaccttgtccccagaggtctactctaatgcctgcagccccaggcgtaagtcccaagctccacgatctgtccccagccgcctacacgaagggggttgcctcccctggccattgtcaccttgggctgccacagcccgctggcgaggctcctgctgtgcaagacgtcccaagacccgtggctacccatcctggaagccctggccagccaccccccgctctgttacctcaacaggtgtctgccccaccatcttcctcgtgcccaccagggctggagcactcactgtgccctagttcacccagccctcctttgccaccagcaacacaggaacccacctgcctgcagccttgctccccggcctgtcctcccgccacaggaagacctcagcacctgcccagcactgtcaggcgggatgaatccccaaccgctggacccaggctgctgcccgaagtgcatgaagatggatctccaaacttggcacctattccggtgactgttaagcgggagcccgaggagctggaccagctgtacctagatgatgtcaacgagatcattcggaacgaccttagttcgacatccacccacagctag

SEQ ID NO: 25356 - DNA, 1062 bp, synthetic construct
  misc_feature 1..1062: note = Description of Artificial Sequence: Synthetic coding sequence
  source 1..1062: mol_type = other DNA
atgctgcagctgttcatcggcaccgccgacgaccggctgctgcggccccacgccttttatcaggtccaccgaattaccgggaaaactgtgagcactacaagtcatgaggcgatcttgagcaatacaaaagttctggagatccctttattgcctgagaatagcatgcgcgccgtgattgattgcgcaggcatccttaagctgaggaattctgacatcgaactgagaaagggagagactgatataggccgaaaaaacacccgggtgagacttgtcttccgcgttcacgttccccagccctcagggcgaactctcagtctgcaggtagccagtaaccccattgagtgctcacagcgttccgctcaagaactgcctctggttgaaaagcagtccactgactcttatccggtcgtgggcggcaagaaaatggtgctgagcggacataacttcttacaggactccaaagtcattttcgtggaaaaagctcccgacggtcaccacgtgtgggaaatggaggcaaagaccgatcgtgatttgtgcaagccaaactctctggtggtagagattccgccctttcgtaatcagagaataacaagcccagtgcatgttagtttctatgtttgtaacggaaagcggaaaagatcccagtaccagcgttttacttacctccctgctaacgtgccgatcattaagacagagccaaccgacgactacgaaccagctccgacttgcgggccggtgagccaagggctgtcccccttaccgaggccgtactactcccagcagctggcaatgccacctgatccctcttcctgcctcgtcgccggatttcccccttgcccccagaggtccacacttatgcctgccgctccgggtgtgtcaccgaaactccacgatctgtctcctgctgcttacactaaaggggtggcctccccagggcattgtcacctgggactgccacagcctgccggcgaggcaccagcagtgcaggacgtgcctaggccagtagcaactcatccagggagtcctggccagcctcctcctgccctgcttcctcagcagtag

SEQ ID NO: 25357 - DNA, 2724 bp, synthetic construct
  misc_feature 1..2724: note = Description of Artificial Sequence: Synthetic coding sequence
  source 1..2724: mol_type = other DNA
atgaagagcggcaccctggagcactacggctacgccagcagcaacgtgagccctgccttgcccctccccacagctcattccacactccctgccccctgtcataaccttcagacatccactcctggcatcatacctcccgccgaccatcctagcggctatggagcagctttggacggggggcccgccggatattttcttagctccggtcacacacgcccagatggcgcaccggcactggagtccccacgcatcgaaattactagttgcctgggcctataccacaacaataatcagtttttccacgatgtggaagttgaagatgtcctcccgtcaagcaaaagatctccctcaacggcaacacttagcctgcccagtctggaggcctatcgggacccttcctgcctgtcgcctgcttcttctttatcatctcgctcgtgtaattctgaagctagtagttacgagagcaattactcttacccttacgccagcccccagacctctccttggcagagtccatgtgtctcgccaaagacgacggacccagaggagggcttccccagagggttgggcgcctgtacacttctcggctcccccaggcacagccccagcacaagccctagagcttctgtcacggaggaaagctggctgggcgcacgcagctctcgtcctgcttcgccatgcaataagaggaagtattcactaaatgggcggcagcctccatactcaccccaccatagtcccactcctagccctcatggctctccgcgagtgtctgtgaccgacgattcatggctgggcaacacaacccagtatacttcgagtgcaatcgtggctgctattaacgccctgactactgactctagtctcgacctcggtgatggcgtgccagttaagtcccgaaagacaacattggagcagcccccatctgtcgcacttaaggtggagcccgtcggggaggacctgggatccccaccgcccccggccgatttcgctcctgaggactactccagcttccagcatatccgtaagggaggtttttgtgaccaatacctagcagtgccacagcatccttatcagtgggcaaagccaaagccgctgagccccacctcatatatgtcaccaactcttcccgccctagattggcagctcccatctcacagcgggccctatgagctgagaatcgaggtccagcctaagtcccaccacagggcccactacgaaacagaggggtcgcggggagctgtaaaagcatcagccggtggccatccaattgtccagctgcatggatacctggaaaacgagcctcttatgctgcagctgttcattgggactgctgacgaccgcttgctccggccgcatgctttttatcaggttcaccgcatcactggaaaaacagtgagcacaaccagtcatgaagcaatcctcagtaatacaaaagttctcgagatcccactcctgcctgaaaacagtatgcgggctgtgattgattgcgctggaatactcaagctgaggaattcagacattgagctccgtaaaggcgagaccgatatcggtcgtaaaaacacacgcgttcgtttagtgttcagggtacacgtgccacagccaagcggtcggaccctatctctgcaagtggcgtccaaccccatcgagtgttctcagagaagcgctcaggaactcccactggtggagaagcagtctacagactcatatcctgtcgtcggcggcaaaaagatggtgcttagcggccacaatttcctccaggatagcaaggtgatcttcgtcgaaaaagcccctgacggccaccacgtgtgggagatggaggcaaagactgatcgtgatctatgcaagccaaatagcttggtcgtggagatcccacctttcagaaatcagcgcatcacttccccagtccacgtgtccttctacgtgtgcaacggcaaaaggaaacgatcccagtatcagaggttcacatacctgcccgccaacgtcccaattattaagaccgagcccacggacgactatgaacccgcccctacttgcgggccagtgtctcagggcctgtctccccttccccgaccttattattctcagcagctcgcaatgccccctgacccatcgagctgtctggtggccgggttcccaccatgcccacagaggtccacgctgatgcctgctgcgcccggcgtcagccccaagctgcacgatcttagtccagctgcctacaccaagggagtagcttcccctgggcactgccatcttggtttaccacagccagcaggggaggctcctgccgtccaggatgtgccccgtcctgttgccactcatcccggcagccccggacagccccctcctgccctcctgccacaacaggtgtccgctccgccctcttcaagttgccctcctggactggaacactctctctgcccttcttcaccttctccaccgctccctcccgcaacgcaggagcccacatgcctccagccctgctcccctgcctgcccacctgctactggaaggccccaacatcttcccagcaccgtacgtcgtgatgagagccccacagcaggcccaagactgctccctgaagttcacgaggatggctccccaaatctcgcacccattcccgtgaccgtgaaacgcgaacccgaagagctggatcagctgtaccttgacgacgtaaacgagataatccggaacgatctgagcagtacttctacacactcctag

SEQ ID NO: 25358 - DNA, 2745 bp, synthetic construct
  misc_feature 1..2745: note = Description of Artificial Sequence: Synthetic coding sequence
  source 1..2745: mol_type = other DNA
atgaccggcctggaggaccaggagttcgacttcgagttcctgttcgaattcaatcagcgggatgaaggggccgcggcggccgccccagagcattacggatacgcctcctctaatgtgagtcccgccttgccattacctactgcccatagcacactgccggctccatgtcataacctgcagacgagcacacccgggatcatcccaccagctgatcatccttctggatacggggcagccctagacgggggcccggcaggatatttcctttcctcaggccacactaggccagacggcgctcctgcccttgaatcacctagaatagagatcacttcttgtctcggcttatatcacaacaataatcagttcttccacgacgtcgaagtggaagacgtcttaccttcgtcaaaaagaagcccgagcacagcaactttgagcttgccttcacttgaagcctatagggatcccagctgtctcagccccgctagctcactcagttcaaggagttgtaacagtgaggccagtagttacgagtcaaactattcctacccttacgcatcccctcagacctcaccatggcagtcaccttgtgtgagcccaaaaaccactgatccggaggagggcttcccacgcgggctcggagcatgtacattgttgggctctcccaggcactccccatcaacttctcctcgagcttctgtaacggaagagtcgtggctaggagcacgttccagtagacccgctagcccatgcaataaacggaaatacagcctaaacggaagacagccaccttacagcccacatcactctcctacgcccagtccccatggatcgccgagagtctccgttacagatgattcctggttgggaaataccacccagtacacaagcagcgccatagtggccgcaatcaacgctcttaccacggatagctccctggacctcggcgacggcgttcccgttaaatctcggaagacaaccctcgagcagcccccttctgtggcgctgaaggtcgaacccgtgggcgaagatctgggctccccccccccacccgcagatttcgccccagaagattattctagtttccaacacattaggaagggtggattctgcgaccaatacctggcagttccgcagcacccgtatcagtgggccaagcccaaaccactctctcctacgagctatatgtcccctactctgcctgcattggactggcaactcccatcacattctggtccctatgagctcagaatcgaggttcaaccgaaatcacatcatagggctcactacgagacagaagggtcccggggagcggtgaaagcttcagccggtgggcacccaatcgtgcagctgcacggatatctggagaatgagccccttatgctccagttgtttatcggtaccgctgacgatagactgctacggccccacgccttctaccaagtgcatcgcatcacaggcaaaaccgtcagtaccacctctcacgaagccattctgtccaatacaaaggtgctggagatacccctgctcccagagaactccatgcgtgccgtgatcgattgtgccgggattctgaagctgcggaatagcgatatagaactgaggaagggcgaaactgatattggtcgaaagaacacacgggttagactggtgttccgagtgcatgtacctcagccatcgggtcggaccctctctttacaggtggcatccaatcccattgaatgtagtcagcgatctgctcaggagctgcccctcgtggagaaacagagcaccgattcgtatccagtggtcggcggaaaaaagatggttttgtccggacataacttcttgcaggattctaaggtgattttcgtggaaaaagccccagatggccaccacgtctgggaaatggaggcaaagacggacagggacctctgtaagccaaatagtttggtggtggagatccccccctttcgcaatcagcggattacttcccctgtgcatgttagcttttatgtgtgcaatgggaaaagaaagcggtcacagtatcaacgcttcacttatcttcccgccaatgtaccaatcataaagacggaacccactgacgattacgagcccgccccaacctgcggtcctgtaagtcagggcctatcacctcttcccaggccctattattctcaacaattggcgatgccccccgaccccagtagctgcctcgtggcagggttccctccttgtccacaacggtcaactctaatgcctgctgcccccggtgtttcccctaaactgcacgacctttcaccagcggcttatacgaaaggcgtggcctctccaggtcattgccacctggggttaccacagcccgcaggggaagccccggcagttcaggacgtaccgcggcctgtggctacacatcctggttccccgggtcagcctccccccgctctgctgccacagcaggtgagtgctcctccttcgagctcctgtcctcctggtctcgagcattccctgtgcccctcgtcaccaagcccccctctgcccccggctacccaggagcccacgtgcttacagccctgctcaccggcgtgcccgcccgcaacaggtagacctcagcacctcccaagtactgtgagaagagatgagtcaccaaccgcaggacctcggcttctccccgaggtacacgaggacggcagtccaaaccttgctcctattcctgttaccgtgaagcgggagccggaggagctcgatcagctttatctcgacgattag

SEQ ID NO: 25359 - DNA, 2142 bp, synthetic construct
  misc_feature 1..2142: note = Description of Artificial Sequence: Synthetic coding sequence
  source 1..2142: mol_type = other DNA
atgcccagcaccagcttccccgtgcccagcaagttccccctgggcccggcagcagccgtgtttggcaggggcgaaactttaggcccagcaccgcgtgctggtggaaccatgaaatccgctgaagaagaacattatgggtacgcgtcgagtaacgtttcacccgcccttcccctacccacagcacacagtactctacccgcaccatgccataatctgcagacatccacgcccggcataatcccccctgccgaccacccctcaggctacggagctgcactagacggcggccccgcgggatactttctgagttcaggccatacgcggcccgatggcgcacctgccctcgagtccccacggatcgaaattacctcctgcctgggcctataccataacaataaccagttcttccacgatgtcgaagttgaggatgtcttaccttcatcaaaaagatcacctagcaccgccacgctatcactcccttcactggaggcgtatcgagacccaagttgcctttcccccgcatcatctctgtcatctagatcatgtaactctgaagcttcatcatatgagtccaactacagctatccttacgcctcgccacagacctcaccctggcagtcaccctgcgtttccccgaagacaacggatccggaggaggggtttcccagaggtcttggggcctgcacgttactcggaagtcctaggcacagcccgtctacttccccacgtgcaagtgtgaccgaggaaagttggctgggcgccagatcctctcggccagcaagtccctgcaataaacgcaagtatagcctcaatggccgacagcccccctacagtccccaccactcccccactccatcgcctcatggaagcccacgagtgtccgtgacagacgactcgtggttgggcaacaccactcagtacacctcctccgccatcgtggcagccatcaatgcactaacgacagactcctccttggacctcggtgacggggtccctgtcaaatcccgaaaaaccaccctggagcaaccaccctcagtcgcgctgaaagtggaaccggtgggtgaggatctgggttcacctccacctcctgcggattttgcccctgaggattattcaagtttccagcacatacgtaaaggcggattctgtgaccagtacctggctgtaccccagcacccctaccagtgggctaagcctaagcctttgtctccaacatcttacatgtctcctacactgcctgcccttgactggcagctgccctctcatagcggtccgtatgaactacgcattgaggtccagccgaaatcacaccaccgggcgcattatgagactgagggcagcaggggagctgtaaaagcttccgctgggggccaccctattgtccagctccacggttacttggaaaatgagcccctaatgctgcaactgttcatcggcacagctgatgacagactcttaaggccgcacgcattctaccaggtccatcgaataactggaaaaaccgtctcgaccacaagtcatgaggccattctgtccaatacgaaggtgctggaaatccctcttctgcccgaaaacagtatgcgcgcggttatcgactgcgccggcattctcaagctccgaaattctgatatagagcttagaaagggagaaacggatatcgggaggaagaacactcgggtgaggctcgtgttcagggttcatgtcccccagccctcagggcgtacgctttccctgcaagtggcttccaatccaatagaatgctcgcaacgaagcgcacaagaactgcccctcgtggaaaaacagtcgactgacagctatcctgttgtcggtggaaagaagatggtgctgtctgggcataactttctccaagactcaaaggtgatcttcgtcgagaaagcacctgatggacatcacgtgtgggaaatggaagccaaaacggatagagacctgtgcaagcccaattcactggtcgttgagattccccctttcaggaaccagagaattacttctcccgtacacgtgagcttttacgtatgcaacggaaaacgcaagcgaagccaatatcaaaggtttacgtatctgcctgcaaacgtgaatgagattatccgaaacgacctgtcgagtacaagcacccactcatag

SEQ ID NO: 25360 - DNA, 1416 bp, synthetic construct
  misc_feature 1..1416: note = Description of Artificial Sequence: Synthetic coding sequence
  source 1..1416: mol_type = other DNA
atgctgcagctgttcatcggcaccgccgacgaccggctgctgcggcctcacgctttttatcaggtgcatagaattactggcaaaaccgtctccaccacctcccatgaagctattctgtctaatactaaagtcctggagatccctctgctgcccgagaattccatgcgcgccgttatcgattgcgcaggcattttgaaactaagaaatagtgacatcgagctgagaaagggagagaccgatatcggcagaaagaacacacgcgttcggctggtcttccgagtgcatgtgccacagccctccggcagaacccttagtttgcaggtagcgagtaatcccatcgaatgttcgcaacgcagtgcacaggagcttccgctggttgagaagcaatctacagactcctatccggtcgtggggggaaagaaaatggtgctctccggccataactttctgcaggactccaaggtgatctttgtcgagaaggccccagatggccaccacgtttgggaaatggaggctaagacagaccgagatctgtgtaagccgaattcactggtcgtcgaaatccccccattccgaaaccagaggatcacaagtcctgtgcacgtatcgttttatgtatgcaatgggaaacgcaagaggtcacagtaccaacgctttacctacctgcccgcgaatgtcccgattatcaagaccgagccaaccgacgactacgagcctgcccccacttgtggccccgtgtcgcagggtctgtctcctctgccccgcccatattatagtcagcagctggccatgccccccgacccaagctcctgtctggtagccggtttccccccgtgcccccagagatcgaccttgatgcctgcagctccaggtgtgagccctaaactgcatgacctctctcccgccgcttatactaagggagttgcgtccccaggacactgtcacctgggactgcctcagccggccggagaggctcctgccgtgcaagacgtacccaggcctgtggctactcatccaggctctcccgggcagccccctcccgcgctgctgccccagcaggttagtgccccccccagtagctcctgcccgcccggactcgagcacagcctttgcccctctagtccttcccctccactgccccccgctacccaggaacccacatgcctccagccttgttcgccagcttgcccacccgccactggcaggccccagcatctcccttctacagttaggcgtgacgagtctcccaccgcaggaccacggctcctgccagaggttcatgaggatggatcccctaatctggccccaatccctgtcacagtgaaaagggagccggaggagcttgaccagttatatcttgacgacgtcaacgaaatcatcaggaatgaccttagcagcacatcaactcactcttag

SEQ ID NO: 25361 - DNA, 2766 bp, synthetic construct
  misc_feature 1..2766: note = Description of Artificial Sequence: Synthetic coding sequence
  source 1..2766: mol_type = other DNA
atgaacgcccccgagcggcagccccagcccgacggcggcgacgcccccggccatgaacccggtggaagtccccaagacgaactcgacttcagcattctgtttgattacgagtacctgaaccctaacgaggaggagcccaatgctcacaaggtggcatctccgccctcagggcctgcctaccctgatgacgttcttgactatggtctgaaaccgtactcccctttagcctcactgagcggcgaaccaccagggcgctttggtgaacccgacagggtcggacctcagaagttcctaagtgccgctaaacctgccggtgcatcaggcttgagccccaggatcgagattacaccaagtcacgaactcatccaagctgtgggtccactccgaatgcgggatgcaggcctcttagtagaacaaccccccttggccggcgtcgctgcctcaccccgttttacgttgcccgttcctggctttgaaggatatagagagcctctctgcctttcaccggccagcagtggctcttccgcatcgtttatcagtgatacattctcaccatataccagtccatgcgtatccccgaataacggcggtccagacgacctatgcccccagttccaaaacattccagcccattactctccacgaacctcccccattatgtctccccgtacaagtctagccgaagattcttgtctgggacggcattcacccgtgcccaggccagcctctcggagtagctcacctggggccaaacgaaggcactcatgcgcagaggcactggtggcccttcccccgggagcatccccacagaggtctagatcaccctccccccagccctcctctcacgttgccccgcaggatcacggctctcctgctggttatcctcccgtcgccggctccgccgtcatcatggacgccctaaattcccttgccaccgatagtccctgcggcatcccccccaagatgtggaagacatcccccgaccctagccccgtcagtgccgcccctagcaaggctgggctgccccgtcacatctaccccgcagttgaatttctgggaccctgtgagcagggggaaaggcgtaatagcgcccctgagtctatcctcctagttcctcccacgtggccaaaaccacttgttccagctattccaatctgctctatccccgtgaccgcctcacttcctcccttagaatggccactgtcaagccaatctgggtcgtacgaacttaggatcgaggtgcagcccaaacctcaccaccgagctcactatgagactgagggtagcaggggcgccgtgaaggcccctactggcggccaccctgtggtccaactgcatgggtacatggaaaacaagcctttgggcctccagatcttcatcgggactgcagacgagcgaatcctgaagccccatgccttttaccaggttcatcggattaccggcaagactgtcacaaccacatcctacgagaagattgtgggtaacactaaggtacttgagatccccctggagcccaagaacaacatgcgtgcaaccatcgactgcgccggaatcctgaagctcaggaatgccgacatcgaacttaggaaaggagagacagacatcggacggaagaacacgcgggtgcgcttagtatttagagtgcacatcccagagtcttcaggcagaattgtgtccctgcagacagcctcaaatccaatagaatgtagtcaacggtccgcccacgaactgcctatggtcgaacggcaggacactgacagctgtttggtctatggggggcagcagatgatcctgacaggacagaatttcacatccgagagcaaggtcgtgttcactgaaaagactaccgacgggcagcaaatatgggagatggaggcaacggtggataaggacaaaagccagcctaacatgctgtttgtcgagatacccgaatatagaaacaagcatattagaacccctgtaaaggtaaacttttatgttataaacggaaagcgtaagagaagtcagccccagcactttacctaccacccagttcccgccattaaaacggaacctaccgacgaatacgaccccacactcatctgttccccaactcatgggggacttggtagccagccatactacccacaacatccgatggtcgcagagtctccgtcatgcctagtcgctacaatggcgccttgtcagcagttcaggacaggactgagttcccctgacgctcgataccaacagcagaacccggcagctgttctgtatcaacggagtaagtcactgtccccttccctcctcggctatcaacagccagccctcatggccgcacctctgagccttgcagatgcccataggagcgtactggtgcatgcggggtcacagggacagtcttccgcgttgctgcatccctctcctaccaaccagcaagcttcccccgtcattcattacagcccaacgaatcagcagctgaggtgcgggtcacaccaggaattccagcatattatgtattgcgagaatttcgctcctggaaccacacggcctgggcccccacccgtttcacaggggcagcgattaagcccaggcagctaccctacagttatccagcagcagaacgcaacatcacagcgcgccgcgaagaatggcccccccgtttcagatcagaaggaagtgctgccagccggagtgacaatcaagcaggagcagaatctggaccagacctatctcgacgatgagctgatcgacacccatctctcctggattcagaatattctttag

SEQ ID NO: 25362 - DNA, 978 bp, synthetic construct
  misc_feature 1..978: note = Description of Artificial Sequence: Synthetic coding sequence
  source 1..978: mol_type = other DNA
atgagcccccggaccagcctggccgaggacagctgcctgggccggcactctcctgtcccccgtcctgcaagccgttcttcatctccaggcgctaagcgcaggcacagctgcgccgaggcactggtggctctgccccccggggcctctccccagaggtcacgatctcccagtccacagccatcatcccatgtcgctccccaggaccacggctctcccgccgggtatccacctgttgctgggtccgcggttattatggatgccttaaacagtctagccactgactctccctgcggaattccaccgaagatgtggaagactagccccgacccttcgcccgtctctgcggctcccagtaaagccggactgccaaggcatatttatccggccgttgaatttctcggcccttgtgaacaaggcgagaggcggaactcggctcccgagtcgatcctgcttgtgccgcccacatggcccaagcctttagtaccagcgatccccatctgtagcattcccgtgacagctagcctacctcctctcgagtggccgctgtcctcccaaagtggctcctatgagcttcggattgaagtgcaacccaaaccacatcaccgagctcactacgagactgagggtagccggggcgcagttaaggcgccaaccggcgggcatcctgtggtgcagctccacggatatatggaaaataaacctctgggactccagatcttcattgggaccgccgatgagcggatcctgaagcctcatgcgttctaccaggtccacagaattaccggcaagaccgttactactacttcttacgaaaagattgtggggaacaccaaagttttggagattccattggagcctagcaccgccccacacctgctctccccgtttatgttcatttcccaacccggtgttcatacacgcatcaatgtctgggctctgtcaggactttctcttaaagaactggctacatcactgtag

SEQ ID NO: 25363 - DNA, 2778 bp, synthetic construct
  misc_feature 1..2778: note = Description of Artificial Sequence: Synthetic coding sequence
  source 1..2778: mol_type = other DNA
atgaacgcccccgagcggcagccccagcccgacggcggcgacgcccctgggcatgagccaggcggcagccctcaggacgagttggatttctcaatcctgttcgattatgagtatctgaatcccaacgaggaagaacccaacgcccacaaagtggcgagtcctccctccggccctgcgtaccccgacgacgtcctcgactacggcctgaaaccttactcccctctcgcttccctttcaggagagcctccagggaggtttggtgaacccgatcgcgtcgggccacagaaattcttgtcggcggccaagcctgccggtgcctctggtctgagcccaagaatcgaaattactcctagccatgagctgattcaggcggtcgggcctctgaggatgcgggatgctggtcttctagtggaacaacctcccttagctggtgtagctgcgagcccccgtttcacgctgccagtcccaggattcgaaggctatagggaacccctatgtttgtcacccgctagctccggtagtagcgccagttttatttctgatacctttagtccgtataccagcccatgcgtgtcccccaataatggcgggcctgatgacctatgtcctcagtttcagaacattcccgcccattactccccccgaacaagccccatcatgtcaccacgtacctccctggccgaagacagctgcctcggccgccattctcccgtgccacgcccggcctcccgctcatcctcacctggcgcgaagcggagacattcctgtgccgaggcattagtggcactgccacccggcgcttctccacagcgcagtcgcagcccaagccctcagccaagcagccatgtcgcaccccaggaccacggaagcccggcaggttaccccccggtggctggatcagcggtgatcatggacgcacttaattccctggccactgactccccctgcgggatccctccaaagatgtggaaaactagtcccgatccaagccccgtgtcagcagctccctccaaagccggccttccccggcacatctatccagccgtggagttcctgggcccatgcgaacaaggggagcgaaggaatagtgcccctgaaagcatcctgttagttcccccaacatggccaaagcccctggtacccgccattcctatctgcagcatccctgtcaccgccagcctcccacccctcgagtggccgctgagttcacaaagcggcagctatgagctgaggatcgaggtgcaaccaaagcctcatcaccgcgctcattatgaaaccgagggctctaggggcgccgttaaggccccaaccggagggcacccagttgttcagctccacggatatatggaaaacaagcctctcggcctccagatcttcatcgggacagctgatgagagaatcctgaagccgcacgccttctatcaggtgcacagaatcacaggaaagactgtaacaacaacatcttatgaaaagattgtggggaacactaaagtgttggagataccacttgaacccaaaaataatatgcgggcaactatagattgcgccgggatattgaaattgcgcaacgccgatatcgaattgcgcaaaggggagacggacattggtagaaagaataccagggttcgtctggtgttcagggtgcacattcccgagtcttcgggaagaatcgtaagcctgcaaactgcttccaaccctatcgagtgttctcagcggtctgcccatgagctgcccatggtggaaagacaggataccgacagctgcctggtgtacggagggcagcaaatgattctaaccggccagaatttcacctcggagagtaaagtggtcttcactgaaaaaacaacagacggccagcaaatttgggagatggaagctactgtcgataaggacaagagtcagccgaatatgctcttcgtcgaaatcccagaatatcgcaataagcacatcagaactccagtgaaggttaacttctatgttattaatggaaagcggaagagaagccagcctcagcatttcacgtaccaccccgtgccagccatcaagacagaacccactgacgaatatgaccctaccctgatctgtagcccgacccacggggggctcggctcgcagccttactatccccagcaccccatggtggcggaatccccttcctgtttggtggccaccatggctccctgccagcaattccgaacgggcctgagttccccggacgcacgctaccagcagcagaacccggcggcagtcctgtatcagcgatcgaaatcactttccccctcacttctcggctatcagcaacctgcgttgatggccgctcctctctccctggccgacgcacaccgatccgtgctggtccacgccgggagtcaaggccagtcgtctgccctcctccacccgtcccctactaatcaacaggcgagcccagtgatccattattctccaacaaatcaacaactgcgctgtggcagccaccaggagttccaacacatcatgtattgtgaaaactttgcgccaggcacgaccagacctgggccaccaccagtctcacagggacagagattatctcctggttcctaccccactgtcatacaacagcaaaatgccacgtcacaaagggccgccaagaacgggcctccggtatctgatcagaaggaggtcctgcccgctggtgtcacaattaagcaggagcagaatctggaccaaacatacttggatgatgtcaacgagatcattaggaaagagttctcaggaccccccgcaaggaatcagacatag

SEQ ID NO: 25364 - DNA, 2706 bp, synthetic construct
  misc_feature 1..2706: note = Description of Artificial Sequence: Synthetic coding sequence
  source 1..2706: mol_type = other DNA
atgcagcgggaggccgccttccggctgggccactgccaccccctgagaataatggggtctgtggaccaggaggagcccaacgcacataaggtggcctctcctccatccgggccggcttacccagacgacgtgctggattacggactcaaaccctatagcccactggctagtctttcaggcgagcctcctggccggttcggggagcctgatcgtgttggacctcagaagttcctgtctgcagcaaagcctgcaggagcgagcggcctttcccccagaatagagatcacacccagccacgaactgatccaggcagtggggccattgcgtatgcgcgatgcaggcttgctcgtggaacagccccctctcgctggcgtggccgcctcccctaggttcactctaccagtccctgggttcgaaggctatcgcgaacccctctgtcttagcccggcctcctcgggctcgtccgcttcttttatatctgatacatttagcccctatacctccccgtgcgtgagcccaaataacggagggccagacgacctgtgtccacagtttcagaatattcccgcccattatagccctaggacgagtccaatcatgagccccagaaccagtctcgccgaggactcttgccttgggaggcacagccccgtacctcgacccgcaagtcggtccagcagccctggtgccaagcggagacactcttgtgccgaggcattggttgccctaccacctggcgcttctccccaacgttcgcgcagccccagccctcagccgtccagccatgtagccccacaagaccatgggtcccctgcagggtacccgccagttgctggatccgccgtgatcatggacgcactgaattcactcgctaccgactccccatgtggcatcccacctaaaatgtggaaaacatccccagaccccagcccggtgagtgccgccccttccaaagccggactgccccgccatatttacccagctgtggaatttctgggcccatgcgaacagggtgaacgccgtaactctgcaccggagtcaattctgctggtgccacccacatggcccaagccgctggtgcccgccattcctatctgttccattcctgttactgcctccttacctcctttggagtggcccctgtcctcccagagcgggtcttatgaactccggattgaggtccaaccaaaacctcaccaccgagcgcactacgaaaccgagggatctcggggggctgtgaaggcgcccacaggcggccacccagtcgtgcagctgcacggctatatggagaacaagcccctgggacttcagatttttatcggcacagccgacgaaaggattctgaaaccccacgctttttatcaggtacataggatcaccggaaagacagtgacaactacttcgtacgagaagattgtgggcaataccaaggtgctggagatcccacttgagccaaaaaataatatgagggctaccatcgattgtgccggaatcctcaagttaagaaacgccgacattgagctgcgcaaaggcgagacagatatcggacgcaaaaacacccgcgtccggctcgtgttccgggtgcatatcccggagagttcaggtcgaattgtgtctcttcaaacagcctctaacccaattgaatgcagccagaggagcgcccatgagctgcctatggtggaacggcaggataccgactcttgtctggtgtacggcggtcagcagatgatcctcacgggccagaattttacctcggagtctaaagtagtatttacagagaaaaccaccgacggccagcagatatgggaaatggaggccacagtggacaaagacaagtctcaacccaacatgctgtttgtggaaattcctgaatataggaacaagcatattagaacacccgttaaggtgaacttctatgtgatcaacgggaagaggaaacgctcacagccccagcactttacgtatcaccccgtgccagcaattaagacagaacccacagatgagtacgatcctacactgatctgcagccccactcatggcggattagggtctcagccctactacccccagcatcccatggtcgcagaatccccttcgtgcctggtggccactatggccccatgccaacaattccgtacaggcctgtctagcccagacgctcgctatcagcagcagaatcccgccgcagtgctctaccaaagatccaagagtctgagcccgagtctgctggggtaccaacagcccgccctgatggccgccccactgtctctcgccgacgcccatagatccgtgctggtccacgcggggtcccaggggcagagctcagctctcctccatccatctcctacaaaccagcaggcttctcccgtcatccactacagcccaacaaaccagcagctcaggtgtggaagccatcaggaattccaacacatcatgtactgtgaaaacttcgctcccggcaccacgcgtccaggacctcctcccgtgagtcaggggcaacggctgtctccaggttcctatccaactgtaattcagcaacagaatgctactagccagcgcgcggccaagaacggtccaccagtgagcgatcaaaaggaagtcttgccagccggcgtgaccataaagcaggaacagaatttagatcagacctatctggatgacgagctgattgacacccatctttcatggatacaaaacattctgtag

SEQ ID NO: 25365 - DNA, 3207 bp, synthetic construct
  misc_feature 1..3207: note = Description of Artificial Sequence: Synthetic coding sequence
  source 1..3207: mol_type = other DNA
atgaccaccgccaactgcggcgcccacgacgagctggacttcaagctcgtttttggagaggacggagcacctgctccccccccccccggaagtagacccgctgacttggagcctgacgactgtgcttctatttacatcttcaacgtagacccccctccctccacccttacaacccccctgtgtttacctcatcacggactgccctcccactcgagcgtgttatcaccaagcttccagctgcagtcacacaagaattacgaggggacctgcgagatcccggagtcgaaatatagcccccttggtgggcccaaaccttttgagtgtccatcgatccaaatcacctctatcagtcctaattgccaccaagaactcgacgcacatgaagatgatctccaaattaacgatcctgagcgcgagttcctcgaacggccatccagggatcatctctacctaccattagaacccagctaccgagagtctagcctgagtccatctccagccagtagcatttcgagtcgctcctggttcagtgacgcatcctcatgcgagtcactgtcccatatatatgatgacgttgatagcgagctcaacgaggctgccgctagattcactctgggttctcctctcacatctcccggcgggtcccctggcggctgcccgggagaagagacttggcaccagcagtacggccttggtcattccctgtctcctcgccagtccccctgtcactcaccccggtcctccgtcacagacgagaattggttgtctcctcgccccgcttcaggcccgtccagtcggcctacaagcccatgtggtaaacggcggcactcgagcgcagaagtttgttatgctgggagtctgtctccacaccatagcccagtgccctcaccagggcactctcctagaggcagcgtaacagaagatacgtggctcaatgcgtccgtacacggcggatccggactggggccagctgtgttccctttccaatattgcgtcgagacagacattccgctgaagactcggaagacctcagaagaccaggccgctattctgccaggcaaactggaattgtgctccgatgatcaggggagcttatcacctgcaagagagacgagtattgatgatggcctaggtagccagtaccccctaaagaaggactcctgcggggatcagttcctgtctgtaccgagccccttcacttggtccaagcctaagcccggacatactcccatctttcgaacatcctcgttaccacccttggattggcccttacccgcccacttcggccagtgcgaactcaaaattgaagttcagccaaagacacatcacagggcccactacgagacagaggggtcgcggggggccgtgaaggcatctacaggaggacaccccgtggttaagctgctgggctataacgaaaagccgatcaacctgcaaatgttcattggaaccgccgacgatagatatctgagacctcacgcattctatcaggtccataggatcaccgggaaaacagtcgcgaccgctagccaggagattattattgcaagtacaaaagtgctggagatcccactgctgcctgaaaacaatatgtctgcctccatcgactgcgcaggcattctaaaattgcgaaactccgacatcgagctacgtaagggtgagacagacatcggtaggaagaataccagggtgcgcctggtattccgtgtgcacattcctcaaccatctggtaaggtcctgtccctccagatcgcttccattccagttgagtgctcacaacgctcagcccaagaacttccacacatagagaaatattccatcaattcctgctcagtgaacggaggacacgagatggtggtcacgggaagtaactttctgccggagtctaagatcattttcctggagaagggccaggacggcagacctcagtgggaagtggagggaaaaattatccgcgaaaaatgtcagggcgcccatattgtgttagaggttccaccctaccataaccccgcagtaacggccgctgttcaggtgcacttttacttatgtaacggcaaaaggaagaaatcgcagagccagcgttttacatacactcccgttctcatgaaacaggagcacagagaggaaattgacctgagtagcgtgccttcactgccagtccctcacccagctcagacccagcgcccttccagcgattccggctgttctcacgactccgtgctgtccggtcagaggtccctgatatgctccatcccccagacctacgcatcgatggtgacttcaagtcatctgccccagttgcagtgccgagacgaaagtgtgtctaaagagcagcacatgattccgtcgcccatagtgcaccagccatttcaggtgactcctaccccaccagtgggctccagttaccagccaatgcagacaaacgtagtgtataatggccccacttgcctgccgatcaatgctgcttctagtcaggagtttgacagtgtactcttccagcaagacgctactctgtcaggactcgttaacctcggatgccagcccctctcttccatcccatttcacagcagcaattccggttcaactggccacctgctcgctcacacgccccatagcgtgcataccctgcctcatctgcaaagtatgggttatcattgctcaaataccggccagcgctctctgtcatcgcccgtggctgaccagattaccggacaaccaagctcgcaactgcagcccatcacttatggaccttcccatagcggatcagctactaccgcctctcctgccgccagccaccccttggccagttcgcctctcagcggaccaccctccccgcagctccagcccatgccctaccagtcaccatcgagcgggactgcctctagtccttctccagccactcgtatgcatagtgggcagcacagcacacaagcccagtctacggggcaggggggtctgtctgcccccagtagtcttatttgccactccctctgtgatcctgcctcgtttccaccagacggcgcaacggtgagtatcaagccggagcctgaagacagagaacccaactttgctacgatcgggctccaggatatcactctagatgacgatcagtttatctcggatctggaacaccaaccctccggctccgcagaaaagtggcctaaccactcagttctgtcttgtcctgcccccttctggcggatctag

SEQ ID NO: 25366 - DNA, 3228 bp, synthetic construct
  misc_feature 1..3228: note = Description of Artificial Sequence: Synthetic coding sequence
  source 1..3228: mol_type = other DNA
atgaccaccgccaactgcggcgcccacgacgagctggacttcaagctagtgttcggagaagacggggctccagcccctccgccaccaggctcccgccccgccgacttagagcccgacgactgtgcctcaatatatatcttcaatgtggatccacctcccagcaccttaacgacacctctgtgtctaccccatcatggcctccccagtcatagtagcgtgttatccccgtcattccagcttcagagccataagaattacgagggtacatgcgagatcccagaaagtaaatattctccccttggggggccgaaaccatttgagtgcccatccatccagatcacgagcattagtcccaattgtcaccaggagctggacgcacatgaggatgatctgcagatcaacgacccagaaagggagtttttggagaggccctctcgcgaccatctgtatctaccactggaacctagttacagagaaagtagtcttagcccctccccagctagcagcatctcctcccgcagctggttcagtgatgcatcctcttgtgaatccctttctcatatttatgacgacgtcgacagcgaattgaatgaggctgcagccagattcaccctcggatccccactgacaagcccgggaggatccccaggaggttgtccaggcgaagagacatggcaccagcaatacggcctgggccattctttatcgccgcgccagagcccctgtcactcccctagatctagtgttaccgatgagaattggctgtccccccgcccagcaagtgggccatcaagccgtccaacttccccatgcggtaaacgtcgccatagctccgccgaggtttgttacgcaggatccctgagtccacatcacagccctgttccgtcacccggtcactcccctcggggctcagtgaccgaagacacatggctaaatgcctctgtccacggcggcagcggcctggggccagccgtgtttcccttccagtactgtgttgaaactgacatccccctgaaaacccgcaaaactagtgaggaccaggccgctatcctgcccggtaagctcgagttgtgtagtgatgatcagggctctctctctcccgctagggaaacctcgattgacgatggcttggggagccaataccccctaaagaaagattcatgcggtgaccagttcctgagtgtgccatcacctttcacatggagtaagccaaagccaggccatactcctatttttcggacctcttccttgcctcctcttgactggccccttcccgcccactttggacagtgtgagctcaagatcgaagtgcagcccaaaacacaccatagagcccactatgaaacagagggatcacgcggcgctgtcaaggcttccaccggaggacatcccgtcgtaaagctcctgggctacaatgagaagccgatcaatctccagatgttcataggaactgctgacgacaggtacctccgcccccatgcattctatcaagtgcaccggattacgggaaagacagtcgccaccgcttcacaggagatcattatcgccagcacaaaggttttggaaattcctctgctcccagaaaacaatatgagcgcctctattgattgcgccgggatcctcaagctgaggaatagtgacattgaactcaggaaaggcgaaacggatataggtcggaagaacaccagggtgcgtttagtgtttagagtgcatatacctcagccttccggtaaggtgttgtccctgcaaattgcctccattccagtggagtgtagccagaggagcgcacaggagttgccccacatagagaagtactctataaactcctgttccgttaatggcggacacgagatggtcgtcaccggtagtaactttctgcccgagtctaaaattatcttcctcgagaaaggtcaggatgggcgcccacagtgggaagttgagggcaaaataatccgggagaagtgtcaaggagcacacattgttctggaagtgcccccataccataatccagcagtgacggctgcagtgcaggtgcacttttatctgtgtaatggcaaaaggaaaaaatcacaatcacagcgctttacctatacaccggtgttgatgaagcaagagcaccgggaggagatcgatctaagctccgtgccctccctccctgtgccacacccggctcagactcaacggccatcaagcgacagtgggtgcagtcacgattcagtgttgtccgggcaaaggtccttaatttgctcaataccccaaacgtacgcctctatggttacttcttcacacctcccccaactgcagtgcagagacgaatccgtgagcaaagagcagcacatgattcccagccctatcgtgcatcagcccttccaggtgacacctacgcctccagtgggaagctcttatcagccaatgcagacaaatgtggtctataacgggccaacttgtttgcccatcaatgctgcttcatcacaggagttcgacagcgtgctgtttcaacaggacgcgactttgtccggacttgtcaatctggggtgccagcccctctcttcaatcccattccacagttctaattctggaagtactggacacttattggctcatactccccatagcgtgcatacactgccacacctgcagagcatgggctaccactgctctaacacagggcaacggagcctgagttccccggtcgccgaccagatcacagggcagccgtcgtcacagctgcagccgatcacctacgggccctctcatagcggcagcgctacaacagctagccccgcggctagtcatcccctcgcctcatcaccactctctggtccacccagtccccagctacaaccaatgccttaccaatccccttcaagtggcactgccagttcccccagccctgccactcgcatgcactccggtcagcacagcacccaagcgcagagtaccggacaaggaggtctgagtgcacctagttcattgatatgccacagcctctgcgatcctgcaagctttccgcctgatggggccactgtctccatcaagcctgagcctgaagaccgggagccgaattttgccactatagggctgcaggacattacccttgatgacgtgaatgagatcatagggagagatatgagtcaaatatccgtttcgcagggcgccggcgtgtctcgccaggcacccctgccttcacccgaatcgctcgacctgggcagatccgacgggctatag

SEQ ID NO: 25367 - DNA, 3198 bp, synthetic construct
  misc_feature 1..3198: note = Description of Artificial Sequence: Synthetic coding sequence
  source 1..3198: mol_type = other DNA
atgaccaccgccaactgcggcgcccacgacgagctggacttcaagctagtcttcggtgaagatggtgcaccagccccacccccacccgggtccaggcctgcggaccttgagcccgatgactgcgccagcatctacattttcaatgtagatccacctccgagtacactgaccaccccactgtgcttgccacaccatggcctaccctcgcacagttctgtcctgagtccctctttccaactgcagtctcacaagaattacgaggggacctgcgaaatcccagagtcgaaatacagtcccttgggaggtcctaagccgtttgaatgtcccagcattcagatcacatccatcagcccaaattgtcaccaggaactagatgcgcacgaagatgatctgcaaatcaacgaccccgagcgtgaatttctggagcggccctccagagatcatctgtacctgcccttagagccttcttatcgcgaatcatccctgtctccatcacctgcttcatcaatctcttctaggagctggttttccgatgcctcctcttgcgagagtctcagtcatatttatgatgacgtggactccgagctgaacgaagcggccgcaagatttactctgggctccccattaacgtcccccggagggtctcccgggggctgccctggggaggaaacctggcaccagcagtacggcctgggacactctctgtcccctcgccaatccccctgccattctcctagaagtagcgtgacagacgagaactggctgtctccaaggcccgcttcaggaccaagcagcagacctacttccccctgtggcaaacgcaggcatagtagcgccgaagtgtgctatgctgggtcactttcacctcaccattcaccagtgccttccccagggcactccccgaggggttcagtcaccgaggacacctggctcaatgccagcgtgcacgggggctctggcctgggccccgccgtatttccctttcaatattgtgttgagacagacatacctctgaaaacccgaaagacctcagaagatcaggcagccattctccccgggaaactggagctgtgctccgacgatcagggcagtttgagtcctgcccgcgagacctcaatcgacgacggcctggggtcccaatatccacttaagaaggattcttgcggggatcagttcttgtctgtgccgagcccttttacgtggtccaagccaaaacctggccacactcccatttttcggacctcttccctgcccccactggattggcctctgccggcacattttggacaatgcgagctgaaaatagaggtacagcccaagactcaccacagggcccattatgaaacggagggaagtagaggtgctgttaaggctagcacaggggggcaccctgttgtgaaactgctgggctataatgagaaacccatcaatctgcaaatgtttattgggactgctgacgacagatatttgagaccacatgcattctatcaggtccatcgcatcaccggcaagaccgtcgctacggcttctcaagaaataatcattgcttcaaccaaggtgctcgaaatccctcttctgcctgagaacaacatgtctgcctcaatcgactgcgcagggattctgaagctgcgcaactcagatattgaactcagaaaaggagagaccgatatcggtcgcaagaacaccagagtgcgtcttgtattccgggtacacatacctcagcctagtggcaaagttctatcccttcagattgctagtatcccagtggagtgtagccagcgtagcgcccaagaactgccccatattgagaagtacagtataaactcctgcagtgttaacgggggccatgagatggttgttactggttctaatttcttaccggagtcaaagatcatcttccttgagaagggccaagacggtcgccctcagtgggaagtggagggaaaaatcatccgcgagaagtgccagggggcccacatcgttctggaggtcccgccatatcataatcccgccgtgaccgctgcagttcaagtccatttctatctttgtaacggaaagaggaagaaaagtcagtcccagaggttcacgtacacacctgtactgatgaaacaggaacatcgggaagagatcgatctgtccagcgtgccctctctacccgttccccacccagcccagactcagagaccttccagcgatagcggctgctcccacgactcagtactctccggtcaacgatcgctgatttgttcaattcctcaaacctacgcctccatggttacgtcatcccacctcccacagctgcagtgtcgtgacgaaagcgtatccaaggaacagcacatgatcccctctcctatagtgcaccagcctttccaggttacccccactcctccagtgggatcctcataccagccaatgcagaccaacgttgtatataatgggcccacatgtctccccattaatgccgcttcatctcaggagttcgatagtgtgctgttccagcaggacgctactctgagcggactcgtgaatttgggctgtcagccgctttcctctatcccattccattcctcaaactctggctccaccggtcacctgctggctcacacacctcacagcgtccacacactgcctcacctgcagtctatgggctatcattgtagtaacacaggacagagatccttgtccagcccggtggcggaccaaatcactggccaaccttcgtcacagctgcagcctatcacttacggcccttctcattctggcagcgccaccactgcaagtcccgccgcttctcaccccttagcttccagtcccctttccggccccccttcaccccagctccaaccaatgccctatcaatcacctagcagtggtactgcctccagcccttcccccgcgactcgaatgcactctgggcaacattctacccaggcccagagcaccggccaaggcgggttgtctgctccttccagtttgatctgtcactcactatgcgaccccgcctcattcccaccagatggggcgaccgtatccatcaaacctgagcctgaggaccgtgagcccaatttcgcaactatcggattgcaggatattaccctggatgatgatctgtttacttcaaataatttcgatctcctgcaattaaggcctacattttggccagttccagccggccggtacctacgaaacctcgagtag

SEQ ID NO: 25368 - DNA, 1770 bp, synthetic construct
  misc_feature 1..1770: note = Description of Artificial Sequence: Synthetic coding sequence
  source 1..1770: mol_type = other DNA
atgttcatcggcaccgccgacgaccggtacctgcggccccacgccttctatcaggtccaccggatcacaggcaagaccgttgctacagcctctcaagaaattatcattgcttcgacgaaagtgttagaaattcctcttctgcctgagaataacatgagcgcaagcattgactgtgctggcatcctgaagctgcgcaactcagacatcgaattacgcaagggggaaacagatatcggacgtaaaaatactcgagtccgcctggtctttagggtgcatatccctcagccctccggcaaggtgcttagcttacaaattgcatcaatcccagtcgaatgctcccagaggtccgctcaagagctcccacatattgagaaatacagcatcaactcttgcagtgttaatgggggtcacgaaatggtcgtaacgggatcaaattttttaccagagtccaaaatcatttttttagagaagggtcaggacgggagacctcagtgggaagtggaaggcaagattattagagagaaatgccagggcgctcacatagtcctcgaggtgcctccgtatcacaatccagccgtgacagccgcagtacaagttcacttttacctgtgtaacggtaagcggaaaaagagccagtcacagcgcttcacctataccccagtcctcatgaagcaggaacaccgcgaggagatcgatttgtcttcggtgccctctctgcctgttcctcaccccgcccagactcagaggcccagctccgactccggctgctcccatgattcggtactgtccgggcaacgttctctgatatgttcaattccacagacgtacgccagtatggttacttccagccatctgcctcagctgcagtgccgggatgaatccgtctccaaggagcagcacatgattcctagccctattgttcatcaaccattccaagtgacccctacgccccctgttgggtcctcctaccaacccatgcaaacgaacgtggtgtacaatgggccgacatgcctgcccatcaatgccgcttctagtcaggagttcgactccgtgttgttccaacaggacgccacgcttagtggtctagttaatctgggctgtcagccactgagctccattccatttcactcttcgaacagcggcagcaccggccacctgctggctcacactccccattctgttcatacgttaccccacctgcagagtatggggtaccattgtagcaacaccggccaacggagtctgtcttcccccgtggccgaccagattaccgggcaacctagctcacagcttcagcccatcacatatgggccatcccattccgggtctgctactacagcctctccagccgcatctcaccctctggcttccagtccgctatccgggccaccatctcctcagttacagccaatgccttatcagagtcccagctcaggcactgcttcctcaccatctcccgccacacggatgcattccggacagcatagcacccaggcccagtccactggacagggcgggctctcggccccaagtagtctcatttgtcactcactatgtgaccctgcttcgttcccaccggatggcgcgacagtatctattaaacccgagccagaagaccgcgaacccaacttcgcgaccattggtttgcaggacattactctggacgacgatcagtttatttctgatcttgagcatcagccatcagggtcagccgagaaatggcccaaccactcagtgctctcttgccctgctcctttctggagaatctag

SEQ ID NO: 25369 - DNA, 2709 bp, synthetic construct
  misc_feature 1..2709: note = Description of Artificial Sequence: Synthetic coding sequence
  source 1..2709: mol_type = other DNA
atgggcgccgccagctgcgaggacgaggagctggagttcaagctggtgtttggcgaagaaaaagaagcacctcccctcggggctggtggcttgggggaggaactcgacagcgaggacgcccccccctgttgtcggctggctctgggggaaccaccgccttatggagctgctcctatcggcatccctagaccacctccgccacggccgggaatgcactccccaccacctcgacctgccccctcgcccgggacctgggaatcacaacccgcaaggtctgtacgtctgggtggacccggggggggggccgggggcgcaggcggcggtcgcgtactcgagtgtccaagtatccggataacgtctatttccccgacccctgaacctccagcagccctggaggacaacccagatgcttggggtgatggcagcccgcgagactatccgccacctgaaggattcggaggctatagggaagctgggggtcagggcggaggcgcattcttcagtccatcaccgggatcgtcgtccctctcttcatggtcctttttttccgacgcttctgatgaggcggctttgtacgccgcttgtgacgaagtggaaagtgagctcaacgaagccgcgtcccggttcgggcttggatcgcccctgccgtcaccacgggcttcgccccggccatggacacctgaagatccttggtcactgtacggcccctctccaggcgggcgaggccccgaagattcctggctgctcctgtccgctcctggcccgactccagcctcacctaggccagcctcgccctgcggcaagaggcgctacagttctagtggtacaccatcatctgcctcccccgcactgagccgacgggggtcgttaggtgaggaaggcagtgaaccgccgcctcccccaccactaccgctagctcgcgatcccggctctcctgggccattcgattacgtaggcgctccgcctgcagagtccattcctcagaagacccgacggaccagttcagaacaagccgtagctttaccacgttcagaggaaccagctagctgcaatggcaagctgcctctgggcgcagaagaaagcgtggcccctccaggcggctctcgtaaggaagtggccgggatggactatctggctgttccttcccctctggcctggagcaaggcaagaatcggagggcactctccaatcttccgcacttctgcactgccccccctggactggcccctgccatctcaatatgagcagcttgaattgaggattgaagtacaaccacgggcacaccacagagcgcattatgagactgaagggtcaaggggcgctgtaaaggccgctcccggcgggcacccagttgtgaaacttttagggtattcagagaagccactaacacttcagatgttcatagggactgccgacgaacgaaacctgcggccacacgcattctaccaggttcatcggatcaccgggaaaatggtcgctactgcatcttacgaggctgtcgtgtcaggcacaaaggtgctggagatgactctgctgccagagaataacatggctgccaatattgactgtgccggcatcctgaagttgcggaatagtgatatcgagctaagaaagggcgaaacggacatagggcggaagaacacaagggtgaggttggtgtttcgggtgcacgttccacaaggtggaggaaaggttgtcagtgttcaggcggcctcagtccctatcgaatgctctcagcgatccgcacaggagctgccccaagtcgaagcctactctccctcagcttgtagcgtgcgagggggggaagagcttgtgcttactggatccaattttttgccagactccaaagttgttttcatcgagcgtggaccagatggcaagctgcagtgggaagaagaggcaaccgtcaataggctgcaatccaacgaggtgactcttactctaactgtgccggaatatagcaacaagagggtgtctaggccagtgcaggtctatttttacgtttcaaatgggcgtcgcaaacggtctccaacccaatcctttcgctttctgccagtcatctgcaaggaggaaccgcttcctgatagctctcttagaggattcccatcagcaagtgctacaccgtttggaaccgacatggacttcagtccacctcggccaccctacccttcgtacccccacgaggaccctgcctgcgagacaccttacttgtctgaggggttcggctatggcatgcccccactgtatccccaaacaggacctccaccatcataccgccccggactccgcatgttccctgagaccaggggaactacgggctgcgcacagccacccgccgtgtcctttctcccccgccccttcccaagcgatccttacgggggacgagggagctcatttagtctagggctgccatttagtccaccagcccctttcagaccgccaccactcccggccagccctcccctcgaaggacctttcccctcccagtctgacgtgcaccccctgccagcagagggctataataaggtagggcctggatacggccccggtgagggtgcacctgaacaagagaagtctaggggcggttattccagtgggttcagagattccgtgcctatccaggggataaccctcgaagaggtgagcgagattataggccgcgatctgagcggttttcccgccccgccaggagaagagcccccggcttag

SEQ ID NO: 25370 - DNA, 2895 bp, synthetic construct
  misc_feature 1..2895: note = Description of Artificial Sequence: Synthetic coding sequence
  source 1..2895: mol_type = other DNA
atgatcaccaccctgcccagcctgctgcccgccagcctggccagcatctcccaccgggtgacaaacttgccatccaacagcctgtcacataaccccggactcagcaagcccgactttccgggtaatagctcccccggtctcccaagttccagctccccaggtagggatctcggagcccctgctggttcaatgggagcagcgagctgcgaagatgaagagctggagtttaaactcgtgttcggagaagagaaagaggcaccccctctaggggcgggggggttgggcgaagagctcgattcagaggatgctccgccgtgttgccggttagccttgggcgagcccccgccctatggggctgcgcccatcggaatcccacggccaccccctcctcgacccggcatgcactccccacccccacgccctgccccctcccctggcacctgggaaagccagccagcgcgatcagtgagactcgggggcccaggcgggggggccggaggggccggcggcggacgcgtgctcgagtgtcccagtatccgcatcacaagcatatccccaactcctgagccaccagccgccctcgaggacaatcccgacgcgtggggagatgggagcccgcgcgactaccctcctccggaggggtttggcgggtaccgggaggctggaggccagggtggcggcgctttctttagtccctcaccgggttccagcagtctgtcctcatggtccttcttttctgatgctagcgacgaggccgctctgtacgccgcctgcgacgaagtcgagagcgagttaaatgaggccgcaagtagattcggccttgggagcccactcccctcaccacgggcatctcccagaccatggacgcccgaggacccatggagcttgtacgggccctcacctggtgggcggggcccggaagattcctggctgctgcttagcgcccccggtcccacccctgcgtcccccaggcccgcatctccttgcggaaagcgtcggtacagttcatcaggaaccccaagcagcgcgtctccagctctgtcacgcagaggttcactgggggaggaaggcagtgagcccccaccccctcccccacttcctttagcaagagaccctgggtcacccggcccatttgactacgtcggggcgcctccagcggagtctattcctcagaaaacaaggcgcaccagctccgagcaggctgttgcactgccccgctccgaagagccagcctcctgcaacggtaaactgcccctaggggccgaggaatccgtggctccacctggcgggagtaggaaggaggttgctgggatggactacctggcagtcccttctcccctggcctggagtaaggccagaatcggcggtcacagtcccatctttagaacttctgccttaccccccttagactggccactgccatcccaatatgagcagctggaactgagaatagaagtgcagcctcgggcccatcacagggcacactatgaaaccgagggcagccgcggagccgtaaaagcggctccggggggtcatcccgtcgttaagcttctaggctactcagagaaaccactgaccctgcaaatgtttattggcaccgccgacgaaaggaaccttagacctcacgccttctaccaagtccaccgcatcaccggcaaaatggtggccaccgcttcttatgaagcagttgtgtccggaactaaggtcctggaaatgactctcttgccagagaataatatggcggcaaacatcgactgtgctggtatcctgaaactccggaacagtgacatcgaattgcggaagggggagacggacattgggaggaagaatacacgcgtacgactggtgtttcgtgtgcacgtgccacagggcgggggcaaggttgttagtgtgcaagcagcctccgtgcctattgagtgctcccagcgatccgcccaggagctgccacaggtagaggcatattctccctcagcgtgctccgtgcgaggtggtgaagagcttgtccttaccggaagtaacttcctcccggatagtaaggttgtgttcatagaacggggccccgacgggaaattacagtgggaagaggaggccactgtcaacaggttacaaagcaacgaagtcaccctgaccctgacagtgcccgaatactctaacaagcgcgtctctagaccagtgcaggtgtacttctacgtatccaacggaaggaggaagcgaagcccaacacagtcttttcgcttcctccctgtgatctgcaaagaagaaccactccctgactcttcgcttcgggggtttccttctgcttctgccactccttttggtaccgacatggacttttccccgccacgcccaccctatccaagctacccacatgaagacccagcttgcgaaaccccctatctcagcgagggatttggttatggcatgccccccctttaccctcagacagggccacctccttcctataggcctggcctacgcatgtttcctgagacgaggggcaccactggatgtgcccagccaccggctgtgtctttcttgccaaggccatttccatccgatccctacggcggccgagggagcagctttagcctcggtctgccctttagtccacctgccccattccggcctcctcccttgcccgcatcaccacctttagaggggcctttcccatctcagagtgatgttcacccactccccgccgaggggtacaataaggtggggcctggctacggacctggagaaggtgcccccgagcaggaaaagagcagaggtggatattcaagtggattcagagattctgtcccaattcaaggaatcactctggaagagggagggtgtggaaccggaggttgtgagtgcgagtgtgtccaagagatcgcactgcacgtgtgctag

SEQ ID NO: 25371 - DNA, 2670 bp, synthetic construct
  misc_feature 1..2670: note = Description of Artificial Sequence: Synthetic coding sequence
  source 1..2670: mol_type = other DNA
atgcccgccagcatcagcagcatcttccccggccccaccctgctgctcagctgtgggagcgaggaactcgactctgaagatgcacccccctgttgccgcctggccctaggggagccacccccctatggcgccgcccctataggcatacctcgacctcccccccctcgacccgggatgcatagtcctccgccccgcccagcacccagtccaggcacatgggagtcacagcccgcaaggtctgtgcggctgggcggaccaggcgggggggcgggaggggctgggggcggacgcgtcctcgaatgcccaagcattcgcattacgagcatctctcccacgcctgaaccaccagcagcccttgaggacaatccggatgcatggggagacggaagcccaagagattatcctccccctgaaggcttcgggggctacagagaagcagggggacaaggcggtggggcctttttcagccctagtcccggctccagcagtctaagttcctggtcttttttcagcgatgccagcgacgaggccgcactgtatgccgcatgtgatgaggttgagagcgagcttaacgaagcggcatctcgcttcgggctcgggtccccgctccctagtccccgcgcctctccccggccgtggaccccagaagacccatggtcactttacggacccagtcctggcggacggggtcctgaagacagttggttactgctgtcggcacccggtcctaccccagcttctcccagacccgcgtctccctgtggcaaacgacgttattcaagtagtgggacaccttccagtgcttccccagcactgtcccgcagaggcagtctgggcgaggagggcagcgagccaccgccaccccctcctctgccgctggcacgtgaccctggttcaccaggccctttcgactacgtcggagcgccgcctgctgaatccattcctcagaaaactaggcgtacctcatcggagcaagccgtggcactcccgagatctgaggaaccagcctcctgcaacggaaaactgcctctaggcgccgaagagtcggtggctcctcctgggggcagcaggaaggaggtggccggaatggactatttagccgtgccttctccactggcatggtccaaggcgcggatagggggccattctccaatattcaggacgtctgccttaccgccgctggattggcccctccctagccagtacgaacaactggagctgcgcatagaagtccaaccaagagctcatcaccgtgcacactacgaaacggagggctcaaggggggcagtgaaagccgcccccggcggacatcctgtcgtcaaactgctgggatattcagaaaagcccctgacgctgcagatgttcatcggtaccgccgacgaacgcaatcttcggccgcacgcgttctaccaggtgcaccggatcactggcaagatggttgcgaccgccagctacgaggccgtggtttcgggaacgaaggtattggaaatgactttgctccctgagaataatatggcagccaatatcgactgcgctggaatccttaagctgcggaattcggacatagaacttcgaaagggagaaacagatataggtcgcaagaatactagagtccgcctggtttttcgggtgcatgtgcctcagggaggcggtaaagtagtgtctgttcaggcagctagcgtgccaatcgagtgttcacagcgttcagcccaggaactcccacaggttgaagcttacagcccctcggcctgctccgtgcgagggggtgaagagctggttttgactggatccaattttctgccagacagtaaagtggttttcattgagcgagggcctgatggcaagctgcaatgggaggaggaagccacagtcaaccgcttgcagtccaatgaagtcaccttaaccctaacggtacccgagtattccaacaagagagtgagcagaccggtacaggtatacttttacgttagtaacggtcgtaggaaaaggagccccacccaatctttcagatttctccccgtgatttgtaaggaggaacccctgccagactctagtctaagaggatttccatcagcaagcgccacaccattcggcacggacatggacttcagcccgccaagacccccctacccttcttatccccatgaggaccccgcttgtgaaaccccctacttgagcgagggcttcggctatggtatgcctcccttatacccacagaccggcccccctcccagttaccgccccggactcaggatgttccccgagacccgcggcaccacggggtgtgcccagccgcctgcagtgtcctttttgcccaggccttttcccagcgacccttacggaggcagagggtcatccttcagtctcggactgccgttttccccccctgcacccttccggcctccaccacttccagccagcccaccactggaggggcctttcccctctcaatctgatgttcaccctctgcctgcagagggctacaacaaggtgggccctggctacggccctggcgaaggtgcccccgaacaagaaaaaagccgaggcggctatagctctggtttcagagattcggtacccatccagggcatcactctggaagagggcggctgtggcacagggggatgcgaatgcgagtgcgtacaggagatagccctgcatgtgtgttag

SEQ ID NO: 25372 - DNA, 2745 bp, synthetic construct
  misc_feature 1..2745: note = Description of Artificial Sequence: Synthetic coding sequence
  source 1..2745: mol_type = other DNA
atgctgagcggccgggacctgggcgcccccgccggcagcatgggcgctgcgagttgcgaggacgaggaactggaattcaagttagtgttcggcgaggagaaagaggctcccccactgggtgctgggggactcggcgaagaactagattcggaggacgccccgccctgttgcagactggcactgggcgagccgcccccttatggagccgccccaatcggtataccgcgcccaccacctccccgaccaggaatgcatagccccccccccagacctgccccctctccggggacttgggaatcccagccggctcggagcgtgcggcttggaggccctggaggtggcgctggcggcgccgggggagggcgggtattggaatgtccatctatccgcattacctctataagtccaacgcctgagccccccgccgcattagaagataacccagatgcctggggcgacggtagtccaagggattatcctccgcccgagggattcggcgggtaccgcgaggcaggaggacagggggggggagcctttttttcaccatccccaggctcctcttcgctctctagctggagtttctttagtgacgcgtctgacgaggctgcactgtacgctgcttgcgatgaagtcgaaagtgaacttaatgaggccgcgagtaggttcggactgggatctcccttgccaagccctcgggctagcccccgaccttggacacctgaggatccatggtccctctacggaccaagcccagggggcagaggccccgaagacagctggttgctgttgagcgcgcccggccctacacctgccagtcctcgaccagcttccccctgcggcaaacggcggtatagcagcagcggcaccccatccagtgcttctcccgctctcagccgtcgtgggagcctgggcgaggagggctccgaaccacccccgcccccaccacttcctctagcacgggatcctgggtcccccgggccgttcgattatgtgggggcccctcctgcagagtcgataccacagaagactcgccgtacctcttcagaacaggctgtggccctgcctaggtccgaggaacccgcgtcttgtaatggtaagctacccttgggcgcagaggaatctgttgcacccccgggggggagccggaaggaggtcgctggcatggattacctggccgtccccagcccactggcttggtccaaagccaggatcggaggacacagcccaattttccggacatccgccctgcccccattggactggccattaccgtcccagtatgagcaactcgagctgcgaattgaagtccaaccacgagcgcaccacagggcgcactacgaaaccgagggttccaggggcgccgttaaggccgcccccggtggtcatccagttgtgaagcttctcggatattccgaaaaaccgctgacacttcagatgtttattggaactgccgatgagcgtaatctcaggccccacgcattctaccaggtccaccgaatcacaggcaagatggtggctacagcctcttatgaagccgttgtgtccggcacaaaggtcctggagatgaccttgctaccggagaataacatggccgccaatatcgactgtgccggcattctaaagttaaggaatagtgacattgaactgcgtaagggggaaacggatattggccgcaagaatacccgcgtcaggctcgtgtttcgggtccatgtgcctcagggtggaggaaaggtggtttccgtgcaggcggcctccgtgccgatcgagtgcagtcaacggtccgcgcaggagctcccccaggtagaggcatactctccctccgcatgttccgttcgagggggcgaagagctggttttaacgggtagtaacttcctgcctgacagtaaagtcgtttttatcgaacgaggacccgatgggaagcttcagtgggaggaggaggctactgtcaataggctgcagtcaaatgaggtcaccttaacgttgactgtacccgaatacagcaacaagcgtgttagcaggccagttcaggtctacttttacgtgagcaatgggcggaggaagcgcagccctacacagtcctttcgtttcttaccggttatttgcaaagaagaaccgttgcctgattcctcccttagaggctttccgtccgcctcagccacacctttcggaaccgacatggatttcagcccccctagacctccttacccttcctacccgcacgaagatccggcatgcgagactccgtacctgagtgaggggtttggatacggaatgccccctctttatccccagacgggaccccctccatcgtatagacctggcttgcgaatgttcccggagactaggggcaccacaggatgtgctcaaccacctgccgtctcatttcttcctaggccttttccaagcgacccatatggtggcagaggctctagcttttccctggggctgccgttttccccccctgccccttttcgccctccacccctccccgccagtcccccacttgaggggccttttccctcacagagcgacgtccacccgttgcccgcagaggggtacaacaaagtgggtcccggttacggaccgggagagggtgcccccgaacaggaaaaatcccgagggggatacagttccggctttagagactctgtgccaatccagggaatcaccctggaggaagggggctgcggaaccggggggtgcgaatgcgaatgcgtccaggagatcgcactgcatgtgtgctag

SEQ ID NO: 25373 - DNA, 2802 bp, synthetic construct
  misc_feature 1..2802: note = Description of Artificial Sequence: Synthetic coding sequence
  source 1..2802: mol_type = other DNA
atggccgacggcggcgccgacagcgccgcccagcggctgcccgaggggcctggacgagtggccccaggaagggatcttggtgcccctgccggttcgatgggagccgcttcctgcgaagatgaagagctagagtttaagttggtgttcggcgaggagaaggaagcccctcctctcggagcagggggacttggggaggaattagacagcgaagacgcccctccttgttgtagactagccctgggcgaacctcctccttacggagctgccccaatagggattccgaggccccctccccctagacccgggatgcactcaccacctccccgacccgctccatcacctggtacatgggaatcccagcctgcccgatcagttcgcctgggtgggcctggtggcggtgcgggcggggcggggggaggcagggtgttggaatgccctagcatcagaatcacatccatctctcctacgcccgagccacccgcagcgttggaagataatccagatgcatggggtgatgggtctcccagggattacccaccacctgaaggattcggaggttatcgggaggctgggggtcaaggcggtggggccttcttcagcccctctccggggtcgtcttcactgtcatcctggtcgttcttctccgacgcttccgacgaggctgctctctatgccgcgtgcgatgaggtggaaagtgagcttaacgaggcagctagcaggttcggacttggctcccctcttccctcccctagagcctcgccacggccctggacccctgaggatccttggtctctgtacggcccctctcccggcggacggggacctgaggattcctggctactgctttccgcacctggccctacacccgcatctcctcgacctgcttccccttgtggaaagagacgatattcttcctctggaactccaagttccgctagtcccgccctctcaagaaggggctctcttggggaagaaggttccgaaccaccccctcctccccccctcccactggcccgggaccctggctctcctggacccttcgattatgtaggcgcccccccggctgagtcaataccacaaaagacgaggagaacgtcttcggagcaggcagtggcgctgcctaggtctgaggaacccgcctcctgcaatggtaaattgccactcggagccgaggagagcgtagcacccccgggcggatctcgaaaagaagtcgccgggatggattacctcgcagttcccagcccgcttgcttggtcaaaagcgcgtattggtggccattctcctattttccgaacctctgccctcccaccccttgattggcccctaccgagccagtacgagcagctcgagctgcgcatcgaagttcagcctagagcccaccacagggctcattatgagaccgagggatctcgcggggctgtgaaagccgctccaggcggccaccctgttgttaagctgctgggctatagcgagaagcctcttacacttcagatgttcattggaactgctgatgagaggaacctgaggccccacgccttttatcaggttcaccgcatcactggtaagatggtggctaccgcttcctatgaagctgtggtgtccgggacaaaagtattagaaatgaccttgctgcctgagaataacatggcggccaatatcgattgcgccgggatcttaaagttacgtaacagcgacatcgagctgcggaagggagaaacagacattggccgcaaaaacacccgggtacgtctggtgtttagagttcacgtgccccaaggcggcgggaaggtggtgtctgtgcaggccgcctctgtgccaatcgagtgcagccagagaagcgcacaagagctcccccaggtagaggcttattctcctagtgcctgcagcgttcgtggcggcgaagaactggttctcactgggagcaacttcttaccagatagcaaggtggtgttcatcgagcgagggcctgacggtaaactccagtgggaggaagaggccacagtcaatagactgcagtctaacgaagtgactttaacactcacggtccctgagtacagcaacaagagagtgtctaggcccgtgcaggtgtatttctatgtgtctaacgggcggagaaagcggtctcctacccagagcttccggttcctgcctgtgatttgcaaggaagaaccccttcctgacagttctctccggggttttccctccgcctctgcgaccccctttggcactgacatggattttagcccgccccgaccgccctatcctagctacccacacgaagaccctgcgtgcgaaaccccatacctctcagaggggttcgggtacgggatgcccccactttatcctcagactggaccacccccttcctaccgacccggtctgcggatgttccccgaaacacgaggaaccaccggctgtgcccagcctcccgccgttagtttcctgcctcgtcctttcccgtctgacccttacggtggaaggggatcgagcttttctcttggcctcccattctctcccccagcgccatttaggccaccccccttaccagcatctcctcccctggagggcccattccccagtcagtccgacgtccaccccctgcccgccgaggggtacaacaaggtgggccctggctatggacccggtgaaggtgcaccagagcaggaaaagagtcgcggagggtactccagcggcttcagggacagtgttccaattcagggcataaccctggaggaaggagggtgcggcacaggagggtgtgagtgcgaatgcgtgcaggagattgctctccatgtgtgctag

SEQ ID NO: 25374 - DNA, 2481 bp, synthetic construct
  misc_feature 1..2481: note = Description of Artificial Sequence: Synthetic coding sequence
  source 1..2481: mol_type = other DNA
atggccgacggcggcgccgacagcgccgcccagcggctgcccgaggggccaggacgagtggcacctggcagggacctgggcgcccctgccggctccatgggggctgccagttgcgaagatgaggagcttgagtttaaacttgtcttcggcgaagaaaaagaggctcctcctttgggagcaggaggcctcggtgaagaactggactcggaagatgccccgccatgttgccgtttggcactcggggagcctcctccatatggagccgcaccaatcggcatcccacgtccccctccccctcggccgggcatgcactctccacctccccgccccgctccgtctcccggtacctgggagagtcaacccgccagaagcgtgcggctaggcgggccagggggcggagctgggggcgcgggaggcggcagggtgctggagtgtccttcaatacggattacctccatctcccccacaccggagccacctgcagcattagaggacaatcccgatgcttggggtgacggttccccaagggattaccctcctcccgaagggtttggcggatatagggaagccggtggccagggagggggtgcattcttttccccttcacctggctcatcttcactctcatcttggagtttcttttctgacgcatctgacgaggctgcactctatgccgcatgtgacgaagtagagtctgaactcaacgaggcagcgtcccggtttggcctgggcagcccgcttccctcgccgagggcaagcccccgtccttggactcccgaggatccttggagtctgtacggcccttctcctggggggcggggccccgaagatagctggttgctgctttcagcccctgggcccacacctgcgtctccaaggcccgcaagcccctgcggcaaacgtaggtatagcagttcgggtacgcctagctcagcctctcccgccctcagcaggcgcggatccttgggggaggagggatctgagcctccaccccctcccccgttaccccttgctcgagatccagggtccccgggtccttttgattacgtgggggccccccctgccgagagtatccctcagaaaacgcgaaggacgagttctgaacaggccgtggccctgcccaggagcgaggaaccagcgagttgcaacggtaaacttcccttgggcgcggaggagtcagtcgccccccccggtggatcccgcaaagaagttgctggcatggactatctggcggtgccctccccgttggcctggtccaaagccaggattggcggtcactctcctatttttcgtacaagcgccctgcctcccctagactggccattgcctagccagtacgagcagcttgagcttcgcatcgaggtccagcctagggctcaccaccgagcacactacgagaccgagggctctcggggagcagtcaaagcagcacccggaggccaccccgtggtgaagctgctgggatattcagagaagccgctgactctgcaaatgttcatcggcaccgctgacgaacgcaaccttaggccccacgccttttatcaggtgcacaggattactggtaaaatggtggcaacggctagctacgaagccgtggtctccggcacaaaggtcctggagatgacccttctgcccgagaataacatggctgctaatatcgactgcgcaggaatactaaaattacggaactcggacatcgagctccgtaaaggcgaaacagatatcggacggaaaaatacgcgggtacggctggtatttcgagtgcacgtgccacaaggcggggggaaggtggtgtctgtgcaggctgcgtctgttccaattgagtgttcacagcggtctgcccaagagctgccccaagtggaggcctacagtccttctgcctgctctgtcagagggggggaagagctggtgctcacagggtcaaactttctgcctgactccaaggtggtgttcatagagcggggtcctgatgggaagctccagtgggaggaagaagccacagtcaacagactgcagtccaatgaagtaacgctgactctgacggtgccagagtactctaataagagggtctctagaccagtgcaggtctatttttatgtctcaaatggacggcgtaagcgctcaccaacccagagcttccggtttttacccgtgatatgcaaggaggagcctctcccagatagtagtctgaggggattcccctcagcttcagcgactcccttcggcaccgacatggatttctccccaccccggccgccctacccttcatacccccatgaggatcctgcatgcgagacgccctacctgtccgaaggctttggatacggaatgcctccgctgtacccccagacaggccccccgcctagctaccgacctggcctgagaatgtttccggaaaccagaggcacaaccgtgtctgagataataggtagggacctgagcggttttccagcgcctcctggagaagagccgccagcctag

SEQ ID NO: 25375 - DNA, 2706 bp, synthetic construct
  misc_feature 1..2706: note = Description of Artificial Sequence: Synthetic coding sequence
  source 1..2706: mol_type = other DNA
atgggcgccgccagctgcgaggacgaggagctggagttcaagctggtgttcggggaggagaaggaggccccccccctcggtgccggtggcttaggagaagaattggacagtgaggatgcacctccttgttgccggttggccttaggcgagcctcctccctacggggctgcaccaattggtattccaaggcctccaccacctaggcctgggatgcatagcccccccccgagaccagcccctagccccggaacctgggaatcccaaccggccagatctgtgagactaggcggtcctggtggaggagcaggcggtgccggcggaggtcgggtcctcgagtgcccgtcgattcggattacaagtatttctccgacgcctgaaccacccgccgccctggaagacaacccagatgcctggggagatggttcacccagggactatccaccccccgaaggttttggcggctatcgtgaagccgggggtcagggtggcggcgcatttttttccccatcgccgggcagttccagcctctcaagctggtctttcttctctgacgcttcagacgaggccgcgctatacgccgcatgtgatgaggttgagagcgagcttaatgaggccgccagccggttcggtctgggatcaccattgcccagcccccgcgccagtccaagaccgtggacacctgaagatccatggtccctgtatggcccaagccccggtggccgcgggccagaagattcttggttactcctcagtgcacccggccctactcctgcctcccccaggcccgcaagcccttgtggcaagaggagatactcatcttctggaacaccaagcagtgcatccccagccctttcaaggcgcgggtcattgggcgaagagggcagtgagcctccaccgcctcctccactcccactggccagagaccccggctcgcccggccccttcgactacgttggagcgccccctgccgaatcaatccctcagaagacccgtaggactagctccgagcaggccgtggccctcccccgatccgaggaacctgcctcctgtaacggcaagctcccattaggcgctgaggaatctgtcgccccccccggcggcagccgcaaggaggtcgctggcatggattatttggcagtccctagcccgctcgcctggtcaaaggctagaattggtggccactcacccatctttaggacttcagccctgcccccgctggattggcctctgccctcccagtacgaacagctggagctgaggatcgaggttcaaccgagggctcaccaccgagctcattacgagacggaaggctcaaggggcgccgtcaaggctgccccaggaggccatccggtggtgaagctccttggctacagcgagaagcccctgaccctgcaaatgttcattggcacagccgatgagaggaatttgcgaccccacgccttctaccaggtgcacagaattacaggcaaaatggttgccaccgctagttatgaagcagtggtcagcggaactaaagtgctggaaatgacactgctccctgaaaataacatggctgccaatatcgactgtgccggcatcctgaagctgagaaattccgacatagaactgcggaagggtgaaacagacatcggccgcaaaaatactcgtgtgcggcttgtctttcgagtgcacgtcccacaggggggggggaaggttgtgagtgttcaggccgcctctgtgcccatcgagtgttcacagcgcagcgcgcaggaacttccacaagttgaggcctatagtccttctgcatgctcggttcgtggcggagaagaacttgttctcactggaagtaacttcctcccggactctaaggtggtgtttattgagaggggcccagatggtaaattgcaatgggaggaggaggccacagtgaatcgcctgcaaagtaacgaggtgacactcacgcttaccgtgcccgaatacagcaacaaaagagtgagcagaccagtccaggtgtacttctacgtgtctaacggtagacggaagagaagtccaacacagagcttcagatttcttcctgtgatttgcaaggaggagccgctcccagatagctcactgcggggcttcccttcagcaagtgcgactcccttcggcaccgatatggacttttccccacctaggccaccatatcccagctacccacacgaagaccctgcatgcgaaactccctatctgtcagaggggttcggctatggaatgccacctctgtacccacagactggaccgccgccctcgtataggcccggattgagaatgtttcccgaaaccagagggacaacggggtgcgctcaaccacctgctgtgtccttcctaccccggccttttcctagcgacccatacggtgggagaggatcttctttctctttgggcctccctttctctccgccggccccctttaggccacccccgctacctgcatctcctcctctcgaggggccatttcctagccagtcagacgtgcaccctcttcctgctgaaggttacaacaaggtcgggcctggctatggccccggagaaggggccccggagcaggaaaaatcccggggcggttacagctctgggttcagggactccgtgccaattcaaggcataactttggaggaaggtggctgcggcactggtgggtgcgagtgcgaatgtgtgcaagagattgcgctgcacgtgtgttag

SEQ ID NO: 25376 - DNA, 2499 bp, synthetic construct
  misc_feature 1..2499: note = Description of Artificial Sequence: Synthetic coding sequence
  source 1..2499: mol_type = other DNA
atgcacagcccccccccccggcccgcccccagccccggcacctgggagagccagcctgcgcgcagcgttcgcctgggtgggcccggcggaggtgctggaggagccggcggcggtagagtgctggagtgtccgagcattaggataacatccatatccccaacccccgaacctcctgcggcactcgaggacaatcctgatgcctggggggacgggtccccaagagactatcctcctcctgagggattcggaggctacagagaagccggaggtcagggcggtggtgcctttttctctccctcaccaggcagcagctccctatccagctggtctttttttagcgatgcctccgatgaggcggccctctacgctgcttgtgatgaggttgagagcgaactgaacgaagccgcatcacgattcggactggggtcacccctgccctctccacgggccagccctagaccctggacccctgaagatccatggtccctctatggaccgagtccaggcggtcgcggccctgaagatagctggctgctgctctccgctcctggaccgacccccgctagcccccgccctgcctccccttgcggaaagcggcgttactcctcttcaggcacgccttcatcggcctctcccgccctctcccggaggggaagccttggcgaggaggggtctgaaccgccacccccgccccccttgcctctggcgagagatcctgggtcacccggcccattcgactacgtgggggctccacccgctgaaagcatcccacagaaaactcgtcggaccagctccgagcaagcagttgcattaccaagatcagaagaacccgcatcttgtaacggcaaactccctctaggagctgaagagtcggtggccccccctggaggttctcgcaaagaagtggctggcatggactaccttgcggtaccatcgcccttagcctggtcaaaggctcgcataggtggacattctccgattttccggacctcggctctgccccccttggattggcctctgccctctcagtacgagcagctggaactgcggattgaggttcagccccgtgcccaccaccgcgctcactacgaaactgagggtagtcgcggtgccgtcaaggcagccccgggaggtcatcctgttgttaagctgttgggctacagtgaaaaacctctgacgctccaaatgttcatcggaacagcggatgagcggaacttacggccacatgccttttatcaggttcacaggataactggtaagatggtggctacagcatcctacgaggcagtagtatctggtactaaggtgctcgaaatgacactgctgcctgaaaataatatggccgcgaacattgattgtgccggaatcctcaaacttcggaatagcgacatcgagcttaggaagggagaaacggatatcgggaggaagaacacccgtgtgcgactggtgttccgagttcacgttccacaaggggggggcaaggttgtaagcgtgcaagcagcctcagtgcctattgagtgctcacagcggagcgctcaggagctgccgcaagttgaggcctacagtccctccgcttgctccgtgagaggaggagaggagttagtcttgactggctctaattttttaccagacagtaaggtagtctttattgagaggggccctgacggtaagctgcagtgggaggaggaagccacagtgaatagattacaatcaaacgaagtgacattgacgctgacggtccctgagtatagcaataagcgagtaagtcggcctgtacaggtgtacttctacgtgtccaacggacgccgcaaacgctcgcctactcagtccttccgcttcctgcctgttatatgtaaggaagagcccctgcctgactcatctctaagagggttcccgtctgcctccgctactcctttcggtaccgacatggacttctccccgcctcgaccaccctacccatcctacccacacgaagacccagcttgcgaaacgccctatctgtccgagggtttcggatacggcatgcctcctctctatccccaaacgggaccaccaccgagttaccgccctggactcaggatgtttcctgagacaagaggcaccacggggtgtgctcagcctccggcggtaagcttccttcctcggcctttccctagcgacccctacggcggtcgaggatcttcatttagcttgggattgcccttttcacctcctgcccctttccgcccccctcccctacccgcaagtccccctctggaaggaccctttcctagtcagtcagacgtccatccgcttcctgcagaagggtacaacaaagttggcccaggatacggcccgggggaaggcgccccggagcaggagaaaagccgagggggctacagctccggattcagagactccgtccctatacagggaataacacttgaggaggtgtcggaaattataggccgagatctgagcggcttcccagccccaccgggcgaagagccaccggcctag

SEQ ID NO: 25377 - DNA, 2385 bp, synthetic construct
  misc_feature 1..2385: note = Description of Artificial Sequence: Synthetic coding sequence
  source 1..2385: mol_type = other DNA
atgggcgccgccagctgcgaggacgaggagctggagttcaagctggtatttggcgaagaaaaggaggcccctcctctgggcgctggcggcctaggggaggagctggacagtgaagacgcacccccatgttgtcgcttggccctgggggagcctccgccttatggcgcagcgcctattggaataccccgccccccacccccccgccctggtatgcactcaccaccaccccgccctgcaccctctcccggcacctgggagtcacagccggcaaggagcgtgagactgggcggacccggcgggggcgccggcggggctggaggcggccgcgtgttagagtgtcccagcattcgcatcacatctatttcgccgacacctgaaccgccagccgcacttgaggataatcctgatgcttggggcgatgggtcacctagggactacccccccccagagggcttcggaggctacagagaagctggggggcaggggggcggggctttcttctctccctcaccagggtccagctctctttctagttggtccttcttctccgatgctagcgatgaagccgctctatatgcggcatgcgacgaggttgagagcgaattaaatgaggcggcctcccgttttggcctcggcagtcctctcccatccccccgcgcatctccgaggccctggacccctgaagatccctggtcgctgtacgggcccagccccggcggcagaggaccggaagattcctggttgctcctgagcgctcctggacctaccccggctagtccacgccccgcaagcccttgtggcaagcgtagatattcttcttctgggactccgtcatcagcatctccagctttaagtaggcggggctcactcggagaagaaggaagcgagccaccgccaccccccccattgccactcgccagggatccaggttcccccggcccattcgattacgtaggcgctccaccagctgagtcgatccctcaaaaaacacgacgcacgagctcggagcaggccgtcgccctcccaaggagtgaggaacccgcttcttgcaacggaaagctccccttgggcgcggaagaatctgtggccccacccggggggtcaagaaaggaggttgccggaatggattatctggcggtgccatctcccctcgcttggtctaaggccaggatcgggggccactcgccgatctttaggacctctgctctgcctcccctggactggcccctgccatcgcaatatgagcagctcgaacttaggatcgaggtccagccaagagcccaccacagggcccactacgaaacggagggtagcaggggggccgttaaggcagccccgggagggcatcccgtcgtgaaactgctggggtatagtgaaaaaccgcttacgctgcagatgtttattggaaccgctgacgagaggaatctaaggccacatgctttctaccaagtgcaccgcattaccggcaagatggtggcaaccgccagctatgaagccgtggtaagcgggaccaaagttctggagatgaccctgctgcccgaaaataatatggctgcaaacatcgattgcgcaggtatcctcaagctgcggaattcggatattgagctccggaagggagagacagatatcggcagaaaaaacacaagagtcagactggtgtttagagtccatgtgccgcagggcggcggtaaggtggttagcgtgcaggcggcttcagtgcccatcgaatgttcccagcggtctgctcaggaattaccgcaggttgaggcctattctccctcagcatgttccgtgcggggcggggaagagctggtcctcaccggtagcaatttcctgcctgactcaaaagtggtgtttatcgaacgcggaccagatggaaaattgcagtgggaggaagaggctaccgtgaatagactgcagtcgaatgaggtgaccttaactctgacagtcccggagtattctaataaacgcgtgtcaagaccggttcaagtctacttctatgtgagtaacggcagacgaaagagaagtcctactcagtcttttcgctttcttcccgtgatttgtaaggaggagcccctgccggacagctcgctgcggggctttccatccgccagcgctactcccttcggcaccgatatggatttttcgccccctcgacctccatacccatcttatccgcatgaggatcccgcttgtgaaacaccctacctgagtgaaggattcggttatggtatgcccccactgtaccctcaaaccgggccccctccttcctataggccaggtctcaggatgtttcccgaaactaggggcacaacggtgagcgagattattgggcgggatctatcagggttccctgctcctccgggagaagagcctcctgcctag

SEQ ID NO: 25378 - DNA, 2499 bp, synthetic construct
  misc_feature 1..2499: note = Description of Artificial Sequence: Synthetic coding sequence
  source 1..2499: mol_type = other DNA
atgcacagcccccccccccggcccgcccccagccccggcacctgggagagtcagcctgcgcgctccgtgcgactgggagggcctgggggtggggcaggtggcgccggaggcgggcgggtcctggagtgtccttcgatccggattacatccatctccccaacccctgagcctccagcagccctggaagacaaccccgatgcctggggggacgggtcaccccgcgattaccctcccccggaagggtttggaggttaccgagaagcgggcggccagggcggaggggcttttttctcacctagccccgggtctagctctctgtctagttggagttttttcagtgatgcttcggatgaggccgcgctgtacgctgcttgtgatgaagttgaatccgaacttaacgaggctgcttccaggttcggcttaggcagccctctcccatcaccaagagcctcccctcgaccatggacccctgaagacccctggtccttgtatgggccctctccagggggcagaggtccagaggactcgtggctgttgctcagcgcccctggccccacaccggcgtctccaaggccagccagcccttgtggaaagcgcaggtattcctcatctggtacgccaagctccgcatccccggccttaagccgcaggggcagcctgggagaggaaggatccgaacccccaccacctcctcccttaccactggcacgggaccctggaagccctggaccatttgactatgtcggtgctcccccagccgagtcgatcccccagaagacccgccggacctcatctgagcaggctgttgcgctcccaagaagtgaggagccagccagctgcaatgggaagcttcccttaggagctgaggaatctgtggcaccccctggcggaagcaggaaggaagttgcagggatggattatttagcagtaccttcacccctggcctggtcgaaggcccggatcggcggtcactcaccaatcttccggacctctgcccttccgcctctcgactggcccctccccagccagtacgaacagttggaactaagaatcgaggttcaacccagagcccaccacagggcccactacgaaaccgagggaagtaggggtgctgttaaggccgctccaggcgggcaccccgtcgtcaagctcctgggctactctgagaagccccttacacttcagatgttcattggtacggctgacgaacgcaacttacgcccacatgctttctatcaggtgcacagaatcactggtaaaatggtcgctactgcttcttacgaagcagttgtaagtggcacgaaggtgctggaaatgacactgctcccagagaacaacatggccgcgaacatcgactgcgcaggtatcttgaagttgaggaatagcgacattgagcttagaaagggcgaaaccgatatcggccggaaaaatacacgggtgcggctggtcttccgagtccatgtgcctcagggaggcggtaaggtcgttagcgtccaggccgcgagtgtccctatcgagtgcagtcaacggagcgcccaggagttgcctcaagtggaagcatattcgccatctgcctgcagcgtccggggaggcgaggagctggtgctaaccggaagcaacttcttgcctgatagcaaggtggtctttatagaacggggacccgacggtaaactgcagtgggaagaagaggccactgtaaatcgactgcagtcaaacgaagtcaccctcaccctgaccgtacccgaatacagcaacaagcgtgtgagcaggcctgtgcaggtatacttttacgtgagcaatggacgaagaaaaaggtctcccactcagagcttccggttcttgcctgttatctgcaaagaagagcccctgccagacagtagcttgcgtggcttcccctccgcctccgcgacaccatttggaacagacatggacttttctccacctcgccctccctacccctcatacccccacgaagatcctgcttgtgagaccccttatctgagtgaaggcttcggatacggaatgccacccctgtacccccagacagggcctccccccagctaccgaccagggctacgcatgtttccagaaacgagagggacgacgggatgtgctcagcctccagcagtttctttcttacccaggccattcccgtctgacccctatgggggcagaggctcaagtttcagcttagggcttcctttttctcctcctgcaccattccgacctccgcctctcccggcctccccaccgcttgaaggacccttcccctcccaatccgacgtgcacccactccccgccgagggctacaataaggtggggcccgggtatggtcccggtgagggtgccccagaacaggaaaaatccaggggagggtactccagcggcttccgtgatagcgtgccgatacaaggcatcaccctggaggaagtcagcgaaatcattggccgggatcttagcgggttcccagccccccctggagaggagccccccgcctag

SEQ ID NO: 25379 - DNA, 990 bp, synthetic construct
  misc_feature 1..990: note = Description of Artificial Sequence: Synthetic coding sequence
  source 1..990: mol_type = other DNA
atgttcatcggcaccgccgacgagcggaacctgcggccccacgccttttatcaggtgcatcgcattacagggaaaatggtggccaccgctagttacgaagccgtcgtatcaggtactaaagttttagaaatgaccctgctcccggagaataatatggcggccaacattgattgcgccggcatcttgaaactccgcaactcagacattgagctgcgaaaaggtgagaccgacataggtagaaagaatacccgggtcaggctggtctttcgggtgcacgtcccacagggcggtggcaaagtggtgtctgtgcaggccgcctctgttccaatcgagtgtagtcaacgaagcgcacaggaactgccacaggtcgaggcctattccccaagtgcgtgtagtgttcgcggaggggaagaactggtgctgactggatccaacttcctgcccgactctaaggtcgtgtttatagagcgcggacccgatggaaaacttcaatgggaagaagaagccaccgttaaccgcctgcagtccaatgaagtaaccctgacccttacagtgcctgagtattctaacaagcgagttagcaggcccgtgcaagtttacttttatgtctcaaacggacggcgcaaaaggagccctactcaatcttttagattcctgccagtcatttgtaaggaagaacccctgcccgattcttcgctccggggcttcccctcggcctccgcaaccccatttggaacggatatggatttctcaccgccgagacccccttatcctagctacccccacgaggatcccgcctgtgaaaccccatacttgtcagagggtttcggctacggcatgccgccgctctatccccagaccggtcctcctccctcatatcgacctggtctgcggatgttccctgagacccgaggcacaaccgtgagcgagattatcggccgggatctgagcggttttcccgccccaccaggagaggagccaccggcctag

SEQ ID NO: 25380 - DNA, 2574 bp, synthetic construct
  misc_feature 1..2574: note = Description of Artificial Sequence: Synthetic coding sequence
  source 1..2574: mol_type = other DNA
atgatcaccaccctgcccagcctgctgcccgccagcctggccagcatcagccacagagtgaccaacctgcccagcaattctctatctcataaccccggactcagtaagcccgactttcccggcaatagcagcccaggcctgcctagctccagctcacctggccgtgatttgggagctcctgccgggagtatgggagccgccagctgtgaagacgaggaattggagttcaagctcgtattcggcgaagaaaaagaggctccaccactaggcgccgggggtctgggagaggaacttgatagcgaggacgctccaccgtgctgtagacttgctctcggtgaaccccctccatatggagctgctcccatcggcatacctcggcccccgccccctcgcccggggatgcattcgccacctccccgcccagccccaagccccggtacctgggagtctcagcccgccagaagtgtccgtctggggggccccggtggtggtgcgggaggcgccggaggcggtagggtgttagagtgcccatccataagaataaccagcatttcccccacacctgagcctcccgcggctctggaagacaaccccgacgcatggggcgacgggtcacctcgagattatcctcccccagaggggttcgggggctacagggaagcgggcggacaggggggcggcgctttcttctcgccgagccccgggagctcctcgctgagcagctggagctttttttccgacgcgagcgatgaggcagctctttatgccgcgtgtgacgaagtcgagtctgaactgaatgaagctgcgtcacggtttggcctcggaagtcccctgccttctccacgggcaagtcccagaccctggactccagaggacccctggtctctgtatgggcccagcccagggggtcggggacctgaggacagttggctgctcctttccgcaccaggtcccactccagcatcacctcggcccgcttctccctgtggcaagcgtagatactcaagcagtggtacaccatcaagcgcgagtccggcactgagccgaaggggcagcctcggggaggagggctcagaacctccaccgccaccgcctctgcctctagccagggaccccggatcacctgggccattcgattatgttggcgcccccccagctgagtcaattccacagaagactagacgtacttccagcgagcaggctgtggctcttccccggagtgaggaaccagctagctgcaatggtaagctgcctctgggggcagaggagagcgtcgctcctccggggggcagtcggaaggaagtggccggcatggattatttggcagtacctagtcctcttgcctggtcaaaagctagaattggaggacacagcccgatatttcgaacttctgcactgcccccccttgattggcctctcccttctcaatacgaacaactcgaactgagaattgaggtccagccccgggctcaccaccgagcacattatgagaccgaaggttcaagaggtgcggtgaaggctgccccaggcggacacccagttgtgaaattgttaggatatagtgaaaaaccgctcacgctgcagatgttcataggtaccgctgatgaaaggaacctgcggcctcacgcattctatcaggtccatcgcattactgggaaaatggtcgcgaccgctagttacgaagcggtggtgagcgggacaaaggtgttagaaatgactttgctacccgaaaacaacatggcggctaatatcgactgcgctggcatactcaagcttaggaacagcgacatcgagttgcgtaagggtgaaacagatattggaagaaaaaatacccgcgtgcgactggtgtttagggtgcatgtaccccaggggggcggcaaggtggtctctgtgcaagccgcttcagtccctatcgaatgttcccaaagaagtgctcaggaacttccccaagtggaggcgtactcgccgagcgcctgtagcgtgcgggggggcgaggagctggtgctcacaggctcaaactttttgcccgactccaaggtcgtgtttattgagagggggcctgatggaaaactgcaatgggaggaagaggctaccgttaaccgacttcaaagcaacgaggtaaccctgacgttaacagtgcctgagtatagtaataaaagggtgagcaggcctgtacaggtgtatttctacgtctcaaacggacgacgcaaacgcagcccgacccaatcctttcggttcctgcctgttatatgtaaggaggagccattacctgacagctccctgaggggattcccgtcagcttccgccacccctttcggaacggatatggatttctcgcctccgagacctccctatccttcttatccgcacgaggacccagcttgtgagactccctacctttctgaaggctttgggtatggaatgccccccctgtatcctcagactggtcccccaccaagctaccgtcctggactgcgtatgttccccgagacgcgcggaactacagttagcgagatcatcggcagagatcttagtggctttccagcgcccccaggagaagagccaccagcatag

SEQ ID NO: 25381 - DNA, 2175 bp, synthetic construct
  misc_feature 1..2175: note = Description of Artificial Sequence: Synthetic coding sequence
  source 1..2175: mol_type = other DNA
atgcacagcccccccccccggcccgcccccagccccggcacctgggagagtcagcccgctaggtctgtgcggctggggggtcccggtgggggggccggcggggccggtggaggacgcgttctggagtgtcccagcattcgtatcacgtcaatctctccaacgcctgaaccacctgccgctctcgaagacaacccagatgcctggggcgacggaagccccagagattacccccctccagagggcttcggggggtatagggaggcaggcgggcagggaggcggcgcattctttagcccctcccctggctcttctagcttgagctcatggagctttttttctgatgcctcagatgaggccgccctgtatgcagcttgcgacgaggtggaaagcgagctaaatgaagccgcctctagatttgggcttggttctccactgccttcaccccgggcatcaccaaggccttggacccccgaagacccttggagtctgtatggccctagtcccggggggaggggaccagaggattcctggctgttgctgtcagcccctggccctactcctgcctcacctcgaccagcatcaccctgcgggaagcggcgttattcctccagtggcaccccctcttcggcttcgccagccttgtctaggcgagggtctctgggcgaggagggatctgagcctccccccccaccgcctctgccactggcaagagaccccggctcccctggaccctttgactacgtgggcgccccgcctgcagagtctatcccacagaagacgcgccggacttccagcgaacaggccgtggctctgcctcggagtgaagaacccgcatcctgcaacggcaaactcccactgggagctgaggaaagcgtggctccaccgggcggctcacgcaaggaagtagccggaatggactacctggccgtcccttccccccttgcatggagtaaagcacggattggtggccatagcccgatcttccgtaccagtgccttgccccccctggactggcctctaccgtctcaatacgaacagctcgagctgcggattgaagtgcagcccagagcacaccatagggcgcattatgagactgaaggctcacgaggtgcagttaaggctgctcccggaggccacccagtggtcaaactgcttggatacagcgagaagccactgacactgcagatgttcattggtactgccgatgagaggaatctgcggccacacgctttctatcaggtgcaccggatcaccggaaagatggtagcaacagcatcatatgaggcagtggtctctgggacaaaggtcttagaaatgactctgctgcccgagaataatatggccgccaatatcgattgcgccgggatcttaaagttgcggaacagcgatatcgaattacgcaagggagaaacagacattggccggaaaaatactagagtgcgcctggtatttcgggtgcatgtcccccagggcggggggaaagttgtctctgtccaggctgcctcggtgccgattgagtgctctcaacggagtgcccaggagctgccccaggtcgaagcatactctccttccgcatgttcggtgcggggaggtgaggagcttgtgctcacgggttctaatttcctgcctgatagtaaagttgttttcatcgagcgtggccctgacggtaagttgcagtgggaagaagaagccacagtgaatcgccttcaatcaaacgaggtgacattaacgttaactgtgcctgagtactctaacaaaagagtgtcacgtcccgtgcaggtctatttttacgtaagcaatggcagacggaaaagaagccccactcaaagttttagattcttgcccgtgatttgcaaagaagagccgttacccgactccagcctgagaggattcccttccgcctcggccaccccattcgggactgatatggacttctctccacccaggccaccatacccttcctatccacatgaggaccctgcttgcgagactccgtatctcagtgaaggctttggctacgggatgcccccactttatccgcagacggggcctccacccagctaccggccggggttgagaatgttcccagagacacgcggaaccaccgtgagtgaaatcataggaagagatctgtcaggctttcccgctcctcccggagaagagccgcctgcttag

SEQ ID NO: 25382 - DNA, 432 bp, synthetic construct
  misc_feature 1..432: note = Description of Artificial Sequence: Synthetic coding sequence
  source 1..432: mol_type = other DNA
atgggcgccgccagctgcgaggacgaggagctggagttcaagctggtttttggagaggagaaagaagcacctcctcttggagccggcggactgggcgaagaattagatagcgaggatgcccccccatgttgtagattggccttgggggagccccctccctatggggccgccccaatcggcatcccccggccgccacctccccggccagggatgcattctcctcctccccggcccgccccctcccccgggacgtgggagagccagcctgcaaggtcagtgcgtctgggaggaccaggtggcggagctgggggcgcaggtggggggcgcgtgctcgaatgccccagcatccggataaccagcatctcccccactcccgaaccgcctgctgctctcgaggataatcctgacgcgtggggagatgggagtccctag

SEQ ID NO: 25383 - DNA, 2424 bp, synthetic construct
  misc_feature 1..2424: note = Description of Artificial Sequence: Synthetic coding sequence
  source 1..2424: mol_type = other DNA
atgctgagcggccgggacctgggcgcccccgccggcagcatgggcgcagccagctgtgaggatgaagagctagagtttaagctcgtgttcggtgaagagaaggaggcaccgcctctgggggccgggggacttggagaagagctggatagcgaggacgcaccaccctgctgccgtttggctctcggcgaaccccctccctatggtgcagcccccattggcatcccccgccctcctcctcctcggcctggaatgcactccccaccgccccgacctgccccatctccgggcacctgggagagccagcccgcccgcagtgttaggctcggtggaccagggggaggcgctggaggcgcaggcggcggccgcgtgctggagtgccccagcatccgaataacctctatatctccaactccagaaccacccgccgccctggaggacaatcctgacgcctggggtgacgggagcccccgggactaccctccgccagagggctttgggggctatagggaagcgggtggtcagggagggggcgcctttttctctccttccccagggagctcatctctctcctcttggagctttttctccgacgcatcagacgaggcagccttgtacgcggcatgcgatgaggtggaatccgagctgaacgaggcagcttccaggtttgggctagggtcccccctaccctcgcctcgtgccagccctcgaccttggaccccagaggatccttggagcctgtacgggccctctcccggagggcgcggaccagaagatagctggctgttgttgtctgctccgggcccgaccccagcgtccccgaggcccgccagtccatgtggcaaaagaagatactcctcatccggcacaccatccagcgcctccccagctttgagtcggcggggtagcctgggagaggagggcagtgaaccaccccctccccctccactgccactggcacgcgacccaggctctcccggcccgttcgattacgtgggtgccccccccgcggagtccattccccagaagaccagacggacctcctccgagcaggcggtcgcacttcctcgctccgaggagcccgcctcttgtaacggaaagctccctttgggagcagaggaatcagtggctccgcccggagggtctaggaaggaggttgccggtatggattacttggccgtgccatcgccactggcttggtccaaggcgaggatcggtggccacagccctatatttagaacctctgccctgccaccactcgattggcctctgccctctcaatacgaacagttggaactacggatcgaagtccaacctagagcccatcacagagctcactacgagaccgagggctctcggggggctgtcaaggcggctcccggcggacatcctgtggtaaaactgctggggtatagtgagaaacccctgacactgcagatgtttattggcactgccgacgagcggaacctgcggcctcacgccttttatcaagtgcatagaatcaccggcaaaatggtggcaaccgcatcttacgaggctgttgtctccggtactaaggtgcttgagatgacactccttcctgagaataatatggctgcaaacatcgattgcgccggcattctcaagctgaggaattccgacatcgagctcaggaagggagaaactgacatcggcagaaagaatacccgcgtgcgtctggtcttccgtgtgcacgtgccacagggaggaggtaaagtggtcagcgtccaggcagcctctgttccaatcgagtgttcccagcggtcggcccaggaattgccccaagttgaagcttattctccatctgcgtgcagtgtcaggggtggcgaggaactggtactgacaggaagcaattttctccctgacagtaaagtggtgttcattgagagagggcctgacggtaagctgcagtgggaagaagaagccactgtcaatcgtctccagtcaaacgaggtgaccctcacattgaccgtgcctgaatactccaataaacgcgtgtccagacccgtacaggtgtatttttatgtgagtaacggcaggcgaaaaaggagcccaacgcagtctttcagatttttgccggtgatctgcaaagaggaaccgctcccagactccagtctgcgcgggtttccatctgccagtgccaccccattcggtacagatatggatttcagcccgccccggcccccttacccgtcctacccacacgaagacccagcctgcgaaactccttatctctccgaggggttcgggtacggcatgccccctctgtaccctcagacaggcccccctccatcatatcggcccggactgagaatgtttccagagacacgaggtacaaccgtttccgagatcatcggcagggacctatctggtttccctgcccctcccggagaagagccaccagcatag

SEQ ID NO: 25384 - DNA, 1311 bp, synthetic construct
  misc_feature 1..1311: note = Description of Artificial Sequence: Synthetic coding sequence
  source 1..1311: mol_type = other DNA
atgttcatcggcaccgccgacgagcggaacctgcggccccacgccttctatcaggttcatcggattaccggtaaaatggtggccaccgccagttacgaagctgtggtgagcggcactaaagtgctggaaatgaccctgctcccagaaaacaatatggctgcaaacatcgactgtgcaggcatcttgaagttaaggaactcggatattgagttgcgcaaaggcgagacagatattggaagaaaaaacactagggtgagactcgtgtttagagtccacgtccctcaagggggaggaaaagtagtgagcgtgcaggccgcaagcgttcccatcgaatgttcacagcggagtgctcaggaactgccccaagtcgaggcctactccccttccgcatgctcagtacggggcggggaggagctggtcttgaccgggtctaacttcctcccggactccaaggttgtgttcattgaacgtggccccgacgggaaacttcagtgggaagaggaggctactgttaatcgactgcagagcaacgaagtgactctcacgctaacagttcctgagtactctaataagagagtatctcgacccgtgcaggtgtatttttatgtatccaacgggcgacgaaagcgctctccaacacaaagcttccgcttcctgccggtgatttgcaaggaggagccactgcccgactcttccttgcgcggtttcccgagtgcatctgctactccatttgggaccgacatggacttttccccacctaggcccccatacccatcataccctcacgaagaccccgcctgtgaaaccccatacctctccgagggttttgggtatggcatgccccccctataccctcagacgggtcctcctcctagctataggcctggactacgtatgtttcctgagaccagaggaacaaccggctgcgcgcagcctcccgccgtgagttttcttcctcgcccttttccctctgatccctacggcggaagaggcagctcttttagcctgggcctgcccttcagcccacccgcaccattcagacccccccctctgcctgccagcccgccattggaaggaccatttccatctcagtctgatgtgcaccccctgcccgccgaaggctataataaggtcgggccaggctacggtccaggtgaaggtgcacctgaacaagaaaagagccgcgggggatacagctctggctttagggattcagttcccatccaaggaatcactcttgaggagggaggctgtggtactgggggatgcgagtgtgagtgcgtccaagagatagctcttcacgtttgctag

SEQ ID NO: 25385 - DNA, 570 bp, synthetic construct
  misc_feature 1..570: note = Description of Artificial Sequence: Synthetic coding sequence
  source 1..570: mol_type = other DNA
atggacttcagccccccccggcccccctaccccagctacccccacgaggacccagcttgtgagactccatacctcagcgaaggttttggctatggtatgccccctctctatcctcagaccggtccacctccttcttacagaccgggcctgcgcatgttccccgagacgcgcgggactactggatgtgcacagccccccgctgtgagctttttacctcgaccctttccctcggatccttacggcggaagaggaagttccttcagcctcggtctgccattttcaccacccgcgccctttagaccgccacccttgcccgcctctccccctctggagggccctttcccttctcaaagcgacgtacacccgttaccggccgaggggtacaacaaagtgggccctggatatggaccaggcgagggggcgccagagcaggagaaaagccgcgggggttacagtagtggatttcgcgactccgtgcctatccaaggcattaccctggaagaggggggctgcgggacggggggttgcgagtgtgagtgtgttcaggagattgcactccacgtctgttag

SEQ ID NO: 25386 - DNA, 2673 bp, synthetic construct
  misc_feature 1..2673: note = Description of Artificial Sequence: Synthetic coding sequence
  source 1..2673: mol_type = other DNA
atgcccgccagcatcagcagcatcttccccggccccaccctgctgttgagctgcggcagcgaggaactcgacagcgaagatgctcctccctgctgccggctggctctaggtgagccaccaccctatggcgcggcacccatcggcattccaagaccacctccacccagaccggggatgcactcaccccctccacggcctgccccttcacccggcacatgggaaagccagccggcccgaagtgtgcggctcggtggccccgggggtggcgcagggggcgctggtggaggtcgcgtgctggagtgcccatctatcagaattacctcgatatcaccaactcctgagcctcctgctgctctggaggacaatcctgatgcctggggcgatggtagtcctagagactacccacctccggaaggtttcggaggttatagggaagcaggaggacaaggtgggggagccttcttttccccttcacccggatcgagttcactgtcctcttggtccttcttctctgatgcctccgatgaagccgccctgtatgcggcatgcgacgaggtggaaagcgagttgaacgaggccgccagcagatttggcctcggatcacctcttcccagtcctagggcatcaccacggccgtggacccccgaggacccttggagcctttatggaccatcccctgggggacgcggtcccgaagatagctggctgctgctctccgctccggggcccacgccagcctcacctagacccgcctcaccatgtggtaaacgacgatacagcagttctggaacgcccagcagcgcaagtcccgccctcagcagaaggggcagcctaggtgaggagggctccgagccaccccccccacctcctttgcccttggcgagggatcccgggagcccggggccgttcgattatgtcggagccccaccggcagagtcaatccctcagaaaactagaagaaccagctctgagcaggcagtggccctgccccggagcgaagagcccgcttcctgtaatgggaagctgcctctgggggctgaggagtcagtggcgcctccagggggctcccgtaaggaggttgccggaatggattatctggccgtcccttccccgctggcctggagcaaggcacggatcggcggccactcacccatttttcgcacatctgcccttccgcctctggactggcccttgccctctcagtatgagcagctggagttgagaattgaggtgcagcccagggcccaccatcgcgctcactacgaaactgaaggtagtagaggcgcagtgaaggccgctccagggggtcatccggttgtcaagttgttggggtacagcgagaaacccttgaccttgcagatgttcataggcacagcagacgagaggaacctgagaccgcatgccttttaccaagtgcaccgcattacagggaaaatggtggcaaccgcctcctacgaagccgtggtgtccggaactaaggttttagaaatgacactgctacccgagaacaatatggcagcaaacatcgactgtgccgggattctaaaactccggaattctgatatcgaactccgtaagggcgaaactgacatcggtagaaaaaatacccgcgtgcgcctggtttttcgagtccatgttccacagggcggagggaaggtagtgtccgtgcaggccgctagcgtgcctatagagtgttcacagcgctccgctcaagaactaccgcaggtcgaggcatactctccctccgcatgttcggttcgcggcggagaggaattggttcttaccgggtccaatttccttcccgattccaaagtcgtatttatagaaaggggcccagatggaaaactgcagtgggaagaggaggccaccgtcaatcggctccagtccaatgaagtgactctaactctgaccgtcccagagtactccaacaagagggtcagccgaccagtgcaggtgtatttctatgtctccaatggccgtcgtaaaaggtctcccacacagtcatttaggttcttacccgtgatttgtaaagaggaaccccttcctgattcctctttacgggggtttccttctgccagtgccacgccattcggaacggatatggacttcagtccccccagaccaccttacccctcgtacccccacgaagatcctgcctgtgagactccatatctcagtgaaggctttggctacggaatgcctccactgtaccctcagaccgggcctccccccagttatagacctggcctgcgcatgtttcccgagactcgcggaactactggctgtgcacagcctccggcagtctccttcctacccagacccttcccttcggatccctacggaggacgcggaagcagctttagtttagggttgcctttctccccccctgcgcccttcaggcctcctccacttcccgccagtccccctctcgagggaccctttccctcccagtccgacgtgcatcccctgccggctgagggatacaacaaagttggacctggctatggccctggagagggagccccagaacaggaaaaatctcgcggcgggtactcttccggctttcgcgattcagtcccgatccagggaattacactggaagaggtgtctgaaatcattggtagagacctgtctggcttccccgcgcccccgggcgaagagcccccagcctag

SEQ ID NO: 25387 - DNA, 2748 bp, synthetic construct
  misc_feature 1..2748: note = Description of Artificial Sequence: Synthetic coding sequence
  source 1..2748: mol_type = other DNA
atgctgagcggccgggacctgggcgcccccgccggcagcatgggcgcagcaagctgcgaagacgaggagctcgagttcaaactggtgttcggcgaggagaaagaggccccccctctgggagccgggggcctcggtgaagagctggatagtgaggacgctccgccatgctgtcggttagctctcggggaacccccaccctacggtgcagcgccaattggaatcccaagacctccaccaccgcgtccgggcatgcatagccctcctcccagacctgcgccgtcccctggcacatgggagagtcagcctgcaaggtcagttcggctgggcgggcccggcgggggcgctggtggggccggaggcgggagagtgctggaatgtccatccatcaggatcacatcgatctcccccacccccgagcctcctgcagcccttgaggataacccagacgcctggggagacgggagtccccgcgactatcccccacctgagggttttggcggctatcgggaggccgggggccagggggggggggcattcttctcaccgtccccaggctcctctagcctgagctcgtggtccttctttagtgatgcctcagatgaagctgctctttacgcagcttgtgacgaagtggagagtgaattgaacgaggccgcgagccgctttgggcttggaagccctcttccctccccacgagcctcacccaggccatggacacccgaggacccatggagcctatacggcccctccccgggtggtcgggggcccgaggacagctggctgctgctttccgctcccggacctacccctgccagtcccaggcctgcctcaccttgtggcaagcggcgttatagctcttcaggaaccccttcttccgcttcccctgctcttagcaggagaggatctcttggagaagaaggctctgagccacctcccccaccaccccttcctttagctcgcgatcctgggtctccaggtccattcgattacgtaggagctccccccgcagaatctattccccaaaagacccgccgaacaagctctgagcaggccgtggcactgccgcgttctgaggagcccgcgagttgcaacggaaagcttcccctgggagcagaggagtctgtggccccgccaggcgggtcacgcaaggaggtcgccgggatggattaccttgcagtgccatctcctctggcatggagtaaagcacgtatcggagggcattctcctatctttcgcacgtccgcactgcctccattagattggcccctgcccagccagtacgagcagctcgaactcaggatcgaggtccaacctagagcccaccacagagcccattacgaaaccgaaggatcacggggagcagtgaaggcggcccccgggggccatccggttgttaaactacttggctattcggagaaacctctgacactccaaatgttcatcggcaccgccgatgagagaaacctccgacctcatgctttttaccaggtccatcggattacaggaaagatggtggccactgctagctacgaggccgtggtcagcggcactaaagtactggagatgactctgctccctgagaacaacatggcggccaacattgattgtgccgggatcctgaagctgcggaactctgatattgaattacgaaagggggaaaccgatattgggcgcaagaatactcgcgtgcgattggtctttagggtccacgtgcctcaaggggggggcaaggtggtctctgtgcaagcagcttccgtgccgattgaatgttctcagcgatctgcacaggagctgcctcaggttgaggcctatagcccctcagcctgttccgtccgcgggggcgaggaacttgtcttgactggctctaactttttgccagattctaaagtggtgtttatcgaacggggccccgatgggaaacttcagtgggaggaagaagcaaccgtcaacaggctgcagtctaatgaggtgactttgacactaactgtgccagagtatagcaacaagcgggtaagtcgccccgtgcaggtttacttctacgttagcaacggaaggaggaagcggagcccaacacagagtttcagattcctcccggtaatctgcaaagaggagcctctgccagactcgtcgctccgaggcttcccctccgctagcgccactccttttgggaccgacatggactttagccctcctagaccgccctacccgtcctacccccacgaggatccagcctgcgaaacaccctacctgagcgagggattcggctacgggatgcccccactgtacccccagacaggcccacccccctcgtaccgccctgggctaagaatgttccccgagactcggggtactacaggctgcgctcaacctcctgccgtaagctttctgcccaggccttttccaagtgacccttacggagggagggggtcctctttcagcctgggcctgcctttttctccccctgcgcccttccggccacctccacttccagcctctcctccactcgagggacccttcccgagccagagcgacgtccatcccctgccagctgaggggtataacaaggttggtccggggtacgggccgggcgagggagcaccagaacaggagaaatcccgcggcggatactcctcaggtttcagagactccgtgccaatccagggaataaccctggaagaggtgtcagagatcatcggaagagatcttagcgggtttcctgccccccccggcgaagagcctcccgcgtag

SEQ ID NO: 25388 - DNA, 573 bp, synthetic construct
  misc_feature 1..573: note = Description of Artificial Sequence: Synthetic coding sequence
  source 1..573: mol_type = other DNA
atggacttcagccccccccggcccccctaccccagctacccccacgaagatccagcttgcgaaaccccctacctgtctgaaggcttcggatacggcatgccaccattgtacccacagacaggtccgcccccgagctataggccgggtctccggatgtttccggagacacgagggacaacagggtgtgcacagccaccggcagtgagtttcctgcccagacccttcccttcagacccatatggcggccggggttccagtttctccctcggtctccccttcagtcctcctgcacctttcagacctccacccttgcccgccagccctcccttagaggggccgtttccttcacagtctgacgtgcatcctctgcctgctgagggatataataaggtgggacctggctatggacctggcgaaggcgccccagaacaggagaagagtcggggcggctactcctcgggtttccgagattctgtccccatccaagggatcactcttgaagaggtttccgagattatcggtagggacctgtctgggttccccgccccccccggtgaggaacctccggcatag

SEQ ID NO: 25389 - DNA, 2349 bp, synthetic construct
  misc_feature 1..2349: note = Description of Artificial Sequence: Synthetic coding sequence
  source 1..2349: mol_type = other DNA
atgcccgccagcatcagcagcatcttccccggccccaccctgctgctcagttgtggatccgaggaattagacagcgaagatgctcccccttgttgccggctggccttaggagagcccccgccctacggcgcagcaccaataggaatacctcgcccacccccacctcggcccggtatgcatagcccgcccccgcggccagctcccagcccggggacctgggagagtcagcccgccaggtccgttagattaggtggacccggcggcggcgctggaggagccggcggcggccgtgtactagaatgtccatcaattcgaattaccagtatctctcctacacccgaacctccggccgccctcgaagacaaccctgacgcttggggtgatggatcaccgcgcgattacccccccccagaaggattcggagggtaccgagaagcgggaggacaaggtggaggagcatttttcagccccagccccggaagctcttccctttcctcatggtcatttttctccgacgccagcgacgaagccgccctgtacgcggcttgcgacgaggtcgaaagtgaactgaacgaagccgcatcgaggttcggcctgggtagtcctctccctagcccaagagctagtcctagaccctggacgcccgaggacccatggagtctgtacgggccatcacccggcgggagaggaccggaagacagctggttattactgtccgctccgggtccgactcctgcctccccacggcccgcctcgccctgtggaaagcggaggtatagctctagtggcaccccgtcgtcggctagtccggcgctgtcacggagaggcagtctgggggaggaaggcagcgagcccccaccaccgcctccactgcccctggccagagacccagggagtccaggaccctttgactacgtcggcgcaccaccggccgaaagcattccacaaaagactcgacgtaccagctctgagcaggcagtggccctcccacgcagtgaagaacctgcaagctgtaacgggaagctgcctctgggagccgaggagtcagtggcccctcctggtggaagccgcaaagaggtggccggtatggactaccttgcagtgccgtcaccattagcctggagtaaggctaggatcggtggccattctccgatatttaggacctccgcgctgccgcctcttgattggcccttgcctagccaatatgagcagctggaacttcggatcgaggtccaaccccgagctcaccacagagcccattatgagacagaaggttccaggggagccgtgaaggccgcccctggaggacacccagtggtcaagctccttgggtactcagaaaagcctctcacgctgcagatgttcatcgggaccgctgacgaacgtaaccttaggccccacgccttctaccaggtgcaccgcattacggggaaaatggtggccacggctagctacgaagccgtggtcagcggaactaaggtgctcgaaatgaccttgctgcccgaaaataatatggccgcaaacatagattgcgccggaattctaaagcttaggaattctgacatcgagctaaggaagggagaaaccgatatcggcagaaagaatacaagggttcgtctggtattccgcgtgcatgtgcctcagggtggtggtaaagtggtgtctgtccaggccgcttcagtgccgattgagtgttcacagcgctcagcccaggagctgccgcaggtcgaggcttactccccctcagcatgctctgtgaggggaggagaagagctggtgctgaccggttctaattttcttcccgattcaaaggttgtgtttatcgaacgaggtccagatggtaagctgcagtgggaggaagaggccactgtgaatcgcttacagtctaatgaggtgactttgacactgactgtgccagaatacagcaataagagagtttcaaggcccgtgcaggtgtacttctacgtttctaacgggcggcggaagagaagccctacccagtctttcagattcctccctgtgatttgcaaagaagagcccttaccagactccagcctcaggggatttccgagtgcttctgcgactcccttcgggacagatatggatttttctccccctcggcctccctatccgtcatatccccatgaagaccctgcctgtgaaacaccttacctatccgagggctttgggtatggtatgccgcccctttatcctcagactgggccaccaccatcataccgccctggcttgagaatgttcccagaaactaggggcactacagtgtcggagattattggcagagatttgagcggattccctgcgccacctggcgaagaaccaccagcttag

SEQ ID NO: 25390 - DNA, 2805 bp, synthetic construct
  misc_feature 1..2805: note = Description of Artificial Sequence: Synthetic coding sequence
  source 1..2805: mol_type = other DNA
atggccgacggcggcgccgacagcgccgcccagcggctgcccgaggggccaggacgcgtcgcccctggccgggacctgggcgcgccggcaggaagtatgggcgccgccagctgcgaggacgaagagttagagtttaaactggtgttcggagaagagaaggaagcaccacccttaggagctggcggacttggagaggagctggactccgaagacgctccaccttgctgtcgtttggccctgggcgaacctcccccatatggagcagcgcccatcgggattccccgcccaccccctccaagaccaggcatgcactccccccctcccaggccagccccaagtccaggaacctgggagtcccagcctgcccggtcagtaaggttaggcgggccaggcggaggggcaggaggagccggaggtggacgcgtgcttgaatgcccaagcatccgcattactagcatcagcccgacacctgaaccaccagcagcactagaggacaacccggacgcttggggcgacggttcaccgagagattaccctccacctgaagggttcggtggatacagggaggccgggggtcaagggggcggtgcattcttttcacccagccccggaagcagctcgctaagctcttggtcctttttcagcgacgcctcagacgaggcagcattatatgcagcctgcgacgaagtcgagtccgagcttaacgaagctgcgtcccgctttggcctcggctcgccactgccttcaccacgggcttcgccgagaccatggactcccgaggatccatggtcgttgtatggaccgtctccaggcggaagggggcctgaggattcttggttgctactgtcagctcctgggcccacacctgcaagcccccgaccagcatctccgtgcggaaaacggcggtacagttcatcaggcactcctagcagtgccagtcccgctttatccagaagaggttctcttggtgaggaagggagcgaaccacctcccccacccccactccctctggcccgggaccctggctctcccgggccctttgactacgtcggagcacccccagctgaaagcatcccccagaagaccaggcgtaccagctccgagcaggcagtcgccttgcctagatcagaggaacccgcaagttgcaacgggaaactgccgctgggcgccgaggagtccgtggctccaccaggaggtagtaggaaggaggtggccggtatggattatctggccgttcccagtccgttggcatggtctaaggcccggattggggggcactctcctattttcaggacctcagcattacctcctctggattggcccctaccctcccagtacgaacaacttgagctgcggatcgaggtacaaccacgggcacaccaccgggcccattacgaaacagaggggtcccggggggctgtgaaggctgcacctggcgggcacccagtggtgaagctcctgggctatagcgagaaaccgctgacacttcagatgttcattggaacagccgatgagaggaacctgagaccacacgccttctatcaagtccaccgcatcacggggaagatggttgcgacggcgtcctatgaggctgtggtcagcggcacgaaggtcttggaaatgactttactgcccgagaataacatggctgcgaatattgattgtgcggggatcctgaaactcagaaattcggatatcgagttacgcaaaggagagaccgacatagggcgcaaaaacaccagggttaggttagtttttcgcgtgcacgttcctcaaggaggcggaaaggttgtttctgtgcaagcagcaagtgtaccgattgagtgttctcagcgcagtgctcaggaactgccccaggtggaagcttactccccttctgcttgctcagtaagggggggagaagagctggtgcttactggatccaacttcctgcccgatagcaaagtagtctttatcgaacggggccctgatgggaaactacagtgggaagaagaggcaacggtcaaccggttgcagtccaatgaggtgaccttgactctcacagtgcccgagtatagcaacaagagggtaagtcggcctgtgcaggtctacttctatgtatcgaatggccgccgtaagcgatcgccaacacagagcttcaggtttttaccagtcatctgcaaggaggagcctctgcctgactcctcactgcgaggcttccctagcgcatctgcaacacccttcggaaccgatatggatttcagcccgccccgcccaccttaccctagctatccccatgaggatccagcatgtgaaactccgtacctcagtgaaggcttcggttatggcatgccgcccttgtatcctcagaccggcccaccaccatcatatcgaccagggctgcggatgtttccagagacccgcggaacgactggctgcgcccagcccccagccgtttcattcttgccacggccgtttccatccgacccctacggcggcagaggcagctctttttcccttggactgccctttagcccccccgctccatttagaccccctccattgcctgccagtccacctctggagggcccttttccctcccagagcgacgttcatcctctacctgcggagggatacaataaggttgggcccggatacggcccaggtgaaggcgcacctgagcaggagaagtccagaggcggttattcatctgggtttcgagacagcgtgcccatacagggcatcacattggaagaggtgtcggaaattataggacgcgacctttccggttttcctgcacctcccggggaagagccgccagcctag

SEQ ID NO: 25391 - DNA, 1314 bp, synthetic construct
  misc_feature 1..1314: note = Description of Artificial Sequence: Synthetic coding sequence
  source 1..1314: mol_type = other DNA
atgttcatcggcaccgccgacgagcggaacctgcggccccacgccttctaccaggttcacaggatcacaggcaagatggtcgccactgccagttacgaagcagtcgtgtcggggaccaaagttttagagatgaccttgttacctgagaacaacatggcagcaaacattgactgtgccggcatccttaaacttcggaatagcgacattgagttgcggaagggcgaaactgacattgggcgaaagaacactcgagtgcgactcgtgttccgagtgcatgttcctcagggaggaggcaaggtcgtctccgtgcaggcggctagcgttcccatagaatgttcacagcggagcgcccaggaactcccccaagtggaagcatacagcccttcagcttgtagtgtgcgcggtggtgaggagctggttttgacaggcagtaattttctacccgatagcaaagtggtgtttatcgagcgtggaccagacgggaagctgcagtgggaggaggaagccaccgtgaatcgactgcagagcaacgaggttactctgacactgaccgtccccgagtactctaacaagcgggtgagtaggccagttcaggtgtacttctacgtatctaatggcaggaggaagcggtctccaacgcagagcttccgatttctgcctgtgatctgtaaggaggagccattacccgactcaagcctccgagggtttccgtctgcatcggccacaccattcgggactgatatggatttctctcccccaaggccaccctatccctcttaccctcacgaagacccagcgtgtgaaaccccttacctcagcgagggctttggctatggcatgcccccattgtacccccaaacggggcccccaccctcataccgtccgggtttgagaatgttccctgagacccggggcaccaccggttgtgcccaacctccagctgtgtccttcctgccccgccccttcccttcagacccctacgggggaagagggagcagtttctcactcggcctgccttttagcccccctgccccattccgtcccccacccctgcccgctagcccccccctggaggggccctttccatcccagagcgatgtgcatccattgcccgctgagggatacaataaggtgggtccgggttacgggccaggagagggcgcccctgaacaggaaaagagtagaggaggatattcctccggttttagggattcagtgcctatccaagggattacgttagaggaagtgagcgagatcatcgggcgcgacctgtctgggttccctgctccaccaggggaggagccccctgcctag

SEQ ID NO: 25392 - DNA, 2496 bp, synthetic construct
  misc_feature 1..2496: note = Description of Artificial Sequence: Synthetic coding sequence
  source 1..2496: mol_type = other DNA
atgcacagcccccccccccggcccgcccccagccccggcacctgggagtcacagcctgcacgatccgttagactgggcggtccaggcggcggggctgggggagcaggcgggggtagagtcttggaatgtccttccattcgtataaccagcatctccccaacccccgagccgcccgccgccctggaggacaatccagatgcgtggggcgatggctcacccagggactatcctcctccagagggctttgggggatatagggaggcgggcggccagggaggtggcgcttttttttccccttccccagggtccagcagcctgtcttcctggagttttttctctgacgcatcggacgaagccgcgctgtacgccgcttgcgatgaggtcgagtccgagctcaatgaggcagctagtcgatttggcctcgggtcgccgctacccagcccgagagcctctccccgaccatggactccggaggacccttggtctctctatggcccatctcccgggggtaggggacctgaagacagttggctgctgctgtcagctcccggcccgaccccggcaagtccacgacccgcttcgccttgcgggaagagacgctattctagctccggtacaccctcatctgcgagtcccgccctgtcacgacgcgggtctcttggagaggaaggctcggagcctccgcctccccctcctttgccactggctagagatccaggatctcctggccccttcgattatgtaggtgcgcctccagccgaatccataccacagaaaacacgaagaacgtcaagcgaacaggcagtggccctgccgcgctccgaagaacctgcctcctgcaacggaaagctgcctctgggcgcagaagagagcgtcgctcccccagggggttcgcgcaaggaagttgcaggaatggactacctggcggttccctctcccctggcgtggagcaaagcacgcatcggcgggcactctcccatcttcaggacttccgcattgccgccgctggactggcctcttccgtctcagtatgagcaattggaattgaggattgaggtgcaaccccgcgcccaccaccgtgcacactacgaaaccgagggatcacgcggcgccgttaaggccgccccaggcggccaccctgtggtcaaactgttgggatactctgaaaaaccgttgaccctgcagatgtttatcggaaccgctgatgagaggaaccttagaccccacgcattctaccaagtccaccgaatcactggaaaaatggttgcaaccgcctcctacgaagcagtcgtgtcaggtaccaaggtcttggagatgacattgctgcctgagaacaatatggccgccaatatcgactgcgcggggatcctcaagctccgcaatagcgacattgagctccggaagggcgagaccgacatcgggcggaaaaatacaagggttaggctggtctttagggttcacgtgcctcagggcggtggtaaagttgtgtcagtgcaggctgcatccgtcccgattgaatgcagtcagaggagcgctcaagaactacctcaggtcgaggcttattcaccatccgcttgctcggttcgaggaggagaggagctggttttgacgggaagcaacttcctgccggacagcaaggtagtgtttattgagaggggaccggacggcaaactgcagtgggaggaggaggcaacagtgaaccggttacagagcaatgaagtgaccctgacactcacagttccggaatatagcaacaaacgcgtgtcccgaccagtgcaggtgtacttttacgtgtccaatggccgaaggaaacgaagtccaacacaatctttccggttcctccctgtgatatgcaaggaagagccacttcctgatagtagcctgagagggttcccatcagcaagcgcgacaccatttggcacagacatggattttagccctcctaggccaccctaccccagttatcctcatgaagatcctgcctgcgaaactccgtacctctccgagggtttcggatatggcatgccccctttatatccccagacaggaccgcccccatcctacaggcccggcctgcgcatgttcccagagacccgcggtactacgggttgtgcacagcccccagcagtgtcgttccttccgcggcctttcccatctgacccctatggaggtcgcggatcttctttctctctgggtttgccgttcagccctcccgcacctttccgaccaccccctcttccagctagtccaccccttgagggaccgtttcccagtcagtcggatgttcacccactgcctgccgaaggatacaacaaagtggggcctggctatggcccaggtgagggggcacctgaacaggaaaagtccagaggcggctattcatctggttttcgagatagcgtgccaatacagggaattacactggaagagggtggctgcggaaccggggggtgcgaatgtgagtgcgtgcaggaaatcgctttgcatgtgtgttag

SEQ ID NO: 25393 - DNA, 249 bp, synthetic construct
  misc_feature 1..249: note = Description of Artificial Sequence: Synthetic coding sequence
  source 1..249: mol_type = other DNA
atggacttcagccccccccggcccccctaccccagctacccccacgaggaccccgcttgcgagacaccatacctcagcgaggggttcggctatgggatgccccctctatatccgcagacaggaccaccaccttcctacaggcctgggttacgcatgtttcctgaaacaagaggcaccacagtctccgaaatcattggtcgtgatctaagcggttttcccgctccacccggggaggaacccccagcctag

SEQ ID NO: 25394 - DNA, 315 bp, synthetic construct
  misc_feature 1..315: note = Description of Artificial Sequence: Synthetic coding sequence
  source 1..315: mol_type = other DNA
atgagcagcgccgcccggagccggctgacccgggccacccggcaggaaatgctgttcctggccttgctgctgttgcctgtcgtagtggcatttgcgcgtgctgaagcagaggaagacggcgacctacagtgtctgtgtgtgaagacaacatctcaggtccgacctaggcatattaccagcctggaagttatcaaagcggggcctcactgtcctacggcccagctcatagccaccctaaaaaacggacgtaaaatctgtttagatctgcaggctcttctgtataagaagattattaaagagcatctggaatcatag

SEQ ID NO: 25395 - DNA, 2907 bp, synthetic construct
  misc_feature 1..2907: note = Description of Artificial Sequence: Synthetic coding sequence
  source 1..2907: mol_type = other DNA
atggccgaggacgacccctacctgggccggcccgagcagatgttccacctggatccctctctcacccatacaattttcaaccctgaggtgttccagccacaaatggcactgcccacagacggtccatatctccagatactggaacaacccaagcagcgcggttttagatttcgatatgtctgcgaagggcctagccacggtggtctgccaggcgctagctccgaaaaaaacaagaagtcatacccacaggtgaagatctgtaattacgtgggacccgctaaggtcatcgtgcagttagtgaccaatgggaaaaatatccaccttcacgcacattccttggtgggaaagcactgtgaagatgggatatgtacagttaccgcaggaccaaaagacatggttgtaggcttcgccaacctgggcatcctgcatgtcactaaaaaaaaggtgttcgagactctggaagctcgaatgaccgaagcctgcatacgaggttacaaccccggcctgctggtccatcccgacctggcttatctgcaggcagaagggggcggagaccgccagctgggcgaccgggagaaggaattaatccgacaggccgcactccagcagacgaaagagatggatctttctgtcgtcaggctgatgtttaccgcttttctccccgactcaaccggcagtttcacaagacggctcgagcctgtcgtgagtgatgccatctacgattcgaaggcccctaatgcatctaatctgaagattgtgcgcatggatcggaccgcaggctgcgttacagggggcgaggagatctacctgttatgcgataaagtgcagaaggatgatatccagatccgattttatgaagaagaagaaaacggcggcgtgtgggagggtttcggggatttctcaccaaccgatgttcaccgccagtttgcgatcgttttcaaaacgcctaagtataaagatattaacataaccaagccggcctcagtgtttgtccagctgcgaagaaaatcggacttggaaacctcagagcctaagcccttcctgtattatcccgaaatcaaggataaggaggaggtgcagaggaagcgccagaagttaatgccaaacttcagcgatagttttgggggaggcagcggcgcaggggctgggggcggaggtatgtttggatccggcggcggggggggggggacagggtctactggtccgggctattcatttccgcactatggatttcccacttatggaggaattaccttccatcccggaactacgaagagtaatgccggcatgaaacatggcacaatggacaccgaatccaaaaaagatcctgagggctgtgataagtcagatgataaaaataccgtgaatttatttggtaaagtgatagagacgaccgagcaggaccaggagcctagcgaagccaccgttgggaacggagaggtgaccctcacttacgcgacggggacaaaggaggaaagcgccggcgtgcaagacaacctgtttctggaaaaggctatgcagctggccaagcgtcacgcaaacgcattgtttgattacgccgtgaccggggacgtgaaaatgctcctggctgttcaacggcatctaactgctgtgcaggacgagaatggggatagcgtgctgcacctggccataatccatcttcatagccagctcgtacgcgatctgctggaggttacctctggtctgatctcagacgacatcatcaatatgcgcaatgacctctaccaaactcctctccacttagccgttattaccaagcaggaagacgtcgtggaggacttacttcgtgccggtgccgacctctcccttctagatcgactcggaaattccgtgcttcacctcgccgcgaaagagggccacgataaggttttgtctattcttctgaagcacaagaaagccgccctgctgttggaccatcccaacggtgatgggctgaatgccatccatctcgccatgatgtcaaatagcctcccatgcctactgctgctcgtggccgctggcgccgatgtgaacgcccaagagcaaaaatcaggaagaactgccctacatctagccgtggagcatgacaatattagtttggcaggttgccttcttctggagggggacgctcatgtggactccacaacctatgatggcacaaccccactccatatagcagctgggagggggtccacacgcctggcggctctgttgaaggcagcgggggccgacccactggttgagaactttgagccactatatgacttggatgattcctgggaaaacgcaggggaagatgaaggagtcgtgcccggaactacacctctagatatggcgacatcatggcaggtgtttgacattctcaatggaaagccctacgagccagagtttacttcagacgacctgctcgctcagggagacatgaagcagctcgccgaagacgtgaagttgcagctatataagctgctagagattcctgaccctgataaaaattgggctactctagcccagaagctgggcttgggcatcttgaataacgcctttagattatccccagcaccatccaaaactctgatggataattatgaggtttctgggggaaccgtgagggaattagtggaggcgctgcgccagatggggtacaccgaggccatcgaggtgatacaggccgcatcctctcccgtcaaaactacctcacaggcccactctctgcccctcagtcccgcatccaccaggcagcagatagatgagttaagagactctgattcagtgtgtgattctggggtagagacctcttttcgcaaactgtccttcactgaaagcctgacatcaggagctagtctcttgacactgaataaaatgcctcatgattatggtcaggagggacctctcgaaggcaagatctag

SEQ ID NO: 25396 - DNA, 2907 bp, synthetic construct
  misc_feature 1..2907: note = Description of Artificial Sequence: Synthetic coding sequence
  source 1..2907: mol_type = other DNA
atggccgaggacgacccctacctgggccggcccgagcagatgttccatctcgacccgtctctcacacacacaatctttaatccagaggtgtttcagccacagatggcgctcccgaccgatgggccctatctgcaaattttagaacagcctaagcagcggggctttcgattcaggtatgtctgtgaaggcccaagccacggcggccttcctggcgcttcctctgaaaagaacaagaaaagctacccacaggtcaagatctgcaactacgtggggccagctaaagttatcgttcagctggtcactaatgggaagaatattcatctgcacgcacactctctggtggggaagcactgcgaggatggcatctgcactgtgaccgccggacccaaggatatggtggtgggattcgcgaatctggggattctgcacgtaaccaaaaagaaagtttttgaaacattagaagcgagaatgactgaggcttgcattagggggtataatcctggactccttgtacacccagacctggcatacctgcaggctgagggcgggggcgaccgccaactgggagatagggagaaagagctcatacgtcaggccgccctccagcaaaccaaggagatggatctctcggtcgtgaggctgatgttcaccgctttccttccagacagcaccggctcttttacacgacgcctggagcccgtcgttagtgatgcgatctatgactcaaaagctcccaatgcctccaacctaaaaatcgtgaggatggacaggaccgccggctgtgtgacaggtggagaagagatttacctactctgtgacaaggtgcagaaggatgatatacaaatcaggttctatgaagaagaagagaacggaggcgtttgggagggcttcggcgacttttccccaacggatgttcacaggcagttcgcaattgtgtttaagactcctaagtacaaagatattaatattaccaaacctgcaagtgtatttgtgcagctgagacggaaatccgatttggagacctccgaaccaaaaccttttctctattaccctgagattaaagacaaggaagaagtgcagagaaagcgtcagaagctcatgccaaatttcagcgattctttcggagggggatcaggtgctggggccggcggtggcggcatgtttggtagcggaggcggtggtggaggtacgggctccacgggacccgggtatagctttccccactatggtttccccacttacggaggcatcacattccatccaggtactactaagagcaatgccggaatgaagcatggaactatggatacagagtctaaaaaggaccctgagggttgtgataagtcagacgacaagaacaccgttaatctttttgggaaggtgatcgagactaccgagcaggaccaggaaccttctgaagccaccgtgggaaatggagaggtgaccttgacgtacgccaccggaaccaaagaagagagcgccggtgtacaggacaatctgtttcttgaaaaggccatgcagttggccaagcgccatgccaacgctctgttcgattatgccgtaaccggcgatgtgaaaatgctcctcgcagttcagcgccatctgactgccgtccaggacgaaaacggggattccgtgcttcacctggctattattcatcttcactctcagttagtgcgtgacttactggaagtgacatccggtctgattagtgatgatatcatcaatatgcgaaacgacctttatcagacaccactgcacctggctgttatcactaagcaggaagatgtcgtcgaggatctactgcgggcaggagccgatttgagcctgttggataggcttgggaactccgtccttcatctggcagcgaaagaggggcacgacaaggtcttaagcattctgctgaaacataagaaagcggccttgctccttgaccacccaaatggcgacggattgaacgccatacacctcgccatgatgtccaattcactcccttgccttttgcttttagtcgccgctggtgccgatgtcaacgcccaagagcagaagtcaggaagaacggcactccatctcgccgttgaacatgacaatatctcacttgccggctgccttttattggaaggggacgcccacgtagactctaccacttatgacggcacaaccccccttcacatcgccgctggtcgaggctcaactaggttagctgccctgctcaaggccgctggcgctgatccgctagtagagaactttgaacctctgtatgacctggacgactcctgggaaaacgccggggaggatgagggcgtcgtcccagggaccacgccactcgacatggctacaagctggcaggtcttcgacatccttaatgggaaaccttatgagccagaattcacgtccgacgaccttctggcacaaggggatatgaagcaactagcggaggacgtgaaacttcagctttacaagctgctggaaatccctgatcctgacaaaaattgggccacactcgcccagaaactcggactcggaatcctgaataacgctttcaggctcagtcctgccccatcaaaaaccctcatggataattacgaagtctctggggggaccgtgcgcgagctcgtggaagccctcagacagatggggtataccgaagcaatcgaagtgatacaggccgccagctccccagttaaaacaacaagccaagcccatagccttcccctgagcccagccagcacccggcaacagatcgacgagttacgagacagcgactctgtctgcgacagtggggtcgagacatctttccgcaaactcagttttacagagtcgctcaccagcggcgctagccttctcactctaaataagatgccccacgactacggacaggaggggcccctggagggaaaaatctag

SEQ ID NO: 25397 - DNA, 438 bp, synthetic construct
  misc_feature 1..438: note = Description of Artificial Sequence: Synthetic coding sequence
  source 1..438: mol_type = other DNA
atggccgaggacgacccctacctgggccggcccgagcagatgttccatttggacccttcccttacccataccattttcaacccggaggtctttcagccgcagatggccttaccgactgcggatggcccctacctccagattttagaacaacctaaacagcgcggcttcagatttagatacgtgtgcgagggcccctctcacggaggcctcccaggtgccagttccgaaaagaacaagaagagctaccctcaggtgaagatctgtaattacgtgggacccgcgaaagtaattgtgcagcttgtgacgaatgggaagaatatccatctgcacgcccacagtcttgtgggtaaacactgtgaagatggtatttgcaccgttaccgcaggtcctaaggatatggttgttggcttcgcaaacttgggcatactgcatgtatag

SEQ ID NO: 25398 - DNA, 225 bp, synthetic construct
  misc_feature 1..225: note = Description of Artificial Sequence: Synthetic coding sequence
  source 1..225: mol_type = other DNA
atgaagcggaccaccagcttccggatggccgaggacgacccctacctgggcaggccggaacaaatgtttcatctggacccttctcttacgcacaccatctttaatcctgaagtctttcaaccccagatggcccttcccaccgatgggccttatcttcagattctcgaacaaccaaagcagaggggattcaggtttagatatgtttgcgagggccccagccattag

SEQ ID NO: 25399 - DNA, 1923 bp, synthetic construct
  misc_feature 1..1923: note = Description of Artificial Sequence: Synthetic coding sequence
  source 1..1923: mol_type = other DNA
atggccgccctgtaccggcccggcctgcggctgaactggcacggcctctctccccttggatggccaagttgtagaagtattcagacccttcgagtgctgtccggcgatctcggccaactgcccaccggtatccgagacttcgttgagcactctgctcggctgtgtcagcccgaggggattcatatttgtgacggaactgaagccgagaacacagccactcttacattactggaacagcagggtctcattaggaaactgcccaaatataacaactgctggctggcccgaactgacccaaaggacgtggcacgcgtcgagagcaagacagtgattgtcacaccaagtcagagggacaccgtccagctcccacccgggggggcacggggccagctcggaaattggatgtccccagccgacttccagcgggccgtcgacgagaggttcccaggctgcatgcaaggcaggactatgtacgtcctgccgttcagcatgggccccgtgggaagcccattatccaggataggagttcagctgacagacagcgcctacgtcgttgcgagcatgcggataatgacccgcctgggaacaccagtacttcaagccctgggagacggggattttgtgaagtgcctacacagtgtgggacagccactgaccgggcaaggggagcccgttagtcagtggccttgtaacccggagaaaactctgatcggacatgttccggatcagcgggaaatcatcagcttcgggtcaggatatggcggtaatagtcttcttgggaagaagtgtttcgcccttcggatcgcctccagactggccagagacgaggggtggctggctgagcacatgctgattcttgggattacctctcccgccggaaaaaaaaggtacgtagctgccgccttcccatcggcctgtggcaagaccaatcttgccatgatgcggccagctcttccgggatggaaggtcgaatgtgtcggcgatgacatagcctggatgcgttttgattctgaggggcgattgcgagctatcaacccagaaaacggattctttggtgtggccccaggcactagcgcgactaccaacccgaatgcaatggccacgatccagagtaatacaatcttcaccaacgtcgcagaaaccagcgacggaggcgtgtactgggagggcatcgaccaaccgctgcctcctggcgtcactgtgaccagctggttaggtaagccctggaagcccggggataaggagccctgcgcgcaccctaacagtaggttttgcgctcctgcacgccaatgcccaatcatggaccccgcttgggaggctccagagggtgttcccatcgacgctatcatcttcggcggtcgaagacccaagggagtgcctctcgtctatgaggcctttaactggagacatggcgtgttcgtgggatccgcaatgaggagcgagagcactgcagcagccgagcataaggggaagataattatgcacgacccttttgcaatgcgaccgttctttggctacaactttggccattacttagagcattggctgtcgatggagggacgaaagggcgcacaactgccccggatctttcatgtgaactggttccgtcgtgacgaggcaggtcattttctttggcccgggtttggcgagaacgcccgcgtcctggactggatttgccgccgattggagggcgaggacagtgcccgggaaacacccattggcctcgtgccaaaggagggtgcgttggacctgagcggcctacgcgctatcgataccacccaactgttcagcctgccgaaagatttttgggagcaggaggtaagagacatccgctcatatttaactgagcaggtaaatcaggaccttcccaaggaggtccttgctgaactggaggcactggagcggagggttcataagatgtag

SEQ ID NO: 25400 - DNA, 3477 bp, synthetic construct
  misc_feature 1..3477: note = Description of Artificial Sequence: Synthetic coding sequence
  source 1..3477: mol_type = other DNA
atgacccacggcgaggagctgggcagcgacgtgcaccaggacagcattgtcctcacgtacctggaaggtcttctgatgcatcaagctgctgggggcagcgggacagcagttgacaaaaaaagcgcaggccacaatgaggaagaccagaattttaacatctccggcagtgcatttcccacgtgccagtccaacggtcccgtgcttaatacccacacatatcagggcagtgggatgctgcatttaaagaaagccaggctgcttcagagttccgaggattggaatgccgcgaagaggaaaagactttcggactcaattatgaacctaaacgtaaagaaagaagccctgctcgctggtatggtcgattcggtgcccaaaggaaagcaggattccactttgctcgcctctctgctccagtccttcagctccagactccagacagtagccctgtcccagcagatccgtcagagtctgaaagagcagggttacgccctttcgcacgatagtctgaaggtagaaaaagacttgagatgttatggagtagcttcttcccatctcaagaccttgcttaagaagagcaaagtaaaagatcagaaacctgataccaatctgccagatgttacaaagaacctgatcagagatagatttgccgagtctccccaccatgtgggtcagtcaggaaccaaggtgatgtctgaacccctatcttgcgccgccaggctgcaggcagtggccagcatggtagagaaacgagcttcccctgcgaccagtccaaagccctccgtcgcctgttctcagctcgcgctactgttgtcttccgaggcccacctacaacaatatagtagagaacacgcccttaagacacagaacgcaaaccaggctgcatccgagaggctagctgccatggcccggctgcaagaaaatggacagaaagacgtcggctcttaccaactccccaaaggcatgtcttcccacttgaatgggcaagcgaggacctcaagctccaaactcatggcatcaaaaagcagcgccactgtgtttcagaatcctatgggcatcatcccctcttccccgaagaacgctggctacaaaaacagcttagagcggaacaatatcaaacaggctgcgaacaactctctgttgctccaccttttgaaaagccagactattcccaaaccgatgaatggccactcccattctgaaaggggcagtattttcgaggagtcttctacccccactacgatcgacgagtacagcgataacaatccgtctttcacggatgatagctccggcgacgaaagtagctacagcaactgcgtaccaatcgacctgtcttgtaaacatagaacggagaaatccgagagtgaccagccagtctcactcgacaattttactcagtctttgctgaacacatgggacccgaaggtgcctgacgtggacattaaggaggaccaggacaccagcaaaaatagtaagctaaactcacaccagaaggtgacactgctacagctgctccttggccacaaaaatgaagagaatgtggagaagaacacatctccgcaaggagtgcacaatgatgtcagtaagttcaacacccagaactacgcccgcacaagtgtcattgagagtcccagcactaacaggaccacgcccgtgtcaacgccccccctgctcacttcaagcaaagctggcagcccaatcaatctgtcacagcatagcctggtgatcaaatggaacagcccaccttatgtatgctccacacagagcgaaaagctcactaataccgcctcaaatcactctatggacctcactaagtccaaggatccccccggcgagaaacctgctcagaatgagggagcccagaacagcgcaaccttctctgctagcaaattgctgcagaacctcgcccagtgtgggatgcaaagcagcatgtccgtcgaagaacagcgcccttcaaagcaactgctcactgggaacactgacaagccaataggaatgatcgaccgcctgaacagtcccctcctctcaaataagacaaatgcagtcgaggagaataaagcatttagtagccagccaacaggccctgaacctggcctgtccgggtcagagattgaaaatcttctggaacggcgtaccgttctgcagctgctgctgggaaatcctaacaaaggaaaaagcgaaaaaaaggagaaaaccccgctcagagatgaaagtacccaagagcatagcgaaagagctctgtctgagcagattcttatggtcaagattaagtccgaaccttgcgacgacctgcaaatccccaacactaacgtacatctgtcccacgatgccaaatctgctccttttctgggaatggcaccggccgtgcagcgctccgcccctgccctcccggtctccgaggactttaagagtgaaccagtgtcgccccaggatttctcattctccaaaaacgggctgctgtcgagactgctgcgacagaaccaggacagttacctggcagacgactccgataggagccacaggaacaatgagatggcactgttagagagcaagaatttgtgtatggtcccgaaaaagcgaaaactgtacacggagccccttgaaaacccattcaagaaaatgaaaaataatattgtggacgccgccaacaaccactcagcccccgaggtgctgtacgggtctctgctgaaccaggaagagctgaaattttcccggaatgacctggagtttaaataccccgctggtcatggctccgccagcgaatcagaacacaggtcttgggctcgcgaatcaaagtctttcaatgtcctgaagcagctgctgttgagtgaaaactgcgtgcgggacctctctccgcataggagcaactccgtagcagacagtaagaagaaaggccacaaaaacaacgttacgaatagcaaaccggaattctctatcagtagcctcaacggcttaatgtatagctctacgcaacctagcagttgtatggataaccgcacgttcagctaccctggcgtggttaaaaccccagtgtctccaacattccctgagcacctgggctgtgcggggtctcgtcctgaatctgggctcttgaacggctgctccatgccaagtgaaaaaggcccgatcaagtgggtcatcacggatgcagaaaagaatgagtatgagaaagacagtccacgactgacgaaaacgaatcccatcttatactatatgctgcagaagggggggaactcagtgactagtcgggagacacaagataaggacatctggcgcgaagcatctagcgccgaatccgtgagtcaggtgaccgcgaaagaggaactgctgccaacagccgaaacaaaggcctctttctttaatctgcgctccccttacaatagccacatggggaacaacgcctcgcgcccacattccgcgaacggagaggtctatggcctgttagggtctgtgctcactatcaaaaaggagtctgagtag

SEQ ID NO: 25401 - DNA, 3477 bp, synthetic construct
  misc_feature 1..3477: note = Description of Artificial Sequence: Synthetic coding sequence
  source 1..3477: mol_type = other DNA
atgacccacggcgaggagctgggcagcgacgtgcaccaggacagcatcgtgttgacatacttggagggattgctgatgcatcaggccgctgggggaagcggtaccgcagttgataaaaagtctgccggtcataacgaggaggatcagaatttcaatataagtggttccgcattcccaacttgccagtctaatgggcctgtcctcaatacccacacttatcagggtagtggcatgctgcatttgaaaaaggcacgccttctacagtccagtgaggattggaacgctgctaagagaaagagactctctgactccatcatgaaccttaatgtgaaaaaggaggccttgctggcaggaatggtggattctgtgcccaagggcaaacaggactctaccctcctggctagtctgcttcagagctttagctcccgattgcagacagtggcactgtctcaacagattcgccagagcctcaaagagcagggttacgcgttgagtcatgactctttaaaagttgaaaaagatctgaggtgctacggtgtggcttccagccatcttaaaaccctcctgaagaagagcaaggttaaggatcagaagcccgacactaacctccccgacgtgactaagaacttgatccgagaccgctttgcggaaagcccccaccacgtgggacaaagcgggacaaaagtgatgagtgagcccctctcctgtgccgctagattgcaggccgtggcctcgatggtcgaaaagagagcatcccccgcaaccagtcctaagcccagtgtggcttgttcccaactcgcccttctgttgtcttctgaggcacaccttcaacaatattctagagaacatgcgcttaagacacagaacgcgaatcaggccgcgtcagagaggctcgcggccatggcccgcctgcaggagaacgggcaaaaggacgtgggatcgtaccagctccccaaaggcatgtcatcccatctgaacgggcaggcccggacttcatcatcaaagctgatggcttctaagtccagtgccacagtcttccagaaccctatgggcatcattccatctagtccgaaaaatgccggctacaagaacagtctggaacggaataacatcaagcaggcggctaacaactctctccttctgcaccttctcaaatcacagactattcccaagcccatgaatggtcatagccactcagagcggggatctatcttcgaagaatcatccacccccaccactatagatgagtatagcgataacaacccgtcgttcacggacgattcctccggcgacgagtcgagctattcaaactgcgttcctattgacctgagctgtaagcacagaactgagaaatcagagtccgatcagccagtatccctggacaactttacccagagcctcctgaacacctgggatcccaaggtgccggacgtcgatataaaggaggaccaagacacctccaaaaattccaaattgaacagtcatcagaaagtgaccctattgcagctgctattgggtcacaaaaacgaagagaatgtggagaagaatacaagtccacaaggcgttcataatgatgtttccaaatttaacacccagaactacgctaggacgtccgttatagagagtccctccactaatcgcacgacccccgtgtctactccaccactgctaactagcagcaaggcaggaagccctatcaatctgtcacaacactcactggttatcaaatggaatagccctccttatgtgtgttctacccaatccgaaaagctcaccaacaccgctagcaatcattcgatggatcttacaaaatctaaagacccacccggcgagaagccggctcagaacgaaggggctcagaactccgccacattcagcgcatcaaaactcctccaaaacctggctcagtgtggaatgcagagctcaatgtcagtggaggagcagcgtccgtctaagcagctgctcacaggaaataccgacaaaccaatcggaatgattgatcgcctgaacagtcctctgctcagcaacaagactaatgccgtggaggaaaataaagccttcagctcacaacctacaggtcctgaacccggcctttctgggagtgagattgagaaccttctggaacgtcgtacagtcttacagctgctacttggtaacccaaataaaggtaagtctgagaaaaaggaaaaaacacccttgcgcgacgaaagcacccaggagcacagcgaacgcgctctgagcgaacagatcttaatggtgaagatcaagagcgagccctgcgatgatctgcagatacctaatacgaacgtgcatctatcccacgatgcaaagtccgcccctttcctggggatggcccccgccgtgcaaagatccgcacctgcactgcctgtgtcagaagactttaagagtgagccagtaagcccacaagattttagcttttccaaaaacgggctactctcccgccttttacgacaaaaccaagattcttaccttgccgatgatagcgatcggtctcatcgcaacaatgagatggccctgcttgagtctaaaaatctgtgcatggtgccgaaaaaacgcaagctgtataccgagccactcgagaacccctttaaaaagatgaaaaacaatatcgtggatgcggccaataatcattctgccccggaagtgttgtatggctccttgttaaatcaggaggaactcaaattcagccgaaacgatcttgaatttaagtatcctgccggacacggcagtgctagtgaaagcgaacatcggagctgggcaagggagagcaaatcattcaatgtgctgaaacagctgctcttgagcgagaactgtgtgcgagatttatctccccatcgatccaattcagtagccgattctaaaaaaaaggggcataagaacaatgtcaccaattcgaagccagagttcagtatttcaagtctcaacgggcttatgtactcttctacacagccaagttcatgcatggacaatcggaccttttcgtaccctggggtggtgaagacgcccgtgtcacccacattccccgagcacctgggctgtgcggggagccggcccgagtcgggcctgctgaacggctgctccatgcccagcgagaaaggaccaattaaatgggtcattactgacgcagagaagaatgagtatgaaaaggactctccccgtcttactaagacaaacccaatactgtattatatgcttcaaaaggggggcaactctgtcacaagtagggaaacccaggacaaggatatttggcgggaagctagctccgcagagtccgtatcacaagtaactgctaaggaagagctgcttcccaccgctgaaacgaaagctagctttttcaatttgcggagcccttacaatagccacatgggtaataacgcgagcaggccgcattcggctaatggggaggtctacggtcttctcggatcggtgctaacaattaaaaaagagtcagagtag

SEQ ID NO: 25402 - DNA, 3477 bp, synthetic construct
  misc_feature 1..3477: note = Description of Artificial Sequence: Synthetic coding sequence
  source 1..3477: mol_type = other DNA
atgacccacggcgaggagctgggcagcgacgtgcaccaggacagcattgtgcttacgtacctggaaggcttgctcatgcatcaggcagccggaggatctggcactgccgtcgataaaaagagtgccgggcataacgaggaagatcagaattttaatataagcggcagcgccttccccacatgccagtccaacggcccagtgttgaacacacacacgtaccagggttccggtatgcttcaccttaagaaggctagactgcttcagagcagcgaggattggaacgcagctaagcgcaagaggctgtcagattccatcatgaatctgaatgtgaaaaaggaggcattgctggcgggaatggtggactcggtgcccaaaggaaagcaagactctacgctcttggcaagcctcctgcagtccttctcaagtcgtctgcagacagtggccctgagccagcagattcgacaatcccttaaagaacagggctacgcactttcccatgactcccttaaggtggagaaggatctccgatgctacggcgttgcaagcagccacctgaagaccttgctgaagaagtcaaaagtaaaggatcaaaagccagataccaatctcccagacgtaaccaaaaatctcatcagggacagattcgccgaatccccacaccacgtaggacaatcaggaacaaaggtcatgtccgagcccctgtcgtgcgccgctcgccttcaagccgtggcctccatggttgagaagcgcgcatctccagctacctctccaaagccgtcagtcgcttgttcccaactggctttattactgtcatccgaggcacatctgcagcagtacagtagagagcatgccctcaagacacagaacgctaatcaggcagctagtgaaagactggctgctatggctcggcttcaggaaaacggccaaaaggatgtgggctcgtaccagctgccaaaaggcatgtcgtcacatctgaacggacaggcacgaactagctcctccaagctgatggcatctaagagctcagctacggtattccagaacccgatgggcatcattccatcatcccctaagaacgccggatacaaaaactccctggagagaaacaacattaaacaagccgccaacaactctctgttgcttcacctgctcaaatcacaaaccattcctaaacccatgaatggacactcacattccgaaagagggagcattttcgaggagtctagtacacccaccactatcgacgagtactccgataacaacccgagctttactgatgactcatcaggcgacgaatcatcttactcgaactgcgttcccatcgacctttcctgcaaacatcgcaccgaaaaatccgagtcggatcagcccgtgtctctggacaacttcactcagagcttgctgaacacatgggaccctaaagtaccagacgtggatataaaagaagaccaagacacgtccaagaattccaagctcaactcccaccagaaagtcacactgttgcagctgcttctgggacacaaaaacgaggagaacgtagaaaaaaacacaagcccccagggcgtgcataatgatgtcagtaaattcaacacccagaactatgctcgtacctcagtgattgagtccccatctacgaataggactacacccgttagtacgcccccgcttttaacatcaagcaaagctggcagtccaatcaacctgtcacagcatagcctggtgattaaatggaactctccaccatacgtctgcagtacccagtcagagaagctgaccaatacggcatccaatcactcaatggacctgaccaaatccaaggatcctcctggcgagaagcccgcccaaaacgaaggcgcgcagaacagcgcaaccttctccgcatctaagctgctccagaatttggctcagtgtggaatgcagtcctccatgagcgtcgaggaacagaggccatctaaacagctgctgacaggcaatacagacaaaccaatcgggatgatcgaccggctcaatagcccactcctgtcgaataagaccaacgccgtcgaggaaaacaaggcattcagtagccagcctacagggcctgagcctgggctctctgggtcggagatcgaaaatttgttggagagacgcacagtgctacagctgctgctcggaaaccctaacaaaggcaagtcggagaaaaaggagaagacgcccctgcgtgatgaatccacacaggagcactccgaaagggctctatccgagcagatactaatggtcaagatcaaaagcgagccatgcgatgatcttcagatccctaacaccaatgttcatctgagtcacgacgccaagtctgctccttttctcgggatggcacctgctgtccagcggtctgctcccgcccttccagtaagtgaggatttcaagagcgagcccgtgagtccacaagattttagttttagcaaaaatggcctgctgagcaggctgctgcgccagaatcaggatagctacctggctgacgattcagaccgaagccaccgaaacaatgaaatggccttgctggaatctaagaatttgtgcatggtccctaaaaaaagaaagctgtacacagaacctttagagaatcccttcaaaaagatgaagaacaatattgtcgatgctgcaaacaaccattctgcgccagaggtgctttatgggagcctgttaaatcaggaggaattaaagtttagccgaaatgatctcgaattcaagtacccagccggtcacgggagcgcctccgagtcagaacataggagctgggctagggaaagcaaatctttcaatgttctcaaacagttgttgctttctgaaaactgcgtgcgggacctttccccacatcggtccaacagcgtggcagacagtaagaaaaaaggccacaagaataacgttactaactctaaaccggagtttagcatctcttcactaaacggccttatgtactcctccacccagccctctagctgcatggacaacaggaccttttcatatccaggggtggtgaaaactccagtgagcccaaccttccctgagcatcttggatgcgctggctctcggccggagtctggcctactgaatgggtgtagcatgccttccgagaaggggcctattaaatgggttatcactgatgccgagaaaaatgagtacgaaaaggattccccacgtctgaccaagacaaaccctattctgtattacatgctccagaaaggcggtaacagcgtgacctctcgcgaaacccaggataaagatatctggcgtgaggcctcctcggcggagtctgttagccaggtgacagcaaaggaggaacttttgccaacggcagagaccaaggctagcttcttcaacctcaggtctccctacaacagtcacatggggaacaacgcttccaggccgcattcggctaatggggaggtctatggtcttcttggctctgttttgacgatcaagaaggaaagcgaatag

SEQ ID NO: 25403 - DNA, 201 bp, synthetic construct
  misc_feature 1..201: note = Description of Artificial Sequence: Synthetic coding sequence
  source 1..201: mol_type = other DNA
atgacccacggcgaggagctgggcagcgacgtgcaccaggacagcatcgtattaacctacttggagggcttattgatgcaccaggcagcaggaggatccgggacagcggttgacaagaagagcgctggacataatgaggaggatcaaaacttcaatatttctgggagtgccttcccaacgtgccagtcaaacggcccgtag

SEQ ID NO: 25404 - DNA, 4176 bp, synthetic construct
  misc_feature 1..4176: note = Description of Artificial Sequence: Synthetic coding sequence
  source 1..4176: mol_type = other DNA
atgcccagcagcctgctgggcgccgccatgcccgccagcaccagcgccgctgcacttcaggaagcgttggaaaatgccggaaggcttattgatcgccagctgcaggaggaccgtatgtatcccgatctctctgagctacttatggtttctgcgcccaacaaccccaccgtcagcggaatgagtgacatggattatcctctgcagggaccgggcctcctctcggtacctaatctccctgagatcagttctattaggagagtgccactaccacccgagctagtggaacagttcggtcatatgcagtgcaactgtatgatgggtgtgttcccccctattagccgagcctggctcaccatcgacagcgacatcttcatgtggaactatgaggatggcggagatcttgcttactttgacggactttcagagacgatccttgcggtgggtcttgtcaaaccaaaggcaggcatatttcagccccatgtgcgccatctcctggtcctggccacgccagtcgacatagtgatcctggggttatcttatgctaacctgcaaactggaagcggcgtcctgaatgattctctgtcaggaggtatgcaactgctccctgatcccctgtactccctccctaccgataacacttatttattgaccataacaagtacggataacgggagaatcttcctggctggcaaagacgggtgcttgtacgaagttgcctaccaggcggaggccggatggttcagtcagagatgccggaaaatcaaccatagcaagtcttccctttccttccttgtcccctctttgctccaattcacattctcagaagacgatcccatcctgcagattgccattgataacagtagaaacatcctttacacgagaagtgagaagggtgtgatccaagtatacgatctgggccaggacggccagggcatgtcgagagtcgcatcggtgtcacagaatgcaattgtatctgccgcaggtaatatcgctagaaccatagatagaagtgtttttaaacctattgtacagatcgctgtgatcgaaaatagcgaatcacttgactgccagctgttagctgttacacacgcaggcgtgcgactctatttcagcacctgtcctttccggcagcctctggcgcggccaaacaccctgaccctggtgcatgtgaggttgccacctggattctctgcctcgtcaaccgtcgaaaagcctagcaaggttcatagggcactgtattccaaaggaatcctgctcatggcggcttctgaaaatgaggataacgatatcctgtggtgcgtgaatcacgatacgttccctttccagaaaccaatgatggagacccagatgaccgctggggtcgatggccatagctgggctctctctgccattgacgaactgaaggtggacaagattatcacccccttgaacaaggaccacataccaatcacagacagccccgtagttgttcagcaacatatgttgccgccaaagaaatttgtactgctctctgctcaaggatcgctgatgtttcataaattgcgccccgtcgaccaactccggcacctgctagtctctaacgtgggcggcgacggtgaagaaatcgagcgtttcttcaaactccatcaggaggatcaggcctgtgccacatgcctgatcctcgcctgcagcaccgcggcctgtgacagggaagtatccgcatgggcaactagagcattcttccgttatggcggcgaagcccaaatgaggtttcctactaccctgccaccaccgtccaatgtgggccctattctcgggtctccagtgtacagctcttcccccgtgcccagcggtagtccctaccctaacccttcctttcttggcaccccttcgcacggaatacagccccctgccatgagtaccccagtgtgcgcactgggcaaccccgccactcaagccaccaatatgtcatgcgttaccggccccgaaatcgtgtatagcggtaagcacaacggtatatgtatctatttctcacgcataatgggtaatatctgggatgcatcactggtggtcgagcgtattttcaagtcaggcaacagagaaatcaccgctattgaatcatccgtaccatgtcaactgttggagtcggtgctgcaggagcttaaaggacttcaagaattcctcgacagaaattctcagtttgccggcgggcctctgggtaatccgaatacaactgctaaggtccagcagcgactgattgggttcatgagacccgagaacggaaacccacagcaaatgcagcaggagctccagagaaagtttcatgaagcccagttaagcgagaaaatcagtctgcaagcgattcagcagctcgtgcgcaaatcttatcaagcactcgccctgtggaagctcctatgcgagcatcaatttaccatcatagttgctgagctccaaaaggaattgcaggagcaactgaagatcactaccttcaaggatctagtgatacgggacaaagagttaaccggtgctcttatcgccagtcttattaattgctacattcgggacaatgcagccgtggacgggatcagtctgcacctgcaggatatttgtccactcttgtacagcaccgatgatgccatttgttctaaagccaacgaactacttcagcgttcccgacaggttcagaataagaccgagaaagaaaggatgttgagagagagtctaaaggaataccagaaaatttccaatcaggttgacttgtccaatgtgtgcgcgcagtaccgccaggtgcggttctacgaaggggtggtagaactctcactgaccgctgccgaaaaaaaagacccgcagggcctgggcctacacttttataagcatggagaaccagaggaagacattgtaggtttacaagcatttcaggagagactaaacagctacaaatgcatcacagacacccttcaggagttggtgaaccagtctaaggccgcaccacagtcgccttccgtgcccaagaagccaggcccccctgtgctgtcctcagaccctaatatgctttccaacgaagaggctggacaccacttcgagcagatgctcaagctgtcacagcggagtaaggacgaactgtttagcatcgccctgtacaactggctgatccaagtggatcttgctgacaagctgcttcaggtggctagccccttcctcgaacctcatttagtgagaatggctaaggtggaccagaaccgcgtgaggtatatggatcttctttggcggtattacgaaaagaatagatccttttctaacgccgccagggtgttatctcgtctggccgatatgcactccacggaaatttccctccagcagagactggaatacatcgccagagccatcctctctgccaagtcctctacagccatttccagtatcgccgcagacggtgaatttctccacgaattagaggagaaaatggaggtagctcgcatccagctccagatacaggagacgctccagaggcagtattcacaccactcttcggtccaagacgctgtctctcagctcgactctgagctgatggatataacaaagctctacggggaattcgcggatccatttaagctggccgaatgtaagttagcaatcatacactgcgctgggtatagcgaccccattttggtgcaaacactgtggcaagatatcatcgaaaaggagctgtctgatagcgtgaccctgtcttcttcagacaggatgcacgcactgtccttaaagatcgtattgttgggtaagatatacgccggaacacctaggtttttcccccttgactttatcgtccaatttctggagcagcaggtatgcactctaaattgggacgtcggctttgttatccaaacgatgaatgagattggagtgcctctgccacgattgttagaggtgtacgaccagctatttaagagtagggaccctttttggaataggatgaaaaagcctcttcacctgttggattgcatacacgtgcttctgatcaggtacgtcgaaaatccaagtcaggtgctgaactgcgagcggaggcggttcaccaacctttgcctggacgcggtatgcgggtaccttgtagagctgcaatctatgtcatctagtgtcgctgtccaagctatcactggtaacttcaaatccctgcaggctaaactggaaagactgcactag

SEQ ID NO: 25405 - DNA, 2334 bp, synthetic construct
  misc_feature 1..2334: note = Description of Artificial Sequence: Synthetic coding sequence
  source 1..2334: mol_type = other DNA
atggacagcaaggagagcctgacccccggccgggaggagaacccctcctctgtcctggcccaggaaaggggagatgtcatggatttttacaaaaccctgagaggtggcgctacagtcaaggtatctgcatctagtccttcacttgcggtagcttcacaatcggacagtaagcagaggcgcctgcttgtcgatttccccaagggctcagtgtctaacgctcagcagcctgatctcagcaaggccgtgagcctgtccatgggcttatatatgggagaaacagagaccaaggtgatggggaacgacctaggctttccccagcagggccagattagtctgtcttctggagagacagacttgaagctgcttgaggagtcaatcgccaacctaaaccggtcgacctcagtacccgagaaccctaaatcctccgcttcaaccgcggtctctgctgcccccactgagaaggagtttcctaagacacattctgacgtgtccagtgagcaacagcatcttaagggccaaacagggactaacggtggtaacgtgaagctgtacacaaccgaccagtcaacattcgatatcctacaggaccttgagttctcgagtggttcccccggtaaagagaccaatgagtcaccatggagaagcgacttgctgatagatgagaattgcctgttgagcccgctcgcaggcgaggacgactcattcctcctggagggaaattcaaatgaggattgcaaacccttaattctgcctgacactaaaccgaaaatcaaggataacggggacttggtgctaagcagtccatccaacgtgacgttacctcaagttaagaccgaaaaggaagactttatcgagttatgcactccaggcgtgataaagcaggaaaagctgggaactgtctattgtcaagcttcctttccaggcgctaacatcatcggtaacaagatgagcgccatatcagttcatggtgtgtctacttccggaggccagatgtaccactacgatatgaacacagcttctctttcccaacagcaggatcaaaagccgatcttcaatgttataccaccaattcccgttgggagcgaaaattggaataggtgccaagggtccggggatgataatctgaccagcttaggcacattgaacttccccgggcgtaccgtattttccaacggctatagcagtcccagtatgaggccggacgtaagcagccccccttcgagctcctctacagctacaacagggccccccccaaagctctgcttggtgtgttccgacgaagcatccggctgtcactatggcgtgctcacctgcggaagctgtaaagtgttcttcaaacgggctgtggaagggcaacacaattacctgtgtgccggccggaacgattgtatcatagacaaaattaggaggaagaattgccctgcatgccgatatcggaagtgtctgcaggccggcatgaaccttgaggctcgtaagaccaaaaagaagatcaaagggatacagcaggccaccactggagtatcccaggaaacctccgagaaccctggaaacaagacaattgtgccagcgactctgccccagctgacgcctaccctggtatccctactagaggtgatcgagcccgaggtgctctacgcaggctacgattcaagcgtgcctgattcaacctggagaatcatgacaacgctcaacatgctggggggccggcaggttatagccgccgtgaagtgggcaaaggcaatcccaggcttccgaaatctgcatctggacgatcaaatgaccctgctccagtactcctggatgtttcttatggcatttgctctcgggtggagatcataccgtcaaagctccgccaaccttctttgttttgcccctgatctcattatcaatgagcagcgcatgaccctcccatgcatgtatgatcaatgtaagcatatgctgtatgtgagtagtgagttgcaccgcttgcaagttagctatgaggagtatctctgtatgaagactctactgctgttgtcaagcgttcccaaggacgggctgaagtcacaggaactgttcgatgagatcaggatgacatacatcaaggagctgggaaaggcaatcgtgaagcgcgaggggaactctagtcagaactggcagcgcttctaccagttgactaagctgttggactccatgcatgaggtggtggagaacttgcttaattactgctttcagacattcctggacaaaacaatgtccattgaattccctgaaatgctggccgagataataaccaatcaaatccccaagtattcgaacggcaacatcaagaagctcctgtttcatcaaaagtag

SEQ ID NO: 25406 - DNA, 1782 bp, synthetic construct
  misc_feature 1..1782: note = Description of Artificial Sequence: Synthetic coding sequence
  source 1..1782: mol_type = other DNA
atggacagcaaggagagcctgacccccggccgggaggagaaccccagctcagtactagcccaagaaaggggagacgtgatggatttctacaaaactttacggggcggcgctaccgtgaaggtgtccgcctcaagccccagcctggcggtggcttcccagtcagacagtaagcagagacgcctgttagtcgacttccctaaaggctcagtgtccaacgcccaacagccagatctctcgaaggctgtgtctctttctatgggcctctacatgggcgagaccgaaactaaagtgatgggtaacgacctgggattcccccagcaaggccaaataagcctgtcatccggcgaaactgacttaaagcttctcgaagagtcaattgcaaacttgaatcggtccacgagcgtgcctgaaaatcctaaatctagcgcatctacagccgtgagcgctgctcctacagagaaagaattccctaagacgcattcagacgtatcatcagagcagcagcaccttaaaggacagacggggaccaacggtggcaacgttaagctctatacgactgatcaaagcacttttgacatcctgcaagacctggaattttcaagtggaagcccaggaaaggaaaccaacgagtcgccttggaggagtgacctgctgattgatgagaactgtctgctctctccactggccggagaagatgattcctttttgttagaagggaactctaacgaggattgcaaacctttgatcttgcctgataccaagcccaagatcaaagacaatggagacctggtcctatcatcaccgagcaacgtaacccttcctcaagttaaaaccgagaaagaagatttcattgagctgtgtaccccgggcgtgatcaagcaagagaaactggggaccgtttactgccaggcctccttccccggtgccaacatcatcggtaataagatgagtgccatcagcgtgcacggtgtgtctacaagtgggggccagatgtatcactacgatatgaacacagccagcctctcgcagcagcaagaccaaaagcccatcttcaatgtcattccccctatccccgttggttcagagaattggaaccggtgccagggaagcggagatgacaaccttactagtctcgggacgctaaactttcccggtcgaaccgtgttctccaatggatatagctcaccctccatgcgcccagacgtgagtagccccccgagcagttcatccacagccaccaccggccccccgcctaagctatgtttggtctgctctgacgaggcaagcggttgtcattatggcgtgctgacatgcggatcttgtaaggtgtttttcaagcgcgcagttgagggtcagcacaactatttatgcgccgggcggaatgattgtattatcgataagatcaggcgtaaaaattgccccgcgtgtcggtacaggaagtgccttcaggctggtatgaatctggaagtggtgcccaaggacggcctgaaatcacaagaattatttgacgagatacggatgacctacattaaggaactgggaaaagccatagtgaagagagagggaaattcatctcagaattggcagaggttttaccagctcactaagctgttagatagtatgcacgaagtggttgaaaatcttctgaactattgctttcagacgttcctggacaaaaccatgtcaatagagttcccagaaatgctcgcagagattattaccaaccagataccaaaatacagcaacggaaatatcaaaaaactcctgttccaccagaagtag

SEQ ID NO: 25407 - DNA, 2334 bp, synthetic construct
  misc_feature 1..2334: note = Description of Artificial Sequence: Synthetic coding sequence
  source 1..2334: mol_type = other DNA
atggacagcaaggagagcctgacccccggccgggaggagaaccccagctctgtattggcacaggagcggggcgacgtcatggatttctacaaaaccctgcggggtggggccacagttaaggtgagcgcctcctccccttcgctcgccgttgccagccaaagtgactccaagcagagacggctgcttgtcgacttcccaaaggggtctgtgtcaaacgctcagcagcctgatctgtccaaagccgtgtccctgtccatgggactttacatgggggagactgagacaaaggtcatgggaaatgatctaggatttccgcagcaagggcagatctcattgtcatcaggcgaaacggacctcaagctgctcgaggaatcgattgcaaaccttaacaggtcaacaagcgtgcctgagaatcccaagtctagcgccagcactgcggtgtcagccgcaccaaccgaaaaagagtttcctaaaacacattccgacgttagcagcgagcaacaacatctaaagggacagacggggaccaatggcggaaatgtcaagttgtataccactgatcagagcacatttgatattctccaagacctggagttttcatcagggagccctggaaaagaaactaacgaaagcccctggcggtccgacttattaatcgatgagaattgcctgctgtctcctctggccggagaagacgatagcttcctcctggaggggaacagtaatgaggattgtaagcctttgatcctgcccgacaccaaacccaagatcaaagacaatggcgaccttgttctctcaagtccatccaatgtgactctccctcaggtgaaaaccgagaaagaggactttatcgaactgtgcacgcctggagtcatcaaacaggagaaattgggcaccgtgtactgtcaagcctcttttccgggagccaatattatcgggaacaaaatgagtgcgatctctgtgcatggagtgtccacttccggaggacagatgtatcactacgacatgaacactgcatctttaagccagcaacaggaccagaaacctattttcaatgttatccctccaatccctgtggggtccgaaaactggaaccgttgtcagggcagtggcgatgataacctgaccagtttaggaaccctgaattttcctggacgaaccgtgttcagcaatggatacagctctccttcaatgcggccagacgtttcttctcccccaagttcaagcagtactgccactacaggtccgccgcccaaactgtgtttggtctgctcggatgaggccagtggttgccactatggggtgctgacctgcggttcgtgcaaagtgttctttaagcgggccgtagaaggccaacacaactatctgtgcgctggcaggaacgattgtatcatagacaagattcgaaggaagaactgtccagcctgtagatatagaaaatgtctgcaggcagggatgaatcttgaagcgcggaagacaaaaaagaagatcaaaggtatccagcaggcgacaactggggtttcacaggaaacttccgaaaaccccggcaacaaaacgatcgtccccgccacgctaccgcagttgaccccaactcttgtgtcactattggaagtcatcgaaccggaagtgctgtacgcaggctatgactcatccgtgccagattcaacatggcgtatcatgaccacgctgaacatgctgggcgggagacaggtgatcgctgccgtgaagtgggctaaagccatccctgggtttcgcaatctccatctggacgaccagatgactctgctgcagtactcctggatgttcttaatggctttcgccctcgggtggaggagttaccgccagtcttcagccaatttactgtgcttcgctccagatttaataataaatgagcagcggatgaccctcccctgcatgtacgatcagtgtaagcacatgctgtacgtcagttccgagctccaccggcttcaggtttcctacgaggagtatctgtgtatgaagaccctgctcctgctgagctctgtgcctaaagacgggcttaaaagccaggaactgttcgatgaaatccgcatgacatatatcaaggagcttggtaaagccatcgtaaagagagagggtaattcttctcagaactggcagcggttctatcagctgacaaagttgctggactcaatgcacgaagtcgtggaaaatctcctgaactactgtttccagaccttcttggacaaaaccatgtcgattgagttcccagaaatgctggctgaaatcatcacaaatcagatcccaaaatattccaacggaaacatcaagaaactgctgtttcaccaaaagtag

SEQ ID NO: 25408 - DNA, 2337 bp, synthetic construct
  misc_feature 1..2337: note = Description of Artificial Sequence: Synthetic coding sequence
  source 1..2337: mol_type = other DNA
atggacagcaaggagagcctgacccccggccgggaggagaacccctctagcgtgttagctcaggaacggggtgacgttatggacttctataaaacactgcgcggcggggccacagtgaaagtctcagccagttccccatcccttgctgtcgcttcccaatccgactcgaagcagaggcgcctgctcgtggacttcccaaagggcagcgtatctaacgcccagcagcccgacctgtctaaggcggtaagcctgtcaatgggcctgtacatgggagaaacagagaccaaggtcatgggcaacgacttaggcttccctcagcagggtcagatcagcctgtcttccggcgagactgacctgaagcttctggaggaatccattgctaatctcaataggtctacatctgtgccagagaatcccaagtctagcgccagtactgcagtgagcgcggcacccacggagaaagagttccctaagactcacagcgacgttagcagcgagcaacagcacctgaagggccagactggcacgaacggcgggaacgtgaaactgtatacgaccgatcagtcgaccttcgacatcctgcaggatctggagtttagctcagggtccccgggcaaggagaccaatgaatctccttggaggagtgacctattgatcgacgaaaactgtttgttatcacctctggccggcgaggacgatagctttcttttggagggtaattcaaatgaggactgcaaacccctgattctacccgacactaagcctaagatcaaagataacggcgatctagttctttcatcgccttccaatgtgactctccctcaggtgaagaccgaaaaagaggacttcatagaactgtgcacccctggcgttattaaacaggagaaactggggacggtgtactgtcaagcctcctttcccggggccaatatcatcggaaacaagatgagcgccataagcgtgcacggggtgagcacttccggtggccaaatgtaccactacgacatgaataccgcttcactcagtcaacaacaggatcagaaaccgatcttcaatgttatacccccaatcccagtcgggagtgaaaattggaaccggtgccaaggttccggcgatgataacctgaccagcttaggtacactgaactttccgggtaggactgtcttttctaacgggtacagcagccccagcatgcgccccgacgtaagttcacctccctcaagcagctctaccgccaccacaggaccaccgccaaagctttgccttgtctgctccgacgaagcaagcgggtgtcattatggtgtgctcacctgcggatcttgtaaggtgttcttcaaacgtgcagtggaaggacgccagcacaactacctttgtgcaggtaggaacgattgtattattgataagatcagacgaaaaaattgcccagcctgcaggtatcgaaagtgcctgcaagccggcatgaaccttgaagctaggaagacgaagaagaaaatcaagggtatccagcaggctacaaccggcgtgagccaagaaacttccgaaaatcctggcaacaagactattgtgccagccaccctgccacagctgacacccaccttggtgtccctgctggaagtgattgagccagaggtgttgtatgctggatacgatagctccgtgccagactcaacatggcggattatgactacactcaacatgctggggggtcgccaggtaattgctgctgtcaaatgggccaaggccatccctggcttccggaacctccacctggacgaccagatgacgctgttgcaatattcctggatgtttctcatggcatttgccctcggatggagaagttacaggcagtcttcagctaacctgctgtgcttcgcacctgatctcatcataaacgagcagaggatgacactgccttgtatgtacgaccaatgtaagcacatgctttacgtgtccagtgagttgcaccggcttcaggtatcttacgaggagtatctttgcatgaagacactgctcttgctgtccagcgttcctaaggatggtctgaagtctcaggagttattcgatgagatccgaatgacctacattaaggaattggggaaggcgatcgttaagagagagggcaacagcagtcagaattggcagcggttttaccagctcacgaagctcctagactccatgcacgaagtggtcgaaaatctcctcaattattgcttccaaacattccttgacaagaccatgtctattgagttccctgagatgttagctgaaattattaccaatcagattcccaagtacagcaatgggaacatcaagaaattgttgtttcaccaaaagtag

SEQ ID NO: 25409 - DNA, 2229 bp, synthetic construct
  misc_feature 1..2229: note = Description of Artificial Sequence: Synthetic coding sequence
  source 1..2229: mol_type = other DNA
atggacagcaaggagagcctgacccccggccgggaggagaacccctcatctgtccttgctcaagaaagaggggatgtcatggacttttataaaactcttcggggcggcgctactgttaaagtctccgcttcctcaccttctctggctgtagcgagccagtcagatagtaaacagcgcagattattggtggacttccctaagggctctgtgagtaacgcccagcagccggacctgtctaaagccgtgagcctgtccatggggttatacatgggagagactgagaccaaagtgatgggaaacgaccttgggtttccacagcagggccagatctccctgagctcaggagagacggatctgaagcttctggaagaaagcatcgcaaacctcaaccggtcaacgtccgtcccagagaacccaaagtcatcagccagtacggccgtgtcagcagcccctacagagaaagagtttcctaagactcatagcgatgttagctccgaacagcagcatctcaaaggccaaacgggtacaaacgggggaaatgtaaagttatatacaactgaccagtcgacgtttgacattctgcaggatctggaattttccagcgggagtcctggcaaggaaactaacgagagtccttggagaagcgacctccttattgacgaaaactgcttgctttctccgctggcgggtgaggacgattccttcctgctagagggtaattctaacgaggattgtaagccactcattctgccagacacaaagcctaagatcaaagataatggcgatcttgtgctgtctagcccaagcaacgttacactaccgcaagtcaagacagagaaagaggatttcatcgagctgtgtactcccggagtgattaaacaggagaagctgggaaccgtatactgccaggcatccttccccggtgccaatatcatcggaaacaaaatgagcgccatctcagtgcacggggtgagcacttcaggcggacaaatgtaccactatgatatgaacactgcgagcctgagtcagcagcaggatcagaaacctatctttaacgtaatacctccgattcctgtgggatctgagaactggaacagatgtcagggtagcggagacgataatctgacgagtctgggaacacttaactttcctggacggacagtcttcagcaatggctacagcagcccatcgatgcggcccgacgtctcatcacccccctcatcttcctccacagcaactaccgggcctccccctaaactttgtctggtgtgctccgacgaagcttcagggtgccactacggtgttctgacatgtggcagctgtaaggtcttctttaaaagggccgtggaaggtcaacacaattatctgtgcgcaggacgaaacgattgcattattgataagattcggaggaagaattgtcccgcctgccggtaccgtaagtgcctccaggccggcatgaacctggaggctagaaagacaaagaaaaaaataaaggggatccaacaggcaacaacaggtgtgtcgcaggagacctccgaaaacccaggaaacaaaacaatagtgcctgccaccctcccgcagctgacccccaccctggtgtctctcctcgaggtgatcgagccagaagtcctgtatgccggctacgattcctccgtgcccgattcaacatggcgcatcatgacgaccctcaacatgctgggtgggcgccaggtgattgccgcagttaagtgggctaaggccatcccggggttccgcaatctgcacttggacgaccaaatgaccttacttcaatacagctggatgtttctaatggcctttgctttagggtggagatcctatcggcaatcaagtgctaatctgctttgcttcgcccctgatctgatcattaatgaacagcggatgacgctgccatgcatgtatgaccaatgtaagcacatgctatacgtgtcttcagaattgcatcgattgcaggtgtcatacgaggaatatctctgtatgaagaccctgttactactgtcctccgtgcccaaggacggcctcaaaagccaagagctgttcgacgagatcagaatgacctacatcaaggagctgggcaaggccatcgttaagagggagggaaattccagccagaattggcagcggttttaccagctcactaaactgctcgattccatgcacgaaaatgtgatgtggctaaagccagaaagcacgagccacaccttgatctag

SEQ ID NO: 25410 - DNA, 1143 bp, synthetic construct
  misc_feature 1..1143: note = Description of Artificial Sequence: Synthetic coding sequence
  source 1..1143: mol_type = other DNA
atgcggcccgacgtgagcagcccccccagcagcagcagcaccgccactacaggaccaccgccgaaactttgcttggtctgcagtgatgaggcaagcggatgccattacggcgttctgacatgtgggtcgtgtaaggtgttctttaagcgggccgtcgaggggcagcataactatctgtgcgccgggcgcaatgactgtatcattgataagatcagacgcaagaattgcccagcgtgtcggtaccgaaagtgtctccaggcaggcatgaatctagaggcacgcaagaccaaaaaaaagatcaaggggattcagcaggctacaacaggagtgtcacaggaaacctctgaaaatccaggaaacaagactattgttccggccacactgccccaactgacacctaccctggtgtcattactggaagtgatcgagccagaggtgctgtacgccggctacgattctagcgtccccgactccacatggcgcattatgacaacattaaatatgctcggcgggcgtcaggtcatagcagcggtgaagtgggcgaaggccattcccggcttccgcaaccttcacctcgacgatcaaatgaccctcttgcagtatagttggatgtttttgatggccttcgcccttgggtggcgaagttaccggcagagcagcgccaatctgctttgcttcgcaccggacctgatcattaacgaacaaaggatgaccttgccgtgcatgtacgaccagtgtaagcacatgctctatgtcagttccgagttacaccgccttcaagtcagctatgaggaatacctctgtatgaagacacttttacttctgagttcggtgccaaaggacggactaaaaagccaggagctttttgacgagatcagaatgacctacataaaggagctgggaaaggctatagttaagagagaggggaattcatcgcagaattggcagcgcttctatcagctgaccaagctcctggacagtatgcatgaggtggttgagaaccttttgaattactgcttccagaccttcctcgacaaaacaatgtccatagaattcccagaaatgctcgcagagattattactaaccagattccaaaatatagcaatggaaatatcaaaaaattgcttttccaccagaaatag

SEQ ID NO: 25411 - DNA, 2256 bp, synthetic construct
  misc_feature 1..2256: note = Description of Artificial Sequence: Synthetic coding sequence
  source 1..2256: mol_type = other DNA
atggacagcaaggagagcctgacccccggccgggaggagaaccccagctcagtcctcgctcaggaacgtggcgatgtcatggacttctacaaaacgttgagaggtggggccacggtcaaggtttctgcctcaagccctagtcttgcagtggcttcccagagtgatagcaaacaacggagactcctggtagattttcctaagggaagtgtttccaatgcacagcaaccagatctcagtaaggcagtctccctctcaatgggcctgtacatgggcgagacagagacgaaagtgatggggaacgatttagggtttccgcaacaggggcagatttctctcagctcaggggagacggacctgaagcttctggaggaatctattgccaacctcaatcgctctacgtctgtgccagagaatcctaagtcgagtgccagcaccgccgtgagcgccgcccctaccgagaaggagttcccaaagactcacagtgacgtgagctccgagcaacaacatctcaaagggcaaactggcaccaatggtggaaacgtgaagctgtacactaccgatcagtcaactttcgatatcttgcaagatctggagttctctagcggaagccccgggaaggaaaccaacgagtcaccctggagaagcgatttgctcatcgatgagaactgcctcctgtctcccctagcaggtgaagatgactcttttctcctggagggcaattcaaatgaggactgtaagcctctcattctgcccgatactaaaccaaagatcaaggataatggcgatctggtgctatcttctccctcaaacgtgacccttccccaggttaagacagagaaggaagattttatagaactctgcactcccggagtgatcaagcaggaaaagctgggaaccgtgtattgccaggctagttttcccggagccaacatcattgcctccctctctcagcagcaggatcagaaacctattttcaatgtgattccgccgattcccgtggggagcgagaactggaacaggtgccagggctcaggagacgataatctgacatctcttggtactctgaacttccccgggcgcacagtgttttcaaatgggtattcgagcccctcaatgaggcccgatgtttcgagcccaccatcaagtagcagcactgcaacaaccgggccaccaccgaagctgtgcttggtgtgttcagacgaggcaagtggctgccattacggtgtcttaacgtgcggttcgtgtaaagtattttttaagcgggccgtagaaggtcagcacaactatctatgcgcagggcgcaacgattgcattatagacaagattcgcagaaagaactgcccagcgtgcagatatcgcaagtgtctccaggccggcatgaatttggaagctagaaagacgaagaagaaaattaaaggcattcaacaggctactactggagtgtcacaggaaacttccgagaaccctggaaacaagaccattgtaccagccaccctgccgcaactgacaccgacacttgtttctctactggaggtgatcgagccggaggtcctctatgctggatacgattctagcgttccagacagcacttggcggatcatgaccacgctcaacatgctgggagggcggcaggtgatcgcagccgtgaaatgggctaaggccatccccggatttcgcaatctccacttagacgatcagatgacactcctccagtatagttggatgtttttgatggcctttgcgttgggctggagatcatatcgacaatccagcgccaacctgctctgtttcgctccagacctcattataaacgaacagcgcatgacccttccctgcatgtacgaccagtgcaagcacatgctgtacgtatcatctgaactgcatcgtttgcaagttagctatgaggagtatctttgtatgaagactttattgttgctgagctccgtacccaaagacggactgaagagtcaagaactgtttgatgaaatcagaatgacgtacataaaagaacttggcaaagctattgtgaaaagagaggggaacagctctcagaattggcagcggttctatcaactgacgaaactgttggactctatgcacgaggtggttgagaacctgcttaactattgctttcagacatttctggacaagacaatgtccatcgaattccccgagatgctggctgagattattactaaccagattccaaaatacagcaatggaaacattaaaaagttactgtttcatcagaagtag

SEQ ID NO: 25412 - DNA, 435 bp, synthetic construct
  misc_feature 1..435: note = Description of Artificial Sequence: Synthetic coding sequence
  source 1..435: mol_type = other DNA
atggacagcaaggagagcctgacccccggccgggaggagaacccctcctcagtcctagcccaggagaggggcgacgtgatggatttttataagaccctgagaggcggcgctactgtgaaggtgagcgcatcctctccaagcttagcagtggcatcacaatccgactctaagcagcgccgattgctggtcgatttccccaagggatccgtatccaacgcccagcaacccgacctgtcaaaggccgtgtcattatccatgggactgtacatgggcgaaacagaaaccaaagtcatgggcaacgatcttggctttccacaacaggggcaaatcagcttgtcatcaggtgagactgacttaaagttacttgaggaatcgatcgccaatcttaatagatccacctcggtccctgagaatccaaaatcttctgccagctag

SEQ ID NO: 25413 - DNA, 438 bp, synthetic construct
  misc_feature 1..438: note = Description of Artificial Sequence: Synthetic coding sequence
  source 1..438: mol_type = other DNA
atggacagcaaggagagcctgacccccggccgggaggagaacccctcttctgttttggcacaggaaagaggagatgtgatggatttttataagaccctgcggggtggggcaacagtgaaagtgagtgcttcctcacccagtctcgctgtggcttctcagtccgactctaagcagcggcgcctactggtggactttcctaagggttctgtgagcaacgcccaacagcctgacctgtctaaagccgtttccctgagtatgggattgtatatgggcgaaactgaaacgaaagtgatgggaaacgatctgggctttccacagcaggggcagatctctctatcctcgggggagaccgacctgaaactgctagaagaaagcatcgcgaacttgaaccgcagcacgagcgtacccgagaacccgaaaagttccgctagtacgtag

SEQ ID NO: 25414 - DNA, 2334 bp, synthetic construct
  misc_feature 1..2334: note = Description of Artificial Sequence: Synthetic coding sequence
  source 1..2334: mol_type = other DNA
atggacagcaaggagagcctgacccccggccgggaggagaacccctcctccgtgttggcccaagaaaggggcgacgtgatggacttttacaaaaccttgagaggcggagcgaccgtaaaggttagcgcaagcagcccttccctggccgtcgcatctcagagcgatagtaaacagaggcggctactggtggattttcctaaaggcagcgttagtaacgctcagcagcccgatctctcgaaagcggtgagcctgagtatgggattgtatatgggcgaaacagaaaccaaggtgatgggtaatgatttaggattccctcagcagggacagatttcacttagttccggtgagacagacttaaagctgttggaggaaagtatcgcaaatctgaatcgctctaccagcgtgcccgagaacccaaagagctccgcctctaccgctgttagtgccgcccccaccgagaaggagttccccaaaacccacagtgacgtgagctctgagcagcagcaccttaaaggtcagaccggcacgaacggcggcaacgttaagctgtatactacagatcagtccacattcgatatcctccaggacctcgagtttagcagtggcagtcctggcaaggagaccaatgagtccccgtggcgctcagacttacttatcgacgagaactgcctcctcagcccactggcgggagaggatgattctttcctgctagagggtaacagcaatgaagattgtaagccgcttatcttgcctgacaccaagccaaagatcaaagataatggtgatctggtgctgtcaagcccatctaatgtaactctgccccaggttaagacggagaaagaggatttcatcgagctttgcacacctggtgtgatcaagcaggagaaactcggcactgtgtactgccaggcctcctttcccggagcgaatattattggcaacaaaatgtccgctatcagcgtgcacggtgtctcaaccagtggaggtcagatgtaccactatgatatgaataccgcatcactgtcacagcagcaagatcaaaaaccgatctttaacgtaattccacctataccagtcggctctgagaactggaaccgatgccagggatctggcgacgataacttgacctccttaggtaccctcaactttcccggccgcactgttttctctaatggctatagttctccgtccatgcggcctgatgttagttcaccccccagcagcagtagcacagcgaccacaggtcccccacccaagctgtgcctggtctgctcagatgaggctagcggctgtcactatggggtgctgacatgcggctcttgcaaagtcttctttaagcgcgctgtcgagggacagcataactacctgtgtgcaggccgaaacgactgtatcatcgacaagataagacggaagaattgccccgcctgtcggtatagaaagtgtctgcaggctggaatgaatctagaagcccggaagaccaagaaaaagattaaaggcattcagcaggcaaccacaggggtgtctcaggagacttccgaaaatcccggaaataagacgattgttcctgcaactttgccgcaactcacccctactctggtgtctctgcttgaggtaatcgagccagaggtgctttatgctggctatgattccagcgtgccggattctacatggagaattatgaccaccctaaatatgttggggggtcgccaggtcatcgctgccgtgaagtgggctaaagctattccagggttccgcaatctccatttagatgatcagatgacactactccagtactcatggatgttcctgatggccttcgcgctgggctggcggtcttaccgacaaagctctgccaacttactgtgttttgcacctgatctgatcattaacgaacagaggatgactttgccctgcatgtacgatcagtgtaaacatatgctgtatgtgtctagcgaactgcaccgcctccaggtctcttacgaagaatacttatgcatgaaaacactcttgctccttagctctgtgcctaaggacggcctgaaatcccaggagctgttcgatgagattcgcatgacctacattaaggaactgggaaaggcaatagtgaagagagagggaaactccagccagaattggcaacggttctaccaactcaccaagctgcttgattctatgcacgaagtggtggaaaacctgctaaattactgcttccaaactttcctggacaagaccatgtccattgaattccctgaaatgctggctgagataatcacaaaccagatccctaaatacagtaacggtaatatcaagaagctgctgttccatcagaagtag

SEQ ID NO: 25415 - DNA, 2337 bp, synthetic construct
  misc_feature 1..2337: note = Description of Artificial Sequence: Synthetic coding sequence
  source 1..2337: mol_type = other DNA
atggacagcaaggagagcctgacccccggccgggaggagaaccccagctcagtgctagcacaagagagaggagatgtaatggatttttacaagactcttcggggtggagccactgttaaagtatcagcatcaagcccctctctcgccgtggcgtcccaaagtgatagcaaacagcgcagacttctagtggactttccaaaagggtcagtgtcgaacgctcagcagcccgatctctcgaaggccgttagcctctctatgggcctgtacatgggagaaaccgaaacaaaggtgatgggtaatgacctggggtttccgcagcaggggcagatttccctctcctctggtgagaccgatctaaaattgctcgaagaatcgatcgccaacttgaaccgaagtacatcagtgcccgaaaaccctaagtctagcgccagcaccgcggtcagtgccgcgccaaccgagaaagaattcccaaagacccattccgacgtgtccagtgaacagcaacatctgaaaggccagacgggcaccaatggtggcaatgtgaagttgtacacaacagaccagagcaccttcgacatcttacaggatctagagttttcaagcggctccccaggaaaggagacgaacgaaagtccttggcgctcagatctcctgattgatgagaattgtcttctctccccactggctggcgaggatgacagtttcctcctggaggggaacagtaacgaggactgtaagcccttgattctgcctgataccaaacctaaaataaaggataatggagacctggtgttgtcgagccctagcaacgtcaccctgccgcaggtaaaaacagagaaagaagactttattgagctgtgcacccccggagtgatcaagcaggagaagctgggcaccgtgtattgccaggcctcttttcccggtgcaaatattatcggaaataagatgagcgcaatatcagtccacggtgtgtccacttcgggtgggcagatgtatcattacgatatgaatactgcgagcctaagccagcagcaagaccagaagcctatcttcaacgtcatccctccgattcctgtggggtctgagaattggaacagatgtcagggaagcggggacgataaccttacctcactgggcaccctgaacttccccggaagaaccgtattctcaaatggatattcctctccgtcaatgagacccgatgtgagcagccccccttcctcctcttctaccgcgaccacagggccacctccaaaactctgtttagtgtgttccgacgaagcaagtggatgccactacggtgtcttgacctgcggttcttgtaaggtgtttttcaagcgggccgtcgaaggaaggcaacacaactacctgtgtgcgggccggaatgactgtattattgataagattcgccgcaaaaactgtcccgcctgccggtacagaaaatgcctgcaagccgggatgaacctggaagcccgcaaaactaagaagaagatcaaggggatacagcaagcaacaaccggagtgagtcaggagacttccgaaaatcccggcaataagacaatcgtgcccgccactttaccgcagttgacaccgacactggtctccctcctggaagtgattgagcctgaggtgctgtatgcaggatatgattccagcgtgcccgattctacatggcgcatcatgaccactcttaacatgctcggcggacgacaggttatagctgccgttaaatgggcaaaagcgatcccaggcttcagaaatctacacctggatgaccagatgaccttacttcagtactcatggatgtttttaatggccttcgcactgggatggaggagttataggcaatcttcggccaatctgttgtgttttgcaccagacctcattatcaacgagcaaaggatgactctgccttgcatgtacgatcaatgtaagcacatgctctacgtgagctctgaactccaccgactccaagtgtcgtacgaagagtatttatgtatgaaaaccctactcctgctgagttctgtgccaaaagatggcctcaaatcccaggaactttttgatgagattcgcatgacgtatattaaggaattgggaaaggctatcgtcaagcgagaagggaattcctctcagaactggcagagattctaccagctcacaaaactactggattcaatgcatgaagtggtcgagaacctccttaactattgtttccagacctttctggataagacgatgtctatagagttccccgagatgttggcagaaataataaccaatcagataccaaaatacagtaacggcaacatcaaaaaactactctttcaccagaagtag

SEQ ID NO: 25416 - DNA, 438 bp, synthetic construct
  misc_feature 1..438: note = Description of Artificial Sequence: Synthetic coding sequence
  source 1..438: mol_type = other DNA
atggacagcaaggagagcctgacccccggccgggaggagaacccctccagcgtattggcccaggagcgcggggacgtgatggatttttataaaacattgcgagggggagcgactgtcaaagtgtctgccagctccccttcgctggctgtcgccagccagagcgattccaagcagcggaggttgcttgtagatttcccaaaagggtcagtgtctaatgcacagcaaccagatctgagcaaggctgtcagcttaagcatgggcctgtatatgggggagacagagaccaaggtcatgggtaatgatctgggattcccccagcaaggacagatttccctatcctctggagaaacggacctgaagctcctagaagaatcgattgcaaatttgaaccgcagcacttcagtacccgaaaatcctaagtcttccgcttctacctag

SEQ ID NO: 25417 - DNA, 438 bp, synthetic construct
  misc_feature 1..438: note = Description of Artificial Sequence: Synthetic coding sequence
  source 1..438: mol_type = other DNA
atggacagcaaggagagcctgacccccggccgggaggagaaccccagctctgttctggcccaggaacgcggcgacgtgatggatttttataaaacactgcggggaggagccacagttaaggtaagcgcctccagtccctctctggccgtcgcttctcagtctgactctaagcaacggcgtctgctggtcgactttcccaaagggagcgtgtctaatgcccagcagccggatctgtctaaggccgtctcgctgagcatggggttatacatgggcgaaacggagacgaaggtcatgggtaacgatctcgggtttccccaacaaggccagatcagcctgagcagtggagaaaccgaccttaagctgctggaagaaagcatcgcaaaccttaaccgttcaacatcggttcccgagaatcctaagagttccgccagcacgtag

SEQ ID NO: 25418 - DNA, 438 bp, synthetic construct
  misc_feature 1..438: note = Description of Artificial Sequence: Synthetic coding sequence
  source 1..438: mol_type = other DNA
atggacagcaaggagagcctgacccccggccgggaggagaacccctctagcgtcctggctcaggagagaggcgatgtgatggacttctataagactctaagaggaggggcgaccgtgaaggtctcggcgtcaagcccatctctcgctgtggcttctcaatcagactcaaaacaacgacggctgctggtggactttcccaagggctccgtatctaacgcgcaacaacccgatctcagtaaagcagtctctctgtctatggggctttacatgggagaaacagaaaccaaggtcatgggtaatgatctcggctttccgcagcaggggcagatttccttgagctctggcgagactgacctgaagctcttagaagagtctattgccaatctgaaccggtcgacctctgtccctgagaatcccaagagtagtgcctccacttag

SEQ ID NO: 25419 - DNA, 1914 bp, synthetic construct
  misc_feature 1..1914: note = Description of Artificial Sequence: Synthetic coding sequence
  source 1..1914: mol_type = other DNA
atgcacgacagcatccggttcggcaacgtggacatgccctgcgtgcaggcgcagtactcaccgtcacccccaggatcaagctatgcggctcagacatattcatctgaatacactacggaaattatgaacccagactataccaagctcactatggatctaggatcaacagagattacggcaactgcaaccacatctctcccctccatcagcaccttcgtggagggatattctagtaactatgagttgaaaccaagttgcgtataccagatgcagagaccattgatcaaggtcgaggaaggccgcgccccctcctatcaccaccaccaccaccatcaccaccatcaccaccaccaccaccagcagcagcaccaacagccatccatcccacctgcttcatctcccgaagatgaggttctgccctccacctccatgtatttcaagcagagccccccaagcacgcccacaactccagcttttccacctcaagccggagccctgtgggacgaggcccttccaagcgctccaggctgtattgcgcccggtcccctgttggaccctccgatgaaagcagttcctactgttgctggagcgcgattccccctattccattttaagccctctcccccgcaccctcctgcaccgtcccccgcagggggccatcacttaggttatgatcccaccgctgctgctgcgctgtctttacctttgggagccgccgctgccgcggggtctcaggcagcagctcttgagtcccatccctatggcctgccactggctaagcgcgcggccccattagcatttcccccactcggcctcacgccatccccgaccgcatcctccctgctaggagaatctcctagcctgccatcaccgccatctcgcagtagcagcagtggcgaggggacctgcgccgtgtgtggagacaatgctgcttgtcagcactacggggtgcgcacgtgtgaagggtgcaaaggttttttcaaacgcaccgtgcagaaaaacgcaaaatatgtttgcctggctaacaaaaattgtcccgttgacaaacgcaggcggaataggtgtcagtactgccggtttcagaagtgcctgagcgtgggtatggtgaaggaagtggtgcgtaccgactctctgaagggacggcgagggagactcccatctaagcccaaatcccctctgcagcaggagccatctcagccttccccccccagccccccaatttgtatgatgaacgcattggtccgggctctgaccgactctactccaagggatctggactacagtaggtactgcccaacagatcaggccgccgcggggactgatgcggagcacgtgcagcagttctacaacctacttacagcctccatcgacgtctccaggtcttgggcagagaaaataccaggattcactgacttaccaaaagaagatcaaactttgctgattgagagcgcctttttggaactgttcgtcctgcggctaagcattaggagtaataccgcggaggataaatttgtgttttgtaatggtctagtgctacaccgcctgcaatgtctgcggggattcggagagtggctggacagcatcaaagatttctcattgaatcttcagagtctgaacctggatatccaggcgcttgcatgcttgtccgctctttccatgatcaccgaacggcacggcctgaaggagcccaaacgcgtggaggagctctgcaataagataacttccagcctgaaggaccaccagtccaagggtcaggctctggagcccacggagtctaaggtcctgggcgcactggtggaactgaggaaaatctgtaccttgggcctgcagagaatcttctacctgaagctggaagacctagtctctcctccaagcattattgacaaactttttctcgataccctgccgttttag

SEQ ID NO: 25420 - DNA, 1332 bp, synthetic construct
  misc_feature 1..1332: note = Description of Artificial Sequence: Synthetic coding sequence
  source 1..1332: mol_type = other DNA
atgccctgcgtgcaggcccagtacagccccagcccccccggcagcagctatgcggcccagacttactcgagtgagtataccaccgaaatcatgaaccccgattatactaaacttacgatggacctcggctcaacagaaattacagccacggccacaacctctttgcctagcatcagcacattcgtcgaaggatacagcagtaattacgaactcaaaccctcttgtgtctatcaaatgcaaaggccgttgataaaagtggaggaagggagggccccatcataccaccatcaccaccatcatcaccaccaccatcatcatcaccaccaacagcagcatcaacagcctagcattcctccagcatcatctccagaggacgaggtactcccaagtacaagcatgtattttaaacaaagtcctcctagcacccccaccaccccagctttcccaccccaggctggcgcactctgggatgaggctctccccagcgccccaggatgcatcgcacctgggccactgcttgaccccccgatgaaagctgtacctaccgtagctggcgcacggttccctctcttccactttaagccaagccccccacacccccctgctccaagccctgccggtggccatcatctggggtatgaccccactgcagccgcggcgctctccctccccttgggagccgctgccgccgccgggtcccaggcagctgctcttgagagccacccttatggcctaccactggctaagcgggctgctcccctggcattccccccactgggcctcacaccgagtccaacagccagtagcctccttggggagagtccaagcctgcctagccctccttcacgtagctcaagcagtggggagggaacctgtgcggtttgtggtgacaacgcggcttgccaacactatggtgtgaggacttgtgaaggctgtaaaggcttctttaagcggacagtgcagaaaaacgcgaaatatgtgtgtctggccaacaaaaactgccctgtagacaaacgccgacgcaataggtgccagtactgcaggttccagaaatgtctgtccgttggaatggtgaaggaggtggtgagaactgattcgctgaagggacggcggggcaggctccctagcaaacctaaatccccactgcagcaggagccctcccagcctagccctcccagtcccccaatctgcatgatgaacgcattggttcgggcgctgacagatagcacccctcgtgacctggactacagtcgggtctccttcatgatctcatgcttccagatgaacgaccaagggctttatctgtggctcctcgtgatccgcgtggactag

SEQ ID NO: 25421 - DNA, 894 bp, synthetic construct
  misc_feature 1..894: note = Description of Artificial Sequence: Synthetic coding sequence
  source 1..894: mol_type = other DNA
atgaaggccgtgcccaccgtggccggcgcccggttccccctgttccacttcaagccgagccctccgcatccccctgccccaagcccagccggcgggcaccaccttggctatgatcccactgcagctgccgcgctttcactgccactaggggccgcagctgccgctggatcgcaggcggctgcattggagagccatccttatggccttccgctagcaaaaagagctgcccctctggctttcccaccactaggattgacaccttcgcctacagccagtagtctgttgggcgaaagcccttctttgcctagtccccctagccgatcatcttcctccggtgaagggacctgtgcagtctgtggagacaatgctgcatgtcagcactatggggtccgaacctgcgagggttgtaagggattttttaagcgcacagtccaaaagaacgccaaatacgtctgtctggcaaacaaaaattgtcccgtggacaaacggaggcgtaatcgctgccaatactgtagattccagaaatgtctatccgtggggatggtgaaggaggtcgtgaggaccgatagtctgaaggggcgcaggggaaggcttccatcgaagccaaagagcccattgcagcaagagccaagtcagccgtcacccccctcgccaccaatctgtatgatgaacgctctggttcgggccttgaccgactctacacctcgggatttagactatagtagagtttcgttcatgatcagttgctttcagatgaatgatcaaggcctttacctgtggctgctggttattagggtgctggattcctttcacacctttagcatttttctggcctctttctccaattcggtccatcctctccaacagataatctttgcccttctgaatttatag

SEQ ID NO: 25422 - DNA, 1881 bp, synthetic construct
  misc_feature 1..1881: note = Description of Artificial Sequence: Synthetic coding sequence
  source 1..1881: mol_type = other DNA
atgccctgcgtgcaggcccagtacagccccagcccccccggcagctcgtatgctgcgcaaacatatagtagcgagtatactaccgaaataatgaatcccgactataccaaactcacaatggatcttggctccacggagattactgccacagccacgacctcccttccctcgatatcaaccttcgtcgaaggctacagttccaattatgagctgaagccaagttgtgtataccagatgcaaagacctttgattaaggtagaggaaggacgagcccccagctaccaccaccatcaccatcaccaccatcaccaccaccaccatcaccagcagcagcatcagcagcctagcatccctcccgccagcagtccggaagatgaagtgttaccctctacatcgatgtattttaaacaatccccaccgtctacccctactacccccgcctttcccccacaggcaggtgccctctgggatgaagccttaccctccgcaccaggctgtatcgctcctggaccattattggacccccctatgaaagccgttccaaccgtggccggagcccggtttcccctgttccacttcaagccatcaccgcctcacccccctgcccccagccctgctggcgggcatcatctgggctacgaccccactgctgctgccgcattatccctgcccctgggagccgctgctgccgcgggctcacaggcagccgccctggaaagccacccctatggattacccttggcaaagagagccgcaccactggccttcccccccctaggactcactccgagccccacagcaagcagtctactcggcgagagtccatcgctgccttcccctcccagcaggagttccagtagcggtgagggtacctgcgctgtatgtggggataacgcagcttgtcagcactacggcgtgcggacctgcgagggttgcaaaggcttcttcaagcgcacagtccagaaaaatgctaagtacgtgtgcctggcaaacaagaactgcccagtcgacaagcgaaggcgtaatcgttgccagtactgccgctttcagaagtgcttatcagttgggatggtgaaggaggttgtccgcacggattcattgaagggccggcgcggaagattgccgtcaaagccgaaaagtcccttacagcaagagccgagtcagccctcccctccatccccacccatttgcatgatgaacgctctggtgagagcccttaccgattccactccccgggacttagattacagcagatactgtcccaccgaccaagccgcggccggtaccgacgctgagcacgttcagcagttttataacctgttgacagccagcatcgacgtctcgcgttcgtgggccgagaaaattcccggctttactgacctgcccaaggaggaccaaactctcctgatcgagagtgcctttctggagctgttcgtgctcagattaagtatcagaagcaatacggctgaagataaatttgtcttctgcaacggtttggtgctgcaccgcctacagtgcttgcgcgggttcggagaatggttagactctataaaagatttttccctaaacctccaaagcttgaacctcgacatccaggctcttgcctgcctttctgctttgtccatgattacagagcgccacggccttaaagaacctaaaagggtcgaagagctgtgtaataagataacttcgagcctcaaggaccatcaatccaaaggtcaggccctagagcctaccgagagcaaggtgctgggcgcattggttgagctgagaaaaatctgcacgcttggactccaacggattttctacctcaagctagaggatctcgtgtctccaccttccatcatcgacaaactgttcctggacacccttcccttctag

SEQ ID NO: 25423 - DNA, 627 bp, synthetic construct
  misc_feature 1..627: note = Description of Artificial Sequence: Synthetic coding sequence
  source 1..627: mol_type = other DNA
atgggcaacgcccaggagcggcccagcgagaccatcgaccgggagcgtaagagacttgtcgaaacactgcaagctgactcgggtctgcttctggacgcactgcttgccagaggggtcctaactggaccagagtacgaggcattagatgcccttccagacgccgaaagacgcgtcaggcggctcctattgctggtgcaaggcaagggggaagctgcttgtcaggaattgctgagatgtgcccagaggaccgccggagcccccgaccctgcttgggattggcaacatgtgggtcccggctacagagaccggtcatatgatccaccttgccccggccactggactccagaggcccccggctcagggactacatgtcccgggctcccccgcgcctccgatcctgacgaggcaggcggtcctgaaggcagtgaagcagtgcagtctgggacaccggaagagccggagcccgaattggaagcagaggctagcaaggaagccgagcccgagccagagccggaacccgagctggagccagaggctgaggccgagcccgagcccgaactggaacctgagccagatcctgagcccgaacccgacttcgaggagcgcgatgagtcagaggatagctag

SEQ ID NO: 25424 - DNA, 627 bp, synthetic construct
  misc_feature 1..627: note = Description of Artificial Sequence: Synthetic coding sequence
  source 1..627: mol_type = other DNA
atgggcaacgcccaggagcggcccagcgagaccatcgaccgggagcggaagcgcctcgtcgagaccctccaagccgactccggcctcctcctggatgctctgctggcccgtggagtgcttacgggccccgagtatgaagctcttgatgccctgccggacgccgaacgccgcgtcagacgacttctgctcttagtacagggcaaaggggaagccgcttgccaggaactcttgcggtgtgcccagaggacagccggggcccccgatcccgcctgggactggcagcacgttggtccaggctatcgggatcgaagctatgacccaccctgtcccggccactggactcctgaggctccggggtcgggaacaacctgtcccggacttccgcgagcaagcgaccctgacgaggctggcggccctgaggggagtgaggcagtgcagagcggtactcctgaggagccggagccagagctagaggctgaggccagtaaagaagcagaacctgagcccgaaccagaacccgagctggagccagaggccgaggcagagcctgagcccgagctcgagccggaacctgatccagaacccgagccagatttcgaggaacgggacgaatcagaggactcctag

SEQ ID NO: 25425 - DNA, 2133 bp, synthetic construct
  misc_feature 1..2133: note = Description of Artificial Sequence: Synthetic coding sequence
  source 1..2133: mol_type = other DNA
atggtgaagctggccaaggccggcaagaaccagggcgaccccaagaaaatggccccacctccaaaggaggttgaggaagactcagaggatgaggagatgagcgaggatgaggaggacgacagctctggcgaggaagtggttatcccacagaaaaagggcaaaaaggcagctgcaacatcagccaaaaaggtagtagtgtcccccaccaagaaggttgccgtggccaccccggcaaagaaggcggcagtaacccctggtaaaaaggctgcagctacaccagcgaagaaaacagtgacaccggcaaaagctgtgactacaccaggcaaaaagggggctactcctgggaaggctctggtggcgacacctgggaaaaaaggagctgcaatccccgccaagggcgctaagaacggtaaaaacgccaagaaggaagatagtgatgaggaggaagacgatgattccgaggaggacgaggaagatgatgaggacgaggacgaagacgaggacgagatagaacccgcagcaatgaaagccgccgctgcagcccctgcgagtgaggacgaggacgacgaggatgatgaggatgatgaggatgacgacgatgatgaagaagacgacagtgaggaagaggccatggaaaccacgcctgccaagggtaagaaggcggctaaagtagtgcctgtaaaagccaaaaatgtggccgaagacgaggatgaggaagaagacgatgaggacgaagacgacgatgacgatgaggacgacgaggatgatgatgatgaggacgacgaagaggaagaagaggaggaggaagaggagcctgtgaaagaagctcccggtaagcgtaaaaaggaaatggctaaacagaaagccgccccagaagctaagaaacagaaggtggaagggaccgaacccacaactgcttttaacttattcgtcgggaacctgaactttaacaaatctgcgcccgaactgaagaccggtatatcggacgtgtttgcaaaaaacgacctggctgtggtggatgttaggatcgggatgactaggaaatttgggtacgtagactttgagagcgcggaggatctggagaaggctcttgaactgactggcttgaaagtgttcggaaacgagatcaagctggaaaaacctaagggcaaagatagtaagaaggagagggacgcccgcactcttttagctaagaatctaccatataaagtgacccaggatgaactaaaagaagtattcgaagacgccgccgaaattagattagtaagtaaggatggtaaatccaagggcattgcatacatcgagttcaaaactgaggccgacgctgaaaagacatttgaggaaaagcagggcacggaaatcgatggcaggagtatatcattatactataccggtgagaaaggacagaatcaggattatcgcggcggcaaaaattctacctggagcggggagagtaaaacgctggtgctctctaatctgtcttattctgccacagaagagaccctccaggaggtctttgaaaaggctaccttcatcaaggtgccccagaaccagaatggaaagtcaaagggatacgcctttattgagttcgcaagcttcgaggacgccaaggaggcgctcaattcatgcaataagcgtgagatcgaaggcagggccattcgcctcgaactgcagggacctcgaggctctccaaatgcccgaagccagccgtccaaaacattgttcgttaagggcctgtctgaagatacaacagaggagaccttgaaggagtcctttgacggcagcgtgcgggcgagaatagtcaccgaccgggagacagggtcaagtaaagggttcggatttgtggacttcaattctgaagaagatgcgaaggccgctaaagaggccatggaggatggagagatagatggaaataaagtaacactcgattgggcaaaacctaagggcgaggggggctttgggggccgcggcggcggcagaggcggcttcgggggaaggggcggcggacgcggtgggcgcgggggatttgggggacgcggaagagggggcttcggtgggcgcggaggatttcgcggcggacgcggaggaggcggcgaccataagccccaagggaagaaaacaaagtttgagtag

SEQ ID NO: 25426 - DNA, 1449 bp, synthetic construct
  misc_feature 1..1449: note = Description of Artificial Sequence: Synthetic coding sequence
  source 1..1449: mol_type = other DNA
atggtgaagctggccaaggccggcaagaaccagggcgaccccaagaaaatggctccccccccaaaagaggtcgaggaggactccgaggacgaggagatgtccgaagacgaggaagacgattcctcaggagaggaagtagttatcccacagaaaaagggaaaaaaagcagcagccactagcgctaagaaagttgtagtgtcacctactaagaaggtagccgtggccactccagcaaagaaagccgctgttacccccggtaagaaagccgctgctacccccgccaagaaaactgtgacccctgccaaggcggtcacgactccagggaaaaaaggagccactcctggaaaggctctggtggcaacgccaggtaagaagggtgctgcaatccctgctaaaggcgccaagaacgggaagaacgctaaaaaggaagacagcgacgaagaggaggatgatgatagcgaagaagatgaggaagacgacgaggatgaggatgaggacgaggatgaaattgagcccgccgccatgaaagcggccgccgccgccccagcatctgaggacgaggacgatgaagatgatgaggatgacgaggatgggaaatctaagggcatcgcctacatcgaattcaaaaccgaggctgacgctgagaaaacctttgaagaaaagcagggtacagaaattgatgggagatcgatcagcctatattacacaggagagaaaggccagaaccaggattaccggggcgggaagaacagcacatggtcaggggaatctaaaaccctggttctctcaaaccttagctactccgctacagaagaaacattgcaggaagtgttcgagaaagccacatttattaaggtcccccagaatcagaacggaaagagtaaaggatatgcatttatcgagtttgccagcttcgaggacgccaaagaggctctgaatagttgtaacaaacgtgagatcgaggggcgtgccatccgactcgaattacagggcccaagggggtcacctaacgccagatcacaaccttctaaaacactctttgtaaaaggattaagcgaggataccacagaagaaactctgaaagagtcttttgacggatctgtaagggcacgcatcgtgactgaccgcgagacaggtagttcaaagggattcgggtttgtcgactttaattctgaggaggacgccaaagcagcgaaggaggccatggaagacggcgagatcgatggtaacaaggtgaccttagattgggcgaagcccaagggcgagggcgggtttggcggccgaggcggggggagaggaggcttcggcggacgcggcggagggcggggtgggagaggcgggtttggtgggaggggcagaggcggatttggcggacggggcgggtttaggggcggacgaggaggcgggggggaccataagcctcagggcaaaaaaaccaaatttgagtag

SEQ ID NO: 25427 - DNA, 1809 bp, synthetic construct
  misc_feature 1..1809: note = Description of Artificial Sequence: Synthetic coding sequence
  source 1..1809: mol_type = other DNA
atggtgaagctggccaaggccggcaagaaccagggcgaccccaagaagatggctcctccacccaaagaggtggaagaggatagtgaggatgaggagatgagcgaggacgaggaagacgactccagcggggaggagttaaacgatgacttctatcaaacaaccatgcatacattgtggaagaaaggtaaaaaagccgccgccacttctgcgatacctgccaaaggagctaaaaacgggaagaatgccaagaaggaggactccgatgaggaagaggacgatgattcggaggaagatgaggaagacgatgaggacgaagatgaggatgaggacgaaatcgagccagctgccatgaaggccgccgcagcggctcctgcaagcgaagacgaggatgacgaagacgatgaggatgacgaggacgacgacgacgatgaagaggatgacgatgacgacgaagatgatgaggaagaagaagaggaggaagaagaggaacctgtgaaggaggcgcccggcaaacggaagaaggagatggctaaacaaaaggcagcccctgaagccaagaaacaaaaagttgaaggcacagagccgacaactgcctttaacctttttgtgggcaatctgaatttcaacaaatctgccccagagctgaagacaggcatttctgacgtctttgccaaaaacgacctggcagtggtggatgtgaggatcggcatgacgcggaaattcgggtacgtcgacttcgaaagtgccgaagacctcgagaaggcattggagctcacgggtctgaaggtgtttggtaacgagattaagttggagaaacccaagggcaaggatagtaaaaaagaacgggatgctcgcacactgctggccaaaaatttaccctacaaggtgacacaggacgagctgaaagaggtttttgaagacgcggcagagattaggttggtgagtaaggacggtaaatcaaaagggattgcctatattgagttcaagacagaagctgatgctgagaaaacctttgaagagaaacaaggtacggaaattgacggccgcagcatcagcctctactatacaggggaaaaagggcaaaatcaggactatcgaggtgggaagaactccacgtggtccggggagagcaagacactggtgttgtccaaccttagctatagcgcaaccgaggagactctccaggaagtgtttgaaaaggctaccttcatcaaagttcctcagaatcagaacgggaaatccaaaggctacgcctttattgagttcgccagcttcgaagatgcgaaagaggccctgaacagctgtaataaaagagagatagaaggacgtgcaattagactggagttacaaggcccacgaggttctcccaatgccaggtctcagccttcaaaaacattatttgttaaaggcctgagtgaagatactacagaggagacactgaaagagtcattcgatggatccgtccgagctcgtatcgtgacagaccgggaaactggatcttcaaagggtttcggttttgtggacttcaactctgaagaggacgcaaaggctgccaaagaggcaatggaagatggcgagatcgatgggaataaggtcactctcgattgggcaaagcctaaaggagaaggcgggttcggaggccgtggaggagggaggggtggatttggcgggcggggtggagggcgggggggtaggggtgggttcggaggaagaggccggggcggctttggtggccgcggcggcttccgtggcggccgaggtgggggtggcgaccataagccacagggcaaaaagacaaaatttgagtag

SEQ ID NO: 25428 - DNA, 885 bp, synthetic construct
  misc_feature 1..885: note = Description of Artificial Sequence: Synthetic coding sequence
  source 1..885: mol_type = other DNA
atggaggacagcatggacatggacatgagccccctgcggccccagaactacctcttcgggtgcgagctcaaggccgacaaggactaccactttaaggtagacaatgacgaaaacgaacatcaactctcattgcgcacagtgtctctgggggccggggcaaaagacgagctgcacattgtggaagcagaggcgatgaactacgaaggcagccccattaaagtgaccctggcaacattaaaaatgtccgtgcagcccactgtgagtctgggaggcttcgaaatcacccctccggttgtcctgcggctcaaatgcgggagtgggcctgtgcacatcagtggtcagcatctagtcgccgtcgaagaggacgccgaatctgaggatgaagaggaggaggatgtgaaactactgagcatttccggcaagaggtctgcacccggtggaggatccaaggtgccacaaaagaaggtcaagctagcggcagatgaagacgacgacgacgatgacgaagaagacgatgacgaagatgatgatgatgacgacttcgacgatgaagaggcagaagaaaaagccccagtcaagaagtcaatccgtgacacccccgccaagaatgcccaaaagtccaatcagaacggaaaagactccaaaccaagctctactcccaggtcgaagggacaggaatcttttaaaaaacaggagaaaactccgaagacacctaagggaccttcctccgtggaggacatcaaggccaaaatgcaggcttcaatagaaaagggcggcagcctacccaaagtggaagccaagttcataaactacgttaaaaattgctttcggatgaccgatcaagaggccatacaggatttgtggcagtggaggaagagtctttag

SEQ ID NO: 25429 - DNA, 798 bp, synthetic construct
  misc_feature 1..798: note = Description of Artificial Sequence: Synthetic coding sequence
  source 1..798: mol_type = other DNA
atggaggacagcatggacatggacatgagccccctgcggccccagaattacctgtttggatgcgagttgaaggcggataaggactaccactttaaagtggacaacgatgaaaacgagcaccagctaagcctgcgtaccgtttccctcggggccggagcaaaggacgagcttcacatcgttgaggccgaagctatgaattatgaggggagccccataaaagtgacattagcgactcttaagatgtcagtgcagcccaccgtctcactggggggattcgaaatcaccccccctgtagtgctgagattgaagtgtggtagcggtcctgtgcacattagcgggcagcatctggtggcggtagaagaggacgctgagtccgaggatgaagaggaggaagacgttaaactcttaagcattagcggaaagcggtcagccccgggtggtggctctaaggtgccccaaaagaaggtgaagttggccgccgatgaagacgacgacgacgatgacgaggaagacgatgacgaggacgacgacgatgacgactttgacgacgaggaagctgaggaaaaggcgcctgttaaaaagggccaagagagtttcaagaaacaggaaaaaacacctaagacccctaagggccctagctcagttgaggacatcaaagcaaagatgcaggcgtcaatcgaaaagggagggtcactgcccaaggtcgaggctaaattcattaattacgttaagaattgcttccggatgacagatcaggaagctattcaagatttgtggcagtggcgtaagtctctgtag

SEQ ID NO: 25430 - DNA, 780 bp, synthetic construct
  misc_feature 1..780: note = Description of Artificial Sequence: Synthetic coding sequence
  source 1..780: mol_type = other DNA
atggaggacagcatggacatggacatgagccccctgcggccccagaattatcttttcggttgcgagctcaaggctgacaaggattaccatttcaaagtggataatgacgaaaatgagcatcaattgagcttgcggacagtttccttgggcgcaggagcaaaggacgaattgcatatcgtcgaggccgaagcgatgaactacgagggcagccctatcaaggtgaccctggcaacccttaaaatgtctgtccagcctactgtgtctctgggcgggttcgaaattacccccccagtcgtcctccggctgaaatgcgggagcgggcctgtgcacattagcggccagcatctagttgcagttgaagaggatgccgaatcagaggacgaggaggaggaggatgtgaagctgttgtcaatatcaggcaaacggagtgccccaggtggcggctcaaaggtgcctcagaagaaggtgaagctcgccgctgatgaggatgacgatgacgacgacgaagaggacgatgatgaggacgacgacgatgatgacttcgacgacgaggaggccgaggagaaagcccctgtcaaaaaatcaatacgcgatacccccgccaagaatgctcagaagagcaaccagaacggaaaggatagtaagcccagctctaccccccgctctaagggacaggagtcttttaaaaagcaggagaagaccccgaaaacccctaaaggtccatccagtgtcgaggacatcaaggcaaaaatgcaggcctcgatcgaaaaggcacactag

SEQ ID NO: 25431 - DNA, 885 bp, synthetic construct
  misc_feature 1..885: note = Description of Artificial Sequence: Synthetic coding sequence
  source 1..885: mol_type = other DNA
atggaggacagcatggacatggacatgagccccctgcggccccagaattatctctttggctgtgagctaaaagctgacaaagactatcattttaaagtcgacaatgacgaaaacgaacaccagctcagtttgagaactgtgagtcttggagccggagccaaggacgagctgcacattgtcgaagcagaggctatgaactatgagggcagcccaattaaggtgaccctggctaccctgaagatgagcgtgcagccaacagtgagcctgggcgggttcgagatcacaccccctgtggtcctcaggctgaaatgtggaagtggccctgtgcatatcagtggtcagcacctggtcgccgttgaagaagacgcagagtctgaggatgaggaagaggaagatgtgaaattgctgtctatatcgggaaagaggtctgcaccagggggaggttctaaggtgccacaaaaaaaggtgaagttagccgcagatgaggatgacgacgacgacgatgaggaggatgatgacgaggacgacgatgatgatgactttgatgacgaggaggcggaggaaaaggcacccgtgaagaaaagtatccgtgatacccctgccaagaacgctcagaaatcaaaccagaacggcaaggactccaagccctccagcaccccccgttcaaaaggccaggagtcctttaaaaaacaagagaaaacccccaagacaccaaaagggccctcatcagtggaagatatcaaagcgaaaatgcaggccagcatcgagaagggcggaagcttacctaaagtggaagccaagtttatcaactatgtgaagaattgctttaggatgactgaccaagaggctatacaagatctgtggcagtggagaaaaagcctgtag

SEQ ID NO: 25432 - DNA, 867 bp, synthetic construct
  misc_feature 1..867: note = Description of Artificial Sequence: Synthetic coding sequence
  source 1..867: mol_type = other DNA
atgaaggaccggacccaggagctgcggaccgccaaggacagcgacgacgacgacgatgtcgccgtgacggttgatcgggatagatttatggatgaatttttcgaacaggtggaagagattcgtgggtttatcgacaagattgctgagaatgtggaggaagtcaagaggaagcacagcgccatcctggccagcccgaacccagatgaaaagacaaaggaggaacttgaggagttaatgtccgacataaagaaaacggccaacaaggtacggtcgaaattgaagagcatcgaacaatccatcgaacaggaagagggtttgaataggtcaagcgcagacttgagaatcagaaaaactcagcactcaacgctctcacggaaattcgttgaagtgatgtcagagtataacgccactcagtccgactacagagagaggtgtaagggccgaatccaaaggcaactcgagataacagggcgcactaccactagcgaagaattagaggacatgctggagtccgggaaccccgccatcttcgcttccggaatcatcatggacagctcgatttccaagcaagccctgtctgagatagagactaggcacagtgagatcattaagctggaaaacagtatccgagaactgcatgacatgtttatggatatggctatgctcgtcgagagccagggtgagatgattgatcggatcgagtacaacgtcgaacacgcagtcgattacgtggaacgtgctgtctcagacacgaaaaaagcagtgaaatatcagtccaaagcaagaagaaaaaaaatcatgatcattatttgctgtgttatactggggatcgtcatcgcatcaactgttggcggcatcttcgcctag

SEQ ID NO: 25433 - DNA, 183 bp, synthetic construct
  misc_feature 1..183: note = Description of Artificial Sequence: Synthetic coding sequence
  source 1..183: mol_type = other DNA
atggaggagcagggccacagcgagatggagatcatccccagcgagagccacccgcacattcagctactcaagagcaaccgcgaactcctagtgacccacattcggaacacacagtgtttggtcgataatcttttgaaaaacgattatttcagcgccgaggacgcagaaattgtgtgcgcctag

SEQ ID NO: 25434 - DNA, 183 bp, synthetic construct
  misc_feature 1..183: note = Description of Artificial Sequence: Synthetic coding sequence
  source 1..183: mol_type = other DNA
atggaggagcagggccacagcgagatggagatcatccccagcgagtcacacccgcatattcaactgctcaaatccaaccgtgaactgctggtgacccacattcggaacacccagtgccttgtggacaacctgctcaagaatgactatttttctgccgaggatgctgaaatcgtgtgcgcctag

SEQ ID NO: 25435 - DNA, 138 bp, synthetic construct
  misc_feature 1..138: note = Description of Artificial Sequence: Synthetic coding sequence
  source 1..138: mol_type = other DNA
atggaggagcagggccacagcgagatggagatcatccccagcgagtcgcatccccatattcagctgctgaagagtaatagagagctgctggttactcacatcagaaatacacagtgcctggtggacaacttgctctag

SEQ ID NO: 25436 - DNA, 183 bp, synthetic construct
  misc_feature 1..183: note = Description of Artificial Sequence: Synthetic coding sequence
  source 1..183: mol_type = other DNA
atggaggagcagggccacagcgagatggagatcatccccagcgagagccaccctcatatccagttgcttaagagtaaccgtgagcttctcgttacacacattcgcaatacgcagtgtctggtggacaatctcctcaaaaacgactacttctcagccgaggatgctgagattgtctgcgcctag

SEQ ID NO: 25437 - DNA, 750 bp, synthetic construct
  misc_feature 1..750: note = Description of Artificial Sequence: Synthetic coding sequence
  source 1..750: mol_type = other DNA
atggaggagcagggccacagcgagatggagatcatccccagcgagtctcacccccatatccagctattaaaatctaatagggagctcctggttacccacatccgaaatacccagtgtctagtggacaacctcctgaaaaacgactattttagcgctgaagacgccgagatcgtctgtgcctgccccacacagccagataaagttcgaaagattctggatttggtgcagagcaagggagaagaagtctcagaattttttctgtacctcttacagcagttagctgatgcctatgtcgacctgagaccttggcttctggagatcggcttttccccatctctgctcacccagtcaaaggttgtggtcaatactgatcccgtgtctcgttatacacagcaactgagacaccacctgggcagagactccaaattcgtcctctgttacgctcagaaggaggaattactgcttgaggagatctacatggacactatcatggagttggtcgggttctccaatgagagtctagggtcactgaactctctagcttgcctcctggatcataccaccggaatactcaacgagcaagcggcctccagaaaagtgactggttgcgtctgtaggacctgctcatcttcaaccactgcgacccagtctggaacccctcgcaggtgtctcccaagctgctgcgcatcgccgacatggcccagctccccgtcaatggcatggacttcctgtaccaggacctggacctag

SEQ ID NO: 25438 - DNA, 2340 bp, synthetic construct
  misc_feature 1..2340: note = Description of Artificial Sequence: Synthetic coding sequence
  source 1..2340: mol_type = other DNA
atggaggagcagggccacagcgagatggagatcatccccagcgagtcccacccacacattcagttgctcaaatccaaccgggagctgcttgtgacgcacatccgtaatactcagtgccttgtggacaatctactaaagaacgactacttttcagccgaagacgccgaaatcgtttgtgcttgccctacacagccagacaaggttaggaaaatactggatctggtgcagtctaaaggagaggaggtctctgagttttttctatatctccttcagcagctggctgacgcatacgtggacctcagaccctggttgctggaaattggctttagtccaagcctgctcacgcagtccaaggtcgttgtcaataccgaccccgtgagtcgatacactcagcagctacgacaccacttaggtagggacagcaaatttgtattatgctacgcacagaaagaggaactattactggaggagatctatatggatacaataatggagctggtaggattttcaaacgagagcctcgggtctctcaatagcttggcatgtctcctggatcacaccactgggatccttaatgagcagggcgagactatttttatcttaggcgatgccggcgttggcaaatcaatgctgcttcagcgactccaatcactttgggccacgggcagactcgacgcaggcgtgaagttcttctttcacttcaggtgccggatgttttcctgtttcaaggagtccgatcgtctttgcctgcaggatctgctgttcaaacattattgttatcccgagagagatccagaagaagtgtttgctttcctcctgaggttcccccatgtggcattgttcacattcgatggactggatgagttgcacagcgacctagatctgagtcgggtgcccgattcaagctgcccttgggaaccggctcatcctctcgtcctcctcgccaatctactgagcggcaagcttctaaagggcgcctccaaactgctgactgcccgcactggcatcgaagtgccaagacaatttctacggaagaaggttctcttaagaggcttctctcctagtcacctcagggcatatgcacggcgcatgtttcccgaaagggcattacaggaccgccttctgtcacagcttgaggctaacccaaacttgtgttctctctgttctgtgccgctcttctgttggattattttccgttgtttccagcactttcgtgcggcattcgagggctcccctcagttacccgactgcaccatgacattgacagatgtgtttttactggtaacagaagtacacctgaaccgaatgcagccttcctctctcgtacagagaaacacgagaagccctgtcgagacactccacgccggaagagacacattgtgctcactcggtcaggtcgcccaccgcgggatggagaagagcctatttgtttttacgcaggaagaagtgcaagccagcgggcttcaggagagggatatgcagctcggcttcttgcgagctttacccgagctcgggcctgggggcgaccagcagagttatgagttctttcatctaacgttgcaggcttttttcacggctttcttcctagtcctggacgatcgagtcggcacacaggaactgttgaggttttttcaggaatggatgccccccgcgggggctgccacaacctcttgttacccaccatttttgccatttcaatgtctgcagggcagcggtccagcccgggaggatttgtttaaaaataaagatcacttccagttcacaaatctatttttatgtggccttttatcaaaagcaaagcagaaactcctgagacatctggtccccgccgcggctcttcggcggaagcggaaggcactttgggctcatttgttctcatccctgcggggttacctgaaatccttgcccagggtgcaggtggagtcattcaatcaggtgcaggctatgcccacttttatctggatgctgcgctgcatctacgaaactcaatcgcagaaggtgggccaattggctgcccgggggatttgtgcaaactacttgaagttgacttactgtaatgcctgcagtgccgactgttctgcattgtccttcgtgcttcatcattttcccaagagattggccctcgacctagataataacaacctgaacgattacggtgtgagggagctccagccctgcttctccagactaaccgtgttgagactcagcgttaatcaaattaccgacgggggcgttaaggtactgtcagaggagctgacgaaatataaaatagtcacgtacttgggtttgtggaagagcgtggacacgatatgtttcaagaagcagggattgctgaaatag

SEQ ID NO: 25439 - DNA, 495 bp, synthetic construct
  misc_feature 1..495: note = Description of Artificial Sequence: Synthetic coding sequence
  source 1..495: mol_type = other DNA
atgaagtgcaagcccaaccagacccggacctacgaccccgagggctttaaaaagagggccgcctgcttgtgtttccggagcgaacgcgaggacgaggtgcttttggtatccagcagtcgctatcccgatagatggatcgtccccggcggcggcatggagcctgaagaggagcccgggggcgctgccgtccgtgaggtgtacgaagaggctggagttaaaggcaaattgggtcggctcctgggggtattcgaacagaatcaggatcgcaaacaccgcacctacgtctacgttcttaccgtcaccgagctactggaagattgggaggatagcgtatcaataggaaggaagcgggaatggtttaaggttgaagatgccatcaaggttcttcagtgccataaacccgttcacgcggagtacctggaaaaacttaagctggggggttctccaaccaacggcaactccatggcaccctcctctcccgactctgatccttag

SEQ ID NO: 25440 - DNA, 792 bp, synthetic construct
  misc_feature 1..792: note = Description of Artificial Sequence: Synthetic coding sequence
  source 1..792: mol_type = other DNA
atgagcctgtactgcggcatcgcctgccggcggaagttcttctggtgctacagactactttctacatatgtcaccaagacccgctacttgttcgagctcaaagaggatgatgatgcgtgcaaaaaagcccagcaaaccggagctttttacctgtttcattctttggcacctttactccagacaagtgcacaccaatacttagcacccagacattcattactagagctcgagaggctgctgggcaaattcggacaggatgctcagagaatcgaagattcagtgctcattggctgctcagaacagcaagaggcatggttcgccctggatctgggcctagacagcagcttttccatttcagccagcctccacaaacccgagatggaaacggagttgaaaggctcatttatcgaattgcggaaggctctctttcagctcaatgctagggatgccagtctgctctccaccgctcaggcactgctacgctggcatgatgcccaccagttttgtagccgaagtggtcagcctaccaagaagaatgtggcaggctctaagcgcgtatgccctagtaacaatataatttactaccctcagatccaggtgaacctccgcgagctggagacggctgcctggttctctcatgacgaagttgccactgcactcaaaagaaagggaccttacacccagcagcagaatggtaccttccctttttggttgccaccaaagctggctatctcacaccagctgattaaagaatgggtggagaagcagacatgctccagcttaccagcttag

SEQ ID NO: 25441 - DNA, 1059 bp, synthetic construct
  misc_feature 1..1059: note = Description of Artificial Sequence: Synthetic coding sequence
  source 1..1059: mol_type = other DNA
atgagcctgtactgcggcatcgcctgccggcggaagttcttctggtgctatcgtctcctcagtacatacgttactaaaacacgctacttgttcgagctgaaggaagatgacgatgcctgtaagaaggcccagcagaccggtgctttttacttgttccactctctggcccccctgctccagacctcggcccatcagtacctcgcccctcgccattccctactggagctggagagactcctggggaaattcggccaggatgctcagcgaatagaagatagtgtcctcataggctgctctgaacaacaggaggcttggtttgctcttgatcttggcctcgattccagtttctccatttctgcgagcttacacaaacctgagatggaaacagagctgaaggggtccttcatagaactccgcaaggccctctttcagttgaacgccagggatgcttctctgctaagtaccgcccaagctctgctgagatggcatgacgcccatcagttctgtagccgaagcggacaacccaccaaaaaaaacgtggccggctctaaacgcgtgtgcccatcaaataacattatctattatcctcagatggccccagtggccatcactttggtgagcgacggcacacgctgcctgctcgctcgacaaagtagctttcctaagggcatgtatagcgcgctcgctgggttctgcgatatcggtgagagtgtggaagagactatccgtagagaggttgccgaagaagttggactggaagtggaatctcttcagtattacgcatcccagcactggccattcccatccggctctcttatgatcgcttgtcacgctacggtaaagcccggccagaccgaaattcaggtgaacctgagagagttggagacggctgcttggttctcgcatgacgaggtcgctaccgctttaaaacgaaaaggaccatacactcagcagcaaaatggtactttccccttttggcttccccctaagctggctatttctcaccaattgattaaagagtgggtggagaaacagacctgctcctctctgcctgcatag

SEQ ID NO: 25442 - DNA, 708 bp, synthetic construct
  misc_feature 1..708: note = Description of Artificial Sequence: Synthetic coding sequence
  source 1..708: mol_type = other DNA
atgagcctgtactgcggcatcgcctgccggcggaagttcttctggtgctaccgccttctctcaacatacgtaactaaaacaaggtacctttttgaattgaaggaggatgacgatgcttgtaaaaaggcacaacagaccggagccttttatctcttccacagcctggcccccctgctccagacaagcgcccatcaatacttggcgcccagacactcattgcttgaactggagaggcttctgggaaagtttggacaggatgctcaacggatagaggatagcgttcttatcggctgttctgaacagcaagaggcttggttcgcactcgatcttggcctggattcttcattttccatcagcgcctccctgcacaaacctgaaatggaaactgagttaaaaggctcgttcatcgaattgcggaaagcattattccagctcaacgcgcgcgatgcctctcttctgtcaacagcacaggctctgctgagatggcacgacgcccatcagttttgcagccggtccggccagccaacgaagaagaatgtggctggatctaagcgcgtgtgtccctcaaacaacatcatctattacccccaagttaaggtgtggaaacgccccagcgcggagaaattgcagaaacgctgggattggaggtggaaggcttgcagcactatgcatccatcaatcgggccatctctcgtcgctcatagctag

SEQ ID NO: 25443 - DNA, 468 bp, synthetic construct
  misc_feature 1..468: note = Description of Artificial Sequence: Synthetic coding sequence
  source 1..468: mol_type = other DNA
atggcccccgtggccatcaccctggtgagcgacggcacccggtgcctgctggcgcgtcagtccagcttccccaagggcatgtatagtgcactggctgggttctgcgatataggcgagtccgtcgaggaaaccatccgcagagaggtcgctgaagaggtgggtctggaggttgaatctctccagtactacgcctcccagcactggccttttccctcaggtagcctgatgattgcctgccacgcgactgtcaaacctggacagactgagatccaggttaacttacgcgagctcgaaaccgccgcctggtttagtcatgatgaagtggccacagccctaaagcgcaagggaccgtatactcagcaacaaaatggaactttccctttctggctgccgccaaagctcgccatctcccatcaactgatcaaggagtgggtcgaaaaacagacctgctcttcgctgcctgcctag

SEQ ID NO: 25444 - DNA, 681 bp, synthetic construct
  misc_feature 1..681: note = Description of Artificial Sequence: Synthetic coding sequence
  source 1..681: mol_type = other DNA
atggagaccgagctgaagggcagcttcatcgagctgcggaaggccctgtttcaactaaacgccagagacgctagcctgctctccactgcacaagcactgctgcggtggcacgacgcacaccaattctgttctcgctccggacagcccacgaagaaaaacgtggccggctcaaagcgggtgtgtccctccaataacatcatatactatccccagatggcgcctgtggcgattaccctagtgagtgatggaacgagatgcctgttggctaggcaaagttctttccccaaaggaatgtactcggccctggccggcttttgcgatatcggtgagagtgtagaggagacgatcaggcgtgaggtggcagaggaagtcggccttgaagtggaatcgctgcagtattatgccagccaacattggccctttccctcaggctcactaatgattgcgtgtcacgccaccgtgaaaccaggacagacagaaatacaggtcaatttacgggagctcgaaactgctgcatggttcagtcacgacgaggtcgctaccgccctgaagaggaagggtccatacacacaacagcaaaacggaacctttcctttctggcttccccccaaactggctatttcgcatcagttgatcaaagagtgggttgaaaagcagacatgcagctcactgcccgcctag

SEQ ID NO: 25445 - DNA, 717 bp, synthetic construct
  misc_feature 1..717: note = Description of Artificial Sequence: Synthetic coding sequence
  source 1..717: mol_type = other DNA
atgctgggccagcccgcccccctggagcggttcgccagccggcggcctcaggtgctggccgtcaggacagtctgcgaccttgtcctcgggaagatggacaaggactgtgaaatgaagcgtacaaccctggattcacccctgggtaagctggaactgtccgggtgtgaacagggactgcacgaaattaaactccttggcaaaggcaccagcgctgccgacgcagttgaagtccctgccccagcagctgttctcggggggcccgaaccactgatgcaatgcaccgcctggctaaacgcctactttcaccaacctgaagccatcgaagagtttccagtgccagccctccaccacccagtcttccagcaggaaagctttacgcgtcaagttctttggaagctgctgaaagttgtcaagtttggtgaggtaatctcctaccagcaactagctgctctagctggaaatcctaaagctgcacgcgccgtaggaggggctatgcgcgggaaccccgtgccaattctgattccatgtcacagagtcgtgtgctcttccggtgccgtgggcaactattcagggggcctcgcagttaaagagtggctgctagcccacgagggacataggctgggcaaaccaggtctgggaggatcctccggtctggcaggagcttggctcaagggcgccggcgctacttccggctcccctcctgctggtcgcaactag

SEQ ID NO: 25446 - DNA, 1569 bp, synthetic construct
  misc_feature 1..1569: note = Description of Artificial Sequence: Synthetic coding sequence
  source 1..1569: mol_type = other DNA
atgagcagccggcccctggagagcccccccccctaccggcccgacgaatttaagcccaaccactacgcaccatctaacgacatttacggcggcgagatgcatgtcaggcctatgctcagtcagcccgcctatagtttctatcctgaagatgagattcttcacttttataagtggacgagtcccccaggagtaattcgcatcctcagcatgctaatcatcgtcatgtgtattgctattttcgcctgcgtggcgtctacattagcctgggatcgaggctacggaacctcgctcttaggcggctccgttgggtacccctatggaggtagcggcttcggaagctatggctcagggtacgggtacggatacggctatggctacggctatggtggatacacagatccacgagctgccaaaggctttatgcttgccatggctgctttctgtttcattgccgccctcgttatcttcgtgacaagcgttatccggagcgagatgagccgaacaagaagatactatctaagcgtgattatcgtgagcgccatcctggggatcatggtgtttatcgccacaattgtatatattatgggtgtcaatcccacagcccagagctcaggctcactgtacgggagccagatatatgccttgtgtaaccaattctatacacctgcagccaccggtctttacgtggatcagtacctttatcactattgcgtggtggatccgcaagaggccatcgcgatcgttcttggattcatgatcatcgtggcctttgctctgatcatcttcttcgccgtaaaaaccaggagaaagatggataggtatgacaaaagcaacatcctttgggacaaggaacatatctacgatgaacagcccccaaatgtggaggagtgggtaaagaacgtctctgcggggactcaagacgtgccctcacccccatcagattacgtggagcgggtcgactctccgatggcctatagcagtaatggcaaagtaaacgataagcgcttctatccggagtctagctataagtctacccccgtgcccgaagtggtgcaagagctgccactgaccagtccagtggacgactttcggcaaccgcggtactcctctggtggaaattttgaaacacccagcaaacgcgcccctgcaaagggtagagccggcaggtccaagaggacggagcaggatcattacgagactgattacaccacaggcggagaatcttgtgatgaacttgaggaagattggatccgtgagtaccccccaatcacaagcgaccagcaaagacaattatacaagcgcaactttgacacgggacttcaggagtacaagtcccttcagtccgagctggacgagatcaataaagagctcagtaggctcgataaggaactggatgactatcgggaggaaagcgaggagtatatggctgctgcagatgaatacaataggctcaagcaggtgaaaggcagcgccgattataagtcaaagaagaatcactgtaaacaattgaagtccaagctgtcccacataaaaaagatggtcggcgattacgaccggcagaaaacctag

SEQ ID NO: 25447 - DNA, 1407 bp, synthetic construct
  misc_feature 1..1407: note = Description of Artificial Sequence: Synthetic coding sequence
  source 1..1407: mol_type = other DNA
atgagcagccggcccctggagagcccccccccctaccggcccgacgagtttaaaccgaaccactacgcaccttcaaacgacatctatggcggtgagatgcacgttcggcccatgctatcgcaacccgcctacagcttttatcctgaggacgagatcctgcacttctataaatggacatcacctcccggggtcatcagaatccttagcatgctgataatcgtgatgtgtatagcgatttttgcgtgtgtggcttcgacactggcctgggacagagggtatgggacttctctcctgggggggagcgtgggatatccctacggcggttctggatttgggtcctacggctccggttacggttatgggtatggttatgggtacggatacggcggctacacggatccacgcgccgctaaaggattcatgttggccatggctgctttctgtttcatagcagcccttgtgatctttgtgaccagcgtgatcaggagcgaaatgtctcgaactcgccgatattacctctccgtaatcattgtatctgccatactgggaattatggtgttcatagccacaatagtgtacatcatgggtgtgaaccccaccgcccagagcagcgggtcactttacggctctcagatctacgccttgtgtaatcagttctatacgcctgctgcgactgggctatatgtcgatcaatatctgtaccactattgcgtggtagacccccaggaagtgaagaacgtatctgcgggaacacaggacgttccatctcctcctagtgattacgtggagcgcgttgattccccaatggcctactcatccaatggcaaggtgaacgacaagcgcttttaccccgaatcatcgtataagtccacacccgtcccggaagtggtgcaggaactccccctgaccagcccagttgatgacttcaggcagccccgatactcctctggtggcaactttgagacccccagcaagagagcacctgcaaaggggcgggcggggcgcagcaagagaaccgagcaggaccattatgaaacagactataccaccggtggcgaatcttgtgacgagctggaagaggattggattcgagagtaccctcctattacctctgatcagcaacggcagctctataagagaaacttcgatacgggcctgcaagagtataagagcctgcagagtgaactcgacgaaatcaacaaggagcttagcagactggataaagagctagacgactatcgggaggagtctgaggagtatatggcagcagctgatgaatataataggctcaagcaggtcaaaggttcagccgactacaagtcaaagaagaaccactgcaagcagctgaagtcaaaattgagccatatcaaaaagatggtgggggattatgacagacagaagacatag

SEQ ID NO: 25448 - DNA, 1569 bp, synthetic construct
  misc_feature 1..1569: note = Description of Artificial Sequence: Synthetic coding sequence
  source 1..1569: mol_type = other DNA
atgagcagccggcccctggagagcccccccccctaccggcccgacgagtttaagcccaaccattacgccccaagcaatgacatctatggcggtgagatgcacgtgagaccaatgttgtcccagcccgcgtattcattctatccggaggatgaaatcttgcacttttacaaatggacctcccctcccggcgtgattagaattctctccatgctgattattgtgatgtgcatcgcaatatttgcctgcgtggcctccaccctggcctgggaccgcgggtatggaacctcactgctcgggggatcagtgggatacccttacggcggatccggatttgggtcctacggcagcggctatgggtatgggtatggctacggttatggctatggcggatacaccgaccctagagcagcaaaaggctttatgctcgcaatggctgccttttgcttcatcgccgccctggtcattttcgtgacctcagtaattagatccgagatgtctcgtaccaggagatattatctctccgtcatcattgtgagtgccattcttggcatcatggtattcatcgctacaattgtgtatattatgggggtcaacccaacagcccagtcttcggggtccttgtacggctcccagatatacgcactgtgtaatcagttctatacgcccgccgctaccggcctttacgtcgaccagtatctgtaccattactgcgttgtggatccacaggaggcgatcgcaattgtgcttgggttcatgatcatagtcgcattcgcacttattattttttttgccgtgaagactaggcgcaagatggatcgctatgataagagcaacatactgtgggacaaggaacatatatacgatgagcagccgcctaatgtggaggaatgggtgaaaaacgtcagcgctggaacccaagatgtcccctctccccctagcgactatgtggaaagagttgactcacccatggcttattcctccaacggcaaggtcaacgacaaacggttctacccagagtcctcctacaagtctacccccgttccagaggtggtgcaggagctccctctcactagtccagtggacgattttcgccaacctaggtattctagtggcggtaatttcgagactccttctaaacgcgccccggccaaaggaagggctggaagatcaaagcggactgagcaggatcactacgagaccgactacacgaccggcggggagagctgcgacgagctcgaggaggattggatcagggaatacccacccatcacgagtgatcagcaaagacaactctacaagaggaacttcgacacaggactgcaggagtataagtcacttcaaagtgagctcgacgagattaacaaggaactatccaggctggataaggagcttgatgactatagagaagaaagtgaggaatatatggctgccgcggacgagtataacagactgaagcaggttaaggggtccgccgactacaagagcaagaagaaccactgcaaacaactgaaaagcaagttatctcatattaagaaaatggtgggggactatgaccggcaaaagacatag

SEQ ID NO: 25449 - DNA, 816 bp, synthetic construct
  misc_feature 1..816: note = Description of Artificial Sequence: Synthetic coding sequence
  source 1..816: mol_type = other DNA
atgatcatcgtggccttcgccctgatcatcttcttcgccgtgaagacccgaagaaagatggaccgctacgacaaatctaacattctatgggacaaggaacatatctacgatgaacaaccacctaacgtcgaggagtgggtgaagaatgtgagtgccggcacgcaggacgttccgagcccccccagcgattacgtggagagagtcgactctcctatggcgtacagctcgaatgggaaagttaatgataagcgtttttaccccgagagcagttacaagagtactcctgtgcccgaagtggtgcaagagctgcccctcacatcgccggtcgatgactttcgacagccccgttattccagcggaggaaactttgagaccccctccaagagagctccagctaagggcagagccggaagatctaagagaaccgagcaggaccactacgagacagactacacaacaggaggcgaatcatgtgacgagttagaggaggattggatcagagagtacccccccattacgtcagaccagcagagacaactgtacaagcgaaatttcgatactggacttcaagagtataagtccctgcagagtgaactggatgagatcaacaaagagctaagtaggctcgacaaagagctcgatgactatagggaggagtcagaggagtacatggcagccgctgatgagtacaacagactgaaacaggtgaaggggtctgccgattacaaaagcaagaagaaccactgtaagcagctgaagtctaagctgtctcacattaaaaagatggtcggggattacgatagacagaagacttag

SEQ ID NO: 25450 - DNA, 603 bp, synthetic construct
  misc_feature 1..603: note = Description of Artificial Sequence: Synthetic coding sequence
  source 1..603: mol_type = other DNA
atggcctacagcagcaacggcaaggtgaacgacaagcggttctaccctgagtccagttataaatctacccccgtgccagaagtcgttcaggagcttccactgacaagtcccgttgatgacttcagacagccgcggtacagctcaggtggcaactttgagaccccatccaagcgagcccctgccaaaggacgggccggaagaagcaaacgcactgaacaggatcactacgagaccgactacacaaccggaggcgaatcttgcgacgagctggaggaagattggatccgggagtaccccccgatcacatccgatcaacagcgccagctctacaagaggaattttgataccggtctgcaggaatacaagagtttacaatctgaactggacgaaatcaataaagagctctctcgtttggacaaggaacttgacgattaccgcgaggaatctgaagaatatatggctgctgctgatgaatacaacaggcttaagcaggtgaagggtagcgcagactataagagtaaaaagaatcactgcaaacaactgaagtcgaaactgagccacattaaaaaaatggttggcgattacgaccgccaaaagacctag

SEQ ID NO: 25451 - DNA, 3114 bp, synthetic construct
  misc_feature 1..3114: note = Description of Artificial Sequence: Synthetic coding sequence
  source 1..3114: mol_type = other DNA
atgtggcggtgcggcggccggcagggcctgtgcgtgctgcggcggctctctggaggacacgcccaccacagagcctggaggtggaatagcaacagagcatgcgagagggcgctgcaatataaactgggagacaagatccatggatttacggtgaaccaggtcacaagtgttcctgagctgtttttaaccgccgtgaagctcacacacgatgacactggagcccgttatctgcacctggccagggaagacactaataacctgtttagcgtgcaattcaggacgacgccgatggacagcactggagtgcctcacatcctggaacacaccgtactgtgtggatcacaaaagtatccttgccgcgatcctttctttaaaatgttaaatcggagtctcagcactttcatgaacgcatttacagcttcagactacactttgtacccttttagtacacagaatcccaaggactttcagaaccttctttccgtctatctcgatgccaccttcttcccatgtctgagggagctggacttctggcaggaggggtggaggctggagcatgagaatccaagtgacccccagaccccacttgtgttcaaaggagttgtcttcaacgagatgaagggcgcctttgttaataacgagaggatatttagccagcacttacagaacaggttgctgcccgaccacacttattccgtcgtctcaggaggcgatcccctgtgtatacccgagctcacttgggagcagcttaagcagtttcacgctactcactatcaccctagcaacgcccggttcttcacgtacgggaatttccctctggaacagcaccttaaacaaattcacgaggaggccctttctaagttccagaaaattgagccatcaacagtggtacctgctcaaactccctgggataagccacgggagttccagattacatgcggcccagacagtttcgctacagaccccagcaagcagaccaccatttccgtgagcttcctgttgccggatattaccgatactttcgaagccttcaccttgtcattgctcagttcactgcttacttctggacctaacagccctttctacaaggcactgattgaatcaggcttggggaccgatttctctccagatgtcggatataacggctacacacgggaggcctatttcagcgtgggcctgcaagggatcgccgaaaaggacatagaaaccgttcgctcattgattgacagaaccatcgacgaggtggtggaaaagggtttcgaggacgatagaatcgaggccctgttacacaagatagaaatccaaatgaaacaccagagcacctcatttggcctgatgctcactagctacatcgcctcatgctggaatcatgacggagacccagttgagctgctgaagctggggaaccagctagcaaaattccggcagtgcctacaagagaacccaaagttcctgcaggagaaggtgaaacagtattttaaaaataaccagcacaagttgaccttgtccatgcgccctgatgacaaataccacgagaagcaggcacaggtagaagcaacaaaactgaaacaaaaagtggaagccctgtctcctggcgacagacaacaaatttatgaaaaggggcttgaattgcgctcccagcagagcaaaccccaggacgcttcctgtttgcccgctctgaaggtctctgacatcgaaccaacaattcccgtcacagagttggacgttgtactaaccgccggtgacattccagtccagtactgtgcccagccgaccaatggcatggtgtactttcgcgccttttcgagtctcaatactcttcccgaggaactgaggccatatgtgcctctattctgtagtgttcttacaaagttggggtgtggacttctagattaccgagaacaggcccagcagatcgagcttaaaaccggcggcatgtcagcctcaccccacgtactgcctgacgattctcatatggatacatacgagcaaggcgtcctgttttcctcactgtgtctggatagaaacctgcccgacatgatgcagctgtggagtgaaattttcaataatccctgcttcgaggaggaggaacacttcaaggtacttgtcaagatgaccgcccaggaactcgctaatggcattcctgatagtggccacttatacgcttcgattagggccgggagaaccctgacaccagcaggggaccttcaggagaccttttccggcatggaccaagttcgactcatgaaaaggatcgctgagatgaccgacatcaagcctatcctgagaaaactaccccggatcaaaaagcacttgttaaacggcgacaatatgcggtgttccgtaaatgcaacgccacagcaaatgccccagactgagaaagcagtcgaggacttcctacgctcaattgggagatccaagaaggagagaaggcctgtgagaccccatacagttgagaagccagttcccagctcaagtggaggcgatgcacacgtgccccacggatcccaggtcatcagaaagctggtcatggagccaactttcaagccgtggcagatgaagactcattttctcatgcccttcccagttaactacgtgggcgagtgtattcgcactgtgccatatactgatcccgatcacgcatctctgaagattttggcccggcttatgactgccaaatttctccacacggagatccgggagaaaggaggcgcatacggaggcggagccaaactgagtcataacggtatcttcaccttgtattcttaccgagatcctaatactatcgagacactgcagtctttcggaaaagccgtggactgggctaagtctggaaaattcacacagcaggatatagatgaagccaagttaagtgtgttctcaactgtcgatgctcccgtcgccccttccgacaaggggatggaccatttcctttacggattgagtgatgagatgaagcaggcgcatcgcgagcagcttttcgccgtttctcatgataaattgttggctgtgagcgataggtacctcgggacaggaaagagcacccacggtctggccatcttgggccctgaaaaccctaagattgctaaggacccctcctggatcattcagtag

SEQ ID NO: 25452 - DNA, 1107 bp, synthetic construct
  misc_feature 1..1107: note = Description of Artificial Sequence: Synthetic coding sequence
  source 1..1107: mol_type = other DNA
atgcagcccggcagcagccggtgcgaggaggagacccccagcctgttgtgggggctggatcctgtcttcctggcattcgccaagttgtatattcgggacattttagacatgaaagagtccagacaagtgcctggcgtattcctgtacaacgggcatcctatcaagcaagtagacgtgctaggcacagtgattggcgtgagggagagagatgcattctacagttacggcgtagacgactcgactggcgtcataaactgtatctgctggaagaagctaaataccgagtccgtctctgctgcacctagcgcggctcgggagctctcactcacgagtcagctgaagaaactccaagagactatcgaacaaaaaactaaaatcgaaataggagatacgatcagagtgcgaggcagcatccgcacatacagggaggaaagagagatacatgctaccacttactataaggtcgatgatcctgtctggaacatacagatcgcccggatgttagagttaccgaccatttacagaaaagtgtatgaccagccgtttcactcctctgctctggagaaggaagaagcccttagcaatccgggcgcattagatctgccaagccttacgagcttgctctctgagaaagctaaggaattcctgatggagaatcgagtgcagagtttctaccagcaggagctggaaatggttgaatcactcctgagcctagctaaccaacctgtgatccattccgcttcctccgatcaagtgaattttaagaaagacacaacgtctaaggctatccactcaatattcaaaaacgctatccagcttttgcaagagaaaggcttggtattccagaaggacgacggtttcgacaatttatattatgtgactagggaagataaggacctgcatagaaagatccatagaataatccagcaggactgtcagaagcccaatcacatggagaaggggtgtcactttctgcacattctggcatgcgcccgcctttcaattagacctggtctgagcgaggccgtcctacagcaggtgctggaacttcttgaggaccagagcgacatcgtgagcaccatggagcattactataccgctttctag

SEQ ID NO: 25453 - DNA, 1038 bp, synthetic construct
  misc_feature 1..1038: note = Description of Artificial Sequence: Synthetic coding sequence
  source 1..1038: mol_type = other DNA
atgggcgtgtgcggctacctgttcctgccctggaagtgcctggtggttgtcagtctgcgcttgttgttcctggtgcccacaggcgtccctgttcgctccggggacgccaccttccctaaggctatggacaacgttactgtgcggcaaggagaatctgccaccctccggtgcaccattgatgatcgcgtcactcgcgttgcctggctgaaccgaagtactatcctctacgccgggaatgataagtggagcatcgatccacgggtgatcattctcgtcaatacccccacccagtatagcattatgatccaaaatgttgatgtgtatgacgaaggcccatatacctgttcagtacagaccgataatcatccgaagaccagccgagtacacctgatcgttcaggtgccacctcagatcatgaacataagtagtgacataaccgtaaacgaaggatctagcgtgacactcctgtgtttggcaatcggcagaccagagcctaccgtaacttggcggcatctgagtgtgaaggaggggcaggggtttgtgtctgaagacgaatatttagaaatatctgatatcaagcgcgaccagtcaggcgaatacgagtgctctgcacttaatgatgtggctgcccccgatgtccggaaagtaaagattaccgtcaactaccccccctacatatccaaagcgaagaataccggtgtctccgtcggccaaaaagggatcttgtcatgtgaagccagcgccgtgcccatggcggaattccagtggtttaaagaggaaacccgtctggctactggtcttgacggcatgagaatcgaaaacaagggacgaatgtccactctcacattctttaatgtaagcgaaaaagactacggaaactacacctgtgtagcaaccaacaaacttggcaatacaaatgcttcgatcaccctatatggacccggagcagtgattgatggtgttaactcggcttctcgcgccttggcctgcctatggctgtccgggactctgttagcacacttctttattaagttttag

SEQ ID NO: 25454 - DNA, 939 bp, synthetic construct
  misc_feature 1..939: note = Description of Artificial Sequence: Synthetic coding sequence
  source 1..939: mol_type = other DNA
atgtaccaccccgcctactgggtggtgttcagcgccaccaccgccttgctgtttatccccggcgtacccgttcgttcaggcgacgccacctttccgaaggcaatggacaacgtgaccgttcgacagggcgagtcagcgacacttagatgcacaattgacgacagagtaacccgtgttgcatggctgaaccggagcactattatgatccagaacgttgatgtgtatgacgaagggccttacacctgcagcgtccagaccgataatcacccgaagacctctagggtgcaccttatagttcaggttcccccccagatcatgaacatctcatcggacattactgttaacgagggcagctcggtgaccctgctctgcctcgccattgggcgcccggaacccactgttacttggagacatcttagcgtgaaggagggacaggggtttgtcagtgaagacgaatacctggagatttcagacattaaacgcgaccagtcgggggaatatgaatgcagtgcgctgaatgacgtggctgctccagacgtgcgcaaggttaagatcactgtcaattatcctccctacatttcaaaggccaagaatactggagtgagcgtcggccagaagggcattcttagctgcgaggccagcgcggtgcctatggctgagtttcagtggttcaaagaagaaactcgcctggccaccggactggacggaatgcggatagagaataaagggcgcatgagcacccttactttctttaatgtgtcagagaaggattacggcaattacacctgtgttgcaacaaacaagctgggcaatacaaatgcctccattaccctgtacggccctggggcagtgatagacggggtcaattctgcctcgcgtgctctggcctgtctgtggctcagcggcactctgctggcccacttctttataaagttttag

SEQ ID NO: 25455 - DNA, 1017 bp, synthetic construct
  misc_feature 1..1017: note = Description of Artificial Sequence: Synthetic coding sequence
  source 1..1017: mol_type = other DNA
atgtaccaccccgcctactgggtggtgttcagcgccaccaccgccctgctcttcatccccggagttcctgtcagatcaggagacgctacttttcccaaagctatggacaatgtgactgtgcgacagggcgagagtgctacactgcggtgtaccattgacgatcgggtgacccgggtcgcctggttaaaccgtagcaccattctttatgccggcaatgacaagtggtcaatcgacccccgggtgataatactggtaaacacaccaacccaatactccattatgatccagaacgtggacgtgtatgacgagggtccttatacatgcagcgtgcagactgacaatcaccccaagacctctagggttcatctgatcgtccaagttccaccacagatcatgaatatcagctccgatattacagtcaacgagggcagctctgtaaccctgctctgcctggccatcggtcggccagaaccaactgttacctggcgccacttgagtgttaaggaaggccagggcttcgtgtcagaggacgagtacttggagattagcgatattaaaagagatcagtcaggagagtatgagtgctccgctctcaacgacgtagctgcccctgacgtacgaaaggtcaaaatcactgtaaactatcctccttacatctcaaaggccaaaaataccggcgtttccgttgggcagaagggtatactgagctgcgaagcatccgccgttccgatggctgagttccagtggttcaaagaggagacaagactagctactggtctcgacggaatgcgcattgaaaacaaaggccgcatgtcaactttaaccttcttcaatgtgtccgagaaggactacggcaattacacttgcgtagcaactaataagctcggcaacactaacgcttcgataacattgtatggccctggggccgttatcgatggagtgaacagcgcttctcgagccctggcttgtctctggctaagcggcaccctgctcgcccactttttcattaagttctag

SEQ ID NO: 25456 - DNA, 1065 bp, synthetic construct
  misc_feature 1..1065: note = Description of Artificial Sequence: Synthetic coding sequence
  source 1..1065: mol_type = other DNA
atgggcgtgtgcggctacctgttcctgccctggaagtgcctggtggtcgttagtctgagactgctgttcctagttcccaccggtgttccggtgcgtagcggtgacgctacatttccgaaggccatggacaatgttactgtccgacagggcgagtctgccacactccgctgtacaatcgacgaccgagtcactcgcgttgcttggctgaaccgctctacaatcctgtacgccggaaatgacaagtggagcatcgacccccgggtcattatcttagtcaatacccctacacagtattccattatgatccaaaatgttgacgtgtacgatgaggggccgtacacatgttctgtgcagaccgataatcaccccaagacctccagagtccacttgatcgtccaggtgcctcctcaaattatgaatatttcctctgacattacagtcaacgagggatcatctgttaccctcctatgcttggcaatcgggagacctgagccaacagtgacatggcggcacctgagcgtgaaagaaggccagggctttgtttctgaggatgagtatctggagatctccgatatcaaacgagatcaatcgggagagtatgaatgttccgccctcaacgacgtggctgctcccgacgtgcgcaaggttaaaattacagtgaattatcccccctacatctccaaggcgaagaatactggagtgtccgtgggccagaaaggtatcctgtcctgtgaggcctctgcagtgccaatggccgaattccagtggttcaaggaagagaccagactggcgaccgggctggacggtatgcgcatcgaaaacaaaggaagaatgagcacattgactttctttaatgtctccgaaaaggactacggcaattatacctgtgtggcgaccaacaaattggggaatactaacgcttctatcacactgtacgagatttcacctagcagcgccgttgctgggccgggggctgttatcgacggggtcaactcagcaagtcgggctctcgcatgcttgtggctgagcgggacactcttagcacactttttcataaagttttag

SEQ ID NO: 25457 - DNA, 1662 bp, synthetic construct
  misc_feature 1..1662: note = Description of Artificial Sequence: Synthetic coding sequence
  source 1..1662: mol_type = other DNA
atgagcaacaacggcctggacatccaggacaagccccccgccccccccatgaggaacacgtctaccatgataggggcagggagtaaggatgccggaactcttaaccacgggtccaagcccctcccaccaaatcccgaggaaaagaagaaaaaggaccgcttctaccggagcattttgcccggtgacaaaacaaacaagaagaaggagaaggagcgtcctgagatcagtctcccatctgatttcgagcatactatacacgtaggcttcgacgctgtcaccggcgagtttacaggcatgccggagcagtgggctcggcttctgcagacaagcaatattacaaagagcgagcaaaagaaaaatccacaggcagtgctcgatgtgctggagttttataattccaaaaaaacgtcgaattctcagaagtacatgtcttttactgacaaaagtgccgaagactacaacagctccaacgctttgaacgtgaaagccgtgtctgagacacctgcggtgccacccgtctctgaggacgaggacgacgatgacgacgatgcgactccacctcccgtcatagccccacggccggaacatactaagtccgtctacacgcgatctgtcatcgaaccattaccagtgacaccaacccgagacgttgctacatctcctataagtcccacggagaacaataccacccctcctgatgcccttacgcgcaacacggagaaacaaaaaaagaaacccaaaatgtcagacgaggagatactggaaaaactgcgatctatagtttcggtaggagatcctaaaaaaaaatacacccgctttgagaagattggccagggggcttccgggaccgtgtatactgctatggatgtagccacgggccaggaggtggctataaaacagatgaatctgcaacaacagcctaagaaagaactgatcattaatgagatcctggtcatgcgagaaaacaagaaccccaacattgttaactacctggactcctatttagtgggcgacgagctgtgggtggtaatggagtacttggcagggggatcgttgacagacgtggtgactgagacatgtatggacgaagggcaaatcgcggcagtgtgtcgggaatgtctacaggccctggagttcctccattcgaatcaggtcatccatcgggatattaaatccgacaacatcctgctgggaatggacggctctgtgaaattgacagacttcggcttctgcgcccagatcacccctgagcagagtaagagatctaccatggtggggacaccatattggatggctcccgaagttgtcacacgcaaggcatacgggccaaaggtagatatctggagcctggggattatggcgatcgaaatgatcgaaggcgaaccaccatatctgaatgaaaatcctcttagagcgctttacttaattgccactaacggtaccccggaactccagaatccagaaaaactctctgcgatcttccgggactttctgaaccggtgtttagagatggacgtggaaaagcgcgggagcgcaaaagagctgctgcaggtgcgcaaactgcggttccaggtgttttcgaatttctctatgattgccgcaagtattcccgaggattgccaggccccactccaaccccattcaaccgactgttgctcctag

SEQ ID NO: 25458 - DNA, 1638 bp, synthetic construct
  misc_feature 1..1638: note = Description of Artificial Sequence: Synthetic coding sequence
  source 1..1638: mol_type = other DNA
atgagcaacaacggcctggacatccaggacaagccccccgccccccctatgcggaatacatccactatgattggcgccggcagcaaagatgctgggacactgaatcacggcagtaaaccattacctcctaacccggaggagaagaaaaaaaaagaccgcttctatcgcagtattctgcccggagacaagaccaataaaaaaaaggaaaaggaaaggccagaaatcagccttccctccgactttgaacacaccatacacgtgggcttcgatgccgtgaccggtgagttcacaggcatgccagagcagtgggctcgactccttcagacttctaatataacgaaatcggaacagaaaaaaaacccacaggctgtgctagatgttctcgaattctacaattcaaaaaaaacaagtaactcgcagaagtatatgtcattcactgataagtccgctgaagactacaactcgagcaacgccctgaacgtgaaggcagtttccgagacccccgccgtgcccccggtatctgaggacgaggacgatgatgacgacgatgctacgcccccacccgttatcgccccccgacccgagcatacaaagtctgtgtacacacggagcgtgattgaacccctgcccgtcaccccaacccgcgacgtcgccaccagcccgatcagtcctaccgagaataatactaccccgccagatgcactgactcgcaacaccgagaagcaaaagaaaaaaccaaagatgagcgatgaagagatcctcgagaagcttagaagtatcgtcagcgtgggggatccaaagaagaagtataccaggtttgaaaaaattggtcagggagctagtgggaccgtttatacagccatggatgttgcaacgggccaggaagtggcgatcaagcagatgaatctgcagcagcagccgaaaaaggagctgatcatcaatgaaatcttggtgatgagggagaacaagaacccaaatatcgtcaattatctggacagttacctggtgggcgacgagctgtgggtggtgatggagtaccttgccggaggctctctgaccgacgttgttaccgaaacttgcatggatgagggacaaatcgcagctgtgtgccgagagtgcttacaggcactcgagtttttgcacagtaaccaggtgatccatagagacattaaaagcgacaacatcctgctggggatggacggatccgtcaagctgacagacttcggcttttgtgcgcagatcacaccggagcaatccaagaggtccaccatggtaggcacaccgtattggatggcacctgaggtggtgacccgaaaggcttacggaccaaaggtggatatatggtcactggggatcatggcaattgagatgatcgaaggggagcctccctatttaaacgagaaccccctgagggctctctatttaatagctactaatggcaccccagaactgcagaaccctgagaaactaagtgcgattttcagagacttcctgaaccgatgtttagaaatggacgtggaaaagagaggctcagctaaagaattgctccagcatcagttcttgaagattgctaaacccctgtccagcctgacccccctcatcgctgcagcaaaagaagccactaaaaataaccactag

SEQ ID NO: 25459 - DNA, 300 bp, synthetic construct
  misc_feature 1..300: note = Description of Artificial Sequence: Synthetic coding sequence
  source 1..300: mol_type = other DNA
atgagcaacaacggcctggacatccaggacaagccccccgcccccccaatgcggaatacttccactatgattggggcgggatccaaagatgcaggaaccctgaaccatggcagcaaacctttaccccctaacccagaggagaaaaaaaagaaagaccgcttctaccgatccatcctacccggagataaaacaaacaagaaaaaggagaaggaaagacctgagatatcactccctagcgattttgaacacaccatccatgtcggttttgatgcagtgacgggagaatttactggcatgtag

SEQ ID NO: 25460 - DNA, 81 bp, synthetic construct
  misc_feature 1..81: note = Description of Artificial Sequence: Synthetic coding sequence
  source 1..81: mol_type = other DNA
atgagcaacaacggcctggacatccaggacaagccccccgccccccctatgagaaatacaagtactatgatcggtgcttag

SEQ ID NO: 25461 - DNA, 270 bp, synthetic construct
  misc_feature 1..270: note = Description of Artificial Sequence: Synthetic coding sequence
  source 1..270: mol_type = other DNA
atgagcaacaacggcctggacatccaggacaagccccccgccccccccatgaggaatacgagtactatgatcggcgccggcagtaaggatgctggcactctgaatcacggctctaagcctctgcccccaaaccccgaggaaaagaagaagaaggacaggttttacaggagtatacttcccggcgataagaccaataaaaaaaaggaaaaggaaagacccgagatctcactcccgtccgacttcgaacataccattcacgtgggtttttag

SEQ ID NO: 25462 - DNA, 192 bp, synthetic construct
  misc_feature 1..192: note = Description of Artificial Sequence: Synthetic coding sequence
  source 1..192: mol_type = other DNA
atgagcaacaacggcctggacatccaggacaagccccccgccccccctatgagaaacacaagtaccatgatcggtgctggatctaaagacgcaggtacactgaaccatggctccaagccgctccccccgaatccagaagagaagaaaaagaaggaccgattctaccgatcgatcttacctggggataagtag

SEQ ID NO: 25463 - DNA, 321 bp, synthetic construct
  misc_feature 1..321: note = Description of Artificial Sequence: Synthetic coding sequence
  source 1..321: mol_type = other DNA
atgagcaacaacggcctggacatccaggacaagccccccgccccccctatgcggaatacttcaactatgatcggggccggcagcaaagatgctggtaccctgaatcatggctccaaacctctgccacccaatcccgaagagaagaagaaaaaggatcgcttctataggagcatcttgcctggagacaagaccaataagaaaaaggaaaaggaacgacccgagatctccctgccaagcgattttgagcatacaatccacgttggcttcgacgcggtgaccggggagttcacagggatgcctgagcagtgggcacgcctttag

SEQ ID NO: 25464 - DNA, 1569 bp, synthetic construct
  misc_feature 1..1569: note = Description of Artificial Sequence: Synthetic coding sequence
  source 1..1569: mol_type = other DNA
atgagcaacaacggcctggacatccaggacaagccccccgccccccctatgcgtaatacatctaccatgattggagctgggtccaaagatgctggcactctgaaccacggatccaagccgctgccacccaacccagaagagaagaagaaaaaggatagattttacagatcaattctgcctggtgataaaaccaataaaaaaaaggaaaaagagcggccagagattagcttgccctccgacttcgagcataccattcacgttggctttgatgccgtgacaggggaattcactgggatgcccgaacagtgggcacgactgctccagacctctaatataaccaagtctgagcagaagaaaaatccgcaagctgtcctagatgtgcttgaattttacaacagcaagaaaacatccaattcccagaaatatatgagctttacagataagagtgctgaagactacaacagctctaatgctctaaatgtgaaagcggtgagcgagactccagccgtgcctccagtctctgaggacgaggatgatgacgacgacgacgcaacacctccgcctgtgattgcacctcgccccgagcacacaaaatcagtgtacacaaggagcgtgatcgagccgttgccagttaccccaacaagggatgtcgccacgagccctatctcaccgactgagaacaacacgacaccccctgatgccctcacgcggaataccgagaagcaaaagaaaaaaccgaagatgagtgatgaggagattctggagaagctgagatccatcgtctcagtcggtgatccaaaaaagaaatatacacgttttgagaaaatcggccaaggcgcctccggaactgtttataccgcgatggacgtcgccaccggacaggaggtcgccatcaagcagatgaatctgcaacagcaaccaaagaaagagctaattatcaacgagattctggtgatgagagaaaacaagaacccgaacatcgtcaactatctcgactcatatctcgtgggagacgaactgtgggttgttatggaatatctggcaggcggttccctgactgacgtggtcaccgagacttgcatggatgaaggacagatagcagcagtgtgcagggagtgtttacaggctctggagttcctccattccaaccaagtgatccaccgggacattaaatcagataacatccttcttgggatggatggcagcgtcaaacttactgattttggcttctgcgcacagattactcccgagcagagcaagaggagtaccatggttgggacaccgtattggatggccccagaggtcgtgacccgtaaggcatatgggccgaaagtggacatctggagtctaggcattatggctatagagatgatagagggcgagcccccgtatctgaacgagaacccacttcgagcgctctacctaatcgcaaccaacgggactccagagctacagaaccccgaaaagctcagtgcaatcttccgagacttcctgaacagatgtctggaaatggacgtcgaaaaacgcggctcggctaaggagctattacaacactcaagcagactctag

SEQ ID NO: 25465 - DNA, 1317 bp, synthetic construct
  misc_feature 1..1317: note = Description of Artificial Sequence: Synthetic coding sequence
  source 1..1317: mol_type = other DNA
atgttcggcaagcggaagaagcgggtggagatcagcgcccccagcaatttcgaacatcgggtccacacggggttcgaccaacatgagcaaaaattcaccggtctgccccgccaatggcagtctttgattgaggaatctgcacggcgccccaagccgctggtagatcctgcttgtataacctctatacagccgggagcccccaagggcgagccccacgacgtggcgcccaacggccccagcgctggcggcctggcaattcctcagagctcttcatcttcctcgcgtcctccaactcgcgctcgcggggccccgagcccaggagtgctaggtccacacgcatccgaaccacagcttgccccccctgcctgcactccggccgccccagccgtcccaggcccacccggccctaggtccccacagagagagcctcagagggtcagtcatgaacaattcagggccgccctacaacttgtagtagatcctggggatcccagatcctatctagacaatttcatcaagataggcgaaggtagcacgggtattgtctgtatcgcgactgtgcgctcatccggaaaactagttgccgtgaagaagatggacctgaggaagcagcagagaagggaactactgtttaacgaggtagtgatcatgcgtgattaccaacacgagaatgtcgttgagatgtataactcctatctcgtgggcgacgagttatgggtggtgatggagttcctggagggaggcgctctgaccgatatcgttacgcacaccaggatgaacgaggagcagattgctgccgtatgtctggcagtgctgcaagccctctcagtgctgcatgctcaaggagtaatacatcgtgacatcaaatctgattcaatcttgctgacccacgatggccgggtgaaattatccgacttcggattttgtgctcaggtgtcaaaggaggttccacgaagaaaaagccttgtcggcacgccatattggatggccccggaactcatctcacgcctcccttatggtccggaagtggatatttggtcgctcggcatcatggtgatcgaaatggtggacggagagccaccatacttcaacgaaccgccccttaaggcaatgaagatgattcgggataacctccccccacgccttaagaacttgcataaggtgtcaccgagcctgaagggcttcctggaccgtcttctggtccgagatccggctcagcgggccactgccgccgagttactgaaacacccctttctggcgaaggccggcccacctgcgagcatcgtcccactgatgcggcagaatcggacaaggtag

SEQ ID NO: 25466 - DNA, 1776 bp, synthetic construct
  misc_feature 1..1776: note = Description of Artificial Sequence: Synthetic coding sequence
  source 1..1776: mol_type = other DNA
atgttcggcaagcggaagaagcgggtggagatcagcgcccccagcaattttgagcacagagtacacacaggatttgatcagcatgaacagaagttcacagggcttcctagacagtggcagagtcttattgaggagtctgcccgtcggcccaagccgttggtcgatccggcttgtattacgtccattcagccaggagcccctaagacaatcgtccggggaagcaagggagccaaggatggcgccctgaccttgttgcttgatgagtttgagaacatgtcggttacacgtagcaattctctgcgccgggattcgcctcctcccccggcccgcgcacgccaggaaaacgggatgccagaggaaccggcgaccaccgcccgtgggggcccaggtaaagctggttctcgggggcgcttcgcggggcattccgaagccgggggcggctccggcgaccggaggagggccggaccagaaaaacgcccgaaatcctcacgagagggctcaggcggacctcaggagtccagcagggacaagcgcccactttccggacccgatgtgggtactcctcagcctgctggactcgcctcaggtgcaaaactagccgcgggcagaccgtttaacacctacccacgcgccgatactgatcatccatcgaggggggcccagggcgagcctcatgacgtagcacccaatggccctagcgctgggggcttggccatcccccagtcctcctccagctcctcacgacctcccacacgagcccggggcgctccatctccgggggtgctgggacctcacgcatcagagccccagttagccccgcctgcatgcactcctgcagcccccgctgttcctgggccccctggccctcggtccccgcagcgcgaaccccagagggttagccacgaacagtttcgggccgctctgcaactggtggtcgatcctggtgacccccgctcatacctggataacttcatcaagataggcgaaggctccaccgggatcgtgtgtatcgccaccgtgagatcgagcggaaaattggtggctgtcaagaagatggacttgaggaagcagcagagaagagaattgctctttaatgaagtggtgataatgagggattatcagcacgaaaatgtggtggagatgtacaacagttatcttgttggcgatgaactgtgggtggtcatggaatttctggagggcggcgcccttactgacatagttacccacactagaatgaacgaggagcagatcgctgcagtatgccttgccgttctgcaggctctgtctgtacttcacgctcagggggtcatacatcgtgacatcaagtccgactccatccttctgacgcatgacggaagagttaaactgagcgacttcggcttttgcgcgcaggtgtccaaagaagtccctaggagaaagagtctcgtggggacaccgtactggatggctcccgagttgataagccgtcttccttacgggcccgaagtggatatatggagcctcggaatcatggtgattgagatggttgacggcgaaccaccctattttaacgagcctccacttaaggcaatgaagatgatcagggacaatttacccccaagactcaagaaccttcacaaagtgtctcccagccttaagggttttctggatcgactgcttgtgcgggatcctgctcagcgtgccaccgccgcagaactgttaaagcaccctttcctggctaaagctgggccccctgcctcaatcgtgccattaatgcgtcagaatcggaccaggtag

SEQ ID NO: 25467 - DNA, 1188 bp, synthetic construct
  misc_feature 1..1188: note = Description of Artificial Sequence: Synthetic coding sequence
  source 1..1188: mol_type = other DNA
atgggctgccagcggagccggcccttcaacacctacccccgggccgacaccgaccatccgtctcgaggtgcccagggagaaccacatgacgtggcacctaatggcccaagcgctggcggactcgccatccctcaaagttcctctagcagctcgagaccccctacaagggctcgcggagcaccaagtccaggggttctcgggccccatgctagtgaaccccaacttgctccccccgcgtgtacgcccgccgcgccagccgtgcctggtccacctggtcctcgcagccctcagagggaaccgcagagagtttcacatgaacagttcagggcagccctgcagttagtggtcgatccgggcgacccaaggtcatacttagacaacttcattaaaattggggagggtagcacaggcattgtatgcatagcaacggtaaggtcctctgggaagttagttgcggtcaaaaaaatggacctcagaaagcagcagcgccgcgagcttctcttcaacgaggtggttattatgcgggactaccagcatgagaatgttgtcgagatgtacaattcataccttgttggggacgaactctgggttgtgatggagtttctggaaggcggcgcattaaccgatatagttacacatacgaggatgaatgaggagcaaattgctgctgtttgcctggccgtcctacaagccttgagcgtactccacgcccagggggtcattcatcgtgatatcaagagcgatagtatcctgttgacacatgacgggcgggtgaagctgtcagattttggcttttgtgcgcaggtcagtaaagaggtccctcggcggaagtctctagtgggcacaccatactggatggctcccgagcttataagccgactcccgtatgggcccgaggtggacatctggtcactgggcattatggtcattgaaatggtggatggagagcccccctacttcaacgagccccctctgaaggccatgaagatgattcgagataatctgccgccaagactgaagaacttacataaggtctctccatccctcaaaggtttcctagatcgcctcctcgtccgagacccagctcagagggctacagccgctgaactactaaagcaccccttcctggcaaaagcggggcctcccgcatccatcgttcccctaatgcgccagaatcgcacccgctag

SEQ ID NO: 25468 - DNA, 1776 bp, synthetic construct
  misc_feature 1..1776: note = Description of Artificial Sequence: Synthetic coding sequence
  source 1..1776: mol_type = other DNA
atgttcggcaagcggaagaagcgggtggagatcagcgcccccagcaattttgagcatagggtgcataccggatttgaccagcatgaacaaaaattcacaggactccccaggcagtggcagagtctcattgaggagagtgctcgtaggcccaagcccttggtggaccccgcctgtatcacatccatccagcccggagctccgaagaccatcgtacggggatctaaaggcgccaaagatggggcgttaactctgcttcttgatgagtttgagaacatgagcgtcaccaggtctaactctctgaggagggattcaccccctccccccgcccgggcgcgccaggaaaacggaatgccggaggagcctgccacgacggcacgcggcggtccaggtaaagccggttcacggggccggttcgccggccactctgaggctggggggggatctggcgatagaagacgcgcaggacccgagaaacggcccaaaagtagccgggagggctctggcggcccgcaggagtcgagccgcgataagagacccttgtcagggccagacgtaggcacgccacagcctgctggactcgcctccggggcaaaactcgccgcaggccggcccttcaacacctacccccgcgctgacactgatcacccgtctagaggcgctcagggtgaaccacacgatgtggcccctaatggaccctctgccggtggcctggccattcctcaatcctcgtctagtagcagccgaccacctacaagagctcgtggcgctccgagtcccggcgttttaggcccccacgccagtgagccccaactcgcccccccagcctgtacccccgcggcacccgctgttcctggcccccctggaccaaggtctcctcagagggaacctcagcgggtgagtcatgagcagttcagagccgccctgcagctggtcgtcgaccctggcgatccccgcagttatctggataatttcatcaaaattggagagggttccacaggtatcgtttgcatagcaacagttagaagcagtggcaagctggtggctgttaaaaagatggatctgcgaaagcaacaacgcagggagcttctcttcaatgaagtcgtgatcatgcgtgattaccagcatgaaaacgttgtcgaaatgtacaattcctatcttgtgggggacgaactctgggttgtgatggagttcttggaaggcggggctctgaccgacattgtcacacacacaagaatgaacgaggagcaaattgccgccgtttgcctggctgtcctccaggccctctccgttctgcacgcccagggcgtcattcacagggatatcaagagtgattccatcctcctgactcatgatggcagagttaaactcagcgattttggattctgtgcccaagtcagtaaagaagttccacgacggaagtccctggtcggcactccatattggatggccccagagttaatcagtagactgccatatgggcctgaggtggatatatggagtcttgggattatggtcatcgagatggtggacggtgagccaccctacttcaatgaaccacctctgaaagccatgaaaatgattagagacaacctacccccccggcttaaaaatctgcacaaggtgagcccatccctgaaaggcttcctggatcgtcttctcgtccgggaccctgctcagcgtgccaccgccgccgagcttctcaagcacccatttctcgctaaggcagggccccccgcctcaatcgtaccattgatgagacagaatagaaccagatag

SEQ ID NO: 25469 - DNA, 1776 bp, synthetic construct
  misc_feature 1..1776: note = Description of Artificial Sequence: Synthetic coding sequence
  source 1..1776: mol_type = other DNA
atgttcggcaagcggaagaagcgggtggagatcagcgcccccagcaacttcgagcaccgagtccatacagggtttgatcagcatgagcaaaagtttaccggactacctcgacagtggcagagtcttattgaggagtcagctcggaggccaaaacctctggtggatccagcctgcatcactagcattcagccgggagcccctaagacgatcgtccgcggcagtaaaggggctaaagatggagcgctgacactcctcctggatgaatttgagaacatgtcagtgacgagatcgaatagcctccgtcgggactctcctcccccacctgctagggcccgacaagagaacggaatgccggaagaaccagctaccacagcgagaggcggcccaggcaaggccgggtccagaggacggtttgccggccactctgaggctggcggggggagtggcgaccggcgccgggccgggcccgaaaagcggcctaaaagctctcgcgaaggtagcggggggcctcaggagtcatctcgggataaacggcctctgtcagggccagacgtcggtaccccccagcctgcaggcctcgcctctggcgctaaactggccgccggcaggccttttaacacctatcccagggctgatacagatcatccatcaagaggagcccagggagaaccgcacgatgtggcccctaacgggccgagcgcaggcggactggccatcccacagagcagttcatcttcgagcaggcctccaacacgagctcgtggcgctccttctccaggagttctgggtccacatgcctcagaaccccaactggcaccgcccgcgtgcactcccgcggcacctgctgtgcctggacccccagggcctagatcacctcaaagagagcctcagagggttagtcatgaacagttcagagcggcgctgcaattggtcgttgaccctggggatcctagatcctatttggacaattttatcaagattggtgagggctctactgggattgtttgtattgccactgtgcgatcttcgggcaaattggtggctgtgaagaaaatggatctgcgcaagcaacaaagaagagagctgctgttcaacgaagtggtgatcatgcgtgattaccagcatgagaacgtggttgaaatgtataacagctacctggtgggtgacgaactgtgggtggtcatggaattcctggagggaggagctctcacggacatcgtgacccacactagaatgaacgaggagcagattgccgccgtttgcctggcagttttacaagcattgtccgttctccacgcccagggcgttatacatcgcgatattaaatcagacagcatactgctgacccacgatggtcgcgttaaactgtccgatttcggcttttgcgctcaggtgtcaaaggaagtgccaaggcggaagtctcttgtgggaactccttactggatggccccggaacttatctctcggctcccctatgggccagaggtagatatctggagtcttggcattatggttattgagatggttgatggtgaacccccttatttcaacgagcccccgctgaaggcaatgaaaatgatacgcgacaacctcccaccacgactaaagaatctacacaaggtctctccgtcccttaagggtttcctcgatagactgctcgtgcgagatcctgcccagcgcgctactgctgccgaactcttgaagcatccattcctggctaaggccggtccccctgcctctatcgtccccctgatgcgccaaaaccgaactagatag

SEQ ID NO: 25470 - DNA, 1044 bp, synthetic construct
  misc_feature 1..1044: note = Description of Artificial Sequence: Synthetic coding sequence
  source 1..1044: mol_type = other DNA
atgacctggcccctgaccggccaccagcggggcgcctggcccagcccttccccccctccaccaccaccagggttgcccccagaacccgaagtgcctccagctttagagtgttgggatcccactccccaatcaccaaggagtccccagcgcgaacctcagcgagtaagccacgaacagttcagggcagccctgcaactggttgtggacccgggtgacccccggtcttatctggataactttatcaagataggagaagggtcaaccgggatcgtttgtatcgctacggtccgctcttcagggaagttagtagcagtgaagaaaatggatcttagaaagcaacagagaagggagctgctgttcaacgaggtggtgataatgcgggactaccaacacgaaaatgtggtagaaatgtacaattcatacctagtgggcgacgagctgtgggtcgtgatggagttcctggaaggtggcgctttgaccgatattgttacccacaccagaatgaatgaagaacagatcgcggctgtctgcctcgccgttctgcaggccctgagcgtccttcacgcgcagggcgtgattcaccgggacataaagtccgattctatattgctgacccatgatggccgtgtgaaactgtctgattttggattctgcgctcaggtctcaaaagaggtgcctcggaggaagagcctggtgggtaccccctattggatggcccctgagcttatttccaggctcccttacggtcctgaggttgatatttggagcctcggcataatggttatcgagatggttgacggcgagcctccttatttcaatgaaccacctttgaaagcaatgaagatgatcagagacaacttacctccaaggctcaaaaacctccataaggtcagcccctcactgaaaggatttcttgataggctgctcgtgagggatccagcacagagagctaccgccgcagagcttctgaagcatccctttctcgctaaagcaggccctcctgcatctatcgtgcccctgatgaggcagaacagaacacgctag

SEQ ID NO: 25471 - DNA, 1776 bp, synthetic construct
  misc_feature 1..1776: note = Description of Artificial Sequence: Synthetic coding sequence
  source 1..1776: mol_type = other DNA
atgttcggcaagcggaagaagcgggtggagatcagcgcccccagcaattttgaacaccgggtccacaccggctttgatcagcacgaacagaagtttaccgggctgccccggcaatggcagagtcttatcgaagagagcgcacgccggcctaagccccttgtcgacccagcatgtataacgtccattcagccaggcgctccgaaaacgatcgtacgcggatcaaagggcgccaaggacggcgctctgacactgctgctcgatgagtttgaaaatatgtcggtcactcgatcaaattcactgagacgagatagcccgccccctcctgcccgcgccagacaggaaaatgggatgcctgaggagccagcgacaaccgcccgcggtggtcccggaaaagcgggctccaggggcaggttcgctggacattctgaggcaggcggtggatctggagatcgtagaagagccggcccagagaagcgtcccaagagcagcagggagggctccggaggcccccaggagtcctcgagggacaaaaggccgctgagcgggcccgacgtcgggacccctcagccagccggactcgcctccggtgccaagcttgccgcggggcggccatttaacacttaccctcgcgccgataccgatcatccttcccgaggcgcccagggtgaaccacacgatgtggctcccaacgggccctctgctggcggactcgcaatcccacagtcttcctcatcgtcgtcaagacctccgacgagagctaggggcgccccgtcacccggcgttttgggtccgcacgcttctgagcctcaactggcgccgcccgcctgtacacccgccgctcccgcagtgccgggacccccaggacctagaagtccccagcgcgagcctcaacgcgtgtctcacgaacagttcagggcagcactccaacttgtggttgaccccggggacccccgatcctatcttgacaatttcattaaaataggggaggggagtactggcatcgtatgcatcgccactgttcggtcatctggaaagctcgtcgcagtgaagaagatggacttgcgcaagcaacagcgaagggagttgttgttcaatgaagtggtgataatgcgcgattatcagcatgaaaatgtggtagaaatgtataattcatatctggttggcgatgaactgtgggtggtaatggaattcctggaaggaggggcccttaccgatatagtcactcataccaggatgaatgaagaacagatcgctgccgtctgtcttgccgtactgcaggctttatccgttcttcatgcacagggggttatccacagggatattaaaagtgatagcattctgctgacccacgatgggagagtcaagctctcagactttgggttctgtgcccaggtgtctaaagaggtaccccgacgtaaaagtctggtggggactccatattggatggctccagaactgatctcacgtttgccatacggacctgaagtagacatctggagtttaggtattatggtaattgagatggtggacggcgaacctccctacttcaatgagccccccctgaaggcgatgaagatgattcgcgacaatctccccccgaggcttaaaaatctccataaggtctccccaagcctgaaaggcttcctggaccgtctcctggttcgggaccccgctcaacgtgccacggccgctgagctcctgaaacacccattccttgctaaggccggcccccccgcttccatcgtacctttaatgcgtcaaaatcggacccgatag

SEQ ID NO: 25472 - DNA, 1317 bp, synthetic construct
  misc_feature 1..1317: note = Description of Artificial Sequence: Synthetic coding sequence
  source 1..1317: mol_type = other DNA
atgttcggcaagcggaagaagcgggtggagatcagcgcccccagcaactttgaacacagagtgcacaccggatttgaccagcacgaacaaaagttcaccggcttgccccgtcagtggcagagcctcatcgaggaatcagcccgccgccccaaacccctggtggatcctgcctgtattacttctatccagccaggggcgccaaagggagaaccacatgacgtggctcctaatgggccaagtgctgggggtctggccatcccccaatcctccagcagttcctctaggccacctacaagggcacgcggggcgccctcccccggcgtgctggggccgcacgcctccgaaccacagctcgcccctcccgcatgtaccccggccgcaccagctgttccaggaccccccggtccacggtcaccgcagcgggaaccgcagagagtaagccacgaacaattcagggctgctttgcagctggtggtggatcccggcgatccaaggtcatacctggacaatttcattaagatcggcgaaggaagcacaggcatagtttgcatcgcgaccgtgaggtcttcaggtaagctagttgcagttaaaaaaatggacctgaggaaacagcagcggagggagctcctctttaatgaagtcgtcattatgcgagattaccagcatgagaacgtggttgagatgtacaactcttacctggtcggcgatgagctctgggtggtcatggagtttctcgagggtggcgcgctaaccgacattgtgacacatactcggatgaacgaagaacagatcgctgccgtctgcctggccgttttacaagcccttagcgttttacacgcacagggcgttatccaccgagacatcaagagcgattctattctgcttacccatgacgggcgggtgaaactctcagacttcggcttctgtgcccaggtttctaaggaggtgcccaggcggaaaagcctagtagggacaccatactggatggcgccagagctgatctctcggctcccttatggccccgaggtggatatctggagtttgggcatcatggtcatcgagatggtggacggggaacctccctactttaacgagccccctttgaaggccatgaagatgatacgggacaatctgccccctcgcctgaagaatctccataaggtctctccttccctcaagggattcctagataggctgcttgtgagggaccccgcccaaagggctactgctgcagagcttctgaaacacccctttctggcaaaagcgggacctccagccagcattgtgccccttatgcgacagaatcgcacccgctag

SEQ ID NO: 25473 - DNA, 1458 bp, synthetic construct
  misc_feature 1..1458: note = Description of Artificial Sequence: Synthetic coding sequence
  source 1..1458: mol_type = other DNA
atggcccccaccatccagacccaggcccagcgggaggacggccaccgcagtggggtcgtatgcagagtgaaatactgtaactccctgcctgacattccgtttgaccccaagtttataacataccctttcgatcagaatcggttcgtgcagtacaaggccacctcactggagaagcagcataagcacgatctcttaacagaacccgacttgggcgtgaccatcgacctgattaatccagacacttaccggatagacccaaatgtgttgctggacccagctgatgaaaagcttctggaggaagaaatacaagctccgacctccagcaagaggagccaacagcacgcaaaagtggtgccctggatgagaaagacggagtacatcagcaccgaattcaacagatacgggatttctaacgagaaacccgaagtaaagatcggggtgtcagtcaagcagcaattcacagaggaggagatatataaggaccgcgactctcagattaccgccattgagaaaacgttcgaggacgcacagaagtccattagccagcactattcaaaaccccgagtgaccccagttgaggtaatgcctgtgttccctgactttaagatgtggatcaacccatgcgcccaagtgatcttcgactcagatcccgctcccaaggacacttccggggctgccgcactggaaatgatgtcccaggctatgattaggggcatgatggacgaggagggaaatcaattcgtggcatacttcttgcccgtggaagaaaccctaaaaaaaaggaagcgggaccaagaagaagagatggactatgcacccgacgacgtttatgattataagatcgctagagaatacaactggaacgtcaaaaacaaggcgagcaagggctatgaagaaaattattttttcattttccgagaaggcgacggagtctactataacgaactcgagacacgagtccgcctgtctaaacgcagggcaaaggcaggagtacagtcaggcaccaatgccctcctagttgtgaagcacagggacatgaacgaaaaagaattagaagcccaagaggcaagaaaagctcagctggaaaaccacgaacccgaagaggaagaagaggaagaaatggaaacagaggaaaaggaggccggcgggtcggtcatgctgatcctccgtacaatgccgactttgatgatgaggacggaggatcgccctaaggtcgcggtcactatgatccagactgccgctgccatgggagtagcatctggtgctggagcgaccgcagcagctccagtgccaagccctgttgccgcatcaactcggcctagacgaatggcggtgaaactccaattactcatacccgtgaaattgatagtcaccgtgacggagtctcaggggatccaggggtggttccgacaccactattgcgaacagcaaagcaccttcctggtggtgtgtctgtag

SEQ ID NO: 25474 - DNA, 873 bp, synthetic construct
  misc_feature 1..873: note = Description of Artificial Sequence: Synthetic coding sequence
  source 1..873: mol_type = other DNA
atgggccacccccccctgctgcccctgctgctgctgctgcacacctgtgtcccggcatcttggggccttcgatgtatgcaatgtaagaccaatggagattgtcgggttgaggaatgcgccctggggcaggacctatgccgcaccacaattgtccggctttgggaggaaggcgaagagctggagctcgttgagaaaagctgcactcatagcgagaaaactaaccgaaccttaagttaccgcacagggctcaagattacaagcttgaccgaagtagtgtgtggcttagacctttgcaatcagggcaatagtggtcgggccgtgacctactctcggagccggtacctggaatgtatctcgtgtggttcttccgatatgtcgtgtgagagaggacgtcaccaaagtctgcagtgccgctcaccagaggagcagtgtctggatgtggtgacacattggatacaggagggggaggaggtcctggagctggaaaatttgccccaaaacgggcgccagtgttatagctgtaaaggaaacagcacccatggctgcagctctgaggagaccttccttatagattgtcgcggcccaatgaatcaatgcttggtcgctaccggaacacacgagcctaagaaccagtcctacatggtgaggggctgcgctaccgcaagcatgtgccagcacgcgcacctgggagacgcctttagcatgaaccacattgatgtaagttgttgtactaagtcaggatgcaaccacccagacctggatgtccaatatcgcagtggtgctgcccctcagcccgggcccgctcacctatccttgacaataactctgctgatgacagcacgcctgtggggcgggaccttgctctggacctag

SEQ ID NO: 25475 - DNA, 1596 bp, synthetic construct
  misc_feature 1..1596: note = Description of Artificial Sequence: Synthetic coding sequence
  source 1..1596: mol_type = other DNA
atggcccccaccatccagacccaggcccagcgggaggacggccaccgtcccaacagccatcggaccctccctgagcgtagcggtgttgtttgccgggtcaagtactgtaacagcctgcctgacattcctttcgatccgaaattcattacctatcccttcgatcagaataggtttgttcagtacaaggcaactagcttagaaaaacaacataagcacgacctcttgaccgaacctgaccttggcgttacaatcgacctcattaaccctgacacttaccggattgatcccaatgtactgcttgacccagccgacgaaaaacttttggaggaggagatccaggcacccaccagttcgaaacgtagccagcaacacgcaaaagtcgttccttggatgcgcaaaaccgagtacatctcaacagaatttaatcggtatggtatcagcaacgagaagcctgaagtgaaaatcggagttagtgtaaaacagcagttcactgaagaagaaatctacaaggatagggactcccagattaccgctattgaaaaaaccttcgaagatgcacagaaatcaatttcacagcattactccaaaccaagggtcactcccgtcgaagtgatgcccgtgtttcccgactttaagatgtggatcaacccctgtgctcaagtgatcttcgacagcgatcccgcccctaaggacacatcgggagctgcagccttggaaatgatgagccaggctatgatccgtggcatgatggacgaagaagggaaccagtttgtggcttattttctgcctgtggaggaaacattaaagaaaagaaaacgggaccaggaggaggagatggactatgcccctgatgatgtctacgactacaagatagcccgcgagtataactggaatgttaagaataaagcaagcaaagggtatgaagaaaattatttctttattttcagggagggagatggagtgtactacaatgagctcgagacccgcgtgcggctgtcaaaaagaagagccaaggcaggggtacagagtgggacgaatgctctgttagttgtgaagcaccgtgacatgaatgagaaggagctggaggcccaagaggccaggaaagcccagttggagaatcatgagcccgaggaagaggaagaagaagagatggaaactgaggagaaggaagccggaggaagcgacgaagaacaggaaaagggatcaagtagcgaaaaagaggggagcgaggacgaacacagcgggagtgagagcgaaagggaggagggagaccgcgatgaggcctccgataagtctggtagcggcgaagatgagagctcagaggatgaggctcgggcggctagagacaaggaagaaatctttgggtctgatgcagactccgaagacgacgcggattcagacgacgaagatcggggccaggcacagggcggctcagacaacgactctgattctggttcaaatgggggaggacagcgctccagaagccactcgcggtcagccagtcctttcccgtctggcagcgagcacagcgctcaggaggatgggagcgaagctgccgcaagtgattcatctgaggctgactctgattccgattag

SEQ ID NO: 25476 - DNA, 867 bp, synthetic construct
  misc_feature 1..867: note = Description of Artificial Sequence: Synthetic coding sequence
  source 1..867: mol_type = other DNA
atggccaccggccccatccccaccggcctgtgcctgcggggcctggaatggagcgctgagtcttccactgctattgctagtctgataagcccatccacgcccagctctagcccgactccctccacacgcaccgttctgctggaccctgcggacgaaaaattgttggaagaagaaattcaagcgccgactagcagcaaacgttctcagcagcatgcaaaggtcgtaccgtggatgaggaaaacagagtatataagcaccgagtttaataggtacggtatcagcaacgagaaacctgaagtgaagatcggcgtttcggtgaagcaacagtttactgaagaggaaatctacaaggatcgcgatagtcaaatcactgcaatcgagaaaacgtttgaggatgctcaaaagtccatttcacaacactactctaaacccagggttacacctgtcgaagtcatgcccgtgtttccggattttaagatgtggatcaacccctgcgcacaagtgatattcgactctgaccctgcgccaaaggacacctcaggcgctgccgctcttgaaatgatgtctcaggctatgatcaggggcatgatggacgaagaggggaaccagtttgtcgcctactttcttccggttgaggaaaccctcaagaagcgtaagagagaccaggaggaggagatggattacgcacctgacgatgtgtatgactataaaatcgctagagagtataattggaacgtcaaaaacaaggcttccaagggctatgaagagaactacttcttcatattcagagaaggggatggagtgtactacaatgaattagaaacctcgatacagtattcacatatgctgtacaatttggtggcctag

SEQ ID NO: 25477 - DNA, 1176 bp, synthetic construct
  misc_feature 1..1176: note = Description of Artificial Sequence: Synthetic coding sequence
  source 1..1176: mol_type = other DNA
atggacctggagaagaactaccccaccccccggaccagccggaccgggcatggtggggttaaccagctaggcggtgttttcgtgaacgggagaccactgcccgatgtggtgaggcagaggatagtggaactcgcacaccagggcgtgcggccttgtgatatctccagacagctcagggtctctcatggttgtgtcagtaagatcttggggcgttactacgagacgggatcaattaaacccggggtgattggagggagcaagcctaaggttgcaacccctaaggtggttgaaaagattgctgagtataaacgccaaaatcccactatgtttgcctgggagattcgggataggttactggctgaacgggtctgcgacaatgatactgtgccaagcgtttcttctattaacagaattatacggacgaaggtgcagcagccacctaatcagcccgtgccagcgagttcgcattctatcgtcagcaccggaagcgttacacaggtctctagcgtgtccacagactcagcggggtcttcatattcaatctcaggcattttgggcatcacctccccgtcagcagataccaataagaggaagcgcgatgaaggaattcaggaatcccccgtccctaacgggcacagcctgcccggtcgggacttcctgaggaagcagatgcggggggacttgttcacacagcagcagctcgaggtcctggaccgcgttttcgagagacagcactattccgatatttttacaaccaccgagcccattaagcccgaacagactacagaatatagcgccatggcatccttagcgggcggactcgacgacatgaaggccaacctcgcctccccaactcccgccgatataggttcaagcgtccctggtccacaaagctatcccattgttaccggacgcgatctggccagcactactctccccggctatccaccacacgtaccccccgctgggcaaggaagttacagcgccccgacgttaaccggcatggtgcccgggagcgaattctcagggtcaccctacagccacccacagtacagcagttataacgactcatggcgttttccaaatccaggcttgcttgggtccccttactactactctgctgctgcccgaggagccgcgcctcctgctgcagccactgcttacgaccgccattag

SEQ ID NO: 25478 - DNA, 867 bp, synthetic construct
  misc_feature 1..867: note = Description of Artificial Sequence: Synthetic coding sequence
  source 1..867: mol_type = other DNA
atggacctggagaagaactaccccaccccccggaccagccggaccggccacggcggcgtcaaccagctcggcggtgtttttgttaatgggagaccactgccagacgtcgtgcggcagagaattgtcgaactggcacatcagggtgtgagaccgtgtgacatcagcagacagctcagagtgagccacggttgtgtgagtaaaatcctggggaggtactacgagaccggcagtattaaacccggtgttatcggggggagcaagcccaaggtggccacccctaaggtcgtggaaaagatcgccgagtacaaaagacagaatcccaccatgttcgcctgggaaatccgcgatcgactgttagctgaacgggtgtgcgacaacgataccgtgccctcagtgtcaagtatcaatcgcatcatccggaccaaagtgcagcagcctccgaatcagcctgttccagcgagcagccattctattgtaagcactgggtctgtaacccaagtatcctccgtgtccaccgatagcgccgggtcatcctactctatcagtggcatcctggggataacttctccgtcagccgatacaaacaagagaaaacgggacgagggaatacaggaatctcctgttccaaatggacactcactccctggccgagacttcctgaggaaacagatgcgcggagacttgtttacacaacagcagctggaggtcctggatcgggtcttcgaacgccagcactatagcgatatctttaccacaaccgaacctattaagcccgagcaggcggtgacatggagagcacgtccctccccggggaccctgcataccagcccccctcttgaccgcgctgctacccagcatcgccggtag

SEQ ID NO: 25479 - DNA, 987 bp, synthetic construct
  misc_feature 1..987: note = Description of Artificial Sequence: Synthetic coding sequence
  source 1..987: mol_type = other DNA
atggacctggagaagaactaccccaccccccggaccagccggaccggtcacggtggagtaaaccagcttggtggcgtctttgtaaatggcagaccactcccagacgtggttaggcagcgcattgtcgagcttgcccaccaaggggtcagaccttgtgatatcagtcgtcagctccgggtcagccatggatgcgtgagcaaaattcttggacgttattacgaaacaggctcgatcaagcccggagttatagggggcagtaaacctaaggttgctacgcctaaggtcgtcgagaagatcgccgagtacaagcgacagaatccaaccatgtttgcgtgggagattcgtgatcgattgctggcagagcgagtttgtgataacgacactgtgccaagcgtgtcttccattaatcggatcattcgaacaaaggtccagcagcccccaaaccagcctgttcccgcttcatcacactcaatcgtgtctactggcagcgtaacccaagtaagttccgttagtaccgattctgccggcagttcctactccatcagcggtatcctgggaataaccagccccagtgccgacaccaataaacgaaaacgggatgagggaatccaagaatcaccagtacccaacggccattctctgcccggccgagactttttgagaaagcaaatgagaggggatctattcactcagcagcaattagaggtccttgaccgcgtgttcgagcgacaacattattctgatatctttactaccacggaacctatcaaacccgaacagaccaccgagtactccgcaatggcttcactggctggtggactcgacgacatgaaggcgaatcttgcaagcccaacacctgcagacatagggagctccgtgccggggccccagagctaccctattgtgaccgggtccccctattattacagcgccgccgcccgcggagcagcccctccagccgctgctacagcgtacgacagacattag

SEQ ID NO: 25480 - DNA, 909 bp, synthetic construct
  misc_feature 1..909: note = Description of Artificial Sequence: Synthetic coding sequence
  source 1..909: mol_type = other DNA
atgttcgcctgggagatccgggaccggctgctggccgagcgggtgtgcgacaacgatactgtgccgtccgtgtccagtatcaaccggattattaggacaaaggtccagcagccacccaaccaaccggttcccgcctcaagccatagcatagtctctacaggaagcgtgacacaggttagttcagtgagcactgacagcgccggcagttcatattctatctcaggcatcctgggcattaccagcccaagcgcagacaccaacaagaggaaacgggatgaaggtattcaggaatctccagttcctaatggtcattccctgccaggcagagactttctgcgcaaacaaatgagaggagacctcttcactcagcaacagctggaggtgcttgaccgagtgttcgaaaggcagcattactcagacatcttcaccactacagagcctattaagccagagcagtggtgtcccgtgctgatgaggcagtacttggtgcaacctcaagccgtcctgttccaaaccaccgaatactcggccatggcttcactggcaggcggcctggacgatatgaaggcaaatctcgctagccctacaccggcagacatcggctcgtcggtgcctggaccccaatcctatcccatagtaaccggcagggacctggcgtccactacactgcccggctatccccctcacgttcctcccgcagggcagggcagttacagcgctccgacacttacaggtatggtgcctggatccgagttcagtgggtctccttattcacatccacagtatagttcgtataatgatagttggagatttcctaaccccggactgctcggctccccttactattattcagctgccgcccgcggcgctgcaccacccgcagcggctaccgcctacgatcgccactag

SEQ ID NO: 25481 - DNA, 1074 bp, synthetic construct
  misc_feature 1..1074: note = Description of Artificial Sequence: Synthetic coding sequence
  source 1..1074: mol_type = other DNA
atggacctggagaagaactaccccaccccccggaccagccggaccggtcacggcggtgtgaaccagcttgggggcgtatttgtcaacggccgccctctgccagacgtggtgcgccagaggatcgtcgaactcgcccaccagggggtccggccctgcgatattagcagacagcttcgcgtgagccatgggtgcgtgtctaagattctggggaggtattatgaaacaggaagcattaagcccggagtcattggcggttccaagcccaaggtggccacccctaaggtggtggagaaaatcgctgagtataagaggcagaatccaacaatgtttgcatgggaaatccgagatcggcttctggcagaacgggtctgtgataatgacactgtgccatcagttagctccattaatagaatcattaggaccaaggtgcagcagcctccaaaccagccagtcccagcatcctcccactccatcgtgtctacagggtctgtgactcaggtctcttccgttagtacagactccgctggaagttcctactcaatcagcggaatcctgggcatcaccagccccagtgcagacactaataaaaggaagagagatgaaggcatccaggagagcccagtgcccaacggccattccctgccagggagggacttcctgcggaagcagatgcgaggcgacctgttcacacagcaacagttagaagttctggaccgggtcttcgaaaggcagcattattcagacatttttaccactaccgagcccattaagcccgaacaaactaccgaatactccgctatggcctcgctggctgggggactagacgatatgaaggcaaatctggcctcaccgactcctgccgacataggaagcagcgtgcctggtccacagagttaccctatagttactggtagcgagttcagcgggtcgccctatagccacccccagtactcttcatataacgactcttggcggttcccaaaccccgggctgctggggtccccgtattattattccgcagccgctcgcggagctgctccccctgcagctgccacggcctacgatcgccattag

SEQ ID NO: 25482 - DNA, 1089 bp, synthetic construct
  misc_feature 1..1089: note = Description of Artificial Sequence: Synthetic coding sequence
  source 1..1089: mol_type = other DNA
atggacctggagaagaactaccccaccccccggaccagccggaccggacacggcggtgtgaatcagctcggcggagttttcgtcaacggccgccctttaccggatgtggtgcgtcaacggatagtggaattggctcaccagggggtgcgaccgtgtgacatcagtcgtcagttacgagtgtcccatgggtgcgtctcgaagattcttggccgctattatgagaccggaagcatcaagccgggggtgatcggcgggtctaaacccaaggtcgccacgccaaaggtcgtcgagaaaattgctgagtacaagcggcagaaccctacaatgtttgcctgggagatccgagatcgcttgctggccgagcgcgtctgcgataacgacactgtgcccagcgtctccagcattaatagaatcatacgaacaaaggtgcagcagcctcctaaccagccagtacctgccagctctcactctattgtctctacgggatctgtgacccaggtgagttcagtctcaaccgatagcgctggatccagttatagcatatccggaattctgggcattaccagcccatctgcagataccaataagcgtaaacgcgacgaaggtatccaggagtctcctgtccctaacgggcactccctgccaggaagagacttccttaggaagcaaatgagaggggatctgttcacccagcaacagctggaagtcctggaccgggtctttgagagacagcactactctgacatctttacaacaaccgaacctattaaacctgaacagactacagagtactccgcaatggctagcctggcaggggggctggacgatatgaaagctaatctggcttcacctacgccagccgatatcggctcttctgttccaggacctcaatcttaccctatcgtcaccggtagggatcttgcatccacgactttgccgggttatccaccccacgtacctcccgcgggccaagggagctacagcgcgccaacattgactgggatggtccctggatctccttattactattccgcagccgcaagaggtgcagcccctcccgctgccgccactgcttatgacagacactag

SEQ ID NO: 25483 - DNA, 1047 bp, synthetic construct
  misc_feature 1..1047: note = Description of Artificial Sequence: Synthetic coding sequence
  source 1..1047: mol_type = other DNA
atggacctggagaagaactaccccaccccccggaccagccggaccggccatgggggtgtcaatcagttggggggggtgttcgtcaacggccgccctctgcccgatgtggtgaggcagagaatcgttgagctggcccatcagggggtgaggccgtgcgatatctcgcgccagttgagggtgagtcacgggtgcgtgtctaaaattctaggtcgctactacgagacgggtagcatcaagccaggagtgataggaggaagtaagcccaaggtcgccaccccgaaggtggtagaaaaaattgccgagtacaaacgccagaaccccacaatgttcgcctgggagattagagataggctgctggcagaaagggtttgtgataatgacacagtgccttcagtctcgtcgatcaacaggatcattcggacaaaggttcagcagcctccgaatcagccagttccggcatcctcccattccattggaatccaggaaagccccgtgccaaacggccatagcctacccggccgggactttctacgtaaacagatgcggggcgatctgtttactcagcagcaactcgaagtgttggatcgcgtttttgagcgacagcactactctgatattttcacgacaacagaaccgatcaagcccgagcagacaacagagtattccgccatggcaagcctcgccggtggattggatgacatgaaagctaatctggcttcaccaacaccggcagacatcggcagcagtgtgcctggcccccagtcttatccaattgttaccgggcgggacctggcatcaacgacccttccgggatacccaccacacgtgccgccagcagggcagggaagctactcggctcccaccctgactgggatggttccgggttccgagttttctggttcgccatattctcacccccagtattcctcctacaatgattcttggagattccccaatcccggtctgctaggcagtccttattattattctgccgcggctagaggcgccgcgccaccagcagcagcaactgcgtatgaccgacactag

SEQ ID NO: 25484 - DNA, 876 bp, synthetic construct
  misc_feature 1..876: note = Description of Artificial Sequence: Synthetic coding sequence
  source 1..876: mol_type = other DNA
atggacctggagaagaactaccccaccccccggaccagccggaccggccatgggggcgtgaatcaactgggaggggtgttcgtgaatggccgtccactgcctgacgtcgtacgacaacgtattgtagagctggctcaccagggcgtcagaccctgcgacatttcgagacagttgcgcgtatcacacgggtgcgtgtctaaaatactcggtaggatcatcaggacgaaagtgcaacagccacctaaccaacctgtccccgcatccagccactccattgtctccaccgggagtgtgacgcaggttagttctgtctccacggacagcgctgggagctcatattccatcagcggaatcctcggcatcacgtccccttcagcagataccaataagaggaagcgagatgaagggatccaagaaagccccgtccccaatggccattccctcccgggtcgcgatttcttaagaaagcaaatgcgcggcgatctctttactcagcagcagctcgaggtcttggaccgtgtctttgagaggcagcattactcagatatctttacaaccaccgagccaatcaagccagagcaaactacggaatactccgctatggctagtttggctggtggtctcgacgatatgaaagccaacttagcaagtcctacccccgccgacattggctctagcgtacctggtcctcagagctaccctatcgttacggggagtgagttttcggggtccccatactcacacccacagtactcatcttataacgacagttggaggttcccaaacccaggacttctgggatccccttactactattccgcagccgctaggggtgcagctcccccagctgctgctaccgcatacgaccggcactag

SEQ ID NO: 25485 - DNA, 960 bp, synthetic construct
  misc_feature 1..960: note = Description of Artificial Sequence: Synthetic coding sequence
  source 1..960: mol_type = other DNA
atggacctggagaagaactaccccaccccccggaccagccggaccggccatgggggtgtgaatcaactgggaggggtgttcgtcaacggacgtcccctgcccgatgtcgtgcggcagcgaatagtggagcttgcccatcagggggttcggccctgcgatatctcccggcagctgcgggtgagtcatgggtgtgtgagcaagatcctggggcgctattatgaaacagggagtatcaagccaggcgtaattggcggttcgaagcctaaggtcgccacgccgaaggtggtcgagaagatcgccgaatacaaaagacagaacccaactatgtttgcctgggagatccgagaccggttgctggctgagcgcgtttgcgacaacgacactgtcccttccgtatcctctataaaccgcattattcgcaccaaggtacaacagccgcctaatcagccggttcccgccagtagccactccattggcatccaggagtcgcctgttccaaatgggcatagcttacctgggcgggattttctgagaaagcaaatgagaggcgatttgttcacccaacagcagttggaggtgctggacagggtctttgagaggcaacactactccgacatattcacgacgacagaacctataaaacctgaacagacaactgagtactccgctatggcctccctcgcaggaggactggatgatatgaaggccaatttggcctctcctacgccggcagacatcggctcttccgtaccaggacctcaatcttaccctattgtgaccggacgagacctcgccagcactacacttcccggctacccacctcatgtgccccccgctgggcagggaagctactcagcacctaccctgactggcatggtcccagggagcccctattattactcggccgcggccagaggcgctgctccacccgcagctgctactgcctatgatcggcattag

SEQ ID NO: 25486 - DNA, 852 bp, synthetic construct
  misc_feature 1..852: note = Description of Artificial Sequence: Synthetic coding sequence
  source 1..852: mol_type = other DNA
atgttcgcctgggagatccgggaccggctgctggccgagcgggtgtgcgacaacgatactgtgccctctgtgtcctcaatcaatcgcatcatccggaccaaggtgcaacagccacccaatcaacctgtgcccgccagcagccactctattgtgagcacaggttcggtaacccaggtttccagcgtatccactgatagcgctggatcctcttactctatttctggaattttaggcattaccagcccgtccgctgatacaaataagcgcaagcgggacgagggtatccaggaaagccccgtgcccaatggccactccctgcccggtcgcgactttctgcgaaaacagatgaggggagacctgtttacccagcaacaattggaggtcttggaccgggtgttcgagaggcagcattattctgacatctttactacaacagaaccaatcaaaccagagcaaaccaccgagtattctgccatggccagtctcgcaggtggtcttgacgacatgaaggccaacctggcctcacccacaccagccgatataggctcctctgtgccaggcccccagagttaccctattgtgacagggcgcgacctggccagcactaccctgccaggataccccccgcacgttccacctgctggacagggttcctactcggctcccacactaactggcatggtgccgggatctgaattctccggaagtccctattcccatccgcagtatagctcttacaatgattcctggaggtttccgaaccccgggcttctcggcagcccttattactattccgccgccgcccggggggcagccccgccggccgctgccactgcatacgatcggcactag

SEQ ID NO: 25487 - DNA, 924 bp, synthetic construct
  misc_feature 1..924: note = Description of Artificial Sequence: Synthetic coding sequence
  source 1..924: mol_type = other DNA
atggacctggagaagaactaccccaccccccggaccagccggaccggtcacggaggagttaaccagttgggcggtgttttcgtcaacggacggcccttgcccgatgtggtacggcagcgcatcgtggaactggcccaccaaggagttcggccctgcgacatttctagacagctgagagtgtctcacggttgcgttagcaagattcttggaagatactatgagacaggctcaatcaagccgggtgtcatcgggggctcaaaacccaaagtcgctacccccaaagttgtggagaagatagcagagtacaaacggcagaacccaaccatgtttgcctgggagattcgggatagattgctcgcagagagggtttgcgacaacgacacagtcccgagcgtctcctccatcaacaggatcattcggaccaaagtacaacaacctcccaaccagcccgtgccggcgtcgtctcatagcatcgtcagcactgggtcagtcacacaggtcagcagtgtgtcaacagatagcgccggaagtagctactcgatctccgggatccttggcatcacaagtccaagcgcagatacaaacaagaggaaaagagatgagggtatccaagaatcaccagtcccaaacggacacagcctgcctggccgggatttcctgagaaagcagatgcgcggcgacctatttactcaacaacaactcgaagtgctcgacagagtgttcgagagacaacactatagcgatatcttcactaccaccgaaccaatcaagcccgaacagtggtgccccgtcctcatgcggcaataccttgtgcagccacaggcagtactgtttcaggccgtgacctggagggcacggccttctcccggcaccctgcacacctcgcctccactggaccgggccgccacccagcacagacgttag

SEQ ID NO: 25488 - DNA, 1197 bp, synthetic construct
  misc_feature 1..1197: note = Description of Artificial Sequence: Synthetic coding sequence
  source 1..1197: mol_type = other DNA
atgccccacaacagcatccggagcggccacggcggcctgaaccagctggggggggccttcgttaacggtaggcccttgccagaggtggtgagacagaggattgtggacctggcacatcagggcgttcggccctgcgacatctcaagacagctgcgcgtgagccacggctgcgtgtccaagatactggggcgctattacgagactggctcaatcaggccaggggtgattggcggttcaaaacccaaagtagccaccccaaaggttgttgaaaagatcggggattataagcgacagaaccccacaatgtttgcctgggagatccgggatcgactgctggctgaaggagtgtgcgataacgacacagtgccctctgtgtccagcattaatcggatcattaggaccaaggtgcagcaacccttcaacctgccgatggactcttgtgtggcaacaaaatcacttagtcccgggcacactctcataccgagctccgccgtaaccccccccgaatctccccaatccgacagcctaggctccacctacagcatcaacggtcttctgggcatcgcccaacctggaagtgacaagcggaagatggacgactccgatcaggattcatgcagactgagcatagatagccagtcttcatcgtccggcccgagaaagcacctacgtactgacgcattctcccagcatcatctcgagccgctagagtgtccattcgagcgtcaacattacccagaagcctacgcctcacccagccacactaaaggcgaacaaggcctatatccactcccgctgctgaattccaccttggatgatgggaaggccacactgaccccctccaacacacctctaggtcggaacctgagcacccatcaaacataccccgtggtagccgctccacccttttggatatgcagtaagagtgccccaggctcccgaccctcaatgccctttcccatgctaccaccttgcaccggatcctcccgcgcgaggccatccagccagggtgagcggtggtggggcccaagatgtccagatacccatccaacttcaccgcccgccgatcgagccgccatgcctcctcttccctctcaggcatggtggcaggaggttaatacactggctatgccaatggccacccccccaacccccccgacggcacgcccaggagctagcccgacaccagcatgttag

SEQ ID NO: 25489 - DNA, 966 bp, synthetic construct
  misc_feature 1..966: note = Description of Artificial Sequence: Synthetic coding sequence
  source 1..966: mol_type = other DNA
atgccccacaacagcatccggagcggccacggcggcctgaaccagctggggggggctttcgtcaacggccggccactgccagaggtcgtcaggcagagaattgtggacctggcccaccagggggttagaccctgcgacattagtaggcagttgcgagttagccacggttgtgtgtccaaaatactgggaagatactacgaaaccgggtctattcgaccgggcgtcattggtgggtccaagcctaaagtagccacgccaaaagtcgtggaaaaaattggcgattacaagagacagaaccctactatgttcgcctgggagatcagagatcgtctgctagcagagggtgtgtgcgataatgacacagtgccaagcgtgtcgtcaatcaatcgcattatccggaccaaggtgcagcagccattcaatttgcccatggattcctgtgtggccacaaaatctctgtcccctgggcatactctgatcccctcttccgctgtaacgcccccagagtctccccagtcggactccctgggatccacatatagcattaatggcctgctgggtattgcccagccagggtccgacaaacgaaagatggatgattctgaccaggatagttgtagactctcaatcgacagtcaatcaagttcttctggcccacggaagcaccttagaacagatgcttttagtcagcatcacctcgaacccttggaatgtcccttcgaaagacagcattaccccgaagcgtatgcgagtcctagccacacaaaaggcgaacagggcgaacgatggtggggacccagatgccctgatacccatcctactagtccccccgccgacagggccgctatgccccccctgccatctcaggcatggtggcaggaagtgaatacactggccatgccaatggcgacacctcccaccccccccacagcgaggcccggggcatctccaacccccgcctgctag

SEQ ID NO: 25490 - DNA, 1197 bp, synthetic construct
  misc_feature 1..1197: note = Description of Artificial Sequence: Synthetic coding sequence
  source 1..1197: mol_type = other DNA
atgccccacaacagcatccggagcggccacggcggcctgaaccagctggggggagcattcgttaacggacggcccctacctgaggtcgtccgacagcggattgtagacttggcccatcaaggagttagaccgtgtgacatctcacggcaactgagagtctcccacggctgcgttagcaaaattttgggcagatattatgagaccggttccatccgcccaggggtgattggtggaagcaaacccaaagtggctacgcccaaggtggtggagaagatcggcgactataaaagacagaaccctacgatgttcgcttgggagattcgggaccgtctgctggccgaaggggtgtgcgacaacgacactgtgccctctgtctcttcaataaacaggattatccggaccaaagtgcagcagcctttcaatctgccaatggatagctgcgttgccaccaagtctctgtcccctggccacactcttattccatcatctgctgtgaccccaccagaaagcccacaatctgactctctgggatccacttatagcattaacgggctgcttggcatcgcccagcccgggtccgacaaaagaaaaatggatgactctgaccaggattcctgcaggctgagcattgactcccagagcagttcttcagggcctaggaagcatctccgaactgacgcattcagccagcaccatctggagcctctggaatgtccttttgaacggcagcactaccccgaggcttatgccagccctagccacactaagggggaacaagggttgtatcctctccccctactcaattcaacactggacgacggaaaagcaacattgaccccctctaacaccccactcggacggaacctgtccacgcaccaaacataccccgtcgtggccgctccacctttctggatctgtagcaagtcggctcctggatcaaggcctagtatgccttttccgatgctgccgccatgcaccggttcctcccgggcacggccgtccagccagggagagcgctggtggggcccccggtgccctgacactcacccaaccagccccccagccgatagggctgcgatgccaccactgccatctcaagcgtggtggcaagaagttaacaccctcgctatgcctatggccacccccccaacccccccaaccgcaagacccggagccagccctacaccagcttgttag

SEQ ID NO: 25491 - DNA, 864 bp, synthetic construct
  misc_feature 1..864: note = Description of Artificial Sequence: Synthetic coding sequence
  source 1..864: mol_type = other DNA
atgccccacaacagcatccggagcggccacggcggcctgaaccagttgggtggggcatttgtcaacgggcgacccctaccagaagtggtgcgccagcgcattgtggacctggcccatcagggagtccgaccttgtgatatatctaggcaacttagagtttcgcatgggtgtgtgagcaaaattttagggcggtattacgagaccggctcaatcaggccaggagtgatcggcggttctaagcccaaggtggctacccccaaggttgtggagaagatcggtgattacaagcggcagaaccccacaatgtttgcatgggaaatcagagacagactactggcagaaggagtctgcgacaacgacacagtgccctctgtgagcagcattaacaggattatccgcaccaaagtgcagcagccatttaacctaccaatggacagttgtgtcgcaaccaagtcgctgtccccaggacatacattgattccctcatctgccgtgactccccccgaaagcccacagagcgattcgctgggttccacttactccatcaatgggctgctcggcattgctcagccgggaagcgacaagcgcaaaatggacgattctgaccaagacagttgcaggctttctatcgacagccagtcttcctcaagcggaccaaggaagcatctgcggacggacgcttttagccagcaccacttggagcctttggaatgtccgttcgagcggcagcattacccggaggcctatgccagtccttcgcacaccaagggcgagcaggaggtgaataccctggcaatgcccatggccacaccccctactccccctaccgctagacccggtgctagccccacaccggcctgttag

SEQ ID NO: 25492 - DNA, 1353 bp, synthetic construct
  misc_feature 1..1353: note = Description of Artificial Sequence: Synthetic coding sequence
  source 1..1353: mol_type = other DNA
atgccccacaacagcatccggagcggccacggcggcctgaaccagttagggggagcattcgtgaacggacgccccttgccagaagtggtacgacagagaatcgtggacttggctcaccagggggttcgcccatgcgacatttcgaggcagctaagggtgagccatggatgtgtctctaaaatcctcgggcgttactatgaaaccggttcaatccgacccggagttatcgggggaagtaaacccaaagtggccacaccaaaagtagtagagaagatcggcgactataagagacaaaacccgaccatgtttgcttgggagattagagaccggttgctagcggaaggagtatgcgacaacgacactgtcccatcggtctccagcataaacaggatcattcggacaaaggtgcagcagcccttcaaccttcccatggactcatgcgtggcaactaaatccttatctcccggccacactctcataccctctagcgccgtaaccccgcccgagtccccacagtccgactcccttggctccacctatagcatcaacggactgctaggaatcgctcagcccggcagtgataagcgcaagatggatgatagtgatcaggattcatgtcgcctgtcaatcgacagtcagtctagctcgagtggaccccgtaagcacctaagaactgacgccttttctcagcaccacctcgagcctctcgagtgcccgttcgaaagacagcattatccggaggcctacgcttcgcctagccacacaaaaggcgaacagggactgtatcccctgcccctactcaacagcaccctggacgacgggaaggctaccctcacaccatctaatacaccactggggcgcaacttgtctacacaccagacctatccagttgtggccgaccctcactccccattcgccattaagcaggaaactccagaggtgtccagcagctcttcaaccccaagcagcctgtcatcctcggcgttcctggatctgcagcaggtcggtagcggtgtgcccccatttaatgcctttcctcacgccgcgtcggtgtacggtcagttcaccggccaggctctcctctctggccgagagatggtgggcccgacactgcccgggtatcccccgcatattcccacgtcaggccaaggcagctacgcttccagcgctatagcagggatggtcgctgggagcgagtacagcgggaatgcctatggccataccccctacagctcttacagtgaagcctggaggttccctaattcttcattgctcagctcaccctactactattcttctacttcaagacctagcgccccccctaccacggcaaccgccttcgatcatctgtag

SEQ ID NO: 25493 - DNA, 570 bp, synthetic construct
  misc_feature 1..570: note = Description of Artificial Sequence: Synthetic coding sequence
  source 1..570: mol_type = other DNA
atggccagcaagcgggccctggtgatcctggccaagggcgccgaggaaatggaaacagtgattcctgttgatgtgatgcgacgtgcaggaattaaggtcacggtagctggcctcgcggggaaagaccctgtccaatgcagcagggacgttgtgatttgccctgacgcttccctggaggacgctaagaaggagggcccgtatgacgtggtcgtcctacctgggggcaacctaggtgcccaaaacctatcagagagtgctgccgtgaaagagatcctcaaagagcaggagaatcgcaagggtctgatcgcagcaatttgtgcaggtcctaccgcactgcttgcacacgaaattggcttcggaagcaaagtgactacccatccgcttgcgaaggataaaatgatgaacggaggacactatacttactctgagaaccgcgtcgaaaaagacggactgatcttaaccagccgaggcccgggcactagctttgagttcgcccttgccattgtggaggctctcaatggcaaggaagtggctgctcaagtgaaagcgccgttggttctgaaggattag

SEQ ID NO: 25494 - DNA, 570 bp, synthetic construct
  misc_feature 1..570: note = Description of Artificial Sequence: Synthetic coding sequence
  source 1..570: mol_type = other DNA
atggccagcaagcgggccctggtgatcctggccaagggcgccgaggagatggaaactgtcatccccgtagacgttatgagaagagcgggcattaaagtgaccgtcgctggcctggcagggaaggatcccgtgcaatgctcacgggacgtggtcatttgtccagacgcgtccttggaagacgccaaaaaagaaggaccgtatgatgttgtggttctacccggcggaaaccttggcgctcagaacttgagtgaatctgccgcagtaaaagaaatcctcaaggaacaagagaatagaaagggcctcattgctgcgatatgtgcgggtccaacggccttgctggcacacgagatcggcttcgggtctaaggtgaccacccaccctttagccaaggataagatgatgaacggcggtcattacacgtactcagagaatagagtggagaaggatgggctaattctgactagccgtggccctgggacatccttcgagttcgccctggcaattgtggaggccctcaatggaaaagaggttgccgcgcaggtcaaggccccattggtgttgaaagactag

SEQ ID NO: 25495 - DNA, 570 bp, synthetic construct
  misc_feature 1..570: note = Description of Artificial Sequence: Synthetic coding sequence
  source 1..570: mol_type = other DNA
atggccagcaagcgggccctggtgatcctggccaagggcgccgaggaaatggagacagtgatccccgtcgacgtgatgcgtagagccgggataaaagtgacagtggctggccttgcaggaaaggaccccgtccagtgttctcgagacgtggtgatctgtcctgacgcatccctcgaggacgcaaaaaaagagggtccttatgatgtggtcgttttaccggggggtaacctcggagcccaaaaccttagtgaatcagctgccgtaaaagagatcctgaaggaacaggagaaccgtaaaggattaattgctgccatttgcgccggtcctacagcgcttcttgcccacgagattggcttcggcagtaaggtgacaacccacccccttgccaaggataaaatgatgaatgggggacattatacatactccgaaaacagggtcgagaaagacgggctgattctgacaagccgcgggcccggcacctctttcgaattcgccctggctatcgtcgaggcgctaaacggtaaggaagttgccgcgcaagtcaaggcccctctggtgctcaaggactag

SEQ ID NO: 25496 - DNA, 570 bp, synthetic construct
  misc_feature 1..570: note = Description of Artificial Sequence: Synthetic coding sequence
  source 1..570: mol_type = other DNA
atggccagcaagcgggccctggtgatcctggccaagggcgccgaggagatggagactgtaattcctgtggatgtcatgagacgcgctggcattaaggtgactgtggcaggcctggctggtaaggacccggttcagtgttctcgcgatgttgtaatttgcccagatgcctctctcgaggacgccaaaaaggagggcccctatgacgtggttgtactccccggcggcaacctgggggcgcagaatctgtctgaatcggccgccgtgaaagagatattgaaggaacaggaaaacaggaaaggtttgatagctgccatttgcgcaggtccgaccgcactgttagcgcatgaaatcggctttggaagcaaggtgactacacacccccttgcaaaggacaaaatgatgaatggcggccactatacctatagtgagaatcgcgtggaaaaggacggcttgatcttgaccagcaggggtcccggaacaagctttgaattcgcactggctatagtcgaggccctcaacggcaaggaggttgccgcacaagttaaggcgcccctggtcctgaaagactag

SEQ ID NO: 25497 - DNA, 3561 bp, synthetic construct
  misc_feature 1..3561: note = Description of Artificial Sequence: Synthetic coding sequence
  source 1..3561: mol_type = other DNA
atggacgagccccccggcaagcccctgagctgcgaggagaaggagaagctcaaggaaaagctggcattcctgaagcgcgaatacagcaaaacacttgctcgactacaaagggcacaacgggccgaaaaaatcaaacattctataaagaagaccgtggaggagcaggattgtctgagtcagcaggatctttcaccgcagttaaaacacagcgagccgaaaaataagatctgcgtctatgacaaacttcatattaaaacgcatttggacgaggaaacaggtgagaaaacaagcatcaccctagacgtggggccggagtctttcaatcccggcgacggacctggaggcctgccaattcaacggaccgatgacacgcaggagcattttcctcaccgcgtcagcgacccctctggcgaacagaaacagaagctgcccagtcgccggaaaaaacagcagaaaaggaccttcatctcccaagaacgcgactgtgtgtttgggaccgactctctccgactgtcagggaagcggctcaaagaacaggaggagattagttccaaaaatcccgctaggtctccagtcacagagattcgcacccatctgctgagtctcaaatccgaacttccagattcgcccgaacccgtgacagaaattaacgaagattccgtacttatcccccccaccgcccagccagagaagggcgtagatacattcctccgccgccctaacttcactcgggctacaaccgtcccactgcaaaccctctccgactctggttcaagccagcaccttgagcatattccaccaaaggggtccagtgagctgactacacacgaccttaagaatattagatttacctccccagtgtctcttgaagcccaggggaagaagatgaccgtgagcacagacaacctgcttgtgaataaggccatctccaaaagcggacagctgcccacctcttctaacctggaagccaatatctcctgcagcctcaatgagctgacttataacaatcttcctgctaacgaaaatcaaaatctcaaggagcaaaatcagactgagaagtccctgaaatcccccagcgatactctggacggaagaaacgaaaacttgcaagagtctgaaatcctgagccagcccaaatctttgagtctcgaagccacgtcaccactatcagcagaaaaacattcttgtaccgtaccagagggactcctgtttccagccgagtactatgtaaggactactcggagcatgtcgaactgtcagcgcaaagtggctgtcgaggccgttatccagtcacacctggacgtgaaaaagaagggattcaagaacaagaataaggacgcctctaagaacctgaacttgagcaacgaagagacggaccagtccgagattaggatgtccggcacctgtacaggccagccaagctcccgaacgtctcagaaacttctgagccttaccaaggtctcatccccagccgggcccaccgaggataacgacctctcacgaaaggcagtggcacaagcgccgggacgtcggtacacaggaaagagaaagagcgcttgcacccctgccagcgatcactgcgaaccactgttgccaacatctagcctgtccatcgttaaccgctcaaaggaggaggtgactagccacaagtatcagcatgagaaactgtttattcaggtgaaaggaaagaaaagccggcatcagaaagaagattccctgagctggtccaatagcgcttacctttcactcgatgacgatgccttcacggctcccttccaccgcgatggcatgttatcgttgaagcagctgctgtcatttctgagtatcacggacttccagctgcccgacgaagactttgggcccctgaaattggagaaggtcaagagctgtagcgagaagcctgtcgagccgttcgaaagcaaaatgtttggcgagcgccacctgaaagagggatcttgtatcttcccagaagagttgtcccctaagagaatggataccgaaatggaggatcttgaggaagatctgattgtactgcctggaaaatcacaccccaaacgacctaactcgcagtcgcaacacacgaagacaggtctgagcagttcgatccttctatatacaccacttaataccgtggccccagacgataacgacaggcccaccactgacatgtgttcacccgcttttccaatactggggacaacaccagcctttggcccacagggatcatacgagaaggcatccactgaggtggccggaagaacatgctgcactcctcagctggcacacctgaaggactcggtgtgcctggcttctgacacgaagcagtttgatagtagcggttcgcctgccaagccccacacaaccctgcaagtgtccgggagacagggccagcccacctgcgactgtgatagtgtgccaccagggacccctccccccatagagtcttttacattcaaagagaaccagctctgtcggaacacctgtcaggagctacataagcactccgtggagcagacggagaccgccgaactgccagccagcgattcaattaaccctgggaacctccagctagttagtgagctaaaaaacccgtctggctcctgttccgtggacgtgagcgctatgttctgggaaagggctgggtgcaaggagccttgtataattacggcctgcgaggacgtcgtgagcctttggaaagccctcgatgcctggcagtgggaaaaactgtacacctggcatttcgcggaggtgcctgtacttcaaatcgtgccagtacctgatgtttacaatctcgtttgtgtagctcttgggaacttggagattagggagatcagagctttgttctgcagcagtgacgatgaaagtgagaagcaggtactattgaaatctggcaatataaaggcagtactaggacttaccaagcggcgcctcgtgtcttcgtcaggtactctttcagatcagcaggtggaggtgatgacatttgccgaggatgggggagggaaagaaaaccagtttttaatgccccctgaggagacaattctgaccttcgccgaggtccagggcatgcaggaggcccttcttgggacaaccattatgaacaacatcgtgatctggaaccttaaaaccggacagttattaaaaaagatgcatatcgacgacagctatcaggcttcagtttgtcataaggcttactcagagatggggctgctgttcatcgttctttcccatccctgcgccaaggaaagcgagtccctgcgttcaccggttttccagttgatcgtcatcaaccccaaaactacgctgtcggtaggtgtgatgctctactgcctgccgccagggcaggccggtaggtttctagaaggggatgtaaaggaccactgtgctgccgccatcctgaccagtgggacaatagcgatttgggacctcctccttggacagtgtaccgccttattgccacccgtttccgatcaacactggtcattcgtgaaatggtccggcaccgactcccatttgctggccggccagaaggatggtaatatctttgtgtaccattacagttag

SEQ ID NO: 25498 - DNA, 4344 bp, synthetic construct
  misc_feature 1..4344: note = Description of Artificial Sequence: Synthetic coding sequence
  source 1..4344: mol_type = other DNA
atggccagcgccggcaacgccgccgagccccaggaccggggcggcggcgggtccggatgtatcggcgccccgggccgacccgcaggcggtggacggaggcggaggaccgggggcctgagacgggcagccgcaccagatagggattatcttcaccggccatcctactgcgatgcggcatttgctctggagcagattagtaagggaaaagctaccgggcgaaaggcacccctctggctacgggctaagtttcagcgcctgttattcaaactcggatgctatattcagaaaaactgcggaaagtttctcgttgtggggctgctcatctttggcgcctttgctgtgggcttgaaggccgctaaccttgaaactaacgtggaggagctttgggttgaggtaggaggacgagtttcccgagagctgaactacacaaggcaaaagatcggcgaggaggccatgttcaatccccagctcatgatccaaactccaaaagaggagggtgctaatgtgttgaccactgaggcgctgctgcagcatttagactctgctctgcaggcctcccgggtgcatgtctacatgtacaatcgccagtggaagctagaacatttgtgctataagtcaggagagctaatcaccgaaactggatacatggatcagatcatcgaatacctgtatccttgcttaattataaccccactggactgcttttgggagggggccaagttacagagcgggaccgcttaccttttaggcaagccacctctcaggtggaccaacttcgatcctcttgagttcctcgaggaactcaaaaaaatcaattatcaggtggacagctgggaggagatgcttaataaggcagaggttggccacgggtacatggaccgaccctgcctaaatcctgctgatccggactgtccggctacggctccgaacaagaacagtaccaaacccttagatatggccctggtgctcaacggaggctgtcatggcctgagcaggaagtacatgcactggcaagaggaattgatcgtgggggggaccgtcaaaaattcaacggggaaactagtcagcgctcatgctctgcagaccatgtttcagttaatgacccccaagcagatgtatgaacattttaagggctacgagtacgtgagccatatcaattggaatgaggacaaggccgcggccatactggaggcctggcagcgcacatacgtggaggttgtgcatcagtccgtggcacaaaatagtacccagaaggtcctcagcttcacaaccacaacactggacgatatattgaagagctttagtgatgtgagcgtgattcgggtggcatccgggtacttgctgatgttagcttacgcctgtttaactatgcttagatgggactgctccaaatcccagggagccgtgggattagctggagtgcttctggtcgccttgagcgtggctgccgggttaggcctttgctcactgatcggtattagctttaacgctgccacgacgcaggtgcttccgtttctggcattgggcgtgggcgtagacgatgtgttccttctcgcccacgcttttagcgaaacagggcaaaacaagcgtatccctttcgaagatcggacaggagaatgtctgaaacggactggggccagcgtggcccttacttcgattagcaatgtcactgcattcttcatggctgctttgatcccaattccagcactacgtgcattttcccttcaggccgccgtggtcgtggtcttcaacttcgccatggtgttactgatatttccagcaattctatcaatggacctttatcgacgcgaagaccggaggctcgacatcttctgttgttttacctccccttgtgtttcccgcgtcattcaagtggagccgcaggcctacacagatacccacgataacacacgatatagtcctcctcctccatattcatcacattcttttgcccacgagacccagattacaatgcagtctaccgttcagctccggacggaatatgacccccatacccacgtctattacactactgcagagcccagaagtgaaatttctgtccaaccagtgaccgttacccaagatacgttgagttgtcagagccccgagtctacatcttctacacgggacctgctgtcacagtttagcgactcaagtttgcattgcctggaacccccatgcacaaagtggaccctctccagctttgccgagaagcattacgcaccttttctgctcaagcccaaggccaaggtggtcgtcatctttctgttcttaggccttttaggggtctctctctacggtaccacaagggtgagggacggccttgacctgaccgatattgttccaagggagacccgagaatacgactttatcgctgcacagtttaagtacttttccttctataacatgtatattgtaacacagaaagccgactatcctaacatccagcatttgttatacgaccttcatcgcagcttttcaaacgtaaaatatgtgatgctcgaagaaaataaacagctgcctaaaatgtggttacattattttcgggactggttgcaggggctccaagacgccttcgactccgactgggaaacagggaagattatgcccaacaattacaaaaatgggagcgatgacggggtactcgcctataaattattggttcagactggctctcgggataagcctattgatatttcgcagcttacgaaacagaggctggtggatgctgatggaatcattaacccatccgcattctacatctacctgaccgcatgggtgtctaatgatcccgtcgcctatgccgcatcgcaggccaacatcaggccccatcgaccggaatgggtgcacgataaggctgactatatgcctgaaacccgattgcgaattcccgcggctgagcccatcgaatacgcacagtttcctttttatttaaacggcctcagagatacttcggactttgtcgaggccattgagaaggtgcggactatatgttcgaactacacttcgctcggactctcctcttaccccaacggctacccgtttctcttctgggagcagtacatcggcctgcggcactggctgctgttgttcatttcagtcgtgttggcctgcacattcttggtgtgtgccgtgttccttctcaacccttggacagctggaattatcgtcatggtgttagccttgatgacggtcgaactgtttggtatgatgggtctgataggcattaaactatccgctgtcccggtggtaatactgattgcatctgtgggcataggcgtcgagtttacagtacacgtcgcgttggctttccttacggcgatcggcgacaagaaccgtcgggcagttcttgccttagaacacatgtttgcacccgtgcttgatggcgcagtgtccactctgctgggagtcctcatgctggctggtagcgagtttgattttatcgtaaggtacttctttgcagttctggcaatactaaccatactgggcgtgttgaatgggctagtactgctgcccgtgttgctgtccttttttggaccctaccccgaggtatccccagctaacgggctgaaccgcctgcccactccaagccctgagcccccaccatcagtggtccgctttgccatgccccctggccacactcacagcggatccgacagttctgacagtgaatacagttcacaaaccaccgtctcagggctcagcgaggagctgcgccactacgaggcccagcaaggcgctggtggtcccgctcatcaagtaatcgtggaagccacagagaaccctgtcttcgctcacagcacagtagtccatcctgagagtaggcaccacccaccttccaatccccgccaacagccacacctcgactcaggttctcttccaccgggacgacagggtcaacaaccgaggcgcgacccaccccgagagggattgtggccgcccccataccggccaaggagagacgctttcgagatctccacagagggacactctggccctagcaaccgcgcccgctggggcccccggggcgcacgttctcataatccacgtaaccctgcttcaacggccatgggctcttctgttccaggatactgccagcctattactactgtgactgccagtgctagtgttaccgtagctgtccacccaccgcctgtccctggcccaggacgaaatcctaggggcggcctgtgccctggttacccggaaaccgaccacggactgtttgaagaccctcacgtaccgtttcatgttaggtgtgaaaggagagactctaaagtggaggtcatcgagctgcaggatgtggagtgtgaagaacggcccagaggcagcagctccaactag

SEQ ID NO: 25499 - DNA, 1059 bp, synthetic construct
  misc_feature 1..1059: note = Description of Artificial Sequence: Synthetic coding sequence
  source 1..1059: mol_type = other DNA
aaggccgaggtgggccacggctacatggaccggccctgcctgaaccctgccgatcctgattgtcccgcgacagcacccaataaaaacagcactaaacctctggacatggccctggtgttaaatggggggtgtcatggtttgtcccgcaagtatatgcattggcaggaggaattgatcgttggagggactgtgaaaaattcaactgggaaactagtgtctgctcatgccctccagacaatgttccagctgatgacacctaaacaaatgtacgagcacttcaagggctacgagtacgtgtctcatatcaactggaacgaagacaaagctgccgccattctggaggcctggcaaagaacatatgtcgaagttgtgcaccagagtgttgcccaaaatagcacccagaaggtgctgtctttcacgacaaccacactcgacgatatactgaagtccttttccgatgtgtccgttatacgggtggccagcggctacctgttgatggtgctcccattcctagccctgggcgtgggcgtggacgacgtttttctgcttgcgcatgcattctccgagacaggacaaaacaagcgcataccttttgaagaccggaccggtgagtgcctgaaacggaccggtgcctcagtggcccttacgagcatatccaacgtgaccgctttttttatggcagcgttgatccctatccctgcactacgcgcattttccctgcaagctgctgtggtggttgtcttcaatttcgccatggtgttattaatcttccccgcaattctgtccatggatctgtaccgaagagaagacagaaggctggacattttctgctgctttacctcgccttgtgtgtctagagtcatccaggtcgagccccaagcctacaccgacactcacgacaacacgaggtactcacccccgcctccatattccagtcacagctttgcccatgaaacccagatcaccatgcagtccactgtccagctaagaaccgagtatgaccctcatacccacgtgtattataccactgcagaacctcgctcagagatttcggtctag

SEQ ID NO: 25500 - DNA, 4341 bp, synthetic construct
  misc_feature 1..4341: note = Description of Artificial Sequence: Synthetic coding sequence
  source 1..4341: mol_type = other DNA
atggagctgctgaaccggaaccggctggtgatcgtgagcccccggtgcacacctccaaaggccagtggagggcccgccagaagaggtttttacacattcaggtctttctgtaaggatggaggtgggggggaggaggaggaagaaaatggaggggaggaaaaggacgatcggggggacaaagagacacggtccgacaaagggaaggccacaggccgtaaggcccccctgtggctccgggcaaagttccaaaggttgctgttcaagctgggctgctacattcaaaaaaattgcggcaagtttctggtggtaggtctgctgatctttggggccttcgccgtgggtttgaaagctgccaatctggaaacaaacgttgaggagctctgggtggaggtgggcggccgtgtgagcagagagctgaattatacaagacaaaaaattggcgaagaggcaatgtttaaccctcagttgatgatccaaacacctaaggaagagggcgccaacgtactcactaccgaggcactgcttcagcacctggacagcgctctgcaagcatccagggtgcacgtttacatgtacaatcggcaatggaaacttgagcatctttgctacaagtctggagagctgatcaccgagaccgggtacatggaccagattatagaatacttgtacccttgcctgatcataacgccattggattgcttctgggaaggagcgaagcttcagagcggcacagcctacctgctgggtaaacctcccctgagatggacaaacttcgaccccctcgagtttctggaagagctgaagaagatcaactatcaggtggacagttgggaggagatgctgaataaagccgaggtgggccacgggtacatggaccgtccctgtctgaaccctgccgaccccgactgtccggccacagcaccaaacaagaatagcactaagcccttggacatggctttggtacttaatggaggttgccacggtctgagtagaaagtacatgcactggcaggaagaactgatcgttggcggcaccgtgaaaaacagcaccggcaaactcgtttccgcccatgctctgcagacgatgttccagctgatgacaccgaagcagatgtacgaacatttcaagggctacgagtacgtgtcccacattaactggaatgaggacaaagcagcagctattctagaagcatggcagaggacttatgtagaagttgtgcatcagtctgtcgctcagaactcaacacagaaagtgctatcattcaccactacaactctcgatgacatcctgaagtccttcagcgatgtgtcagttatcagggtcgcatccggatacctcctcatgcttgcctacgcctgtctgacaatgctcagatgggactgctctaagtcccagggagcggtcggcctggcaggagtgttgctggtggcactaagtgtggcggccggcctgggcctctgttccttgatcggaattagcttcaacgcggctactactcaggttctgccattcctagccttgggagtcggcgtggacgacgtgttcctcctagcccatgcgttctcagagaccggacaaaataaaaggatcccctttgaggatcgaaccggagaatgcctgaagagaacaggggcctccgtcgctctgacctcaatttctaacgtcaccgccttcttcatggctgcacttatacccatacccgcccttcgagctttctccctccaggccgccgtggttgtggtatttaacttcgctatggttttgctgattttccctgctattctgagcatggatctgtataggcgcgaggacaggcgcctggacatcttttgttgcttcactagtccttgcgtgtccagagtgatacaggttgagcctcaggcctacacagatacacatgacaatacgcggtactccccaccgcccccctactcaagccactcattcgctcatgaaacgcaaattaccatgcaaagcacggtccagctgaggaccgagtatgatcctcacacacatgtgtattatacaacagccgagcccaggagtgaaatttctgtccaaccagttaccgtaactcaagatactctttcctgtcagtcccctgagtcgacctccagtacacgcgacctgttgtcacagttcagtgactcatccctccactgcctcgaacccccttgtaccaaatggactctgagcagttttgcggaaaaacactacgccccatttcttctaaagccaaaggccaaagtcgtggtgatcttcttgttcctgggccttctcggcgtatcactgtacggaacaacaagagtgcgtgatggactggatctaaccgatatcgtgcccagagaaacgcgcgaatatgactttatagcggcgcaattcaaatactttagtttttacaacatgtatatcgtaacccaaaaagccgactacccgaatatccagcacctgctgtatgatctgcacagatcctttagtaacgttaaatacgtgatgctggaagagaacaaacagctccccaagatgtggctacattatttccgggactggctccaagggctccaggacgcattcgacagtgactgggagacgggaaagattatgccgaataactacaagaacggtagcgacgacggagtactagcctataagctcctcgtacaaactggaagtcgagacaaacccatagacattagccagctgacaaaacagaggctggtcgatgccgacgggataatcaaccccagcgccttttatatatatctaaccgcttgggtgtcgaatgacccagtggcctatgccgcgtcccaagcaaatattagaccacatcggccagagtgggtgcacgacaaggccgactacatgccagagaccagattgagaattccagcggcagagcctatcgagtatgctcaattccctttctatctcaacggcctgagagacaccagcgattttgtagaagcgatagagaaagtccgcaccatctgctccaattatacgtccctgggcttgtcatcctaccccaacggatacccctttctcttctgggagcagtatattggcctgagacattggctactactgttcatctccgtggtgctggcttgtaccttcctggtgtgcgctgtctttctcttaaacccatggaccgcagggattattgttatggtgcttgcgctgatgacggtggagctgtttggcatgatgggtcttatcggcattaagctgagtgccgtacccgtagtgatcctgattgctagcgtggggattggggttgaattcaccgtgcatgtggccctggcctttctcaccgcgataggtgacaagaacagacgagccgtccttgctttagagcacatgtttgccccagtgctggatggcgctgtctccacccttctgggcgtgctgatgttggcgggatccgaatttgatttcatcgtaagatacttcttcgccgttttagcgatcctcaccatactgggcgtgcttaacggacttgtattgctgcccgtgttgctgtctttcttcggcccatacccggaagtgtcccccgccaacgggctgaatagactgcccacgccaagtcccgagcccccacctagcgtggtcaggtttgccatgccacccgggcatacgcactctggctccgatagttcggactccgagtactccagccagaccactgtaagtggactgtctgaggagctgagacactatgaggcgcagcagggagccggaggcccagcacatcaggtcattgtggaggccaccgaaaatcccgtctttgcccatagtactgttgtacatcctgaatctaggcaccacccaccatcaaaccctagacagcagccgcacttggattctggcagcctgcccccgggccgacagggacagcaaccaaggcgcgatcctcccagggaggggctctggccacccccctacagaccgcgcagggacgcctttgagatctcaactgaaggtcacagcggaccctccaaccgagcgaggtggggaccacgcggagccaggtcccacaaccctcgaaatccggcgtccacagctatgggatcttccgtgcccggctactgccagccaatcaccactgttaccgcttctgcctccgtaactgtcgccgtgcaccctcctccagtgcctgggccaggccgaaatccccggggagggctttgcccaggctaccccgaaacggatcacggcttgttcgaggacccacatgtaccctttcatgtgcggtgtgaaagaagagatagtaaggtggaagtgatcgagctgcaggacgtcgagtgcgaggaacgccctaggggttccagtagtaactag

SEQ ID NO: 25501 - DNA, 1758 bp, synthetic construct
  misc_feature 1..1758: note = Description of Artificial Sequence: Synthetic coding sequence
  source 1..1758: mol_type = other DNA
ccctgccggaagagcagcgccctgaacagccccaaggccgccgtggtggtggtctttaatttcgcgatggtgcttcttatctttcccgccattctgtccatggatctttatcgtcgggaagataggaggctggacattttctgctgcttcacgagtccgtgcgtttctcgggtcatccaggtggaaccgcaggcctatacagacactcacgacaacactcgatattccccaccacctccttactccagccacagcttcgcgcacgaaacacagatcactatgcaatctaccgtgcagctccggacagagtacgatccccacacccacgtgtattatacgaccgcagagcctcgtagtgaaatttcagtgcaacccgtgaccgtcacccaggatacattatcctgccaaagcccagaatctacgtcttccacccgggacctgctgtcgcagttttccgactcttccttacactgcctagagccaccatgcaccaaatggacacttagctcctttgcagagaaacactacgcaccttttctcttaaaacccaaggccaaggtggtggtgattttcctgtttctcggcctgctcggcgtgtccctgtatggcacaaccagggtcagagacggactcgatctgaccgacatcgtgcccagagaaacgagggagtacgacttcatcgcagcacagttcaagtacttctcattctataacatgtacatcgtgacacagaaggccgactaccccaatatccaacatctcctttacgatctgcatcggagcttttccaacgttaaatacgtcatgctagaagagaataaacaactcccaaaaatgtggctgcactatttcagggactggctgcagggactacaggatgcgttcgattctgactgggaaacaggaaaaattatgccaaataactataaaaacggatcagacgacggagttttggcgtataagcttcttgtccaaacagggagccgagacaagcccatcgacatcagtcagttgactaagcagcggctggtagacgccgatggaattatcaacccatctgcgttttacatctacttaacagcttgggttagcaatgatcctgtggcgtacgcagcttcccaggcaaacatcaggcctcatcgcccggaatgggtgcacgataaagcagactacatgcccgaaacacgcctgcgcatcccagccgcagaaccaattgagtacgcccagttccccttttacctcaacggcctgcgagacactagcgatttcgtggaggctattgagaaagtgcggaccatatgttccaattacacatcactgggactatcaagttatcccaacggctacccttttttgttttgggagcagtacataggtctcagacattggctactgcttttcatttctgtcgtgttggcttgtacctttctcgtgtgcgctgtgttccttctgaatccatggacagccgggataatcgtgatggtgttagctctgatgaccgtggaactttttgggatgatgggcttgattggcataaaactttctgccgtgcctgtcgtaatcctcattgcctcagttggcattggtgtagagttcactgtgcacgtagccttggctttcctgaccgcaattggcgataaaaataggagggcagtgcttgccctcgaacatatgtttgcgccggtactcgatggcgcggtcagcacattattgggagtcctgatgctcgccggttccgaatttgacttcatcgtgtag

SEQ ID NO: 25502 - DNA, 729 bp, synthetic construct
  misc_feature 1..729: note = Description of Artificial Sequence: Synthetic coding sequence
  source 1..729: mol_type = other DNA
atgccccccggccacacccacagcggcagcgacagcagcgacagcgaatacagctctcaaactacagtgtctgggctctccgaggaactcagacactatgaggctcagcagggtgctgggggccccgcgcatcaggttatcgtggaagccaccgaaaaccctgtcttcgcccacagtaccgtggtgcaccccgaaagcagacaccatccaccatctaacccccggcagcagccacacctggacagcgggtcactgccaccaggaagacagggccagcagccacgtcgagatccgcctagagagggcttgtggcctccaccctaccgccccaggcgggacgcctttgagatctccactgaaggccacagtggcccatctaatagggccaggtgggggccaagaggagccaggtctcacaatcctcgtaatcctgctagcaccgctatgggctccagtgtgccaggctactgtcagcctattacaactgtgacagcatcagcaagcgttacggttgccgtccatccacctcccgtcccgggccccgggcgaaatcccagaggcgggctttgcccagggtaccccgagacagaccacggcctgtttgaggacccgacatgcctgtctacttccggggttcgtggaggcatcaggcgatggaaatccctcagctgtagaacttggaacgccaggaggggacccggcgaggccgctcctacagagggcgactag

SEQ ID NO: 25503 - DNA, 1461 bp, synthetic construct
  misc_feature 1..1461: note = Description of Artificial Sequence: Synthetic coding sequence
  source 1..1461: mol_type = other DNA
ggcaaggccaccggccggaaggcccccctgtggctgcgggccaagttccagcggctgctgtttaagcttggctgctacattcagaagaattgcggaaagttcctggttgtaggcctgctgatatttggcgcgtttgccgtgggtctgaaggccgcaaacctggagaccaatgttgaggaactttgggtggaggttggaggcagggtaagccgggagctcaattatacccgacaaaagatcggtgaagaggcaatgttcaatcctcagctgatgatacagactccaaaggaagagggagccaacgttttgaccacagaagctctgttgcaacacttagactctgctctgcaggcttcccgcgtccacgtttacatgtacaatcgaggaaagccacccctcagatggaccaattttgatcctctggagtttttagaagagctgaagaagattaattatcaagtggatagctgggaggaaatgctaaataaagcagaggtgggccatggatacatggacagaccttgtttaaaccccgccgacccagactgtcctgctacagcccctaataagaactccaccaagcctttggatatggccctggtgctgaatggtgggtgtcacggcctctcaagaaaatatatgcactggcaggaagaactgatcgtgggaggtactgtgaagaactccacaggaaaactcgtcagcgcacacgctctgcagacaatgtttcagctcatgacaccaaagcagatgtacgaacatttcaagggatatgagtatgtcagtcacattaactggaatgaggacaaggcagccgctatcttagaggcctggcagaggacatacgttgaggtggtacaccagtcggttgcacagaacagcacacagaaagtcctgtcgttcacgaccaccactctggacgatattcttaaaagcttttctgatgtttctgtaatccgtgtagcctctgggtacctcctgatgctggcctacgcctgtctcaccatgttacggtgggattgctcaaaatctcagggggccgttggtctagccggtgtattactggtggctctcagtgtcgccgccgggctggggctgtgttccttgatcggtatctcatttaacgccgcaaccacccaggtgctaccctttctggctctgggagtgggtgtggacgacgtgttcttgctggcgcacgctttcagcgaaaccggtcaaaataagcgcattccattcgaagataggaccggcgaatgcttaaagaggactggggcttccgtggcactaaccagcatcagcaacgtgacggctttttttatggctgccctgatcccaattccagccctgcgggcgttttcactacagtacattctcatggcacatagagggcggttgagcttcaatgacaccctttggtgcggagggttaaagtcgtacatgagattcccttacgaggaatag

SEQ ID NO: 25504 - DNA, 3891 bp, synthetic construct
  misc_feature 1..3891: note = Description of Artificial Sequence: Synthetic coding sequence
  source 1..3891: mol_type = other DNA
atgttcaacccccagctgatgatccagacccccaaggaggagggcgccaatgttctcaccaccgaggcactgcttcagcacctcgattctgccttacaagctagtagggtgcacgtgtacatgtacaatagacagtggaaacttgagcatctgtgttacaagtccggggagctgatcactgagaccggttatatggaccagatcattgagtatctttatccgtgtctcataatcactcccctggactgcttctgggagggagctaaattgcagtcaggaaccgcttacctgcttggcaagccccctctcaggtggacaaactttgatcccttggaatttcttgaggaactgaaaaagattaactatcaggtggatagttgggaggagatgctgaacaaagcggaggtagggcacgggtacatggacaggccctgtctgaacccagcagatccagactgccccgccaccgctccaaataagaacagcaccaagccattagatatggccctggtgctgaacgggggttgccacggcttgtcacggaagtatatgcattggcaagaagaattgatcgtcggtggcaccgtcaagaactcaactgggaagctagtctcagcgcatgcgctgcagacaatgttccaactgatgaccccaaagcagatgtacgagcactttaaggggtacgaatatgttagtcacatcaactggaacgaagacaaggctgcagcaattctggaagcttggcagagaacatacgtggaggttgtacatcagtctgtggctcagaatagcactcaaaaggtcctctcctttaccaccacaactttggatgacattctgaaatctttttctgatgtgtcagtcatccgcgtagcctctggctacctgttaatgctcgcatacgcttgcctgacaatgcttaggtgggattgtagtaagagccagggtgcagttggactggctggcgttctcctcgtggctctctcggtagcagcgggacttggactgtgctcacttattgggatctccttcaacgctgctacgactcaggtgttgccctttctcgccctgggagttggtgtggacgatgtgttccttttggcccatgccttttctgaaactggacagaataaaaggataccttttgaggacaggaccggggagtgcctcaaacggacaggagcctccgtggctctgacatctatttcaaacgttacagctttcttcatggctgcattgatacccataccagccctgcgggccttctccttacaggccgccgtagtggtggtgtttaatttcgccatggtgctgctcatttttcctgctatcctgtcaatggacctctatcgacgcgaggataggaggttggatatcttttgttgcttcacttcgccctgtgtgagtcgagtgatccaggtcgagcctcaggcttacaccgacacacatgacaataccagatacagccccccaccaccctattcttctcattccttcgcacacgaaacacagatcacaatgcagtccacagttcagctgaggaccgagtacgacccgcacacccatgtttactacaccacggcagagccaaggagcgagatctccgtacagcctgttacagtcacacaggatacattgtcttgtcagagtccagaaagcacgtctagcaccagagaccttttgagccagttctcagactccagtttgcactgcctcgaacctccttgcaccaagtggacactgtctagttttgcagaaaagcactatgcaccattcctgctcaaacccaaagccaaggtagtagtaatctttcttttcctgggtctgctcggcgtttccctctacggcacaaccagggttagggatggactggacctcaccgacattgtgccaagggagaccagagaatacgattttattgccgcccagtttaagtatttcagcttttacaacatgtatattgttacccagaaagctgattatcctaacattcaacatctgctctacgatttgcaccgttcttttagcaatgtaaagtacgttatgttggaagaaaacaaacagctgcctaagatgtggctgcactatttccgcgactggctgcaggggctgcaagacgcctttgatagcgactgggaaaccgggaagatcatgccgaataactacaagaatggatccgatgatggcgtgctggcctacaaactgttagtgcaaaccgggtctcgtgataagcccatagatattagccagctcaccaaacagaggctggtagatgctgacgggatcattaacccatccgccttctatatttatttgacggcatgggtgtcaaatgaccccgtggcttacgccgcctcccaggccaatattaggccacaccgtcccgaatgggttcacgacaaagccgattatatgcccgaaacgagactgagaatcccggcagccgaacctatcgaatatgcccagtttccgttctacctgaacgggctgcgggatacttccgacttcgtggaagccattgaaaaggtccgaactatctgcagcaactacacaagtctggggctgtcttcttatcctaacggataccccttcctcttctgggagcagtacatcggcctccggcattggctgctcctgttcatcagcgtggttctagcctgcacctttctcgtctgtgctgtatttctcttgaacccctggactgccggcattatcgtcatggttctggccctgatgactgtggagttgttcggtatgatgggacttatcggaatcaaacttagtgccgtgcccgtcgtgatcctgattgcaagtgtgggtatcggcgtggaattcacagtccacgtagcactcgcatttttgactgcaattggggacaagaatcgacgggcagttctcgccctagagcacatgtttgcaccagttttagatggggccgttagtactcttttgggggttctgatgctcgccggctctgagttcgactttattgtcagatatttttttgccgtgttagctattctgaccatattgggggtcctcaacggtctagtcttactgcctgtactgctctccttctttggaccttatcctgaggtgtcccccgcaaatggtctcaataggctaccaactccatctccagaacctccaccatcggttgtgcgtttcgcgatgccacccggccatacgcattccggcagcgactcttcggatagtgaatactcttctcagacaactgtttcaggactgagcgaagaattgcggcattacgaggcccagcagggtgccggtggccccgctcatcaggtcatcgtggaggctaccgagaacccagtgtttgcacacagtactgtggtccacccagaaagtcggcaccaccctccttccaatccccgtcagcagccgcatctggattccggcagccttccacccgggcgccagggacaacagccccgccgggatccacctcgcgagggcctgtggccacctccatatcgcccgcggcgcgacgcatttgaaatcagcaccgagggacattcaggacccagcaacagagccaggtggggccctcgaggtgcgcgttcacataaccccagaaatccggcctccacggccatggggagctccgtccccggctattgtcagcctataacgacggtgactgcgtcagcaagcgtgaccgtggccgtgcaccccccacccgtgcccggccctggtaggaacccccgaggcgggctgtgtcccggctatcccgagaccgaccacggactcttcgaagatccgcacgtgccattccacgtgaggtgtgaacgccgggatagtaaggtggaggtgatcgaactgcaggatgtcgagtgtgaagaaagaccaagaggcagttcttctaactag

SEQ ID NO: 25505 - DNA, 3891 bp, synthetic construct
  misc_feature 1..3891: note = Description of Artificial Sequence: Synthetic coding sequence
  source 1..3891: mol_type = other DNA
atgttcaacccccagctgatgatccagacccccaaggaggagggcgctaatgtacttactaccgaagccctcctccagcatcttgacagcgcacttcaggccagccgagtgcatgtgtatatgtacaatagacagtggaagcttgaacacctgtgctataagtcaggcgagttgataactgagaccggctatatggaccaaatcatcgaatatctgtatccatgtttaattatcacaccgctcgactgcttttgggagggcgcaaaactgcagtccggtactgcctatctactcgggaagccccccttgaggtggaccaatttcgacccactcgaatttctcgaagagttgaaaaagattaattaccaagtagattcctgggaagagatgttaaacaaagcagaggtgggccacggatacatggaccggccgtgtctgaatcctgctgatcccgactgccccgcaaccgctccaaacaagaatagcactaagcctctggatatggcactggtgctgaatggtgggtgtcatggcctcagcagaaagtacatgcattggcaggaggagcttatagtaggaggaacagtgaagaatagcactggcaaattggtgtcagctcatgcgttacagaccatgtttcagttgatgaccccaaaacagatgtacgaacacttcaagggatacgaatacgtatcacatatcaattggaacgaagacaaggcagctgcaattctcgaggcttggcagcgtacctatgtcgaagtcgtacatcagtctgtagctcagaatagtactcaaaaggtcctgtcctttaccacaaccacactggatgacattctcaagtcttttagtgacgttagcgtgattcgggttgcttccggataccttctgatgctcgcttacgcctgtctgacaatgttgaggtgggattgcagcaagtcccagggcgccgtggggctggcaggcgttctcctggtggccctttctgtggcggccggacttgggctgtgttctttaattggcatcagttttaatgctgctacaacgcaagtcctgcccttccttgctcttggggtgggcgtagacgacgttttccttctggcacacgcattttctgaaaccggtcaaaacaaacgaattcctttcgaggatcgcacaggtgaatgtctcaaaagaactggtgcgtccgtcgcacttacgagtatttccaacgtgacggcattttttatggccgcgctgatccctattcccgccctgcgtgctttctccctccaggccgccgtggtcgttgtcttcaactttgccatggtcttgctgattttcccggccattctaagtatggacctgtacaggcgcgaggaccgacgactggacattttctgttgcttcacaagcccttgcgttagcagagtgatacaagtggagccgcaagcttacactgacacccacgacaacaccaggtacagtccaccccctccgtacagctcccacagcttcgcccacgagacccagatcaccatgcagagcaccgttcagctcaggacagagtatgacccccacactcatgtgtactacacgacggctgaacctcgatcagagatctctgtacaacctgtgacagtaacccaggatacactgtcctgtcagagtccagaaagcaccagttccactagagacctgctgagccagttctcagatagctccttgcattgtctggaacctccttgtacgaaatggactctgtcctccttcgccgagaagcactacgccccttttctattgaagcctaaagcaaaagtggtggtcatctttctgttcttagggctcctcggtgtttccctctacggcacaactagggtacgggacggactggacctcaccgacatagtcccccgggagactcgagagtacgatttcattgcagcccagtttaaatacttttctttctataatatgtacatcgtgactcagaaagccgattatcctaacatacagcatttgctatacgacctgcaccgctccttctccaacgttaagtatgtaatgctggaggaaaacaaacagctacccaaaatgtggcttcactactttcgcgactggctgcagggcctgcaggacgccttcgactcggactgggaaacaggcaagatcatgccaaataattacaagaacggctccgatgatggtgtgttagcgtacaagctcctcgtccagacaggcagtcgcgacaaacctatagatatcagccagctgactaagcaacgcctcgtggatgctgacggcatcatcaatcccagtgctttctacatctatcttactgcctgggtgagtaacgatccggtcgcatacgccgcctcccaggcgaacattaggccccaccgacctgaatgggtccatgataaagctgactacatgcccgagacccgacttcgtatcccagctgccgagcccatcgagtatgctcagtttccattttatcttaatggacttcgggacacctccgatttcgttgaggctatagagaaggtgagaactatttgtagtaattacactagtctcgggctctccagctaccccaacggttaccccttccttttttgggaacaatatatcggcctgcgccattggctgctactgttcatttctgttgttcttgcctgtaccttcctcgtgtgcgcagtatttctgctgaatccatggaccgcaggaatcatagttatggtcctggcactgatgactgtcgaactctttgggatgatgggtctcatcggcatcaagctgtcagctgtccccgtagtgattctgattgctagcgtcggtattggggttgaattcacggttcacgtggctctcgcatttctaaccgctatcggggacaagaataggagggcagtccttgctctggagcacatgtttgctcctgtacttgatggcgctgtgtcaacattgctgggcgtgctcatgttagccggttcagagttcgatttcattgtgagatacttctttgctgtgttggctatcctcacaattctgggagtcttaaatgggttagtcctgctgccagtgctgctgagctttttcgggccatacccagaagtgagccctgcaaatgggctcaaccgcctgcctacaccatctcccgaacctcccccgtcagtagtgcgattcgctatgccacccggtcatactcacagtggatcagactctagcgattccgaatattcctcacagaccaccgtgtccggcctgtccgaggagctgaggcattatgaggcgcagcaaggggctggtggtcctgctcaccaggtaattgttgaggcaaccgagaatcctgtgtttgctcactccaccgtggtgcaccccgagtccagacatcacccaccgtctaatcccagacaacagcctcacctcgattcaggctctctacccccaggacggcaaggccagcagccacgacgtgaccctcctcgcgaggggctgtggccacctccctaccggcccaggcgggacgccttcgaaattagcactgaaggccactcaggcccgtctaacagagcccgctggggacccagaggagctcgatcgcacaatcctcgaaacccagcttcgacagcgatgggcagttctgttccaggatattgccagccaatcaccactgtaactgccagcgcatccgtcaccgtagccgtgcatccccctccagttcctggtccagggcgtaatccgaggggtggactgtgcccaggctatcctgagacagaccacggtctgtttgaggacccacacgtgcctttccacgtgaggtgcgagcggagagattccaaagtggaagtgatcgaattgcaggacgtggagtgcgaagagaggccaagagggtcctcaagtaactag

SEQ ID NO: 25506 - DNA, 3891 bp, synthetic construct
  misc_feature 1..3891: note = Description of Artificial Sequence: Synthetic coding sequence
  source 1..3891: mol_type = other DNA
atgttcaacccccagctgatgatccagacccccaaggaggagggcgcaaatgtcttgacaaccgaggcactgttgcagcacctggactctgcgttgcaggctagtcgtgtgcacgtgtatatgtacaatagacagtggaagctcgagcatctttgttacaaatccggagagctgataactgagaccggctacatggaccagatcatagagtacctgtacccttgcttaatcatcacacctctggactgtttctgggagggggccaagcttcagtctgggaccgcctaccttttgggcaagccacctctccgttggacaaactttgatcccctggagtttctggaagaattgaagaagattaactaccaagtggacagctgggaggaaatgctgaacaaggccgaggtgggccacggctatatggatcgcccatgtcttaaccctgccgatccagattgtccagccacggctccaaacaaaaattctaccaaacccttggacatggccctcgtcctcaatggcggatgccacgggctgagccggaagtacatgcactggcaggaggaactaattgtcgggggaactgtcaagaactctaccggaaagctggtgtctgcccatgccctccagaccatgtttcagctcatgactccaaagcaaatgtacgagcactttaaggggtacgagtatgtgagccatatcaattggaacgaagataaggcggccgccatcctggaggcctggcagagaacctatgtcgaggttgtgcaccagagcgtcgcgcagaactctacacagaaggtgctttcctttaccaccactactctggatgacattttgaaatcattctctgatgtctcagttatcagagtagcctcaggctatctcttgatgctcgcctatgcatgtctcaccatgctccggtgggattgcagtaagtcccagggagctgtcggactggccggggtgctgctggtcgccctcagcgtcgcagccggcctgggtctctgctccctaataggcatctctttcaatgccgcaaccactcaggttcttccctttctcgctcttggggtgggagtcgacgatgtgttccttctggcccatgcctttagtgagaccggacagaataagcggatcccatttgaggatcgcacaggcgagtgccttaagcgtaccggagctagcgtagccctgacctccatatctaatgtgactgcctttttcatggctgccctgatcccaatcccagctctcagggccttcagcctgcaagccgccgtggttgtggtgtttaattttgccatggttctcctcatcttccccgcaatccttagcatggacctctaccggcgggaggacaggcgactggatattttttgttgcttcactagtccttgcgtttccagagtaatccaggtcgaaccgcaagcgtataccgatactcacgacaatacaagatatagtcccccccctccttactcttcccacagtttcgcacatgagacacagatcaccatgcagtccactgtccagctgagaaccgaatatgatcctcacacacacgtctactataccacggctgaaccacgctctgagattagtgtgcagcctgtcaccgtgacccaagatactctctcctgccagagcccagagtcaacctccagcactcgggatttgctgagtcagttttccgatagctcactccattgcctggaacccccctgcacgaagtggacgctctccagcttcgccgagaaacattacgcaccgtttcttctgaaacctaaggctaaagttgttgtgatctttttattcttgggactcctgggcgtgagcctgtatggtactactcgcgtccgcgatgggctcgacctaaccgatatagtacctagagaaacaagagaatacgacttcatcgcagcccaatttaagtatttcagcttctacaacatgtatatcgtgacacagaaggcagattatcccaacattcagcacttactctacgatctgcacagatcttttagtaatgtcaagtatgtgatgctggaagagaacaagcaactacctaagatgtggctgcactatttcagggactggttgcaggggctacaggacgctttcgattctgactgggagaccggcaagattatgccaaataattacaaaaacgggtcagacgacggcgttttggcttacaagttgttggtgcagaccggtagccgcgacaaacccatcgacattagtcagctaacaaagcagcgccttgtggacgcagacgggattattaacccgagcgccttttatatctacctgacagcatgggtatctaatgaccctgtggcatacgcagccagccaggcaaacatcaggccacataggccggagtgggtgcacgacaaggccgattatatgcctgagactcggctgcgcattcctgccgcagagccaatagagtacgctcagttccccttttacttaaatggtctgcgcgatacatcagatttcgtggaagctatcgagaaagtccgcacaatctgcagcaattacacgtcgctggggctgtcctcttacccaaacggatacccatttctgttttgggaacagtacattgggctccggcattggttgctgctttttattagcgttgtcctggcctgcacatttttggtgtgcgcagtattcctgctgaacccctggacagccggaattatcgtgatggtactagctctgatgacagtcgagctgtttggaatgatgggtcttatcgggatcaaactgtccgctgtccctgttgtcatactgatagctagcgtagggatcggagtcgaattcaccgtgcacgtagcattggcctttctgactgccatcggagacaaaaatcgtcgcgcagttctcgcattggagcacatgtttgcccccgtgcttgacggagccgtgtccacactattaggggtcctgatgctcgctgggagtgaattcgatttcatagtgagatacttctttgcagtgttagccatcctgacaatactcggcgtattgaatggcctcgttctcctgccagtgttgctgtcttttttcggtccctacccagaggttagtcccgcaaacgggctaaaccgactacctaccccaagtcccgaaccgccaccatctgttgtgcgcttcgcaatgcctccaggccatactcattcaggttccgattcatccgacagcgaatattcgagccagactacagtgagcggcctctccgaggagttgcgtcattacgaggcccagcagggagccggaggtcctgcccatcaggtgatcgttgaggctactgagaatccagtattcgcacacagcacagtggtccatcctgagagcaggcatcacccaccctcaaatccaagacagcagcctcacctggattccgggagtctgcccccagggaggcagggccagcaaccccgccgtgaccctccccgcgaagggctgtggccccctccctataggcctcgcagagatgctttcgagatttccaccgagggtcacagcggaccatctaatcgtgcccggtggggaccccgaggagcaagatcccacaatcctagaaatcccgcatccacagctatgggaagcagtgtccccgggtactgtcaaccaatcaccacagtaacagccagtgcaagcgtgactgtggcagttcacccccctcccgtgcctgggccaggccgtaacccgagagggggcctctgtcctggataccctgagactgatcatggactgtttgaggatccacacgtgccgtttcacgtgcgctgcgaacgaagggacagtaaggtggaagttatagaactgcaggacgtggagtgcgaggaaaggcctcggggaagctcttctaactag

SEQ ID NO: 25507 - DNA, 4146 bp, synthetic construct
  misc_feature 1..4146: note = Description of Artificial Sequence: Synthetic coding sequence
  source 1..4146: mol_type = other DNA
atgggcaaggccaccggccggaaggcccccctgtggctgcgggccaaatttcagcggctcctgttcaaactaggttgctacattcagaagaactgcggtaagttcttggtcgtgggattacttatcttcggtgcgtttgcagtcgggctgaaggcagcaaatctggagacaaacgtggaagagctgtgggtcgaggtagggggtcgagtatcacgggagctcaattacacccggcagaaaataggtgaggaagcaatgttcaatccgcagttgatgatccagaccccgaaggaggaaggcgctaatgtgctcactaccgaagcactgctgcaacatctggacagtgctctgcaggcgtctagagtgcacgtctacatgtacaaccgccagtggaagctcgagcacctgtgctacaagagtggggagctgatcactgaaaccggctacatggaccagatcattgagtacctctacccttgtcttatcatcactccgttggactgcttctgggaaggcgcgaagctgcagtcaggtactgcctaccttctgggaaagcctccgctgaggtggacaaacttcgaccccctggagtttctggaggagcttaagaagataaactaccaagtggatagttgggaggagatgctcaataaagccgaggtgggccacggatacatggatcggccctgcctgaacccagcggatcccgattgccccgccacagctccaaacaagaacagcaccaagcccctcgatatggcactggtcctcaacggcggctgtcatgggctgagtaggaagtatatgcactggcaggaagaactgatcgtcggaggcacggtcaaaaactcaaccggcaaactggtctctgcccacgcactgcagacgatgtttcagctcatgacccccaagcagatgtacgaacacttcaaaggctatgagtatgttagtcatatcaattggaatgaagataaggcggcagcaatcctggaagcgtggcagcggacctacgtcgaagtggttcatcagtctgttgcacagaattctacccagaaggtgctgagctttacaacaacaactcttgatgacatactcaaaagctttagcgacgtgagcgtgattagagtggccagcggctacctgctaatgctggcttacgcatgcctgactatgctcagatgggattgctctaagtcacaaggggcagtcggcttggccggcgtgttactggtagccctttctgtagcagctggactcggactctgctccctgataggaatttccttcaatgctgcaacaacccaggttctgccgtttctcgccctgggcgtgggagtggacgatgtgtttctgctggcccatgccttttcagagaccggccagaacaagagaattccattcgaagataggactggagagtgccttaagaggaccggcgcgtctgtggcattgacctcaatcagcaatgtgaccgccttctttatggctgctctgattcccatccccgccctgcgcgcctttagcttgcaggctgccgtggtggttgtgttcaatttcgccatggtcctgctgattttccccgctatactctccatggacctctaccgccgcgaagaccggcgtcttgatattttctgctgtttcacatcgccatgtgtttctagagttattcaggtggaaccacaagcttatacagatacccacgacaataccagatatagtcctccccccccgtattcctcccactctttcgcccatgagacacaaatcaccatgcagagcaccgttcagctcagaaccgaatacgatccccatacacatgtctactacactaccgctgagcctcggtcagaaattagcgtgcagcccgtgacggtcacccaggataccctttcttgccagagtccggagtcgaccagttcgactcgggacctactctcccaatttagtgatagctcattacactgtctggagccaccctgcacaaagtggacattgtcttcttttgctgagaaacattatgcgccattcctgttgaagccgaaggccaaggtggtggtgatcttcttatttcttggccttctgggtgtgagtctttacggcacaacaagggtaagagatggacttgacctgaccgacattgtgccccgggagacaagagaatacgacttcattgcagctcagtttaagtacttctccttctataatatgtatatagtgacccagaaggccgactaccctaatatccagcacttattgtacgacctacacaggagttttagcaatgtcaaatacgtaatgcttgaagaaaacaagcagctacctaagatgtggcttcattatttccgagattggctccaagggctgcaggacgcctttgattcagactgggaaacaggcaagatcatgccaaacaactacaaaaatggaagcgatgatggggtcctggcatataaactgctggtgcagactggcagtcgggataaaccgatcgacatctcccaactgacaaagcagcgcctcgtggacgccgacggcatcataaatccatccgcgttctacatctatttgaccgcttgggtgtctaatgatccagttgcatatgccgctagccaggctaacattcgtccacacaggccagaatgggtgcacgacaaggccgactacatgcccgaaaccaggcttcggatacctgccgccgaaccgatcgagtatgcccagtttccgttttatcttaacggacttagagacacctcagattttgtggaggcgattgagaaggtgaggacaatttgtagcaactatacttctctcggtctgagctcgtacccaaatgggtacccgtttttgttttgggaacagtacattgggctgcgtcattggctgctcctcttcatctccgttgtgctcgcctgtacctttctggtctgcgcggtgtttctgttgaatccgtggaccgccggcataattgtgatggtcctggcccttatgaccgttgagctcttcggcatgatgggtcttattggcattaagctgtcagctgtccctgtggtgattttgatcgcaagcgttggcatcggcgtcgagtttacagtgcacgtggcactcgcctttttaacggctataggagacaagaacagacgggctgtgttggcgcttgaacacatgttcgctccagttctagacggtgcagtgtcgaccctgctcggcgtcttaatgctggctggaagcgaattcgatttcatcgttcggtatttttttgccgtgctagccattcttaccatattgggcgtgctaaatgggctagtcttattgcccgtgctgctgagcttcttcggcccttatccagaggtgtctcccgccaatggtctcaacagacttccaacaccatctcccgagccacccccatctgtggtgcgcttcgctatgccccctggccacacacactcagggagtgactcttcagatagcgaatacagttctcagaccacagtgagcggcctgagtgaagagctcagacactacgaggcccagcaaggtgccggtggtcccgcgcatcaagtgatagtagaagctacagagaatccggtatttgcacatagcacggtggtacatcccgaatcccggcatcatccgccatctaatcctcggcagcagccccatctggattctgggagcctccccccagggaggcagggtcaacagccacgtcgagatcctcccagagagggcctgtggccacctccatataggccacggagagacgctttcgagatttccactgaaggacatagcggtcccagcaatagagctagatgggggccgagaggcgctcgctcacacaaccctagaaatccagcctccaccgccatgggctctagcgtacccgggtactgccaaccgatcacaacagttactgccagcgcctccgtgacagtcgctgtccatcctccgccggtgcctggcccaggaagaaaccctaggggcgggctttgccctggataccccgagacggaccacggattgttcgaagatccccacgtgccttttcacgtacggtgcgagagacgagatagtaaagtcgaagtcatcgaactgcaggacgtggaatgtgaagagagacctaggggctcctcgtcaaactag

SEQ ID NO: 25508 - DNA, 4146 bp, synthetic construct
  misc_feature 1..4146: note = Description of Artificial Sequence: Synthetic coding sequence
  source 1..4146: mol_type = other DNA
atgggcaaggccaccggccggaaggcccccctgtggctgcgggccaaattccagagactgttgttcaaactcggctgttacattcaaaaaaattgtgggaaatttctcgtggtggggttgctcattttcggcgcctttgctgtgggcctcaaagcagcaaatctagagacaaatgtggaagagctgtgggtagaggtcggcggccgagtcagtcgcgagctgaattatacaaggcaaaaaatcggtgaggaggctatgtttaacccacaattgatgattcagacacctaaggaggaaggagctaatgtgctgacaactgaggccctattgcagcatctggactctgctctccaggcgagcagagtgcatgtctatatgtacaatcgccagtggaagcttgaacacctctgttataagagcggtgagctaatcacggagaccgggtacatggatcagattatcgagtatttatacccatgtctcatcataactcccttagattgcttctgggaaggggcgaaactccagtccggcaccgcttatctgctaggcaaaccacctttgcggtggactaattttgacccccttgagttcctcgaggagctgaagaaaattaattatcaggttgactcttgggaagagatgctgaataaggcggaagttgggcatggatacatggacagaccttgtctgaatccggctgaccccgattgcccggccacggcccccaataagaattctactaagcccctcgatatggctttagtgctcaacgggggctgtcatgggctaagccgaaaatacatgcattggcaggaagagctgattgtgggaggcaccgtgaaaaattcaacaggcaagctcgtgtcagcccatgctctgcagactatgtttcagctgatgacacccaaacaaatgtacgaacacttcaaaggttatgagtacgtgtcccacatcaactggaacgaagataaagctgctgccatactcgaagcatggcaacgcacttatgtagaggtggtacatcagagcgtcgcccagaactccactcagaaggtgctatcgtttaccaccacaactcttgatgacatcctgaaatcattctccgacgtcagtgtgatccgggtcgcgtccggatacttgcttatgctcgcgtatgcatgtctaactatgctgagatgggattgttctaagagtcaaggcgctgtcggcttagcgggagtcctcctagtcgctcttagtgttgccgcaggcttagggctgtgctcactgatcgggatttcttttaatgctgcaaccactcaggttctccctttcttagccctaggcgttggcgtcgacgacgtgtttctgctggcccatgccttctctgaaactggacagaacaagcgaatcccattcgaagaccggactggcgaatgtctgaaaagaaccggcgcgtctgtggcactcaccagtatatctaatgtcaccgcatttttcatggccgcattgatcccaatccctgcgctgagagccttctctctgcaggcagccgtggtggttgtctttaacttcgcaatggtcctcttgattttccctgccatcctgtccatggacctatatcggcgcgaggatcggagacttgacatcttttgttgtttcacatcgccttgtgtcagtcgggtaatccaggtggagccccaggcctatacagatacccatgacaacacccgctatagtccccctcctccatactcttcccacagcttcgcccacgaaacccagatcaccatgcagagcacggtgcagcttcgcactgaatacgacccccatacacacgtttattataccaccgcggagcctcggagtgagatttccgtgcagcctgtgaccgtgactcaggataccctttcatgccaatcccctgagtctacctcttcaaccagggaccttctgtcccagttctcagacagcagcctccactgtctggagcccccatgcactaagtggacgctctccagctttgccgagaaacactacgcgcctttcctcctgaaacccaaggccaaggtggtagtgattttcctcttcctgggactgttgggggttagcctgtacggcacaacacgggtccgagacggcctggatctcacagatatcgtgcccagggaaacccgcgagtatgacttcattgctgctcagttcaaatatttcagtttctacaacatgtatattgtcacccagaaggccgactatcctaatatccagcaccttctgtacgacctccaccgctcattctcaaacgttaaatacgtgatgctcgaggagaataagcagttgcctaaaatgtggctgcactactttcgggattggcttcaggggttacaggatgctttcgactctgactgggaaaccgggaagattatgccaaacaactataaaaatggctccgacgatggcgtcctcgcttataagctccttgtccaaacagggtcccgagataaacctatcgacatttctcagttgaccaaacaaaggttagtcgatgccgacggcattattaatccctcagccttttacatctacctgacagcatgggtgtcaaacgacccagtggcttacgctgccagccaagcgaatattagacctcacaggcccgagtgggtccacgacaaagctgattacatgcccgagacacgcctgcgaattcccgccgctgagcctatcgaatatgcccagttccccttctacctgaatggcctccgggatactagtgattttgtggaggcaatcgagaaagtgcgtacaatatgttccaactatacctctctggggctatcttcctacccaaacggttaccctttccttttttgggaacagtacatcggactccgccactggttgctccttttcatctctgtggtcctcgcttgcacattcctagtgtgcgccgtgtttcttctcaacccctggaccgctggcataattgtgatggttctggcgttgatgaccgtggagttgttcggaatgatggggctgattgggatcaagctcagcgctgtaccggttgtgatccttattgcctcagtgggtatcggcgttgaatttaccgtgcacgtggctttagcctttttgacagccataggcgacaagaatcgtagggccgtcctcgcactcgagcatatgttcgcacctgtgttggatggcgccgtctccactctgctcggggttctcatgctcgctggtagcgagtttgatttcatcgtgcgctatttctttgctgtcctcgcaatcctgaccatcctgggcgttctgaatggtttggtactcttgcctgtgctgcttagcttttttgggccttaccctgaggtaagccctgccaatggactaaaccgcttgcccacgccatctcctgagccccctccttcggtggtgagattcgccatgccccccgggcatactcattcaggaagcgacagttccgacagcgagtacagttcccagacgaccgtgtcggggttgtccgaggaactcaggcactatgaggcccaacagggtgccggcggtccagcccaccaagtgatcgtagaagcaaccgagaaccccgtgttcgcgcacagcacagttgtccacccagaatctcgccaccatcctccttctaaccctcggcagcagccacacctggactctgggtcccttcctcccggccgacagggacaacagccgagaagggaccccccccgcgagggattgtggccacccccttacagaccgcggcgggatgcctttgagatctctacagaagggcactctggtccttcgaatagagccaggtggggcccgcggggggcccgaagtcacaaccctagaaaccctgccagcaccgccatggggtcatccgtgcccggctactgccaaccaataacaacagtgaccgcgtctgccagcgttaccgtggctgtccatccaccaccagtgcctgggcccggtcggaatccacgaggcgggctgtgccccggatatcccgaaaccgaccacggactcttcgaggatcctcatgttccattccacgtgcgctgtgaacgcagagatagcaaagtagaagtgatcgagctgcaggacgtggagtgcgaagagcggccgcgaggtagtagctccaattag

SEQ ID NO: 25509 - DNA, 255 bp, synthetic construct
  misc_feature 1..255: note = Description of Artificial Sequence: Synthetic coding sequence
  source 1..255: mol_type = other DNA
atgggcaaggccaccggccggaaggcccccctgtggctgcgggccaaatttcagcggttgctttttaaactcgggtgttacatccagaagaattgcggtaagttcttggtggttgggctgcttattttcggagcctttgcagtaggccttaaagccgcaaacctcgagaccaatgtggaggagctctgggtggaggaggtgaatctactttgcggaggacagaccagcactctctggaacagctggaagtcttag

SEQ ID NO: 25510 - DNA, 525 bp, synthetic construct
  misc_feature 1..525: note = Description of Artificial Sequence: Synthetic coding sequence
  source 1..525: mol_type = other DNA
atgttcaacccccagctgatgatccagacccccaaggaggagggcgccaatgtacttacgacggaggccttactgcagcatctggactcagccttgcaggcctcacgtgtacacgtctacatgtacaacagacagtggaaactagagcacctatgctacaaatcaggggaactgatcacagagaccggctacatggatcagatcatagaatatctctacccgtgcctgataatcacaccactggactgcttctgggagggagccaagttacaaagtgggactgcttacctcctggggaaacctcctcttaggtggacaaattttgatccactggaatttttggaagagctgaaaaaaattaactatcaggtcgacagttgggaggaaatgctgaacaaggcggaagtgggtcatgggtacatggatcggccatgtctcaaccccgcggacccggattgtccggccactgctcccaacaagaattccaccaagcctctcgacatggcgctcgtgttgaatggctag

SEQ ID NO: 25511 - DNA, 525 bp, synthetic construct
  misc_feature 1..525: note = Description of Artificial Sequence: Synthetic coding sequence
  source 1..525: mol_type = other DNA
atgttcaacccccagctgatgatccagacccccaaggaggagggcgcgaacgtgctgacaaccgaggccctccttcagcacctcgattcagctctccaggctagcagagttcacgtgtacatgtataatcgccagtggaagttagagcacctctgctataaaagtggtgaactgattacagaaacagggtatatggaccaaattatcgagtatctctatccctgtcttatcattacccccttggactgtttttgggaaggggcaaaactgcagtctggcaccgcctatctcctcggcaagcctcctctccggtggacgaacttcgatcccttggagtttctggaagaactgaagaaaataaactaccaggttgatagctgggaagagatgttgaataaggctgaagtgggccacggttatatggaccgaccatgtcttaacccagcagaccctgactgtccagctacggcccccaataaaaatagtaccaagcccctggacatggctttggtcttgaacggttag

SEQ ID NO: 25512 - DNA, 279 bp, synthetic construct
  misc_feature 1..279: note = Description of Artificial Sequence: Synthetic coding sequence
  source 1..279: mol_type = other DNA
atgttcaacccccagctgatgatccagacccccaaggaggagggcgccaatgttctgaccaccgaggcacttctgcagcacctggatagtgctctgcaggcaagtagagtacatgtatacatgtacaacaggcaatggaagttggaacacttgtgttacaagagtggcgagctgataaccgagactggctacatggaccagatcattgaatatctgtacccttgtcttatcatcaccccacttgattgcttttgggaaggcgcaaaactgcaatcctag

SEQ ID NO: 25513 - DNA, 525 bp, synthetic construct
  misc_feature 1..525: note = Description of Artificial Sequence: Synthetic coding sequence
  source 1..525: mol_type = other DNA
atgttcaacccccagctgatgatccagacccccaaggaggagggcgcgaacgtgttaacaaccgaggcacttcttcagcatctggactccgcgctccaagcaagccgagttcacgtgtacatgtacaatagacagtggaaactggagcacctgtgttacaagtctggggagctgatcaccgagacaggatacatggaccagatcattgagtatttgtacccctgcctaataataacacctctcgactgtttttgggagggagcaaaactacaatccgggacagcttacctcctgggcaaacctcctctgcgatggaccaattttgaccccttggagttccttgaggaactgaagaaaattaattatcaggtagacagctgggaggaaatgcttaacaaggccgaagtcggtcacgggtacatggatagaccttgcctgaatcccgcagacccagactgccccgcaaccgccccgaacaagaactcaactaagccactggacatggccttggtccttaacgggtag

SEQ ID NO: 25514 - DNA, 525 bp, synthetic construct
  misc_feature 1..525: note = Description of Artificial Sequence: Synthetic coding sequence
  source 1..525: mol_type = other DNA
atgttcaacccccagctgatgatccagacccccaaggaggagggcgccaacgtcctgactacagaagccctgctccagcatcttgattccgctttgcaagccagcagggtgcacgtgtacatgtacaataggcaatggaagctggaacacctgtgctataagtcgggcgaacttatcacggagactggctacatggatcagatcattgagtacctgtatccgtgcctgattatcactcctcttgattgcttttgggagggggctaaattacagagcgggaccgcttatttgttgggtaagcctccactgcggtggaccaatttcgatcccctggagtttctggaagagctaaagaagatcaattaccaagtggacagctgggaggaaatgctgaacaaggccgaagtgggtcacgggtacatggacagaccgtgtcttaaccctgccgacccagattgccccgcaacagccccaaataaaaactccaccaagccccttgacatggccttggtgctgaacgggtag

SEQ ID NO: 25515 - DNA, 954 bp, synthetic construct
  misc_feature 1..954: note = Description of Artificial Sequence: Synthetic coding sequence
  source 1..954: mol_type = other DNA
atgccccgggaggaccgggccacctggaagagcaactacttcctgaagatcatccagttactggacgattacccgaagtgcttcattgtgggcgccgataacgttggaagcaagcagatgcagcagatccgaatgagccttcggggcaaggccgtagttctgatgggaaagaacacaatgatgcggaaagctatccgcggacatctagagaacaatcccgcgctggaaaagttgttaccacacattcgtggtaacgtgggctttgtcttcaccaaagaagacctgaccgagattagggatatgctcctggctaacaaggtcccagctgcagcacgcgcaggggcaatcgctccctgcgaggttaccgtgccagctcagaatacaggcctcggccctgagaagacgtcttttttccaggccctgggcatcactactaaaatctcgcgaggaacgatagagatcctgtcagatgtccagttaatcaagacgggagataaagtcggggcaagtgaggcgacgctactaaacatgcttaatattagcccttttagcttcggactggtaatccagcaggtttttgacaacggcagcatatacaacccagaagtactcgacatcacagaggagaccctccattcacgttttctcgagggcgtgagaaatgtagcctccgtgtgtttacaaataggttatcctacggtcgcgagtgtaccccatagcatcattaacgggtacaagagagttctggctctgtcagttgaaacagactacactttcccgctcgctgagaaagtgaaggcttttctcgcggatcccagtgcttttgtggccgccgccccagtggccgctgccaccactgccgctcccgccgctgcagctgcccctgcaaaggtcgaagcaaaggaagagtcagaggagagtgatgaggatatgggattcggtctctttgactag

SEQ ID NO: 25516 - DNA, 1818 bp, synthetic construct
  misc_feature 1..1818: note = Description of Artificial Sequence: Synthetic coding sequence
  source 1..1818: mol_type = other DNA
atggacgacctggacgccctgctggccgacctggagagcaccacctctcatataagtaaacgtcccgtgtttctaagcgaagaaacaccgtattcctatcccactgggaaccatacataccaggaaattgccgtcccaccacccgtgcccccgccaccttcaagcgaagctttaaatggcaccatcctggatcccctggaccagtggcaaccgtcctcgagccggtttattcatcagcaaccgcaaagttccagcccagtgtacggctccagcgccaagacttcctctgtgtcaaacccccaggacagcgtgggttcaccttgcagccgggtaggtgaagaggagcacgtgtactccttccctaacaaacagaagtccgctgagccatctcccacagttatgagtactagcctaggttccaacctgagtgaactggacagactcttgctggaactgaacgctgtccagcataacccccctggattccccgcagacgaggctaacagctcccctccattacccggagccctgagtccactgtacggcgtgccggagaccaacagccctctgggcggaaaggcgggaccactcaccaaggagaagccgaagcgcaacggtggccgcggcctggaggacgtgaggccatccgtggaaagtctgctggacgaactcgagtcctccgtgccctctccggtgccagctattaccgtgaatcagggagagatgtccagcccccagagggtaactagcacccaacagcaaacacgcatcagcgccagttctgcaacacgtgagttggatgaactcatggcctctttgtccgacttcaaaggttcttggccgctggaggaagtggtactcctcgtttcaattagcagcagtgtgcaggagggcgagaaatacccacacccgtgtgctgctcgtcaccgtaccccaagcctcagatctcccgatcagcctcctccttgcccacagttcatggcgcagggtaagaccggcagctcttctcctccgggagggcccccaaagccaggttcccaactggatagtatgctgggcagccttcaaagcgatctcaataaactcggcgtggccaccgtcgcaaagggcgtctgtggcgcatgcaaaaaacccatcgccggacaggtggtcacggccatgggaaaaacctggcatcccgaacacttcgtatgcactcactgccaggaagaaatcggctctaggaattttttcgaaagggacggtcagccctactgcgaaaaagactaccataatctgttttcaccccggtgctactactgtaatggtcctattctagataaggttgtgaccgctttagaccgcacctggcaccctgaacactttttctgcgcgcagtgcggcgcttttttcggaccagagggctttcacgagaaggacggcaaagcctattgccggaaggattacttcgacatgttcgcccctaagtgtgggggatgtgcacgcgcaatcttggagaattacatttcagcccttaataccctgtggcatcctgagtgtttcgtttgcagagagtgctttaccccctttgtgaatggttctttcttcgagcatgacggtcagccttattgcgaggtgcattaccacgaacggcgcggatcactctgttccggctgtcagaagccgattaccggtagatgcatcacggcgatggccaaaaaattccatccagagcacttcgtctgtgcattttgtcttaagcagctgaataagggcacttttaaagagcagaacgataaaccatactgccagaattgcttcctgaagttgttctgctag

SEQ ID NO: 25517 - DNA, 702 bp, synthetic construct
  misc_feature 1..702: note = Description of Artificial Sequence: Synthetic coding sequence
  source 1..702: mol_type = other DNA
atgggcaagacctggcaccccgagcacttcgtgtgcacccactgccaagaggaaatcgggagcagaaacttcttcgagagggatggccagccctactgtgagaaggattaccataatttgttctcccctcgatgctattattgcaacggacccatcctcgataaggttgtcactgctctggaccgcacatggcatccggagcattttttctgtgcccaatgtggagccttctttgggcctgaaggcttccatgaaaaagatgggaaggcctattgtagaaaagattattttgacatgtttgcccctaagtgcgggggctgcgcccgggctatccttgagaactacatttccgcccttaataccctgtggcatccagaatgttttgtgtgtcgagagtgttttacacctttcgtcaacggatccttcttcgagcatgacgggcagccgtactgcgaagtccattatcatgaacggaggggctctctgtgttccggttgtcagaagcccatcaccggaagatgtattactgctatggccaaaaaattccaccctgacccgtgtacgagcccacgaaccgggctggcttccactccacactggtctcacttatttctcatattccaacaatgctctcgcggggccggaaagggacgacagggcctgctcggcagcctttttatcctaataccccccccaacatag

SEQ ID NO: 25518 - DNA, 1212 bp, synthetic construct
  misc_feature 1..1212: note = Description of Artificial Sequence: Synthetic coding sequence
  source 1..1212: mol_type = other DNA
atgagcgcccccagcagcaccggcccccagtactgccccggcctgccctctcgcaaagaggcaacccccgaaggtcgaccagaaacttgtctgctgccaagttccccccaggctcagcgacccatacagggcctggaacagcgagcagatggtgaaaggtgctgggccgctggctggcctagagatggcggcaggtcctcaccaggtggccaggacgaaggcggcgggagctggccattggaagaagtggtgctgctcgtgtctatctcaagttcggtacaggagggggagaagtatccgcatccatgtgccgcccggcacaggactccaagtctcagatctccggatcaaccccctccgtgtcctcaattcatggcgcagggtaagaccggatcttctagccctccaggcggccctcctaaaccaggaagccaactcgacagcatgttaggttccctgcagagtgacttgaataaactgggagtggcaactgttgccaagggggtctgcggggcttgcaagaaacccatagcggggcaagttgtgacggctatgggcaaaacgtggcaccctgagcatttcgtctgtacgcactgtcaagaggagatcgggtctaggaacttttttgaacgcgatggacagccatactgtgaaaaggattaccataatttatttagtccaaggtgctactattgcaacgggcccattctcgacaaggtggtgactgcgctcgaccggacctggcatcctgaacattttttttgcgcccagtgtggcgcattcttcgggcccgagggtttccatgaaaaggatgggaaggcatattgtagaaaggactacttcgacatgttcgcccctaagtgcggtggctgcgctcgcgccatcttggaaaactacatctccgctctgaatacactatggcaccctgaatgtttcgtgtgtcgagaatgttttaccccctttgttaacggctcattcttcgagcacgacggtcaaccatactgcgaagtccactaccacgagcgccgtgggagcctatgttctggatgtcagaagcctatcacaggaaggtgcatcaccgctatggccaagaaattccaccctgagcactttgtttgtgccttctgtctgaaacagctcaacaaaggcaccttcaaggaacaaaacgataagccgtactgccagaactgtttccttaagctgttttgttag

SEQ ID NO: 25519 - DNA, 1674 bp, synthetic construct
  misc_feature 1..1674: note = Description of Artificial Sequence: Synthetic coding sequence
  source 1..1674: mol_type = other DNA
atggacgacctggacgccctgctggccgacctggagagcaccacctcgcatatttccaagcggcctgtattcctcagcgaggagaccccttattcctatccaaccggcaaccatacctaccaggagatagctgtgccacctccagtgccccctccaccgagctcagaagccctaaatggcactatccttgatcccctggaccagtggcagcctagcagctcccgattcatacatcagcagccccagagctcaagccctgtttacggctccagtgcgaaaactagcagcgtcagtaaccctcaggatagcgtaggctcgccctgcagccgcgtaggggaggaagagcatgtatactcatttcccaataagcaaaaaagcgctgagccaagcccaacggtgatgtccacgtcactggggtccaacctctctgagttagaccggctgctgctggagctgaacgcagtgcaacataatccacccggattccccgcggacgaggcaaatagtagccctccgcttccaggggctctgagtcccctgtatggtgtcccagagacgaacagcccactcggcgggaaagctggcccattgacaaaagagaagcctaaaaggaatggcggaagggggttggaagacgtgcgtccttcagtggagagcttgctggatgaattagaatcctcagtccccagcccagtgccggctatcactgtgaaccagggggagatgtcttctcctcagagggtgacttcaacccaacagcaaacgcggatttctgcatcaagcgctaccagagaactggatgaattaatggcctcactcagcgattttaaatttatggcgcagggcaagacggggtcaagttctcctcccggtggccccccaaaaccagggtcccaattggattcaatgctggggagtctccagtccgacctcaacaagcttggtgtggctactgtggcgaagggtgtgtgtggcgcatgcaaaaaacctatcgctgggcaggtagtgacggctatgggcaagacatggcatcctgagcattttgtctgcacacattgtcaggaggaaatcggcagtaggaatttcttcgagcgggacggccagccatactgcgaaaaagattaccataatctgtttagcccccgctgttactactgcaatgggccaatcctggacaaagttgtgaccgccctggatcgcacatggcacccagagcacttcttttgcgcgcagtgtggagcattcttcggacccgagggattccatgagaaggacggcaaggcctattgtcgaaaagactatttcgatatgttcgcaccaaaatgcggcggttgcgccagagctatcctggaaaattacattagtgctttgaataccctgtggcatcctgaatgctttgtgtgccgcgagtgtttcacaccattcgtgaatgggtccttcttcgaacacgacggacagccatactgtgaagtacactatcatgagagacgcggatccctctgtagcggttgtcaaaagcccatcaccggtcggtgcatcaccgccatggccaaaaagtttcatcctgaacattttgtctgcgctttttgtttaaaacaactgaacaagggcacctttaaagaacagaacgataagccctattgccagaactgcttcctgaagctattctgttag

SEQ ID NO: 25520 - DNA, 1275 bp, synthetic construct
  misc_feature 1..1275: note = Description of Artificial Sequence: Synthetic coding sequence
  source 1..1275: mol_type = other DNA
atgagcaccagcctgggcagcaacctgagcgagctggaccggctgctgctggaattaaacgccgtgcagcataacccacctggcttcccggctgacgaagctaacagctctccccctctgcctggcgccctgtcacccctgtacggggttcccgaaacaaatagcccactcggaggaaaggccgggccgttgacgaaggaaaaacccaaaagaaatggaggtaggggacttgaggacgtgcgtccatcagttgaatccttattggacgagctcgaatcgagcgtaccaagccctgtaccagcaatcaccgttaatcagggcgaaatgtcttccccccagcgcgtaacctctacccagcagcagacacgcatctccgcttctagtgctacccgtgagctggacgaactgatggcgtctctgtccgatttcaaatttatggcccaaggtaaaacaggttcctcgagtccccctggcgggcctcccaaaccaggatcacagctggacagtatgctgggaagtctacagtccgacctcaataagctcggtgttgcaaccgtggcaaaaggcgtgtgtggggcatgtaagaaacccatcgccggccaggtagtcacagcaatgggtaagacatggcatcctgagcactttgtctgcacccactgccaggaggagattggtagcaggaatttctttgaacgggacggacaaccctactgcgagaaggactaccataatctgtttagcccccgatgttactactgcaatgggccaatacttgataaagtcgtgacagcactagacaggacatggcacccggaacatttcttttgtgcacaatgcggcgccttttttgggccagagggttttcacgagaaagatgggaaggcctactgtaggaaggattatttcgacatgttcgcgcccaagtgcggtggttgcgcccgcgccatcctggaaaattatatcagtgccctcaatacactgtggcatccagaatgctttgtatgcagagagtgtttcacaccgtttgtcaatgggtcattcttcgagcatgacggccagccatattgcgaggtgcattaccatgaacggagagggtccctgtgttccggctgccagaaacccattaccggaaggtgcattaccgccatggcaaaaaagttccaccctgaacattttgtctgcgccttctgtctgaagcaattaaataaggggacgtttaaagagcagaacgacaaaccctactgccaaaattgtttccttaagctattctgttag

SEQ ID NO: 25521 - DNA, 951 bp, synthetic construct
  misc_feature 1..951: note = Description of Artificial Sequence: Synthetic coding sequence
  source 1..951: mol_type = other DNA
atgagcagcccccagcgggtgaccagcacccagcagcagacccggattagcgcatctagtgcgactcgggaactagacgaactaatggcttccctatctgactttaaattcatggctcaggggaaaacaggctcttccagtcccccgggcggccctcctaaaccaggatctcagctcgatagcatgctcgggagtttacaatcggaccttaacaagctgggggttgctacggttgctaaaggggtttgtggcgcttgcaaaaagcctatagccggccaggtggtgactgctatgggcaagacttggcatcccgagcattttgtgtgtacccactgccaagaagaaataggctccaggaacttctttgagagagatggtcagccctactgtgagaaggactaccacaatctgtttagcccaaggtgttactactgcaatggaccaatcctggacaaagtcgtgaccgccctcgacaggacatggcatcctgaacatttcttctgcgctcaatgtggggccttctttggcccagaaggtttccatgaaaaagacggcaaggcctactgccggaaagactattttgatatgtttgcacctaagtgtggaggttgcgcgagggccatactggaaaactatatatccgcgctgaatacattatggcaccctgagtgctttgtctgcagggagtgcttcacaccattcgtgaacgggtcctttttcgaacatgacggtcagccgtattgcgaggtccactatcatgagaggaggggaagcctctgctccggctgtcaaaaacctattaccgggaggtgcattacagccatggcaaaaaagtttcacccagagcatttcgtgtgtgccttttgcctaaagcagttgaacaaaggtacgtttaaagagcagaacgataaaccctactgtcagaactgcttcctgaagctattttgctag

SEQ ID NO: 25522 - DNA, 993 bp, synthetic construct
  misc_feature 1..993: note = Description of Artificial Sequence: Synthetic coding sequence
  source 1..993: mol_type = other DNA
atgccccacagcgtgaccctgcggggccccagcccctggggcttccgattggtgggaggccgagacttttctgccccactgacaatctccagggtgcacgcagggagtaaagccgccctggccgctctatgcccaggcgatttgatacaggccatcaacggtgagtccacagagctgatgacacacttggaagctcagaaccgaataaaagggtgtcacgatcacttgacacttagtgtttcgcgccccgaaggccgatcctggccctccgctccagatgattcaaaggcccaggcgcacaggattcatatcgacccagagattcaagacggctcccccactacctcaagaaggccaagtggcactgggacggggcccgaagatggccgcccctccctcggaagcccctatggacaacctcctagattccccgtgcctcataacggaagcagtgaagcaacgctacccgcacaaatgagcacgctccatgtgagtccaccaccaagtgctgaccccgccagagggctgccgcggtctagagactgcagagtcgatctgggatcagaggtctaccgaatgctgcgagaacctgccgaacctgtagccgctgaacctaaacaatccggttctttcagatatcttcaggggatgctggaggctggtgagggaggcgattggcccggtcctggaggcccacggaacctcaaacccaccgctagcaaattaggtgcgcccttgagtgggctccagggacttcctgagtgtacacgatgcgggcacggtattgttggcacaattgtgaaggcccgcgataagctctaccaccccgagtgtttcatgtgcagcgactgtggacttaatcttaagcagagaggttatttcttcctcgatgaacgtctttactgtgaatctcacgccaaagctagggtgaagcctccagagggctacgatgtcgtggctgtgtaccccaatgctaaggtggaactggtctag

SEQ ID NO: 25523 - DNA, 741 bp, synthetic construct
  misc_feature 1..741: note = Description of Artificial Sequence: Synthetic coding sequence
  source 1..741: mol_type = other DNA
atgccccacagcgtgaccctgcggggccccagcccctggggcttcaggctcgtcggaggacgcgacttttcagctcctctcactatcagtcgggtgcatgctggatctaaagcagctttagccgcactgtgtcccggagacctcatccaggctataaacggtgaatctacagaactcatgacacatctcgaggcccagaatcggatcaaaggatgccacgatcacttgacactctcagttagccggcccgaaggcaggtcttggccctctgctccagacgatagtaaggcccaggcccacaggattcatatcgatccagagatacaggatggatctcccaccacctcccggagacctagcgggactggaacaggccccgaggacggaagaccttctctaggctctccttatggccagccccctcgatttcccgtcccccacaacgggtcttcggaagccaccctgccagcccagatgagtactctacatgtaagtccccccccttccgctgacccggccagaggccttcctagatcccgagactgcagggtcgatctgggctccgaagtgtatcgcatgttgcgggagcccgccgaaccagttgccgccgaacccaaacagtccgggtctttccggtatcttcagggcatgctcgaagcaggggagggcggcgccccatcatctcgacacggtactagcagcacaatacctagtgccagttgtgccgtcacagccgcctag

SEQ ID NO: 25524 - DNA, 1791 bp, synthetic construct
  misc_feature 1..1791: note = Description of Artificial Sequence: Synthetic coding sequence
  source 1..1791: mol_type = other DNA
atgagcaactacagcgtgagcctggtgggccccgccccctggggcttccgactacagggtggcaaggacttcaatatgcccttaactatttcttccctgaaggacggtggcaaggccgctcaggctaatgtacgcatcggcgatgtggtgctgtcaatagacggaataaacgcccagggcatgacacatcttgaagcgcagaataagataaaaggatgtacaggttccttgaacatgacacttcagagggcatccgccgctcccaaacccgaaccggtccctgtgcagaagggtgaacctaaagaagtggtcaagccagtccccattacctcaccagctgtgagcaaggtgacatccaccaataacatggcttacaacaaagcacctaggccttttgggagcgtgtcctccccgaaggtaactagcatcccctcccctagcagtgcgtttacccctgcccacgcaaccacgagttctcatgcttccccatctcctgtcgccgcggtaacacctccgctcttcgctgcctctgggctacacgctaacgccaacctatccgcagaccagtctccatctgcactcagcgcaggaaagacggccgtcaacgtgccaaggcagcccaccgtgacttcagtgtgttccgaaacttcacaggaactggcagaaggccagcggcgaggctcgcagggcgacagcaaacagcagaacggaccacccagaaagcatatcgttgagaggtacactgagttctaccatgtgccgacacactccgacgcctcaaagaagaggctgattgaggataccgaagactggcggcctcgtaccggtaccacccagtcacggagctttcggatcttagcccagattacaggaacagagcacctgaaggaaagtgaagcagataatacaaagaaggcaaataacagtcaggaacccagcccccagctggcatcctccgtggcctccaccagaagtatgcccgagtctctggatagccccacatccggcagaccaggcgtcaccagtctgacggccgcagccgccttcaagccagtaggctcaacaggggtcattaaatctccttcttggcagagaccaaatcagggggtcccaagcaccggtaggatctctaactctgccacctactccggttcggtggcgccagccaattccgcactagggcagacgcagccatccgaccaggataccttggttcagcgcgcagaacacatccctgcaggcaaaagaacacccatgtgcgcacattgcaaccaggtaatccgtggtcctttcctcgtggctctgggtaaatcgtggcaccctgaggaattcaactgtgcacactgtaaaaataccatggcctacatcggattcgtcgaagagaaaggcgcattatactgcgagctctgctacgaaaagttctttgcccccgagtgtgggcgatgccagcgaaagattctgggggaggtgattagtgcgctcaagcaaacctggcacgtgtcttgcttcgtgtgtgtggcctgtggaaaaccaatacgtaacaatgtattccatcttgaggacggcgagccttattgcgaaacggattactatgcgctgtttggaaccatctgtcatgggtgcgagtttcccatcgaggcaggtgatatgtttctggaagccctcggttatacttggcacgacacctgcttcgtgtgctccgtctgctgtgaatcactggaaggtcagacttttttctccaaaaaggacaaaccgctgtgcaaaaaacacgcacacagtgtgaatttctag

SEQ ID NO: 25525 - DNA, 645 bp, synthetic construct
  misc_feature 1..645: note = Description of Artificial Sequence: Synthetic coding sequence
  source 1..645: mol_type = other DNA
atgagcaactacagcgtgagcctggtgggccccgccccctggggcttcagattgcaagggggcaaagatttcaacatgcctcttactattagctctttgaaggacgggggtaaggccgctcaggcgaacgttcgcatcggtgatgttgttttgagtattgacggtatcaacgcacaagggatgactcatctcgaggcgcaaaataaaattaagggctgtaccgggagcctgaacatgacccttcagagggcgtccgccgcacctaagcccgaaccggtgccggttcagaagaagacacaggtgacgaataatcccggcactgttaagattcccccaaagcggcccccacgcaagcatattgtggagcgctacaccgagttctatcacgtgcctactcattccgatgctagcaagaaacggcttatagaggataccgaggattggaggcccagaacaggaaccacccagagccggtcatttagaatcctggcccagataacagggaccgagcatctgaaggagtccgaggcggataatactaaaaaggccaaggagaagattcccctgcacgtgttttcgcctaagtatacaaagctacgtgattggcaccatgaagttagtgcacgtgccctgaacgtgcagtag

SEQ ID NO: 25526 - DNA, 705 bp, synthetic construct
  misc_feature 1..705: note = Description of Artificial Sequence: Synthetic coding sequence
  source 1..705: mol_type = other DNA
atgagcaactacagcgtgagcctggtgggccccgccccctggggctttagattgcaaggaggcaaggactttaacatgccacttactatctcatctctgaaagatggtgggaaggctgcgcaggccaatgttagaatcggagatgtggtgttgtctatagatggcataaatgcacagggtatgacccacctggaagcccagaataagatcaagggatgcacgggtagcctgaatatgacactacaaagggcaagcgccgcccccaaacctgagccggtcccagtacagaagcctacggtgacatctgtctgttcggaaacctcccaggagttggccgaaggacagcgccgcgggtcccagggggattccaaacaacaaaacggtaagatcccccctaaaaggcctcccagaaagcacattgtggaacggtataccgaattttatcatgtgccgacccacagtgatgcttccaaaaaacgcctgatcgaggacactgaggattggcgacccaggaccggtactacccaatctcgtagctttcgcattctagcgcagatcactgggaccgagcacctgaaggagtccgaggctgacaataccaaaaaagctaaggagaagatcccgctgcacgtgttcagcccaaagtacaccaaattgcgggactggcaccatgaggtgtcagcccgggctctcaatgtccagtag

SEQ ID NO: 25527 - DNA, 1464 bp, synthetic construct
  misc_feature 1..1464: note = Description of Artificial Sequence: Synthetic coding sequence
  source 1..1464: mol_type = other DNA
atgagcaactacagcgtgagcctggtgggccccgccccctggggcttccggctgcagggcggcaaggattttaacatgcccttgacaattagtagcttgaaagacgggggtaaggcggcgcaggcaaacgtgcgaatcggagacgtggtcctgtctatagatgggatcaacgcccagggaatgacgcatctagaggcacagaacaagatcaagggttgcactggaagtctgaatatgactctgcagcgagctagcgcagctcccaagccagaaccagttcctgttcagaaacctacagttacatccgtgtgttctgagacatcgcaggagttagctgaaggccagagacgcggatcacagggagacagcaagcagcagaatggcccaccgcggaagcacattgtcgagcggtatacggaattctatcatgtccccacgcacagtgacgcttcaaagaaaaggttgattgaggacacggaggactggcggcctaggaccggaactacccagtctcgatcttttagaatcttggctcaaattacaggaaccgagcacctgaaagagtctgaggctgataatacaaagaaagctaataacagtcaagaaccatcgccacagctggcaagcagcgtcgcttcaacccgatccatgcccgagtccctggactcgccaacttccggccgacctggggtcaccagcctgaccgccgcagctgccttcaagcctgtcggctcgactggtgtgattaaatctccctcttggcagcgacccaaccaaggcgtgcctagcacgggccggatatcgaacagcgccacgtattctggcagtgtcgctcccgctaatagtgctctggggcagacacagccatccgaccaggacacgctggttcaaagagcggagcatatcccggctggcaagagaacacccatgtgcgcccactgtaaccaggtaatcagaggtccctttctcgtcgcactgggcaagagttggcatccagaagagttcaattgcgctcactgtaaaaatactatggcttatattgggtttgtggaagaaaagggggccctgtattgcgaactgtgctacgagaagttcttcgcgccagaatgcggccggtgccaaagaaagatactcggcgaggtcatttcagcccttaaacaaacctggcatgtgtcctgcttcgtgtgcgtcgcctgtgggaaaccaatccggaacaatgtttttcatctggaggatggagagccctactgtgagaccgactattacgctttgttcggcacgatctgccacgggtgtgaatttccaatcgaggctggagatatgtttctcgaggcgctgggatacacatggcacgatacatgtttcgtgtgctccgtctgttgtgaaagcctggagggccagacattcttcagtaaaaaggacaagccactgtgcaaaaaacatgcccactccgtaaacttttag

SEQ ID NO: 25528 - DNA, 705 bp, synthetic construct
  misc_feature 1..705: note = Description of Artificial Sequence: Synthetic coding sequence
  source 1..705: mol_type = other DNA
atgagcaactacagcgtgagcctggtgggccccgccccctggggcttccggcttcagggcggaaaggatttcaacatgcccttgaccatcagtagtctaaaggacggtgggaaggccgcccaagccaatgtgcggattggtgatgtggtgctttccattgatgggatcaacgctcagggaatgacacacctagaggcccagaacaaaattaagggatgtacgggaagtctcaacatgacactgcagcgggccagtgctgctccaaagcctgagccggtccctgtgcagaagcctaccgtgacaagcgtgtgctccgagacgagccaggagctggccgagggacagaggcgtggaagccagggggatagcaaacaacagaatggtcctgtgcccaggaagatccctccgaggaagcacattgtggagaggtacacagagttctatcatgtgcccactcacagtgatgctagcaagaagcggttaatagaggatacagaggattggaggccccgcacaggaaccactcaaagccgttcttttcggatcctagcacagattaccggtactgagcatctgaaggagtctgaggcggacaatactaagaaggctaaggagaaaatccccctccatgtcttctccccgaaatacacaaaactgcgggactggcaccatgaggtttcagcccgagcactaaatgtgcagtag

SEQ ID NO: 25529 - DNA, 645 bp, synthetic construct
  misc_feature 1..645: note = Description of Artificial Sequence: Synthetic coding sequence
  source 1..645: mol_type = other DNA
atgagcaactacagcgtgagcctggtgggccccgccccctggggctttagactgcagggcggaaaggattttaacatgcccctcacaatctcttctctcaaggacggtggaaaggcagcccaggccaacgtgcgcatcggtgacgttgtgctttcaattgacggcatcaacgcccagggcatgacacatctcgaagctcaaaacaagatcaaaggatgcacagggtccctgaatatgaccttgcaaagagcttccgccgccccaaaacccgagcctgtgcccgtgcagaaggtcactcaaaaacgcgagtcacgaagctctaggcgcactgcacccggcctgccgcccaggaaacacattgtggaaagatacaccgaattctaccatgtgccaacacactctgacgcatccaaaaagagactgatcgaggacactgaagattggagaccccggaccggaaccacccagagccggtctttccggattctggcgcagatcactggcactgaacatctcaaggagtctgaggccgataatactaaaaaggcaaaggagaagattcctctgcacgtattttctcctaaatacacgaagttacgggattggcatcatgaagtgtccgctcgggctctcaacgtgcagtag

SEQ ID NO: 25530 - DNA, 1425 bp, synthetic construct
  misc_feature 1..1425: note = Description of Artificial Sequence: Synthetic coding sequence
  source 1..1425: mol_type = other DNA
atggcctacaacaaggccccccggcccttcggcagcgtgagcagcccgaaagtgaccagtattccctcaccctcaagtgctttcactcccgctcatgcaactacctcatctcacgccagtccctctccagtagcagctgtcactccacctttgttcgcggcctccggtctccacgccaacgccaacctatctgccgaccagtctccgtcagcattgagtgctgggaaaacagccgtcaatgtgcccagacaacccactgtaacatccgtctgctccgagaccagccaggagttagcagagggtcaacggcgcggctcccagggggattccaaacagcagaatggaccccctcgcaagcacatcgtggagcgctatactgaattctatcacgttcctacacactcagatgccagcaagaagcgccttatcgaagacaccgaggattggagacctaggacggggaccacacagagtcggtctttccggattctggcacaaatcacaggtaccgagcatcttaaagagtctgaggccgacaataccaaaaaggcaaacaatagccaggagccctccccccagctggcctccagcgtggcctccacccgttccatgcccgaatccctggactctcccacctcgggcagaccaggcgtgacaagcctgacagcagcagcggcatttaaaccagttggttccacaggcgtgataaagtctcccagctggcagcgccctaaccagggcgtcccaagcaccggtcgaataagtaattccgccacttattcgggtagcgttgcccccgccaactctgcactcgggcaaactcagccctctgatcaggacacgctcgtacagcgtgctgaacacattccagccggcaaaaggactcctatgtgcgcccactgtaaccaggtcattaggggaccctttctggtggccctaggcaagtcatggcaccccgaagaattcaattgtgcccattgcaagaatactatggcatatatcggcttcgtggaggagaaaggagccttgtactgcgagctgtgctatgagaaattttttgcgcccgagtgtggcaggtgtcagagaaagatcctcggcgaggtaattagcgcgctcaaacagacttggcatgtatcctgtttcgtgtgtgtcgcctgtggcaagcccattaggaacaatgtgtttcatctggaagacggtgagccttactgtgagactgactactacgctctctttggcacaatttgtcatggatgtgagttccctattgaggccggggatatgtttttggaggccctgggatacacatggcacgatacctgcttcgtctgttccgtgtgctgtgagagtctggagggtcagacttttttcagcaagaaagacaagccactatgcaagaaacacgcgcattctgttaacttttag

SEQ ID NO: 25531 - DNA, 411 bp, synthetic construct
  misc_feature 1..411: note = Description of Artificial Sequence: Synthetic coding sequence
  source 1..411: mol_type = other DNA
atgagcaactacagcgtgagcctggtgggccccgccccctggggcttcagactgcagggggggaaggatttcaacatgccacttacaatatcctctgccggggtccagtggcgtaatttaggcagtccacaacctccgagtcccgagttcaagagattctcatgcttgtctcttccttcctcctgggattaccgccacgtgcctccgaggctggctaacttcgttttcctggttgagaccaagttcccctacgtaggtcaagccggcttagaactgcccacctctggcgacctgcctacttccgccagtcaatcggcgaagatcacaggagtgtctcaccgcgcatggccgacgctcttctatacactgcttttcttcgccactatttaccctgaaatcattctctactag

SEQ ID NO: 25532 - DNA, 669 bp, synthetic construct
  misc_feature 1..669: note = Description of Artificial Sequence: Synthetic coding sequence
  source 1..669: mol_type = other DNA
atggacagcttcaaggtggtgctggagggccccgccccctggggctttcgactccaggggggcaaggacttcaatgttcccctgtcaatcagtcgactcacgccagggggcaaggcagcccaggccggagtggctgtcggcgactgggtgttatcaattgacggagagaatgcagggtcacttacgcacatcgaggctcagaacaaaattagagcctgcggcgaacgtttgtcactgggtcttagccgggcccaacctgtgcagtctaaacctcaaaaagcttcagctccggccgctgaccctcccaggtatacttttgccccatctgtatctcttaataaaaccgcgcgaccattcggggccccaccgcctgccgactctgctccacagcagaacggccagccacttcgccctctcgtgcctgatgccagcaaacagcgtctaatggagaataccgaagattggcgccctaggcccggaacaggacaaagtaggagtttccgtattctcgcccatctaaccgggacagagtttatgcaagatcccgacgaggagcacttaaagaaaagccgtgaaaagtacgtgctggaactccagagtccgaggtacacacggctgagagactggcatcaccagcgctcagctcacgtcctcaacgtccagagttag

SEQ ID NO: 25533 - DNA, 1374 bp, synthetic construct
  misc_feature 1..1374: note = Description of Artificial Sequence: Synthetic coding sequence
  source 1..1374: mol_type = other DNA
atggacagcttcaaggtggtgctggagggccccgccccctggggctttcgtctgcaaggagggaaggactttaacgtgcccctgtcaattagccgcctgactcccggcggaaaagccgcacaggctggtgtggccgtgggtgattgggtgctcagtattgatggagagaacgctggcagcttaacccatatcgaggcacaaaataaaattcgcgcctgcggggagagactttcactgggactttcgagggcccaacctgtgcagtctaaacctcagaaagcttcggcacctgcggcagacccgccccggtatacctttgcccccagcgtctctctgaataaaactgcccgaccgttcggggcccctccacccgcagattccgccccccagcagaacggccagcccctgagacccctcgttcccgatgccagtaaacaacgcctgatggaaaatacagaagactggagaccacggcccggaaccggacagagcaggtctttcagaattctggcacatcttacaggtactgagtttatgcaggaccctgacgaagagcacctgaagaagtcgtcccaggtcccccgaaccgaggcccccgcccccgcttcatccacaccccaggagccctggcctgggcctaccgcaccctcccccacctcccgccctccatgggccgtcgaccctgcgttcgccgaacgctatgctccggacaagacgagcactgttctgactaggcattctcagcccgctacacctaccccgcttcagtcccggacaagcatcgtgcaagcggcagccggcggtgttcccggcggaggcagcaacaatggcaagaccccagtatgccaccaatgtcataaggtgattcggggacgttatcttgtggctctcggccacgcataccatccagaagagtttgtctgtagtcaatgcggaaaagtgctggaagagggaggctttttcgaagagaaaggggcaattttttgtcctccatgctatgatgtgagatacgcccctagttgcgccaaatgcaaaaaaaagatcacgggagaaattatgcacgcacttaagatgacctggcacgtgcactgttttacttgtgccgcatgcaagaccccaattcgtaatcgagctttctatatggaggaaggcgtgccctattgtgagcgggactatgagaagatgttcggaaccaagtgccacggttgtgatttcaaaattgatgctggggacagattcttggaagccctaggcttctcctggcatgacacatgttttgtatgcgcaatttgtcagatcaacctggaaggcaagactttctactcaaagaaggataggcccctatgtaagtctcacgccttctcccatgtttag

SEQ ID NO: 25534 - DNA, 864 bp, synthetic construct
  misc_feature 1..864: note = Description of Artificial Sequence: Synthetic coding sequence
  source 1..864: mol_type = other DNA
atggacagcttcaaggtggtgctggagggccccgccccctggggctttagactgcaagggggtaaagatttcaatgtcccgctctctatatctcgccttacacccggtggtaaggcggcgcaagccggcgttgctgttggcgactgggtactctccatcgacggagagaacgcagggtctctgacacacattgaagcccagaacaagatcagagcctgcggagaaaggctgtccttgggcctgtctcgagcccaacccgtccagtcaaagccccaaaaagctagcgctccggcagccgacccacctagatatacctttgccccgtctgtgagcctcaataagacagcaagacctttcggcgccccacccccagcagattcggcgccccaacagaacggacagcctctgaggccactggttcccgatgcatccaagcagcggctgatggagaatacagaggactggcgccctcgccccggcacggggcagtcacggtccttcagaattttagcacacttgacgggcacagaattcatgcaggatcccgacgaggaacacctgaaaaaaagcaggccttaccgtccacagccataccagcccccagccctgggatgtggaccatgtgtttgtagggccctgtgtcccgggcaaaatgagcattccgccgaccccgcccaaccagccggacatgcccacgctgccgcagagccacacctgcactgcgctgggagttgcagaagaggagcccgccgggggcaacagcagaggcaggattcccgggtgtcccccgttccacaagggcacccaggaccgctgccaggtggcgccggccccagggtgccccctgggggggtgtgcgtgtag

SEQ ID NO: 25535 - DNA, 1272 bp, synthetic construct
  misc_feature 1..1272: note = Description of Artificial Sequence: Synthetic coding sequence
  source 1..1272: mol_type = other DNA
atggacagcttcaaggtggtgctggagggccccgccccctggggcttcaggctgcagggaggcaaagactttaatgtacctctcagtattagcaggcttaccccagggggcaaggcagcacaggctggcgtggccgtgggggactgggtactgtcgattgatggagaaaacgcaggctccctgactcatattgaggctcaaaataagattcgggcttgtggtgaacggctatcacttggcctgagcagagcgcagccggtgcagagcaaacctcagaaggtccagacgccagacaaacaaccattgcgaccgctagtgcccgatgcgtcaaagcagcgtcttatggagaacacagaggactggagaccgcgacccgggactggccagtcacggtccttccgcattctggctcatctgaccgggactgagttcatgcaggatcccgatgaggagcacctcaaaaaatctagccaggtaccccgtacagaggcccctgccccagcaagtagtaccccgcaagaaccctggcccggccctacggccccatctcctacatccagacctccttgggcagtggatccagcctttgctgagcggtatgcccccgacaagacctctacagttcttacacggcacagccagccagccactcccacgcctctgcagagtcgcacaagtatcgtgcaggcagcagccggcggagtgcccggcggaggctctaacaatggaaagacgccggtttgtcaccagtgtcataaggtgattagagggcgctacctcgtcgcgctgggccatgcttatcacccagaagaattcgtgtgtagccaatgcggaaaagtgttggaagagggcggctttttcgaggagaaaggcgcaatcttctgccccccttgctatgacgtccgctacgcaccctcatgtgctaagtgcaagaagaagattaccggagaaatcatgcacgcattgaagatgacatggcacgtgcactgcttcacttgtgctgcatgtaaaaccccgattcggaacagagccttctacatggaagagggagtcccatattgcgaaagggactacgaaaaaatgttcgggaccaagtgtcatggatgcgattttaagattgacgctggagatcgcttcttggaggctcttggcttttcctggcacgacacttgctttgtttgcgcaatctgccaaatcaatcttgaaggtaagaccttctacagtaaaaaggacaggcctttgtgtaaaagccacgccttttctcacgtctag

SEQ ID NO: 25536 - DNA, 522 bp, synthetic construct
  misc_feature 1..522: note = Description of Artificial Sequence: Synthetic coding sequence
  source 1..522: mol_type = other DNA
atggacagcttcaaggtggtgctggagggccccgccccctggggctttcgcctccaggggggcaaagatttcaatgtgcccttgtcgataagtagactcactcccggtgggaaggcggcgcaggccggggtggccgtaggggactgggtcctgagcattgacggtgagaacgcgggatccctcacccacattgaagcgcagaacaagataagggcctgcggcgagagactctccttgggcttgagtagggcacagcccgtgcaatccaagccgcagaaggcatctgctccagccgcggacccccctagatacaccttcgcaccttctgtgtccctgaacaagactgcaaggccttttggcgccccacctcccgctgactccgctccccagcaaaacggccagcccctgcggccccttgtccccgatgcatcgaagcagaggctgatggagaatacagaagactggcgtcccagacctggaacgggacaatccagatctttccggattctggctcacctctag

SEQ ID NO: 25537 - DNA, 273 bp, synthetic construct
  misc_feature 1..273: note = Description of Artificial Sequence: Synthetic coding sequence
  source 1..273: mol_type = other DNA
atggacagcttcaaggtggtgctggagggccccgccccctggggctttcgattgcaaggagggaaggattttaatgtgcctcttagcattagccgcctcacgcctgggggaaaagccgcccaggctggtgtggccgtgggcgactgggtcctgtcaattgacggagagaacgcagggagcttgacgcacattgaagctcagaacaagattcgggcctgcggcgagcggttaagcctcgggctctctagggcccagcccgttcaaagcaagtag

SEQ ID NO: 25538 - DNA, 492 bp, synthetic construct
  misc_feature 1..492: note = Description of Artificial Sequence: Synthetic coding sequence
  source 1..492: mol_type = other DNA
atggccgacgaggagaagctgccccccggctgggagaagcggatgagtcgctcctcaggcagggtatactattttaaccacatcaccaatgcctcacagtgggagcggccaagcggcaattcgtcctctggtggaaaaaatggccaaggggaaccagcacgggtaagatgcagtcaccttctggtgaaacactctcagagccgaaggccctcctcatggaggcaagaaaaaatcactcgaaccaaagaagaggccttagagctgattaatggatatatccagaaaatcaaaagcggggaggaggatttcgaaagtttagcaagccagttctctgactgctccagtgctaaggctcgcggtgatctaggcgccttttctcgcggtcagatgcaaaagccgtttgaggatgcctcttttgccctgcgaacaggtgaaatgagtgggccggtgttcaccgattccggcattcatataattttgcgcaccgagtag

SEQ ID NO: 25539 - DNA, 138 bp, synthetic construct
  misc_feature 1..138: note = Description of Artificial Sequence: Synthetic coding sequence
  source 1..138: mol_type = other DNA
atgcagaagcccttcgaggacgccagcttcgccctgcggaccggcgaaatgtccggcccggttttcactgactccggcattcacatcatccttagaactgagtgctggagacagacccggggccctaactgcttttag

SEQ ID NO: 25540 - DNA, 438 bp, synthetic construct
  misc_feature 1..438: note = Description of Artificial Sequence: Synthetic coding sequence
  source 1..438: mol_type = other DNA
atggccgacgaggagaagctgccccccggctgggagaagcggatgagcaggtcaagcggaagagtgtattactttaatcatatcacaaatgcttcacaatgggaacggccgagcggcaattcaagcagcggcgggaagaacggacaaggcgagcccgcccgcgttcgttgtagccacctgctggtgaagcattctcagagcagaagacctagttcctggaggcaagaaaaaatcactaggactaaagaagaagctctagaattgatcaatggctacatccagaagatcaagagcggtgaagaggatttcgagagcctggccagccagttcagcgactgcagttcagctaaggcccggggggatctaggtgccttttctcggggcgcacagggcatgggtctcactcgcctcggcgatccgtaccaccctgagggatag

SEQ ID NO: 25541 - DNA, 561 bp, synthetic construct
  misc_feature 1..561: note = Description of Artificial Sequence: Synthetic coding sequence
  source 1..561: mol_type = other DNA
atgaccatggtggacaccgagatgcccttctggcccaccaacttcggcatatcctctgtggatttaagcgttatggaggatcattcccacagctttgacatcaaaccttttactaccgtagacttttcctctatcagcacaccacactacgaggacatcccatttacaagaactgatcccgtcgtggctgattataaatatgatctgaaactgcaggaataccagtctgcaatcaaggtagagcctgcgtcccctccgtattactcagagaagacccagctgtacaataagccccacgaggaaccatcaaacagtctaatggccatagagtgccgggtttgcggcgacaaggcctcaggctttcattacggtgttcacgcttgcgaaggttgcaaaggattttttcgtcgcaccattaggctgaagttgatctacgaccgctgcgacctgaattgtaggatacacaagaaaagtcgtaataagtgccagtactgcaggtttcagaaatgtctggccgtgggcatgtcccacaatgaggagttacagaaggactcctactag

SEQ ID NO: 25542 - DNA, 1752 bp, synthetic construct
  misc_feature 1..1752: note = Description of Artificial Sequence: Synthetic coding sequence
  source 1..1752: mol_type = other DNA
atgggcggcctggagaagaagaagtacgagcggggcagcgccaccaattacattacccggaacaaagcacgcaagaaattacagctttcacttgcagacttccggcgattatgtatcctgaaagggatctacccacatgagccaaaacacaaaaaaaaggtaaataaaggtagcacagccgcgagaactttttatctaataaaggatattaggtttttgttacatgagcccatagtgaacaaattccgcgagtacaaagtgttcgtgaggaagcttaggaaggcatatggcaaaagtgaatggaacactgtggagagactcaaggataataagcctaactataagctcgaccacatcatcaaggaaagataccccaccttcatcgatgccctgagggatcttgatgatgcactgtcaatgtgctttttattctcaaccttcccaagaactggcaagtgccacgtacaaacaatacagttgtgccgtcgcctcactgtcgagttcatgcactacattatagcagctagggccttgaggaaggtcttccttagcatcaaaggaatttactatcaagccgaagtgctgggccaaccaatcgtatggatcacaccatatgcgtttagccatgatcatccgacagacgtggattatcgggtgatggcgacttttactgagttctatacaactctcctcggattcgtgaacttcaggctgtatcagctactaaacttacattatccccctaagctggagggtcaagcgcaggctgaagctaaagcgggggagggaacttatgcactggactccgagtcctgcatggagaaactcgcggcactatcagcttccttggcccgagtagtggtgcctgctaccgaggaagaagcagaagtggacgagtttcccactgacggcgaggaagaccgccgaaaggaattggaagcccaagagaagcacaagaaactcttcgagggtctaaagttcttcttaaatagggaagtgccccgtgaagctctggcattcattatcaggtcttttggtggcgaggtctcatgggacaagagcctgtgcattggtgcaacctacgacgtgaccgattcaaggattacccaccagattgtggaccggccaggccagcagaccagtgtgattgggcgatgctacgtgcagccccagtgggtgttcgatagcgttaatgcccggctccttctcccagtggctgaatatttctcgggcgtgcaactgcccccccacctatctccattcgtgaccgagaaggagggagattacgtcccgcccgagaagctgaagctgctcgccttgcagaggggagaggacccagggaacctcaatgaatcagaggaagaagaggaggaggatgacaataacgaaggcgatggggacgaagagggtgaaaacgaggaagaggaagaggatgccgaggcgggctcagaaaaggaagaagaggccagactcgcggcgctcgaagaacagagaatggagggtaaaaagcctagagtgatggctggcactttaaaattggaggataaacagagactcgctcaagaggaggaatccgaagctaagcgattggctattatgatgatgaagaagagggaaaagtacttgtatcaaaagatcatgttcgggaaaagacggaaaattcgggaagccaacaaactggccgagaagcgaaaagctcacgacgaagcagtccggtctgagaaaaaagcgaaaaaggcgagaccagaatag

SEQ ID NO: 25543 - DNA, 1767 bp, synthetic construct
  misc_feature 1..1767: note = Description of Artificial Sequence: Synthetic coding sequence
  source 1..1767: mol_type = other DNA
atgggcggcctggagaagaagaagtacgagcggggcagcgccaccaactatattacaagaaataaagctaggaagaaactccagctgtctcttgccgattttaggcgcctgtgtattcttaaaggtatctatcctcatgagccaaaacacaaaaaaaaggttaacaaaggctccactgccgctcgcaccttctatttaattaaggacataaggtttttgttgcatgagcctatcgtaaacaaattccgggagtataaggtctttgtaagaaagctccggaaagcctacgggaaatctgaatggaacacagtggagaggctgaaggacaacaagccaaattacaaactcgatcatattattaaagagcggtatcctactttcatcgacgctctcagagatctggacgacgccctgtctatgtgctttcttttctcaacttttcctagaacagggaagtgtcacgtgcagacaatccaattatgccgccggttgactgtggaatttatgcactatatcatcgctgctcgggctctgagaaaagtttttctttccattaagggtatatactatcaggcagaagtccttggccagccaatcgtgtggattaccccctacgcgttctctcatgatcacccgaccgatgtggattacagagtcatggccactttcaccgaattttataccaccttgctcggatttgttaactttaggctttatcaattgcttaacctacactatcccccaaagctcgaggggcaggcccaggctgaggcgaaggctggcgagggcacttacgcacttgacagcgaatcctgcatggaaaagctcgcagccctctctgcctccctcgctcgcgtggtggtgcctgccactgaggaggaggctgaggttgatgagttcccaaccgacggtgagatgagcgcacaagaagaagatcgtcgcaaagagctagaagctcaggagaaacataagaagctgtttgaagggctgaagttcttcttgaatagggaggtccctcgtgaggcactggcctttatcatccgtagttttgggggagaagtgagctgggacaagtcgctctgtatcggagccacctatgatgtgacagattctagaatcacacaccagatagtggatcggccgggtcagcaaacatctgtgatcggcaggtgctacgttcagcctcagtgggtgtttgacagcgtaaatgcacgcctgctgttacccgtggcggaatacttttcgggcgttcagcttcctcctcatctgtccccgttcgtcacagaaaaagaaggagattatgttcctccggaaaagcttaaactcctcgcactgcaaagaggagaagaccctggcaacttgaatgagtcagaagaggaggaggaggaggatgataacaatgaaggagatggcgacgaggagggagagaacgaggaagaggaggaggatgcagaggctggctctgaaaaagaggaggaggcccgcttggccgccctcgaagaacagcggatggaagggaaaaagcctcgagtgatggccggcaccctgaagctcgaagacaaacagcgtcttgcacaggaggaagagtctgaggctaagaggctggccatcatgatgatgaaaaaacgtgaaaagtacttgtaccagaagatcatgtttgggaagaggcgaaaaatccgcgaggccaacaaactcgcagaaaagagaaaggcccacgacgaagccgtcaggtctgagaagaaggccaaaaaggcacggccagagtag

SEQ ID NO: 25544 - DNA, 1350 bp, synthetic construct
  misc_feature 1..1350: note = Description of Artificial Sequence: Synthetic coding sequence
  source 1..1350: mol_type = other DNA
atgtgcttcctgttcagcaccttcccccggaccggcaagtgccacgtccaaaccattcagttgtgtcgacggctgacagtagaatttatgcactatataattgccgccagagccctgcgcaaggtgttcttatctatcaaggggatttactatcaggccgaggtgttaggccagcctatcgtttggattacaccttatgcatttagccatgaccacccaactgacgttgattacagagttatggccacttttacggagttctataccacacttcttggatttgtgaactttcggttgtaccagctactgaatttgcactacccgcccaagttggagggccaggctcaagccgaggctaaagcaggggaaggaacatacgccctagactccgagagctgtatggaaaaactggccgctttgtcagccagtctggccagagtcgtcgtgcctgccactgaggaggaagccgaggttgacgagtttccaaccgacggagagatgtcagcacaggaggaagatagacgcaaggaattggaggcccaggaaaagcataagaagctgttcgagggactgaaattctttctgaatcgcgaggtgccaagggaggctctggcgttcatcattcgtagttttggcggtgaggtgtcatgggacaaatctctctgtatcggggctacatacgatgtgacagacagccgcattacgcatcagatcgtggacaggccaggccagcagacgtctgttataggtcgctgttacgtgcagccccaatgggtctttgatagcgtgaatgctaggctgcttttgcccgtcgccgagtacttctcaggagtgcaactgcctcctcatcttagccctttcgtaaccgagaaagaaggcgactacgttccccccgaaaagctcaagcttcttgccctgcagagaggagaggatccaggcaacctgaatgaatccgaagaagaggaggaggaagacgataacaacgagggagacggcgatgaagagggggagaacgaagaagaagaagaggatgccgaggccggcagtgaaaaggaggaagaggcccgccttgctgccttggaagaacagagaatggaaggaaagaaacctcgcgtgatggcgggcaccttgaaattggaggataaacagcggctggcgcaagaagaagaatccgaagccaagaggctggccatcatgatgatgaagaagcgtgaaaaatacctttatcagaaaattatgttcgggaagcgtcggaaaatccgagaggccaataagctggcggaaaaaagaaaagcccacgacgaggcggtgcgtagtgagaaaaaggcaaagaaggcgaggcccgagtag

SEQ ID NO: 25545 - DNA, 1350 bp, synthetic construct
  misc_feature 1..1350: note = Description of Artificial Sequence: Synthetic coding sequence
  source 1..1350: mol_type = other DNA
atgtgcttcctgttcagcaccttcccccggaccggcaagtgccacgtgcagactattcagctgtgcaggaggttaactgtggaattcatgcactatattattgcggcccgagcacttcgaaaggtgttcctctcaattaagggcatctattaccaagccgaggttctgggacagcccattgtgtggatcactccctatgcatttagccacgatcatcccacagatgtagactaccgagtgatggctacttttaccgaattttacacaactctgctcgggtttgtgaattttagactgtatcagttgttgaacctccattatccacccaaactggaaggccaagcccaagccgaagctaaggctggcgagggcacttatgcattagattctgaatcttgcatggagaaactagctgctctctctgcctcactcgcccgggtcgtcgtccctgcaactgaggaggaggccgaggttgacgaatttccgactgatggagaaatgagcgcacaggaagaggaccgtaggaaggagctggaggcacaggagaagcacaagaaactattcgaagggcttaagtttttcttgaatcgcgaagtcccacgggaagcactcgctttcattattaggtcattcggtggggaagtatcctgggataaatctctgtgcatcggagccacgtatgacgtgacagattcgaggataactcaccagattgtcgaccgccctgggcagcagacttccgtgattggccgctgttacgtacaaccccaatgggtctttgacagtgtgaacgccaggcttctgctcccagttgccgagtattttagtggcgttcagctgcccccccatctgagtccttttgtcactgaaaaagaaggtgattacgtgcctcccgaaaagctcaagttgctagccctccagcgcggtgaggatccaggaaatttgaacgagagcgaggaggaggaggaggaagacgacaacaacgaaggggatggggacgaggagggtgagaatgaagaagaagaagaggatgccgaggccggctccgaaaaagaagaggaggcgcggcttgccgccctagaggagcagcggatggagggcaaaaagccacgggtgatggccggcacgctcaagttggaagacaaacagaggctcgcccaggaggaggagtccgaagcgaaaaggttggccatcatgatgatgaagaagagagagaaatacttataccagaagatcatgttcggcaagagacgtaagatccgagaagctaataaattggccgaaaagaggaaagcccatgacgaagctgtccgatccgagaagaaagccaaaaaagccaggcccgagtag

SEQ ID NO: 25546 - DNA, 5154 bp, synthetic construct
  misc_feature 1..5154: note = Description of Artificial Sequence: Synthetic coding sequence
  source 1..5154: mol_type = other DNA
atggagcccgccgccgccgccaccgtgcagcggctgcccgagctggggagggaggacagggccagtgcccctgccgcagctgccgcagctgccgctgccgccgccgcggccgccgccgctctagctgctgccgcaggagggggccggtcaccggagcccgctttaacacccgccgcaccatctggtggaaatggatctggctcaggagctcgagaggaggccccgggcgaggctccccccggaccactccctggtcgcgcgggtggagctggcagacgtcgtcgccggggcgcaccccagcccatcgcagggggagcagctcccgtgcccggggccggggggggggctaattcgttactgctgagacgaggtcgactgaaacgcaacctgtcggccgcggctgctgctgcgagcagtagctcatccagttctgccgctgctgcctctcactccccaggagccgccggcttgcccgccagctgcagcgccagtgcaagcctgtgtacccgctcgcttgaccgcaaaacattgctgctgaagcatcggcagacattacagctacagcccagtgatcgagattgggtccgtcaccaactccagcggggatgtgtccacgtgtttgacaggcatatggcgtcaacctatttgaggccagtgctgtgcacactggatacaaccgcgggtgaggtggccgcaaggctcttgcagcttggtcacaaaggggggggcgtggttaaagtgctgggccagggccccggggcagctgccgcacgcgaacctgcagagcctccaccagaagcaggaccccggcttgctccacctgagccccgcgacagcgaggttccaccggccagaagcgcccccggggcctttgggggacctccaagagctcctcccgccgacttacccctgcctgtgggcggcccaggagggtggtcacgacgagcatcaccagctccctctgactcctccccaggagagcctttcgtaggtggcccagtttccagccctcgagcgcctagacccgtggttagcgataccgaatcttttagtctgtcgccgagcgcggagtctgtctccgatcgcctggacccctattcgtcaggcggcggcagtagcagttcctcggaggagctcgaggccgacgcagccagcgcacctactggagtgcctggacagccccgcagaccaggtcaccctgcgcagcccttgccactgccccagacagcaagttcaccgcagccacaacagaaggcaccccgcgctatcgactctccagggggcgccgtcagggagggaagttgcgaagaaaaggccgcagcagcggtcgcacctggtggactacagtcaacacccggaaggtctggggtgactgcagaaaaggcccctcctcccccacctccacctacgctatacgtgcagctgcacggcgagacaacacggcgcctcgaggccgaagagaaaccactccaaatccaaaatgactacctgtttcaactcggattcggcgagctgtggcgggtccaggaggaagggatggatagcgagattgggtgtctgattcgattctacgctgggaaaccccacagtacagggagttcagagcgaattcagctctcgggcatgtataacgtgagaaagggcaaaatgcagttgccagtgaatcgatggacacgacggcaggtcattctttgtggcacctgccttatagtaagttcggttaaggactctttgactggcaaaatgcacgtccttcccctgatagggggaaaggtggaggaagtgaaaaaacaccagcattgtctcgcctttagcagttcaggaccacagagccagacatactatatatgcttcgacacttttaccgaatacctgagatggctacggcaggtgtccaaggtggcctcccagcggatcagctccgtcgacctttcatgttgttctctggagcatctgccggcaaatctgttttattcccaggatttaacacacctgaacctgaagcagaactttctgcggcaaaatccctctctccctgctgccagaggactgaacgagctgcaacggttcacaaaactaaagagtctgaacctctcaaacaaccatctgggggacttcccactagccgtatgctccatccccactctggccgaactgaacgtgagctgcaatgccctacgatccgtgccggctgctgtgggagttatgcataatctgcagaccttccttttggacggcaattttctccagtccttacccgccgagctggagaacatgaaacagctatcctacttaggcctgtctttcaatgagttcactgatattccggaagtgctggagaaattaacagccgtggacaagctgtgtatgtctgggaactgtgttgagaccctgcggctgcaggctttgaggaagatgccccatatcaagcacgtggatctacggctgaacgtcatacgaaaacttattgccgatgaagtcgactttctgcagcatgtcactcagttggatctccgagacaacaaactgggggatctggatgccatgatctttaacaatattgaggttcttcattgtgaaagaaatcaactggtgactcttgacatatgtggatacttcttgaaggctctgtacgcctctagcaatgagttggttcagctggatgtgtaccccgtgccgaattacttatcctatatggatgtgtctcggaataggttagagaacgttcccgagtgggtgtgtgaatcgagaaaacttgaagtgctcgacataggccacaatcagatatgtgagttgcctgcccgtctattctgcaacagcagtttacgaaagctgcttgctgggcataaccagctggcaagactgcccgagcgtcttgaacgaacctcagtggaagttctggacgtacagcacaatcaattactggagctgcctccaaacctgttaatgaaggctgatagtctgaggttcttgaatgcgagtgcgaacaaacttgaatcccttcctcctgctaccctaagcgaggaaaccaattcgatcttacaagagttatacttgactaataacagcctaacagacaagtgtgtacccctcctgaccggccatccacatttgaagattctgcatatggcgtataataggttgcagtctttccccgccagcaagatggccaagctggaggaacttgaggagattgacctctccggtaataagctaaaggcaatccctaccactattatgaattgcaggcgcatgcacaccgttattgcccattccaattgtattgaagtcttccctgaggttatgcagttaccagaaataaaatgtgtggatcttagctgtaacgagctctccgaagtaacattgcccgagaacctgccccccaagttgcaggagttggacctcaccggaaacccacgcctggttcttgatcacaaaacactggagttgctgaataacatacggtgcttcaaaatcgaccagccgtccaccggagacgcaagtggtgcacctgcagtgtggagtcacggctatacggaggccagcggggttaagaacaaactgtgtgtggcagctctttctgtgaacaacttctgcgacaaccgcgaggccctttacggcgtgttcgatggcgatcggaacgtggaagtgccatacctcctgcagtgcactatgtccgacatcctggccgaggagttacagaagactaaaaacgaggaggagtacatggtcaacacattcatcgttatgcaacgcaagctgggaactgctggacagaagttgggcggtgccgccgtcctgtgccatataaaacacgatcctgtggatcctggtggtagtttcacactgacttctgccaatgtcgggaagtgccagacggtgctgtgtaggaatggcaaacctctacctctgtccagaagttacatcatgtcttgcgaggaagagctgaaaaggatcaaacagcacaaggcaatcattacggaggacggaaaggttaacggtgtgacagaatcgacaagaattctggggtatacttttctacacccttccgtggtgccccgcccgcacgtgcagtctgttctcttaacaccccaggacgaattcttcatcctgggatccaagggcctgtgggattctctgtccgtagaggaggccgtggaagctgtccggaatgtccccgacgccctggcagccgcgaagaagctctgcactttggctcagagctatggctgccacgattctatcagtgctgttgtcgtccagctgtccgtaaccgaggacagtttttgttgttgtgagctaagtgcaggtggggctgtgcccccaccttcccccgggatttttccaccatccgttaatatggtaatcaaggaccggccctccgacggcctgggagtgcccagcagcagcagcggcatggccagcgagattagttcagaacttagcacctctgagatgtcatccgaggtgggctcaaccgctagcgatgagccccctccgggagccctctcagaaaactctcccgcttatccgtctgagcaacgctgcatgcttcatcccatctgcttgtctaactcgttccaacgacagctttcatcggcaacgttcagctcggcttttagtgacaatggtcttgattccgacgacgaagagccgatagagggggtatttacgaatggctctcgggtggaagtggaagttgacatccattgctcaagagccaaggagaaggagaagcagcagcacctgttgcaggttccggccgaggcgtccgacgagggaattgtcatttctgccaatgaagacgagcccggactgccccgaaaggctgacttttctgctgtggggacaataggacgccgccgtgctaatggttctgtcgccccgcaggagcgctcccacaatgtcattgaagtagctactgacgccccactgcgtaagcccggcgggtacttcgccgcaccagctcagcctgatcccgatgatcagtttatcatccctcccgaattagaggaggaggttaaagaaatcatgaagcaccaccaggagcaacagcagcaacaacagccccccccgccacctcagttgcagcctcagctgcctcgacactatcagttggaccagcttcctgactactacgacactccgctgtag

SEQ ID NO: 25547 - DNA, 3618 bp, synthetic construct
  misc_feature 1..3618: note = Description of Artificial Sequence: Synthetic coding sequence
  source 1..3618: mol_type = other DNA
atggacagcgagatcggctgcctgatccggttctacgccggcaagccccatagcaccggcagctctgagagaattcagttgtccggaatgtataacgtgcgcaagggaaaaatgcagttgccagtgaaccgatggacccgccggcaagtgatcttgtgcggcacatgcttgatcgtgtcttcagtgaaagatagtctcacagggaaaatgcacgtgctgccactcattggtgggaaagtcgaggaagtgaaaaagcaccagcattgcttggccttttcgtcctctggaccccagagccagacctattatatttgtttcgacactttcactgagtatctaagatggcttcggcaggtgtcaaaagtcgcttcacagagaatttcctccgtggacctgagctgctgttcgttggaacacctgccagccaacctgttctattcccaggaccttacgcacctgaacttgaaacagaatttcctgagacaaaacccgtccctgcctgccgcccggggacttaatgagctccagagattcaccaaactcaagtccctgaatttgtccaacaaccaccttggcgactttcctctggccgtttgcagcatccctaccctggccgaactaaacgttagttgcaacgctcttcgatctgtgccagctgccgttggagttatgcacaacctccagaccttcctgcttgatgggaatttcctccagtccctgcccgccgaactggaaaacatgaaacaactctcctatctgggactatcctttaacgagttcacagatatccccgaggtcctggagaagctgaccgctgtcgacaagctatgcatgtccggcaattgcgtggagactcttagactgcaggcccttcggaagatgcctcacatcaagcacgtagatctgaggctgaatgttatccgcaagcttattgctgacgaggtagatttcttgcagcatgttactcagctcgacctacgagataataagctgggtgacctggatgccatgattttcaataacatcgaagtactgcactgcgaaagaaatcaactcgttacgttggacatctgcggctacttcctgaaggcgctgtacgcatcatctaatgaacttgttcagttggatgtttacccagttcctaattacttgagctacatggacgtgtcacggaataggctggagaacgtccctgagtgggtttgtgagagccggaaactcgaagtccttgatatcggacacaatcagatttgcgagcttccggccaggctcttctgcaatagctccttacggaaactgctggccggccataaccagttagccagactaccagagcgactggaacgcacttccgtggaagttctcgacgtccaacacaaccagctcctagagttgccgcccaacctccttatgaaagccgactcccttcggttcctaaacgcctccgccaacaagcttgagtcactccccccagctacactgtcagaagagaccaactctattttgcaggagctttatttaaccaataactcactgacggataagtgcgtaccgctgttgacgggccacccacacttgaaaatcctccacatggcttacaacaggctccaatcctttcccgcgtctaagatggccaaacttgaggagctggaagaaatcgatctatctggaaacaaattgaaagccattccaacaacgattatgaattgtcggagaatgcacactgtgatagcacattctaattgcattgaagtgtttccagaagtcatgcagctccccgaaatcaagtgcgtcgacctgtcctgcaatgaactcagtgaggtgacactccccgaaaacctgcctcctaaactccaggaactggatctgacagggaatcctaggctcgtgcttgatcacaagaccctggagttgctcaataacatcagatgctttaagattgatcagccgtcaacaggcgacgcaagcggcgccccggctgtatggtcccacggctatactgaagcatcaggcgtgaagaacaaactctgcgtggcagccttaagcgtgaataacttttgcgataaccgcgaggctctctacggggtgttcgatggagatcggaatgttgaggtgccctaccttcttcagtgcactatgtctgacatccttgccgaggaattacagaagacgaagaacgaggaagagtacatggttaataccttcatcgtcatgcagcgcaagctcggtacggccggacagaaactggggggcgctgctgtgttgtgtcacatcaagcatgatcctgttgaccctggtggctcatttaccctcacttcagcgaatgtgggaaagtgccaaacagtgttatgtcgcaacgggaaacccctgccattatccaggtcttacatcatgtcttgcgaggaggagctgaagcgtattaagcagcataaggctattatcacagaggacgggaaggtgaacggcgtgaccgaatcgacgcgcatcttgggctacactttcctgcatccaagtgttgtgccccgaccccatgtccagtccgtcctgctgaccccccaggacgagttttttatcctggggagcaagggattgtgggacagtctgtcagtggaagaggcggtggaagctgttcggaacgtgcccgatgccctcgccgcagcaaaaaaactgtgcacactggcacagagctacggatgccacgacagtattagcgcggtagttgtccagctgagtgtaaccgaagacagtttttgctgctgcgaactgtcagccgggggggcggtgccccctccttcccctggcatattcccaccaagcgttaacatggtgatcaaagacagaccctctgatgggctcggagtgccctccagctcatccggcatggcatctgagatcagttccgagctaagcacttcagagatgtcctctgaagtgggaagcaccgcaagtgacgaacctcctcctggagccctgagtgaaaatagccctgcttatccctccgaacagcggtgcatgctacatcccatttgtctttccaacagctttcaacggcaactgagcagcgcaaccttttcctctgcgttttccgataatggcctagattcagacgacgaagaacccatagaaggggtgtttacgaacggatctagagtcgaggtggaggttgatatccactgctcccgtgcaaaggaaaaggaaaagcagcagcaccttctccaagtgccggcagaagcaagcgatgaggggatcgttatctccgctaacgaagacgagccaggcctccccagaaaggccgactttagcgccgtcggtacgatcgggcgtcgccgtgccaacggcagcgtagctccccaggagcgttcgcataatgtgattgaggttgctacggatgctcccctgcggaaacctggagggtactttgctgctcctgctcagccagatcccgacgatcaatttataatcccgcctgaactggaggaggaagtcaaagagataatgaaacaccatcaggaacagcaacagcaacagcagcctcccccaccaccacagttgcagccacaactgccgaggcactaccagttagaccaacttcctgactattacgacactccactgtag

SEQ ID NO: 25548 - DNA, 2379 bp, synthetic construct
  misc_feature 1..2379: note = Description of Artificial Sequence: Synthetic coding sequence
  source 1..2379: mol_type = other DNA
atgcacatcctgcccctggtgggcggcaagatcgaggaggtgaagcgacgccaatattccctggcatttagctctgccggtgcccaggcccagacataccatgtcagctttgagacgctggccgaataccaacgatggcagcgccaagcatctaaggtcgtctcccagcgtatcagcacagtggacctgagttgctatagcctggaggaagttcctgagcacttgttctattcccaagacattacttaccttaacttacgccataatttcatgcaattggagcggccaggagggctcgatacgctatataagtttagtcagctcaaaggcctcaaccttagccacaacaagctgggactgttcccaattctcctctgtgaaataagcaccctcaccgaattaaacctgtcctgtaacggatttcatgacctgccaagtcagattggcaacttgctgaacctgcagaccctctgtcttgacgggaacttcctcaccacactgcccgaggaactgggcaacctgcaacagctctcctctctgggaatttcatttaacaacttctctcagatccccgaggtgtacgaaaagctaacgatgctggatagagtggtgatggccgggaactgtctggaagtgctgaacttaggtgtcctcaatcgcatgaatcatattaaacacgtggacctgagaatgaatcaccttaaaactatggtgatcgaaaatcttgagggcaataagcacattactcatgtagacctgcgagataacagactgactgacctcgacctttcttcactgtgcagtctggagcaacttcactgtgggaggaatcaattacgggagctgaccctttctggcttttcccttagaaccctgtacgcctcctctaacagactgacagccgtgaacgtgtacccagtcccgtcgctgttaacttttctcgatctctcgagaaatctcctggagtgtgtccctgactgggcatgtgaagccaagaaaatagaagttctcgatgtctcctacaacctgctgacagaggtgcctgtaagaattctgagtagtctttcactccgcaagctgatgctgggacataatcacgtgcaaaatttacccaccctggtggaacacatcccgttggaagtactcgatttgcagcataatgccctgacccgcctccccgacaccctgttctcaaaggcccttaacttacggtatcttaacgccagtgccaatagcctcgaaagccttccatccgcttgtacgggagaggagtcattatctatgctgcagctactgtacctcacaaacaacctgttaactgatcagtgcatccctgtgttggtggggcacttgcatctcagaatcctgcatctcgccaacaaccagctgcagacatttcccgcctctaagcttaacaagcttgagcagctggaggagctcaacctgtctggcaacaaattgaagaccataccaactactattgccaattgcaagcgacttcacaccctggtcgcgcactcaaataatattagtatcttccctgaaatcctccaactcccgcaaatccagttcgtggaccttagctgtaatgatctgactgaaattctaattcctgaagcactaccagccacactccaggatctggaccttactggaaatacaaatctagttttggagcataaaacactggacatctttagccacattaccacactgaagatcgaccaaaaaccgctgcctaccaccgacagtactgtgacaagcaccttttggagtcacggtttagctgaaatggccggccagaggaataagctgtgtgtctcagccttagcgatggacagttttgctgagggggttggagcagtgtatggaatgttcgacggggacaggaatgaggaactcccccggctgctgcaatgtactatggcggacgtgctcctggaggaggtgcagcagagcacaaatgacactgtgttcatggcgaatacattcctggttagccaccggaaactaggaatggcaggacagaaactggggagttctgcattgttgtgttacattcgacctgacaccgctgatccagcgagttcattttcattaacagtagccaacgtggggacctgccaggctgtcctgtgtcggggggggaaacccgtgcctctgtccaaagtcttctccttagagcaggatccagaagaggctcagcgcgtcaaagaccagaaagccattattacagaggttcccgaggatttgaaggaatttcaaaccacagacataccggttcaccattgcaactttcgggcagtgctgggttgtttgtgcagcgcgagtgttctcggcagttacgccggtccggcgcctaggtggcgtcgcacttag

SEQ ID NO: 25549 - DNA, 3972 bp, synthetic construct
  misc_feature 1..3972: note = Description of Artificial Sequence: Synthetic coding sequence
  source 1..3972: mol_type = other DNA
atgaagcggaacggcagccggaactgcctgaaccggcggagccggtttggatctagggagagggactggcttagagaagatgtgaagcgagggtgcgtgtacttatacggagcagataccacaactgcaacgacgacgaccaccactagctctagctccagtagcagttctagttcgtccgatcttcacctggtgctttgcactgtggagacacccgcctccgagatctgtgccggagagggacgcgaaagcctctaccttcagctccacggggatctagtgagacgtctcgagccaaccgaacgcccgctgcaaatagtttatgactacctgtctagacttggcttcgacgatcccgtacgaattcaagaagaagcgactaatcccgacctcgggtgtatgattcgcttctatggggagaagccttgtcacatggatcgacttgacagaatcctcctttctggtatctacaatgttagaaagggcaaaacgcagcttcacaagtgggctgagaggctggtggttctgtgcggtacctgcctaattgtttcatctgtaaaggattgccagactggcaagatgcatatattaccacttgtggggggcaagatcgaagaagtcaaaagacgtcagtatagtttagcatttagctctgcaggtgcccaggctcagacgtatcacgtttcctttgaaactctggccgaataccaaagatggcagagacaggcaagcaaagttgtcagccaacgaatctctacagtggacctgtcatgctatagcctagaggaggttccagaacatctgttttactcccaagatattacctacctgaacctgagacataactttatgcagctcgaacgtcccggaggcctcgacaccctgtacaaattttcccagctgaaaggactgaacttgtctcacaacaaactggggctttttcctatattactgtgcgaaatcagtaccctcactgagctgaacctgagctgcaacggtttccatgacctgccatcacagatcgggaatcttctcaatctgcagaccctgtgcctggatggtaatttcctgactaccttgccggaggaactgggaaatcttcaacaactgtcctcactcggcatcagctttaacaattttagccagattcccgaggtgtatgagaaactgacgatgctggaccgagtcgtaatggccggcaactgtttagaagtgttgaatctgggcgttctcaataggatgaatcatatcaagcatgtcgatctccggatgaaccatctcaagacaatggtaattgaaaacctggagggcaataagcacataactcatgttgacctgcgtgacaataggttgactgatctggacctctcaagcttgtgcagcctggaacagctgcattgtggaagaaaccagctgagagaactcaccttatccggattctctctccgaacgctttatgcctctagtaatcgtctcactgctgtgaacgtatacccggttccatcccttttgacctttctcgatctcagccgaaacctcctggagtgcgttcctgactgggcttgcgaggctaaaaaaatagaggtccttgatgtgtcttacaatctgttaacagaagtgcctgtgaggatcctgagctctctgtcactcaggaagctgatgctagggcataatcatgttcagaatttgccaaccctggtggaacatatcccccttgaggtcctggacctgcagcataatgccctcacccggcttccggacaccctcttctccaaggccctgaacctccgctatttgaacgctagtgcgaactctctggagagtctgccttcagcttgcactggcgaggagagtctcagtatgttacaactactttatctgactaataatctgcttaccgatcagtgcattcctgtgctggtcggacacctccaccttcgcattttgcacctggctaataaccaactgcaaacatttcccgcttctaaactgaacaaactggagcaacttgaagagctcaacctgagcgggaacaagctaaagactattccaaccaccattgctaattgcaaaagactacacacgctagtcgcacactccaacaatatttctatattccccgagattctgcaacttccccaaattcagtttgtggacctaagctgcaatgatctaactgaaattctgatcccagaggctctccctgcaaccctgcaggacctcgacctcacggggaacacaaatctggtgcttgagcacaagactctggatattttcagtcacatcaccaccctaaaaatcgaccaaaaacccctcccaactacagattctactgtgaccagcaccttctggtctcacggccttgctgagatggctgggcaacggaataaactatgcgttagcgccctggcaatggacagtttcgctgagggagtcggcgctgtgtatggaatgtttgatggtgacagaaacgaggagctgccacgactgctccagtgtactatggccgacgtgttgctggaggaagtccagcaatccactaacgataccgtgttcatggctaataccttcctggtgagtcatcggaagctggggatggctggacagaagcttggttcttcggcccttttgtgttacatccggcctgacaccgcagatccagcatctagtttttctctgaccgtggctaacgtaggcacgtgtcaggccgtgctttgcagggggggcaagccagttcccctgtcaaaagtgttttccttggaacaggaccccgaggaagcccagagagtcaaggaccagaaggcaatcattaccgaggataacaaggttaatggggttacctgctgtactcgcatgttaggttgcacatatctgtatccttggatcctgccaaaacctcacatcagctcgactcccctgacaatacaagacgagctgctgatcttgggcaacaaagcattatgggaacacctgtcttacaccgaggccgttaacgccgttaggcacgttcaagaccctctggcggctgccaaaaagctgtgtacgctggcacaaagctatggatgccaagataacgtgggtgctatggtggtgtatctgaacataggtgaggagggctgtacctgtgagatgaacggccttacgttacctggaccagtaggcttcgcatccaccactacaatcaaggatgcccccaaacccgctactccaagtagcagttccggcatagccagtgaattttcatctgagatgtccacaagcgaggtgtcctccgaagtgggaagcactgcttcagacgagcataacgccggcggcctggatactgcgctcctgccaaggcccgaacgccgttgctccctgcaccccactccaactagtggcttgttccaaaggcagccctcttcagcaacattctcctcgaatcaatctgataacgggttagatagtgacgacgatcagcctgtggaaggggtgattacgaatggttccaaagtggaggtggaagtggacatccactgctgccgcggccgcgatctcgagaattcgcctcctctgattgagagctccccgaccctctgtagtgaggagcatgcacgcggctcctgcttcggaattagacggcagaactccgtgaacagcggcatgctgctccctatgagcaaggaccgcatggagttacagaagtctccaagcacaagctgtctgtatgggaagaaactatcaaatgggagcattgtgcccctggaagactccctgaacctcatcgaggtggcaaccgaagttccaaaaagaaagacaggatacttcgcagccccaacccagatggaacccgaggaccagtttgtggtccctcacgatctggaagaggaggtgaaagagcagatgaaacaacatcaagactcccggttggaacctgagcctcacgaagaagaccgaaccgagcccccagaagaatttgacacagccctgtag

SEQ ID NO: 25550 - DNA, 2871 bp, synthetic construct
  misc_feature 1..2871: note = Description of Artificial Sequence: Synthetic coding sequence
  source 1..2871: mol_type = other DNA
atgaagcggaacggcagccggaactgcctgaaccggcggagccggtttggctctcgtgaacgtgattggctgcgagaagatgttaaaagagggtgtgtgtatttatatggggctgacacaactacagcaaccacgaccactacaacttcctcctccagcagcagcagctcatcgagcagcgatctgcaccttgtgctatgcactgtcgagacccctgccagcgagatatgcgcaggcgagggtagggagtcactatatttgcaattgcacggggacctggtgaggcggctcgaaccaacggaaagacccctgcagattgtttacgattacctcagccgccttggcttcgatgatcctgttaggatccaggaggaagccacaaatcctgacctggggtgcatgatccgattttacggtgagaaaccatgtcacatggaccgcctggacaggattttgctgtccggcatttacaacgtgagaaagggcaagacacaactgcataagtgggccgaaaggctcgttgtcctctgtggaacctgcctcattgtgagcagcgtgaaagactgtcaaacgggcaagatgcacattctacccctggttggtggtaaaattgaagaggtaaagcgaagacagtatagtctggccttctccagtgcaggagcgcaggcccagacctatcacgtcagcttcgagacactcgctgagtaccagcgttggcagcgccaggcgtccaaggtcgtgtcccagcggattagtactgttgacctcagctgctattcactggaagaggtgcccgaacacctattttactcccaggacattacctacctgaaccttcgccataatttcatgcaactggaaagacctggggggctggacactttgtacaaattctcacaacttaagggcctgaatctgagtcataacaaactgggcctgtttcccattcttttatgcgagatctccacacttaccgagctaaacttgagctgcaatggcttccacgatcttccgtctcagatcggtaacctactaaatctccaaactctatgcctagatgggaatttcttgaccacactgcccgaagaacttgggaatctgcagcaacttagttcgctgggcatatcctttaataactttagccagattcctgaggtgtacgagaagctcaccatgctcgatcgagtcgtcatggccggcaattgcttggaggtccttaacctgggggtcctaaacagaatgaaccacataaagcacgttgatttgcggatgaatcacctgaaaactatggtgattgaaaatctggaaggaaacaaacacatcacacatgtcgatctgagagacaatcgccttacagacttggatctaagcagcctctgctccctggaacagctgcactgtggcaggaaccagctgcgagaactgaccttgagtgggttttctctgcgaaccctgtacgcctctagcaacaggctgaccgccgtgaacgtgtacccagttccttctctgttgaccttccttgatctttcccgcaacttgctggaatgtgtgcccgattgggcatgtgaggccaaaaagattgaggtcctcgatgtcagttataacctcctgaccgaggtgcccgtgcggatcctgagctctctctctcttagaaaactcatgctgggccacaaccacgtccagaacttacccactctggtagagcacatccccctggaagtgctggatttgcagcataacgcattgaccaggttgcctgataccctcttttctaaggctctcaacctccgttaccttaacgcctcagcaaacagcttagagtcattgcctagcgcctgtacaggtgaagaatccctcagcatgctccagttactgtacctgaccaataacttgctcaccgatcagtgtatccccgtgctagtcggccacctccatttgagaatcttacacctagctaataatcagttgcagactttcccagccagcaaactcaataaactggaacagctggaggagttgaacctgagcggaaacaaactcaagacaattcccactactatcgccaactgtaagcggctccacactctagttgcgcactctaacaatatatccatttttcctgagatcctacaactgccccagatccagtttgtagatctgagctgtaacgacctcaccgaaatactcatccctgaggccttgccagctaccctgcaggacttggatctgaccggcaataccaatctggtcttggaacacaaaaccttagatatcttctctcacattactacgcttaagatagatcagaagcctcttccaaccaccgacagtaccgtcacctcaacattctggagccacggtctggccgaaatggctggacagaggaataagctttgcgtgagcgctctggctatggatagcttcgcggaaggggtgggagccgtgtatggaatgttcgatggcgacagaaacgaggaactccccaggttgcttcaatgtaccatggctgatgtgttgctcgaggaggtgcagcaatctacaaatgacacagtttttatggccaacaccttcctcgtgtcacatcgcaagctgggaatggccggacagaagttggggtcttctgcactcttgtgctatattagacctgacaccgccgatccggcctcaagcttttccttgacggtggccaatgtagggacctgtcaggccgtgttgtgccgcggtggcaagccagtcccactgagcaaagttttttctctggagcaggaccctgaggaggcacaaagggtgaaagatcaaaaagctattattaccgagaactgggtgctgaaccagaagcatctgcaggacttccccggtgaagacaagtag

SEQ ID NO: 25551 - DNA, 3771 bp, synthetic construct
  misc_feature 1..3771: note = Description of Artificial Sequence: Synthetic coding sequence
  source 1..3771: mol_type = other DNA
atgaagcggaacggcagccggaactgcctgaaccggcggagccggttcgggtccagggagcgggattggctgcgcgaggatgtgaagcgtgggtgcgtgtatttatacggcgcggacaccaccaccgctaccaccaccaccacgacctcttcgagttcaagttcctcatcttcgagttccgatctgcatctggtgctgtgcactgttgaaacccccgcctccgaaatctgcgccggggaaggccgcgagtcactctacctgcagctacatggagacttagttagaagactggagcccacagaaaggcccctgcagatcgtgtacgattacctgtcccggttgggctttgatgatccagtgagaatccaggaagaagccactaatcctgaccttggatgcatgataagattttatggcgagaagccatgccatatggaccggctcgatcgcatactgctaagcggtatttataatgttcggaaagggaagacccagctgcacaaatgggcagagcgcctcgtcgtattgtgcggcacctgcctaatcgtatctagtgttaaagattgtcagacaggcaagatgcatatcctgccacttgtcggcgggaaaattgaggaagtgaaaagacgtcaatattctttagccttttcatccgccggcgcacaggctcagacctatcatgtaagtttcgaaacgctggccgaatatcagagatggcaacggcaggccagcaaagtcgtttcgcaaagaattagcaccgtggatctaagctgttatagcctcgaagaagtacctgagcacctcttctactctcaagacatcacgtatttaaatctcagacacaattttatgcagctcgagaggccaggtgggctggacaccctatataaattttctcaattgaaaggactcaacctctctcataacaaactgggcttgtttcctatcctcctgtgtgagatcagcaccctgaccgagctgaacttgagttgtaatggctttcacgacttacctagccagataggcaatcttctcaatcttcaaaccctgtgtctggacggtaactttttgactacactgcctgaggagctgggtaatctgcagcaattgtcttctctgggcatctcatttaacaatttctcccagatacccgaggtctacgagaagctgacaatgctagatcgtgtggtaatggccggcaactgtttagaggtgctgaacctaggcgtactcaatcgtatgaaccacataaaacatgtggacctccggatgaatcatcttaagacaatggtgatagagaacctggaagggaacaagcacattacacatgtagatctgcgggacaacaggttgacagatctggacctgagctcactctgctcgcttgagcagctccactgtggccgaaaccagcttagagagctcacgctttctggtttttctctgcggacactctatgcttcatccaaccgtctcacagctgtgaatgtgtaccctgtccccagcttgctcacgtttttagatctctccaggaatctgttggagtgtgtcccagactgggcctgtgaagctaagaaaatcgaagtccttgacgtgtcatataacctcctcactgaggttcctgttcgcatcctcagtagcttaagtctgcgaaagctgatgctgggacataaccacgtgcagaatcttcccacactagtagaacacatccctctggaagtcctcgatctacagcacaacgctctgacgcggctccctgataccttgttctctaaggccttgaataagctgaataaattggagcagctagaggagcttaatctctcagggaacaagctaaagacaataccgactaccattgctaactgcaagagacttcacacgctggtggctcactcaaacaatataagcatcttccctgaaatacttcagctcccgcagattcaattcgtcgacttgtcttgcaatgacttgaccgagatcctcatacccgaagcactgccagcgaccctgcaggacttagacctaactggaaacacaaatctggttctggaacacaaaaccctcgacatcttcagccacatcaccaccttgaaaatagaccagaagccccttcccacaactgattccacggttacatctacattctggtcgcatggcctcgctgagatggctggacagagaaacaaactgtgcgttagtgctcttgccatggatagcttcgcagaaggcgtcggcgctgtgtatggaatgttcgacggagatagaaatgaagaacttccacggctcctgcagtgtaccatggccgacgtgctcctcgaagaggttcagcagagcaccaatgacaccgtctttatggcaaacacattcttggtgtctcaccggaagttgggtatggcgggccagaagttgggctcctcggccttactatgctatatccggcccgacaccgcggatcccgccagctcatttagtcttactgtagctaacgtaggaacatgccaagcagtcctatgtcgcggaggcaaacctgtgccactgtcaaaagtattcagtctggaacaagatcccgaggaagcccagagggttaaggaccaaaaagctattatcaccgaggacaataaagtgaatggtgtgacctgttgtacgcgcatgctgggatgcacctatctgtatccatggattctgccaaaacctcatatctctagtactccccttaccattcaggatgagttgctcatcttaggtaacaaagctctgtgggagcatctttcctacaccgaggctgtaaacgccgtccggcacgtgcaagatccgctcgccgccgctaagaagctgtgcacacttgcccagtcatacggctgccaggataatgtgggagctatggtcgtttacctgaacataggggaggaggggtgcacttgtgagatgaacgggctcaccctgcccgggcctgtggggttcgcgtccacaaccacgataaaagacgccccaaaacctgccacccccagctcctcctccggcatcgcgtcagaattttcgtctgaaatgtcgaccagtgaggtgagctcggaggtaggaagcaccgcgtcagacgagcataatgcagggggacttgacacagctctgcttccaaggcctgagagacgctgttctctccacccgactcccacaagtggtctctttcagcggcagcccagtagtgctacatttagtagcaatcagtcagacaatgggttggacagtgatgacgaccagcccgtagaaggcgtgattaccaatgggtccaaagtagaagtggaggtcgacatccactgttgtagaggcagagatctggagaactccccgcccctgatcgaatcaagccccacgctctgtagcgaagagcacgcccggggttcgtgcttcggtatccgcagacagaattctgttaattcagggatgttattaccaatgagcaaggacaggatggaacttcaaaaatctccatccacttcctgtctttacggcaagaagctctccaacgggagcatcgttcccctcgaagattcattgaatctaattgaggtggcaacggaggtgcctaagcggaagaccggatattttgcggctcccacgcagatggagccagaggaccagttcgtcgtgcctcacgacttagaggaagaggtcaaggaacaaatgaaacagcaccaggactctcgcctggagcccgagcctcatgaggaggacaggacagaacccccagaggagtttgataccgctttatag

SEQ ID NO: 25552 - DNA, 1272 bp, synthetic construct
  misc_feature 1..1272: note = Description of Artificial Sequence: Synthetic coding sequence
  source 1..1272: mol_type = other DNA
atgaagcggaacggcagccggaactgcctgaaccggcggagccggtttggcagcagagagcgagactggctaagagaggacgtcaagcgaggttgtgtgtacctttatggcgcggatactaccactgcaaccacaactacaacaaccagctcatcgtcctctagctcctcctcttcgtcggacctgcatcttgtgctgtgcacggtggaaaccccagcctccgaaatttgcgctggggagggccgagaatccctttacttgcagctccacggagacctggttagaagattggagccaacagaaagacccctgcaaatcgtctacgactacctctctcgactgggctttgatgatcccgtgcgcatccaggaggaggctacgaaccctgacctcggctgcatgataaggttctatggagagaaaccatgccatatggaccggcttgaccggatcctgctgagtggtatttacaacgtacgaaagggaaaaacccaactgcacaagtgggccgagcgacttgtagtcctgtgcggaacctgcctgattgtgtcgtctgttaaagattgccaaactggcaaaatgcatattctccccctagtcgggggcaagatcgaggaggtgaagcgccgacagtactccctcgccttctcctctgccggagcgcaggcacagacatatcacgtgtcctttgagaccttggccgagtaccagcggtggcagaggcaggcctctaaagtcgtgagccagagaatctccaccgtggatctttcctgttactcccttgaggaagtccccgagcacctcttttattcccaggatattacttacttaaacctacggcacaacttcatgcagctggaaagacccgggggactcgacactctatataagttttcccagctcaaaggcctgaatctaagccacaacaagctggggctgttcccaatcctcctgtgtgaaatttcgactctcacagagctgaatctgtcttgtaacggattccacgacctgccctcacagattgggaaccttctgaaccttcagaccctctgcctagacggaaatttcctaaccacactcccagaagagttgggaaacttgcagcagctgtcgagtttagggatctcctttaacaacttcagtcagattcctgaggtctacgagaaactgaccatgctcgatcgcgtggtgatggccgggaactgtctggaagtgcttaatctcggtgttctgaacagaatgaatcacattaagcacgtggacttgaggtag

SEQ ID NO: 25553 - DNA, 501 bp, synthetic construct
  misc_feature 1..501: note = Description of Artificial Sequence: Synthetic coding sequence
  source 1..501: mol_type = other DNA
atggccggccagcggaacaagctgtgcgtgagcgccctggccatggacagctttgcagagggcgtgggcgccgtatatgggatgtttgatggggatcgaaacgaggagctccccagactgttacagtgcactatggcagacgtcctgctcgaggaggttcagcagagcactaacgatacggtgtttatggcaaacaccttccttgttagccacagaaagctgggcatggctggtcaaaagctgggcagttcagccttactgtgctatatccgccccgataccgccgatccagcttcttccttctccttgactgtggcgaacgtaggtacctgccaggcagtactctgtcggggagggaaacctgtaccactcagcaaagtcttctccttagaacaagatccagaggaggcacagagggtgaaggaccaaaaggctatcattacagaaaactgggtgctgaaccagaaacatttgcaggatttccctggagaagataagtag

SEQ ID NO: 25554 - DNA, 3972 bp, synthetic construct
  misc_feature 1..3972: note = Description of Artificial Sequence: Synthetic coding sequence
  source 1..3972: mol_type = other DNA
atgaagcggaacggcagccggaactgcctgaaccggcggagccggtttggctcacgcgagagggactggcttcgggaggacgtgaagcgcgggtgtgtgtatctttacggcgccgatacgactaccgcaaccactacgacaacaacctcatcatcttcgagctcatcctcctcatcttccgatctccatttggttctgtgtacggtagagacacccgcctcagagatttgcgcaggcgagggtcgggagtccctgtatctgcagttacacggagacctggtgaggcgccttgagccaaccgagcggccactccagattgtatatgattaccttagtagactggggtttgacgatcccgtgcgaatccaagaggaagctaccaatccagatctggggtgcatgattcgcttttacggggaaaaaccttgccacatggacagactggaccgcatactgctgtctggtatttacaatgtgcggaagggaaaaacccaactgcataaatgggccgagcgactggtggtgctctgtggcacttgtctgatcgtgtcttctgttaaagattgccagaccgggaagatgcatatcctgcctttagtaggagggaagatcgaagaggttaagcggaggcagtattccctggctttctcttccgccggtgcacaggctcagacttaccacgtgtccttcgagactctagcagagtaccaaagatggcaaagacaggcttcgaaagtggtaagccaaaggatcagtactgttgacctcagctgctattctttggaggaggtgccagaacatttgttttatagccaagatatcacctacctcaacctgagacataattttatgcagctagagcgtcccgggggacttgacactctctataagttcagtcagcttaaaggcttgaacctgtcacataacaagctgggtctttttccaattctgctttgcgaaatcagcactctgacagaattgaatctgagttgtaatggttttcatgacttgccttcacagatagggaatctactaaacctgcagacactgtgcctggacggcaatttcctcaccacccttccggaagagcttggcaacttgcagcagttaagctcactgggaatatcctttaataatttctctcagattcccgaagtgtacgaaaaactgactatgctggatcgggttgtgatggccgggaattgtttagaggtactcaatctgggggtgctgaacaggatgaaccacatcaagcacgttgatctccggatgaaccacctcaagactatggtcattgaaaacctggaaggaaataagcacattacccacgtggacctccgcgataacagactgacggacctcgaccttagttcattgtgctcccttgaacagttgcactgcgggagaaaccagttgagagagctgaccctttcaggattctccctgaggactctgtacgcctcttcaaataggctcacagcggtcaatgtttatcctgtgccaagtcttttaactttcctggatctcagtcgcaacctgttggagtgtgtgccagattgggcctgtgaagctaaaaagattgaagttttggatgtcagttacaacttattaacagaggtccctgtcagaattctgtcctcactttcacttcggaagctgatgttaggacacaaccacgtgcagaacctgcccactctagtggaacacatacctctggaagtattggatctgcagcacaacgctctcacccggctccccgacaccttgttctctaaggctctgaatctgaggtacctcaacgcttccgccaatagcctcgaatctctgcccagcgcttgtaccggcgaagaatcactctccatgctgcagctactgtaccttactaacaatctcctcactgaccagtgtattcccgtgctggtagggcacctacacctccggatactgcatctggctaacaatcaactacagacattcccagccagcaaactcaataagctggagcagctggaagagctgaatctgagcgggaacaagttgaaaaccatcccaaccaccattgccaactgcaagaggttacataccctggtagctcatagcaacaacatctccattttcccggagattctccagctgcctcagatccagttcgttgacctgagttgcaatgatcttacagaaattctcatcccagaggcccttcccgcgactttacaggacctcgacctgacaggcaacactaatctggtgctagaacataagacactggatattttctcccacatcaccacgttgaaaatcgatcagaaaccactccctacaacagatagcacggtgaccagtacattctggagtcacgggctggctgagatggcgggtcagcgcaacaagctttgcgtgtctgccctggccatggattcatttgccgaaggagtgggcgcggtctatggcatgtttgacggggaccgcaatgaggaacttccgcggttgctacagtgcaccatggccgacgtcctgctggaagaagtccagcaatccaccaacgatactgtgttcatggctaacaccttcttggtcagccaccggaagcttggtatggctggtcagaaactgggatcatctgctttgctgtgctacatacgcccggacaccgccgatcccgcctcgagcttctcacttacagtggctaacgtcggtacgtgccaggcagtgctttgccggggcggtaagcctgtacctctgtctaaagtgtttagcttggagcaagacccagaggaagcacagagagttaaagaccagaaagcaattattactgaggacaacaaggtgaatggtgtcacctgttgcacgaggatgctcgggtgcacgtatctgtacccctggatcttgcccaagcctcacattagcagtactcctctaaccatacaggacgaactcctcatcttggggaacaaagctctttgggaacacctgtcttacactgaggcagtaaatgctgtgcgccatgtgcaagacccactcgccgctgcaaagaagctttgcacacttgcacagtcgtacgggtgccaggataacgtcggggctatggtggtgtatctgaacatcggcgaggagggctgcacctgtgaaatgaatggtctgacccttcccggtcctgtcgggttcgcctctacaacgactataaaagatgcccctaagccagcaaccccaagtagtagttctggtattgcctctgagttctccagcgaaatgtcaacatccgaggtgtcatccgaagtcggttcgacagctagcgacgagcataacgcaggagggttggataccgctctcctgccacgccccgagaggcggtgctctctccacccaaccccgacttcgggtcttttccagagacagccgtcaagcgcgaccttctcctccaaccagagtgataacggcctcgacagcgacgatgatcagcccgtcgagggggtcatcacgaacggttcgaaggttgaagtcgaagtcgacatccattgctgtcgagggagggaccttgaaaatagcccgccactgatagagtcaagtccaactctttgctctgaagaacacgctcgcgggagctgcttcggaatcagaaggcagaattccgtgaacagtggtatgctgctgcccatgtctaaagaccgcatggagctacaaaagtctccctcgacaagttgtttatacgggaaaaagctctcaaacgggtctattgtgcctctggaagactcactgaatctcatcgaggtggctacagaagtccccaaacgcaaaactggctacttcgctgcaccaacccagatggagccagaagaccagtttgtggtaccccacgatctggaagaagaggtgaaagagcagatgaaacagcatcaggatagtcgactggagcctgagccacacgaggaggatcgcacagagccacccgaggaattcgacaccgccctctag

SEQ ID NO: 25555 - DNA, 1212 bp, synthetic construct
  misc_feature 1..1212: note = Description of Artificial Sequence: Synthetic coding sequence
  source 1..1212: mol_type = other DNA
atgaccgccatcatcaaggagatcgtgagccggaacaagcggcggtaccaggaggatggctttgatctggatcttacctacatttatcccaatatcattgctatgggattcccggccgaacgcctggagggggtctaccgtaataatattgacgatgtggtgagatttctggactctaagcataaaaatcactacaagatttacaatctatgtgcggagcgacactatgataccgccaagtttaattgtagggtcgctcagtatcccttcgaggatcacaatccacctcaactcgagctgatcaaaccattctgtgaggatctggatcagtggctgagcgaggatgacaatcatgtggcggccattcactgtaaagcaggaaaaggacgcaccggcgttatgatctgcgcatacctccttcaccgtgggaagtttctaaaagctcaggaagcacttgacttttacggcgaagtgaggacacgtgataagaagggggtgaccatcccatctcaacggcgctacgtgtattattacagctatttgctgaaaaaccacctggactatagaccggtcgccctgctgtttcacaaaatgatgttcgaaactatcccaatgttttccggtggcacttgcaacccccagttcgtggtgtgccagctgaaagtgaagatctactcctccaacagcggtcccactcgcagggaagacaagtttatgtacttcgaatttccgcagccactccccgtgtgtggggacataaaggtcgagttcttccataagcaaaataagatgttaaaaaaagataaaatgttccacttttgggtcaacacgttctttattcccggcccagaggaaaccagcgagaaggtagaaaacgggtccctttgcgaccaagaaattgattccatttgctcaatcgagagggccgacaacgacaaagagtatttggttctgactctgaccaaaaatgatctcgataaggccaacaaggacaaagccaaccgctactttagtcctaatttcaaagtgaagctgtactttacaaagactgttgaggaaccctcaaacccagaagctagttctagcaccagcgtaacccctgatgtgtccgacaacgaacctgaccactacaggtactctgataccactgactccgatcctgaaaatgagccgtttgacgaggatcagcatacccaaatcacgaaggtttag

SEQ ID NO: 25556 - DNA, 531 bp, synthetic construct
  misc_feature 1..531: note = Description of Artificial Sequence: Synthetic coding sequence
  source 1..531: mol_type = other DNA
atgggcaaggccgccgccgccgtggccttcggcgccgaggtgggcgttcgcctcgctttgttcgcagctttcctggttactgagctgctccctccatttcagcgcctcatccagccagaggaaatgtggctctatagaaatccctacgtcgaggcagaatacttccccactaagccaatgtttgtgatagcctttctcagtcccctttctctcattttcctggccaaattccttaaaaaggcagataccagggattcacggcaagcttgtttagctgcttctttggctctcgctctcaacggggtgttcaccaataccattaaactgatcgttggtcggccccggcctgatttcttttaccgatgtttcccggatggtttggctcatagtgatctcatgtgcaccggcgacaaagatgtggttaatgaaggcagaaagagcttcccttctggccacagctcttgcatgaacattatttggaccctgccgtatgcttgtttccacataatagaattcaatctggagtcctag

SEQ ID NO: 25557 - DNA, 651 bp, synthetic construct
  misc_feature 1..651: note = Description of Artificial Sequence: Synthetic coding sequence
  source 1..651: mol_type = other DNA
atgggcaaggccgccgccgccgtggccttcggcgccgaggtgggcgtgcggcttgctttgttcgccgcctttttagtgactgaactcctgcctccgttccaaaggctcattcagcctgaggagatgtggctttacagaaatccttacgtggaggccgagtacttcccaacaaagccaatgttcgttatcgcctttctgtcacccctgtccctgattttcctggccaagttcctgaagaaggcggataccagggactcccggcaggcctgtctagcagcatccctggcactggcccttaatggcgttttcacgaataccatcaagctcatagtgggtcgcccgaggccagatttcttctaccgatgcttccccgacggcctcgcccacagcgaccttatgtgcacaggagacaaggatgtggtaaacgaagggaggaaaagtttcccatcaggacacagctcatttgccttcgccggactggcctttgcatctttctacctggcgggcaaactgcactgttttactccacagggtagaggtaaatcttggcgattttgtgcatttctgagtcctcttttgtttgcagccgtcattgctctcagtaggacctgcgattataagcatcactggcagggaccttttaagtggtag

SEQ ID NO: 25558 - DNA, 795 bp, synthetic construct
  misc_feature 1..795: note = Description of Artificial Sequence: Synthetic coding sequence
  source 1..795: mol_type = other DNA
atgggcaaggccgccgccgccgtggccttcggcgccgaggtgggcgtgagactggcactttttgcagcatttttagtgacggagctactgcccccgtttcagcgattaatacagccggaagagatgtggctgtatagaaatccatatgtggaggccgaatatttccccacaaagccaatgtttgttattgcattcctgtcacctctgtccctcatttttcttgcaaaattcctaaagaaagctgatacacgagatagcagacaggcctgcctggccgcatccctggcgctggccctgaacggggtctttactaacacaatcaaactcatcgttggccgcccccggcccgattttttctaccgctgctttcccgacggccttgcccacagtgacctgatgtgtacaggagacaaggacgtagtcaatgaaggcaggaaatctttcccgagcgggcattcctcttttgcctttgctgggctggcctttgcaagcttctacctggccggaaaattacactgctttactcctcaaggcagaggcaagagctggaggttctgtgccttcctttcccctttgcttttcgctgccgttattgccctttctaggacctgcgattacaagcaccattggcaggatgtcctcgtcggctctatgatcggaatgacttttgcatatgtatgttacagacagtattatccacccctgactgacgccgagtgccacaagccctttcaggataagctggtgctgagtacggcacaaaagccaggtgattcttactgctttgatatctag

SEQ ID NO: 25559 - DNA, 1086 bp, synthetic construct
  misc_feature 1..1086: note = Description of Artificial Sequence: Synthetic coding sequence
  source 1..1086: mol_type = other DNA
atgcacggcgactacaccctgaccctgcggaagggcggcaacaacaagctcatcaagatatttcatcgagatgggaagtacgggttctccgacccccttacttttagttcagtggtggagctcattaatcactaccgcaacgagagccttgctcagtataatccgaagttagatgtcaaactcctgtacccagtgtccaaatatcaacaggaccaggtagttaaagaagacaacatagaggctgtaggaaaaaagctgcatgaatacaacacccaattccaggagaaatctagggagtacgacaggctgtacgaagagtacactaggacaagtcaggaaattcagatgaagcggaccgccattgaggccttcaatgaaaccatcaagatctttgaggaacaatgtcaaacacaagagcgctattccaaggagtacatagagaaatttaagagggagggaaacgagaaggagatccaacgtatcatgcataattatgataaactgaaatccagaatatcagaaatcatcgacagcaggcggaggctcgaggaggacctaaagaagcaggctgcagaatatcgggagatagataagcggatgaatagcattaagccagaccttattcagctgcgcaaaacccgggaccaatacctgatgtggttaacccagaagggcgtgcggcaaaagaagttgaatgagtggctgggcaatgaaaatactgaggaccagtactccttggttgaggatgacgaggatctgccccaccacgacgaaaaaacctggaatgtgggatcttccaatcggaacaaggccgaaaacctgctgcgtggcaagcgagacggtactttcctggtacgtgaatcctcaaagcaggggtgttatgcttgctcagttgttgtggacggcgaggtgaaacactgcgtcatcaacaagaccgccaccgggtatggcttcgccgagccgtataacctctacagctccctcaaggagctggtactgcactatcagcacaccagccttgtgcagcataatgactccttaaacgtgactcttgcatatccagtatatgcccagcaaaggaggtag

SEQ ID NO: 25560 - DNA, 3207 bp, synthetic construct
  misc_feature 1..3207: note = Description of Artificial Sequence: Synthetic coding sequence
  source 1..3207: mol_type = other DNA
atgcccccccggcccagcagcggcgagctgtggggcatccacctgatgcctcctagaattcttgttgaatgcttgttgccgaatggcatgatcgtgactcttgagtgcttaagagaggcaaccttaattaccattaagcacgagctgttcaaagaggctaggaagtaccctctccatcagctccttcaggatgagtcatcctatatttttgtgtccgttactcaagaggcagagcgcgaagagtttttcgatgagaccaggcgattgtgcgatctgagactcttccagccttttctgaaagtgattgaacctgtggggaacagagaggaaaagatactgaatcgtgagatagggtttgccatcggaatgccagtctgtgaattcgacatggtaaaagaccccgaagtgcaggacttccggcgcaatattcttaatgtgtgtaaggaagcagtcgacttgcgcgacttgaactcccctcatagcagagcaatgtacgtgtacccacccaatgtggagtctagccccgaactgcctaagcacatctataacaagctcgataagggccagataatcgtggtgatttgggtgattgtgagccccaacaacgataagcagaagtacactctgaaaataaatcatgattgcgtgcccgaacaggtcatcgccgaggctatccgaaagaagacacgctcaatgctactgtcgtccgagcagctcaagctctgtgttctggagtaccaggggaaatacattctgaaggtttgtggctgcgatgaatactttctcgagaagtaccccctgtcacagtataaatatataaggtcttgcatcatgctcggaaggatgcctaacttaatgctcatggcaaaggagagtctatactcacaactacctatggactgctttaccatgccttcctatagcagacggatttctactgccactccctacatgaatggcgagacaagcacaaaatccctctgggttatcaacagtgctctgagaatcaaaatcctctgtgccacttacgtgaatgtgaatattagagacattgacaaaatatatgtcaggacaggaatctatcacgggggcgagcccctgtgtgacaacgtcaatacccagcgagtgccttgcagcaaccccaggtggaacgagtggctcaattacgatatctatattcctgatctcccccgcgcagcccgcctgtgtctcagtatctgcagcgtgaaaggccgcaaaggagcaaaagaggagcattgcccactcgcctggggtaacatcaatttgttcgactacacagacactctggtctccggcaaaatggcattaaacttatggcctgtgccacacggtttagaggacttgctgaatcccatcggcgtcacaggcagcaatcctaacaaagagacaccatgcttggagctggagtttgattggttcagctctgtggtgaagttccctgacatgtccgttattgaggagcacgcaaactggagcgtatcaagagaagccggcttttcttactctcacgcaggcctcagcaacaggctggccagagataatgagctcagggagaacgacaaagagcagctgaaagcaatctccaccagggatcccctttctgagatcactgagcaagaaaaggactttctctggtcacaccgtcattactgtgtgacaatcccagaaatcttgcctaagctgctcctctctgtgaagtggaacagcagagatgaggtggcgcagatgtattgcttggtgaaagattggcccccaatcaagcctgaacaggctatggagctcctggactgcaattaccctgatcctatggtccgcggtttcgccgtgcggtgtctggaaaagtatctaaccgatgataagctgtcacagtatctgatccagcttgtacaggtgttaaagtatgaacagtatctggataacctgttggtcaggttcctgctcaagaaagcactgactaatcagagaatcggccacttcttcttttggcatctcaagagtgagatgcacaacaagaccgtgagccagagatttggcctgctgctggagtcctactgcagagcctgcggtatgtatctcaagcacctgaacagacaggttgaagctatggagaagttgattaatctgactgatattcttaaacaggagaagaaagacgaaactcagaaagtgcagatgaagtttctcgttgaacaaatgcggcggcctgacttcatggacgcactccaggggttcctctcaccccttaatcccgcccatcaactgggcaatctgagattggaagaatgccgtatcatgtctagcgcgaaaaggcctttgtggctaaactgggaaaacccagatatcatgtctgaactgttgtttcagaataatgagatcatctttaagaacggggatgacctgcggcaagacatgctcacgcttcaaattattcggattatggagaacatttggcaaaatcaaggcttagacttacggatgcttccatatggatgcctgtctatcggtgactgcgttgggctgattgaggtggtaaggaatagccacacaataatgcaaattcaatgcaaaggtgggctgaaaggagctcttcagttcaattctcacacgttgcatcagtggctgaaggacaaaaacaaaggtgagatctacgacgccgccattgatctgttcactcgtagttgtgctggttactgtgttgcaacttttatcctcgggattggggacagacataatagcaatattatggtgaaggatgacgggcagctgttccatatagactttggtcacttcctggatcacaagaaaaagaagtttgggtataaacgggagcgggtgccatttgttttgacgcaagattttttgatcgtgatctccaaaggggcacaggaatgcaccaagacgcgggagttcgagcgcttccaagaaatgtgctacaaggcttatttagctatccgccagcacgccaatctctttatcaacctctttagcatgatgctgggctctggcatgccagaattgcaaagctttgatgacatagcgtacatccgaaaaacgctggccttggacaagaccgaacaggaggccctggaatactttatgaagcagatgaatgatgcacatcacggaggctggacaaccaagatggactggatctttcatacaataaaacagcatgctctgaactag

SEQ ID NO: 25561 - DNA, 357 bp, synthetic construct
  misc_feature 1..357: note = Description of Artificial Sequence: Synthetic coding sequence
  source 1..357: mol_type = other DNA
atgcccccccggcccagcagcggcgagctgtggggcatccacctgatgccgccaaggattcttgtggagtgcctattacctaacggtatgattgtaactcttgagtgtctcagggaggccactctcatcacgattaagcacgagctgtttaaggaggccaggaagtacccactgcaccagctcttgcaagatgagagtagctacatatttgtatccgttacccaggaagccgaaagggaggagttcttcgatgagactcggcgcctgtgcgatctgcggcttttccagccctttcttaaggtgattgagcccgtcggcaacagggaagagaagattctgaaccgtgaaatcggctag

SEQ ID NO: 25562 - DNA, 66 bp, synthetic construct
  misc_feature 1..66: note = Description of Artificial Sequence: Synthetic coding sequence
  source 1..66: mol_type = other DNA
atgcccccccggcccagcagcggcgagctgtggggcatccacctgatgcctcctcgcattctgtag

SEQ ID NO: 25563 - DNA, 3213 bp, synthetic construct
  misc_feature 1..3213: note = Description of Artificial Sequence: Synthetic coding sequence
  source 1..3213: mol_type = other DNA
atgtgcttcagcttcatcatgccccccgccatggccgacatcctggacatttgggctgtggactcccagattgcaagcgatgggagcatccctgttgatttcttactccccactggtatatacatacaactggaagttccacgcgaagccacgatctcctatattaaacagatgttatggaagcaggtgcacaactaccccatgtttaatcttttgatggatattgacagctacatgttcgcctgtgtcaaccagaccgctgtttatgaggagttggaggatgaaacccgcagactgtgcgatgtcaggcccttcctgcccgtgctgaagctggttacaaggagttgcgaccctggagaaaagttagactcaaaaataggcgttctgatcggaaagggcttacatgaatttgattcactgaaggatccagaagtgaacgagtttagaaggaagatgagaaagtttagcgaagagaagattttgagcttagtgggcctcagttggatggattggctcaagcagacttacccccccgaacacgaaccttctattcccgaaaacctcgaagataagctttatggaggcaagttgatcgtagcggtccacttcgagaactgtcaggatgtattttctttccaggtgtcacccaatatgaatcccattaaggttaatgaactcgcgattcagaagcgcctgaccatacacgggaaagaggatgaagtgagcccttacgactacgtgctgcaggtgtctggacgcgtcgagtacgtgttcggtgatcatcccctgatccaatttcagtatatccgtaactgtgtgatgaatcgggcgctcccgcacttcattctggtagagtgttgcaagataaaaaaaatgtacgagcaggagatgattgctatagaggccgctattaaccggaactctagcaatctccccttgccccttccacctaagaaaactaggatcatcagccacgtatgggaaaacaacaatccgttccaaatagtgcttgtcaaaggcaataagctcaacactgaggagactgtgaaagttcatgtcagggcgggactcttccacggaaccgaattgctctgcaagacaattgtctcatcagaggtttcgggcaagaacgaccacatttggaacgaacccctggagtttgatattaatatctgtgatttgcctcgaatggcccgcttatgctttgctgtgtatgccgtcctggataaggtaaagaccaagaagagtactaagacaatcaaccctagcaaatatcagaccatacgtaaggcaggcaaggtgcattatcccgtcgcctgggtgaacaccatggtctttgatttcaagggtcagctgagaacgggtgatatcatcttgcattcgtggagcagcttccccgatgaactggaagagatgctaaaccctatggggacggtccagacgaacccctacaccgagaatgccactgcactgcacgtcaagttccccgagaataagaagcagccctattattacccgccatttgacaagataatcgaaaaggcagcagagattgctagcagcgattccgccaacgtgagttctcgagggggcaaaaaattcttacccgtgcttaaagagattctggatagagaccccctttcccagttgtgcgagaacgagatggaccttatctggacgttgaggcaggattgcagagaaattttcccccagtccctgcccaaattgttgctgtcaatcaagtggaataagcttgaggatgttgcgcaactacaggcattgttgcagatctggcctaagctgcccccgagggaagcgctggaattactagacttcaactatccagaccagtacgtgagggaatatgcagtgggctgtctaagacagatgtcggacgaagagctaagccagtaccttctccagctggttcaggtgttaaaatatgaaccattcttggactgtgcactgagtaggtttcttctggagcgtgccttgggcaacagaagaattgggcaatttctcttttggcatctgcggagtgaagttcacatcccagccgtctccgtgcagttcggcgttatccttgaggcgtactgccgaggttccgtggggcatatgaaagttttatctaagcaggttgaagctcttaacaaattgaaaactctgaattctctcatcaaactcaatgccgtcaaacttaaccgcgcgaagggcaaagaggcaatgcacacttgtctgaaacaaagcgcgtaccgcgaggctctaagcgatttgcagtctcccttaaatccgtgcgtcattctgagcgagctctacgtcgagaaatgcaagtacatggacagcaaaatgaagcccctctggctggtttataacaacaaggtgttcggggaagacagtgtcggcgtaatctttaagaatggtgacgaccttcgacaagatatgctgacactccagatgttaaggcttatggacttgctttggaaggaggccggtctcgatctgcgcatgctgccttatgggtgcctcgccactggcgaccgaagcggactgatagaagtggtgtcgaccagcgaaactatcgccgacatccagctcaattcatctaatgtcgctgccgcagctgcatttaataaagacgccctactcaattggttgaaagagtataactctggagacgacctggaccgggccatagaagaatttaccctctcttgcgcaggatactgtgtcgcaagttacgttctgggtatcggggataggcattcagacaatatcatggtcaagaagacagggcagctcttccatatcgatttcggtcacattctcggaaacttcaagtctaaattcgggatcaagagggaacgagtccctttcattttaacatacgattttatccatgtgatacagcaagggaagaccggcaatacagagaagtttggcaggtttaggcagtgctgcgaggacgcttacctgattttaaggcgccacggcaacttattcattaccctgtttgcattgatgttgactgctggactccccgagctcacttcagttaaggacattcaatatttgaaagactcactcgccttgggcaagtccgaggaggaggctctcaaacagtttaaacagaagttcgatgaggccctgcgcgagtcgtggacaacgaaagtgaattggatggcacacacggtgcggaaggattaccgctcatag

SEQ ID NO: 25564 - DNA, 303 bp, synthetic construct
  misc_feature 1..303: note = Description of Artificial Sequence: Synthetic coding sequence
  source 1..303: mol_type = other DNA
atgtgcttcagcttcatcatgccccccgccatggccgacatcctggacatctgggctgtcgattcccagatcgcctccgatggaagcattcccgtcgattttctgctaccaaccggaatatatattcagctggaggtgcccagagaagcgactatcagttatattaaacagatgctgtggaaacaagtccataattaccccatgtttaatcttctcatggacatcgattcttatatgttcgcttgtgtcaatcagacagccgtgtacgaggagctcgaggatgagacccggagactctgttag

SEQ ID NO: 25565 - DNA, 171 bp, synthetic construct
  misc_feature 1..171: note = Description of Artificial Sequence: Synthetic coding sequence
  source 1..171: mol_type = other DNA
atgtgcttcagcttcatcatgccccccgccatggccgacatcctggatatttgggcggttgacagccagattgcaagtgatggctcaatccctgtggatttcttactccctacaggcatatacatccagttggaggtgcctcgcgaagctaccatctcatacataaagtag

SEQ ID NO: 25566 - DNA, 3213 bp, synthetic construct
  misc_feature 1..3213: note = Description of Artificial Sequence: Synthetic coding sequence
  source 1..3213: mol_type = other DNA
atgtgcttcagcttcatcatgccccccgccatggccgacatcctggatatctgggccgtggatagccaaatagcgtcggatgggtcaatccctgtcgactttcttctgcccacgggaatttatatccagttagaagtccctagggaagccacaatttcatacatcaaacaaatgttgtggaaacaggtccacaactaccccatgtttaaccttctcatggacatcgatagttatatgttcgcttgcgtgaaccagacagccgtgtacgaggagcttgaggatgagaccagaaggttgtgcgacgttcgacccttcctgcccgtcctaaaacttgtgacccggagttgtgatccgggggaaaaacttgactcaaagattggggtcctgattggaaaaggattgcatgaattcgactccctgaaagaccctgaggtaaatgagtttcgacgaaaaatgagaaagttttccgaagagaaaatcctctccctcgttgggcttagttggatggattggttgaaacagacctaccctcccgaacacgaacccagcattcctgaaaatctcgaggacaaactttatggtggcaagctgatcgtagcagtgcatttcgagaattgtcaagatgtgttctcctttcaggtgtccccaaatatgaatcccatcaaggtcaatgaattggccattcagaaacgactgaccatccacggcaaggaggacgaagtttctccgtacgactatgtgcttcaggtatctgggagggtggaatacgtgttcggcgatcatccgctcatacagtttcagtacatcaggaattgtgtgatgaatagagcgttgccccactttatacttgttgagtgttgcaaaattaagaagatgtatgagcaggagatgatagccatcgaggctgccatcaaccggaacagtagtaacctaccgcttcccctgcctcccaagaagactcgaatcataagccacgtatgggagaacaacaatcccttccagatcgtccttgtgaaagggaacaaactcaacacagaagagacagtgaaagtccatgtgagggctggactttttcacggcacagagctgctctgcaagactattgtttcaagcgaagtctcaggcaaaaatgaccacatctggaacgaacccctggagttcgacatcaacatctgtgatctgccacgaatggccaggctgtgcttcgctgtgtacgctgtcctcgacaaggtcaaaactaagaagtcaaccaagacgattaacccgtcgaaatatcagaccatccggaaggctgggaaagtccactaccccgtggcctgggttaatactatggtcttcgatttcaaagggcagctgagaacaggcgatattatcctgcattcttggtcttcctttcccgatgaactggaggaaatgcttaatcctatggggaccgtccagactaacccttataccgagaacgcaacagctctgcacgtaaagtttcccgagaacaaaaagcaaccttattattatcctcctttcgacaaaatcattgaaaaagctgcagagattgcctcttccgattctgccaatgttagcagcaggggcggtaagaagtttctgccagtcctgaaggaaatcctggaccgtgacccacttagccaattatgtgaaaacgagatggatctcatttggacactcagacaagactgtagagagatcttccctcagagcctgccaaagctgctcctgtccataaagtggaataaactggaggatgtggcccagttgcaagctttactacagatttggcctaaactcccgccccgggaggcccttgagctgctggatttcaactacccggaccaatacgttcgtgagtatgctgtgggatgcctgcgacagatgtccgacgaggagctgtctcagtacctactccaactggttcaggtgctgaagtacgagccattcctggattgcgccctgtcccgatttttgctggagagagctctgggcaatagacgcattggtcaatttctgttttggcacctgaggtcggaagtgcatatacctgccgtgtcagtacagttcggcgtgatcctagaagcttactgccgcggatcagtgggccatatgaaagtgttaagcaaacaggtagaagctctgaataagctgaaaaccctgaactccctcataaagcttaacgcagtgaaactgaacagggctaagggtaaggaagccatgcacacttgcctgaagcaaagcgcgtaccgagaagccctctctgacttgcagtcaccactgaatccctgcgtgattttaagcgaactctacgttgagaaatgcaaatatatggattcaaagatgaagccactatggctagtctataacaataaagtcttcggtgaagattctgtgggcgtgatcttcaagaacggggatgacctgaggcaagacatgttgactctgcaaatgctccgcctgatggatttactatggaaggaggctgggttagatctaagaatgctcccctatggctgtctggccaccggagaccggtcaggattgatcgaagttgtttcgaccagcgagacaattgcagatattcagcttaacagttcaaacgtagcagcagcagcagctttcaataaagacgctctgttgaactggctaaaagagtacaattccggagatgacctggatagagccatcgaggagtttaccctgtcctgtgccgggtactgcgttgcgagctacgtattgggaatcggggataggcattccgataatatcatggtcaagaagacaggtcagttgtttcacatcgacttcgggcacattttgggaaactttaagagcaaattcgggattaagcgtgagagagttccgttcattctgacctatgatttcatacatgttatccagcaaggcaaaacagggaacactgaaaagtttgggaggttcaggcagtgttgtgaggacgcctacctgattttgagaaggcatggaaacctctttataactttgtttgccctgatgctcactgcgggcctccctgagctaacgtccgtcaaagacatacaatatctgaaggactctctagcactggggaaatccgaagaagaagctctgaaacagtttaaacagaagttcgacgaagcattacgtgaatcctggacaaccaaggtgaactggatggctcacaccgtgcggaaagactaccgcagctag

SEQ ID NO: 25567 - DNA, 396 bp, synthetic construct
  misc_feature 1..396: note = Description of Artificial Sequence: Synthetic coding sequence
  source 1..396: mol_type = other DNA
atgtgcttcagcttcatcatgccccccgccatggccgacatcctggacatatgggccgtcgattctcagatcgcatccgacggatctatccctgttgatttccttctccctaccggcatttatatacagctggaggttcctcgggaggcaacaatctcatatatcaagcagatgctctggaaacaagtacacaactaccctatgttcaatctgttaatggatatagactcctacatgttcgcctgcgtcaaccaaacagcggtgtacgaggagcttgaagacgaaacccggcgactttgcgatgtgcggccctttcttcctgtcctcaaactggttactcgcagttgcgatcccggcgagaagctggacagtaaaatcggagtcttgattgggtag

SEQ ID NO: 25568 - DNA, 2109 bp, synthetic construct
  misc_feature 1..2109: note = Description of Artificial Sequence: Synthetic coding sequence
  source 1..2109: mol_type = other DNA
tgagtgcgggccggcctgttccacggcaccgagctgctgtgcaagaccattgtaagctcagaggtgtctggcaaaaatgaccacatttggaatgagccactggagttcgatattaacatctgcgatctaccccgcatggcacggctctgcttcgctgtgtatgcagtgctggataaagtaaaaacaaagaaatctacaaaaaccattaacccttctaaataccagacgatccgtaaggctggtaaggtccactacccggtggcatgggtgaacacaatggtgtttgacttcaagggccagctgcgaactggcgacatcattctacattcgtggtcctcattccccgacgaactggaggagatgcttaaccccatgggcaccgtccagactaatccctataccgagaacgctaccgcgttgcacgtgaaatttcccgagaataagaagcagccgtactattatcctccctttgacaaatcccggggaggtaagaagttcctccccgtgcttaaggagatcctggatagggaccccctttctcagctctgcgagaacgagatggatttgatatggacgctgcgccaggactgtagagagatattccctcaaagcctacctaagttactgctctctattaaatggaacaaactggaagatgtggctcagttacaggccctacttcaaatatggccaaagcttcctcctagggaggctctggagctgctggacttcaactaccccgatcagtacgtgagagaatatgcagtaggatgcctccgtcaaatgagcgacgaagaactctctcagtatctccttcagttagtacaggtcctgaaatacgaacccttcctggattgtgccctctctagattcctcctagagcgggcactggggaatcgtagaattggacagtttctcttctggcacttacgatctgaagtccatattcctgcggtgagcgtccaattcggcgtcatcctagaagcctactgcagaggttccgtgggccacatgaaagtgctgtcgaagcaggttgaggctctgaataagcttaagactctgaattccctgattaagctgaacgctgtaaaactgaaccgggcaaaaggaaaagaagccatgcatacgtgcctgaaacagagtgcttaccgggaggctctcagcgatctccagtctcccttgaatccttgcgtaattctgagcgagctgtacgttgagaagtgcaagtacatggatagtaagatgaagcccctttggctcgtatataataataaggtgtttggtgaggacagtgtgggtgtcatattcaagaacggcgatgatctgcgacaggacatgcttacgttgcaaatgctccgactcatggatctcctgtggaaggaggctgggctggacttgcggatgctaccttatggctgcttggctaccggtgaccggagtgggctgattgaagttgtaagcacaagcgaaacaatcgccgacatacaactgaacagcagtaatgtggctgccgccgctgcttttaataaagacgccctgctgaattggcttaaggagtacaattctggcgacgatttggacagggctattgaggaatttacattgtcttgcgcaggctattgcgtagcctcctacgtgctcggcattggagaccgccattccgataatattatggtgaagaagaccggccagcttttccatattgacttcggtcatatccttgggaattttaagagcaaattcggcattaaacgggaacgggtcccctttatccttacctatgactttatccatgttattcagcagggcaagaccggcaataccgagaaattcggcaggttccggcaatgctgcgaggacgcttaccttatcctcagaagacacggtaacctgtttattacactgttcgcactgatgctcaccgcgggccttcctgaattaacatcagtgaaggatattcaatacctgaaggactccctggctctgggtaagagtgaagaagaagccctgaagcagttcaaacaaaagttcgacgaggccttgcgcgagtcatggaccaccaaagtgaattggatggcgcacaccgttcgaaaggattatcgaagctag

SEQ ID NO: 25569 - DNA, 1566 bp, synthetic construct
  misc_feature 1..1566: note = Description of Artificial Sequence: Synthetic coding sequence
  source 1..1566: mol_type = other DNA
atggacctgatctggaccctgcggcaggactgccgggagatcttcccacagagcctcccaaagctgctcctgagtatcaagtggaataagctggaggacgtcgcccaactgcaggctttgctgcagatatggcctaaactgccccctcgcgaagccctggagctgctggacttcaattatccagatcagtacgtgcgggaatatgccgtcgggtgtcttcggcagatgtctgacgaggagctttctcaatacctcttgcagcttgtccaagtgctcaaatacgaacccttcctggactgcgcactcagtaggtttctgctcgagcgcgctctggggaatcgtcgcataggacagtttctgttctggcacctccgttcagaagtccacataccagcggtgtctgtgcaatttggggtgatcctggaggcctactgccgggggagcgttggacatatgaaggtcctgagcaaacaagtggaggctttaaacaaattaaaaacgctgaacagccttatcaaactgaacgccgtgaagctgaatagagcaaaaggcaaggaggcgatgcacacttgcctgaaacagtcagcttatagggaagccttgagtgatcttcaatcaccgttgaatccgtgcgtgatactttctgaattatatgtagagaagtgtaaatatatggatagcaagatgaaacctctgtggctggtatataacaacaaggtgttcggtgaagacagcgtcggggtgattttcaagaacggagatgtctgtttccccctggacctgagacaggacatgctgacactgcagatgctcaggttgatggatctgctttggaaggaggcaggtttagacctgcgcatgctgccatatggctgcctggcgaccggagataggagtgggctcatcgaggttgtgtccacatccgagaccattgcagacattcaactgaattcttcgaatgtggcagcagctgctgcgtttaataaggatgccttattgaactggctcaaggagtataattccggcgatgacctggaccgggctattgaggagttcacattatcctgcgccggatactgcgtcgcatcctacgtcctaggaattggcgatcgacacagcgataatatcatggttaagaaaactggtcaactgttccacatcgacttcgggcacatactcggcaacttcaagtcaaagtttggtatcaaaagggagagagttccgttcattttgacatacgatttcattcacgtaattcagcagggtaaaactggcaatacagaaaagttcggccgattcagacagtgctgtgaggatgcctatttgatcttgagacggcatgggaacctgttcattaccctttttgcactgatgttaactgccggtctacccgaattgacctcggtgaaagacatacagtatttgaaagattcactcgccctaggtaaatcagaagaggaggcattaaagcagttcaaacaaaagtttgacgaggcactgagagagtcatggaccaccaaagttaactggatggcccacacggttcgcaaggactatcggagctag

SEQ ID NO: 25570 - DNA, 3207 bp, synthetic construct
  misc_feature 1..3207: note = Description of Artificial Sequence: Synthetic coding sequence
  source 1..3207: mol_type = other DNA
atgccccccggcgtggactgccccatggagttctggaccaaggaggaaaatcagagtgtcgtggttgacttcctattaccaactggagtgtacctgaacttccctgtctcccgaaatgccaatttgtctacgataaagcagcttctgtggcatagagcccagtacgaaccgctcttccacatgttgtcgggccccgaagcttacgtgttcacatgtatcaatcagactgccgagcaacaggaattggaggacgaacagcggagactgtgcgacgtccagccttttttgccagttctgaggctggtggctcgtgaaggcgatagggtgaagaagctgatcaacagtcaaatttccctgctcattggaaagggacttcacgagttcgacagtctgtgcgaccctgaagtgaacgattttagagccaagatgtgccagttctgtgaggaggctgctgcccggagacagcaactgggctgggaagcctggctgcagtattctttccctctccagctcgaaccctctgcccaaacatgggggccagggaccctgcgattgcccaatagagctctgctcgttaatgttaaatttgaaggctctgaagagagtttcaccttccaagtctccacgaaggacgtcccgctggccctgatggcctgtgctctccgcaaaaaggccacagtattcagacagcctttagtggaacagcccgaggactatacgcttcaggtcaatggtcggcatgagtacttatatgggtcgtatccgctttgccagttccaagtgcagaagcctcgggctaaacctccccccatccctgcgaagaaaccttccagcgtttccctctggtccctggagcaaccattcagaatcgagttaattcaaggttcaaaagttaatgctgatgaacgaatgaagctggttgtgcaggcaggactgttccatggcaatgaaatgctctgtaagaccgtgtccagctccgaggtcagcgtctgctctgagcccgtgtggaaacagcggttagaatttgacatcaatatttgtgatctgcctcgcatggccagactctgcttcgccctatatgccgtgatcgaaaaggcaaagaaagcacgctctactaaaaagaagtctaaaaaggctgactgccctattgcatgggcgaatctgatgctcttcgactacaaagaccagctgaaaacaggcgaaaggtgtctgtacatgtggccaagtgttcctgatgagaagggcgagctgctcaaccccacggggactgtccgaagtaatccgaacacagacagtgcagccgcgctgctgatctgtctcccggaggtggctccgcaccccgtgtattatccggcccttgagaagctgcccggaggcatgttgctcgcctcgcgggagtggcggcccgaacttctgtggatgcgactgcatgctgaagattccgccccttcacgcatgattggggtggcgatgcctggactgggcgtcctgccaggactcgtgcaggcgcctggtgatgccgagtgcagtaggctgctgcaaattctagaactgggcagacactcagagtgcgtacatgttactgaggaggagcagctacagctacgggaaattctggaacggaggggttctggggaactttacgagcatgagaaggacctggtgtggaagctccggcatgaggtccaagagcactttcccgaagctctcgccagactcttgctggttactaagtggaataaacacgaagatgtggctcaggacgcacttccagccgtgagctggcccgaactcccggtgctgtccgctctggagctgctggatttcagcttccccgattgtcacgtcggctccttcgccattaagagcctgaggaagctgactgatgacgaactgttccagtatttgcttcagttggtgcaggtcttgaaatacgagagctatctcgattgcgagctcacaaagttcctgctggaccgcgcactggctaaccgcaagatcggacacttcctgttctggcatctccggtcagagatgcacgtcccaagcgtcgctttaagatttggcctgatcctggaagcctattgtcggggctcaacacaccacatgaaggtcctgatgaagcagggcgaggccctgagtaaattaaaggctctgaatgattttgtgaagctttcctcccaaaaaacaccaaagccgcaaacaaaggaactcatgcacctgtgtatgcgccaggaagcttacctcgaggcgctgagccacctgcagagcccccttgatccatcaactctgctagctgaggtgtgtgtggaacaatgtacttttatggatagcaagatgaagccactctggattatgtattcaaatgaagaggctggatccggcgggtcagtgggcattatttttaaaaatggggatgaccttagacaggatatgctcactctacagatgatacagctgatggatgttctgtggaaacaggagggcctcgatcttagaatgactccgtacggctgtttgcctacgggggatcgcaccggcctgattgaagtggtactgcggtcagacaccatcgctaatatacagctaaacaaatcaaacatggccgctaccgccgcattcaataaagatgccttgttgaattggctgaagagcaaaaatcccggggaggccctcgatagagctatcgaggagttcaccctgagttgcgcaggttactgcgtcgccacttatgttctgggaatcggagatagacactcagacaatatcatgattcgtgagagtggccaactcttccacattgactttggccacttcctcggaaattttaagactaaatttgggatcaaccgagaacgggtcccgttcattctgacctatgacttcgtgcacgtcattcagcagggcaagactaacaattcagaaaagtttgagcggtttaggggttactgtgaacgtgcgtataccatcctgaggcgacatggcctcctgtttctccatttgttcgctctcatgagggccgctggacttcctgagctgagctgtagcaaggatatccagtatctgaaggacagtctggctttaggcaaaacagaggaggaggccctcaaacattttcgcgtcaagttcaatgaggcactccgcgagagctggaagacgaaagtcaattggctggcacataatgtgagcaaggataatcggcagtag

SEQ ID NO: 25571 - DNA, 3207 bp, synthetic construct
  misc_feature 1..3207: note = Description of Artificial Sequence: Synthetic coding sequence
  source 1..3207: mol_type = other DNA
atgccccccggcgtggactgccccatggagttctggaccaaggaggagaaccaatcggtagtcgtcgattttctcttgcccaccggggtctacctgaatttccctgtgtcgaggaacgctaacttatctacaattaagcagctgctatggcaccgtgcccagtacgagccgttgttccacatgctgagcggaccagaggcctacgtctttacctgcataaatcaaaccgctgagcagcaggagctggaagacgaacagagaaggttgtgcgatgtgcagccgttccttcctgttctgcgactcgtcgctcgtgagggagatcgagtgaagaagcttatcaattcccaaatcagcttactgattgggaagggacttcatgagtttgattccctctgcgaccccgaggtgaacgatttccgtgctaaaatgtgtcagttctgcgaagaggccgctgctaggcgccaacagctcggttgggaagcctggctgcagtatagtttcccacttcagctcgagccctctgcgcaaacctggggtcccggaactctccgactccctaatagagctctgttagtgaacgtaaagtttgaagggtcagaagagtcctttaccttccaggtctctaccaaagatgttcctctcgctctgatggcgtgtgccctcagaaaaaaagctaccgtgttcagacaacctttagtggagcagcctgaggattacactctgcaggtaaatggtagacacgaatacctgtacggttcctatccactctgtcagttccaggtacagaagccaagagccaagcctcctccaatcccggcgaaaaaacctagtagcgtgagtctgtggtccttggaacagccctttagaattgagctgatacagggctctaaggtaaacgccgacgaaagaatgaagctggttgtccaggccggtttgttccatgggaatgaaatgctctgtaagaccgtcagctctagcgaggtatccgtctgttccgaacccgtctggaagcaacggttggaattcgacataaacatatgtgatctgccgcgtatggcccgcttatgttttgccttgtacgccgtgatagagaaagccaagaaggcaaggtccaccaagaagaagtctaagaaagccgattgtccaatagcctgggcgaatctgatgttatttgactataaagatcagcttaaaacgggcgagcgctgtctgtatatgtggccttccgttcctgacgaaaagggtgaactgcttaatcctaccgggacggtcaggtccaacccaaacaccgactccgcagcggcactgttgatctgcctgcccgaggtcgcaccccacccggtttactaccccgctttggagaagctccctggcggcatgctgctggccagccgggagtggaggcctgaactgttgtggatgcggctgcacgccgaggattctgccccttcgaggatgatcggagtggcaatgcccggtctgggagttctccccgggctggtgcaggcccccggggatgccgagtgtagcaggctgttgcaaattttggaactgggacgtcattctgagtgcgtccacgtaaccgaggaggagcaacttcagctgcgtgaaatcttggaacgtagagggtcaggagaattgtacgaacacgagaaagacctagtttggaagttaaggcacgaggtacaggaacactttccagaggctttagcacgactcctcctggtgaccaaatggaacaagcacgaggatgttgcacaaatgctgtaccttctgtgcagctggcctgagctgccagtactcagtgcccttgagctgttagatttctccttccctgattgtcatgtcgggagcttcgcgatcaaaagtctgcggaagctaaccgacgacgaacttttccaatacttactgcagcttgtgcaggtgttgaaatatgaaagttacctggactgcgaattgaccaaattccttctagaccgtgccctcgctaacagaaagatcggacatttccttttttggcatctcagatccgaaatgcatgtgccttcggttgccctccgattcggtcttatcttggaggcttattgtcgaggcagtacacaccacatgaaagtgctgatgaaacagggcgaggcactgtcgaagctcaaggccctgaatgattttgtcaagctgagtagccagaagactcccaaacctcagacaaaggagctcatgcacttatgtatgcgtcaggaggcgtaccttgaagctttatcgcatctacagtcacccctcgaccccagtacattgctcgcagaggtgtgtgtagaacagtgcaccttcatggattctaagatgaagcctctttggattatgtactctaacgaagaagcaggatccggaggcagcgtgggtatcattttcaagaacggcgacgacctaaggcaagacatgcttactctgcaaatgattcagttgatggacgtactatggaaacaggaaggactcgatctccgaatgacaccatacgggtgtctgcccacaggggataggacaggattgatagaagtagttttaaggtccgacaccatcgctaacatccagttgaataaatctaatatggccgccaccgccgctttcaacaaagacgcactactgaactggctgaaatctaagaaccctggcgaagccttagacagggcaatagaggagttcactctatcttgtgccgggtactgcgtggccacttacgtgttaggcatcggtgaccgtcatagcgacaacataatgatcagggagtcagggcagctgttccacattgatttcggtcatttccttgggaactttaaaacgaaattcggcatcaatcgagaaagagtgccgttcatcttgacttacgatttcgttcacgttatccagcagggcaagaccaataatagtgagaagtttgaaaggtttcggggctattgcgagcgagcctacaccatactgcgtcgccacgggctgctgtttttgcatctgtttgctctgatgagagctgccggattgccggagttgagctgttctaaggacatacaatatttgaaagactccctggcactgggaaagacggaagaggaggccttaaagcacttccgtgtcaaatttaatgaggctctccgcgagtcgtggaaaaccaaggtaaattggcttgcgcacaatgtttcgaaggacaatcgccagtag
